United States Patent Application Publication US 2020/0109395 A1 - sequence listing, part 12

SEQ ID NO: 48046 - DNA, 3474 bp, Nocardioides sp. Soil797
ctgcaccgtgaggtggccaacccggtcgacgacacggtgcagtggcgcgcagccctgctgcaactggtcaactggggcggattcggcggcctcaccacggtgccgttgcgcggcgacgcgacgatgatctccggcgcctcgggggtcggcaagagcaccatcctcgatgcctacacggcgctgatgatgacctccgacaccaagttcaacggggcctcgaacgacgccgtcgcggggcgggcgcgcagcgtcgggcagcgcaacctgctgtcctacctgcgcggcgccgtcgacgtgatcgacgaccccaggaccggccgcccggtcgagaagctcctgcgtggcaagggatccgacacgtggggcgcgatcgcgatgacgttcgtgaacgaccacggcggtcgcttcaccgccctgcgcacctactacgtcccgcgacgggccacccggtccagtgacgtccagatgcggctgttctccctcgacggcaccgtcgagctcgacaagctcgaggtcgccgttcccgacaagctgcacgcgaacaccgtcaagaagctctatccgggcatccgggcccacggcacgtacgccgagttctcggccgtgctgcatgcccgcctcggcatcggtgcgaacggcgacggcgccaaggcgctgcgtctgctctcccgaatccagggcggcaaccaggtgcgcagcgtcgacgagctctacaaggacatggtgctcgagcgcccggcgacgtacgccgcagcggatcgcgccatcgagcacttcgacgacctcgacgcggcgtactccgcgatgcgcaccgaggaggccaagctcgcgctcctcgcgccgatcgaggagctcaacgagcgccgcaccagtgccacccggcggctcgcccagctcgactcctacggcgtgaccgctgccggtgacaccccgttgcggctgtggctgctcggcacccacctgcgcctgatcgagtccgcgctgaccaccaacagcgcggcgcgcgcggccactgccgacgagctggcgaaggcggcctcggccgaggcctcactggtcagtgacctggaggcggccaaggagtcccaccggaccgccggcggctcgaccctgcagtcgttgggcaacgcactggagcaggagaaggtggtgcgcgacgacagggtgtcgcgtcgtaccgtcctggaggagcggatgctcccgctgctcgaggccccgctcgacgcggctcacgaccagtccgacggcggcgccttcggcggcgtgcggtcgtcggaggctgccctgtcctcggcggccggcttcgccgccctgcaggagcaggcccgcacctggctcgcctcctggcaggaccagcacgacgcactgcgcaaggagcgcgacgaggcgctgcgtggcggatacccgctcaaccagcgccaggcggagctgcgccaggagcgtgcctcgctcgaggggcgttcgggtcgggtgccgtcacggctgcacgagctccgcgcggcggtctccgaggccagtggcctgagcgaggaccgcatgccgttcgtggccgagctgctcgacgtcgcccccgacgagtcgaagtggcgcaccgcgatcgagaccgtgctgggagcctccgcgcgcaccatgttggtgccgatcgacgagctggcccgcttctcggcggccatcgacgggctgcacctgcgtggacgcctcaccttcgagggcgtcgagctcgacctgcccgccaccgagccggccgatcccgaacgggttgccggcaagctcgccttcaaggagtccccgttctccgggtgggtgcaggcccatgtcgccgagccgtcgcgcaacgcgctgtgcgtcgagacctcggccggcctcgacggtggcggctaccgcgtcacggctgcgggccagacccgcaagggacgtcgcggcacgcacggccgggccgattcgcgcaacatcatcggcttctccaacgacgacgcgatcgccgagatcgacaacgagctggccgcggtcggcgagcagctgaccgccctcgacaaccgggtgcacgagctcgaccggcaggtcagcgtgctggggcaacgccacacggcgtacgacgcggtggttgcggcccgcttcgacgacttcgacgtcaccgccagcgaccaacggatcgcggacatcggccgacggcggcgcgagatcctcggctccgacgaccagctgcaggccctgcaggggcagatcgaggagctcaccaccagcctcgacgagacccgccagcagcgcttcgtcctcgagcagcagcgcttcgacctcaacgaggtgcacggccggctcgtcgacgacgaggactcggtcaaggaccggctcgaggccatgcagcgttctggtcgggccgtgctcaccgaggaccagtcgagcaccctggcggccgacttcgcggccgcctcggctcccgctgatcccgatgacctcgatcgcttcgcggagaactcacagcgtctcgccgagcggctccgtgacgcggtgggtgacgcccagtcggagatcgagcgcgccgacgacgagctcagcgggatcttccggatgtacaagctgcagtgggacgcgcccaacctcggcgccacacccgaggcataccccgactatgcgcggatcctcgaggagatcaagcagaccggcctggcccagcggcgcaccgagtggcgccgccgactcaccgagtggagcgggcaggacctggtgccgctggtgggggcgatggcggcttccatcgaggagatcgaggaccgcctcgagccgatcaacgcgatcctgcggcgtctggagttcggcgccgagcgccatcggctgcggatccggctgcgccgcctggcgccgacgcacgtgcaggtcttcctcaaggacctgcgggcactgtcgtcggccactgccaaggatctcgacgacgccgcgctcgagaggcggttcagcgagctgagccgtttcatgcagcagctgcgcaggtccgaccagaccagcgtcggcctcaccgaccgcgaccggttgctcgacgtacgccgtcacgtggagatcagcgcggagcagtatgaccacctcacgggggagctgcgggccacctatcgcaccctgggtgagaagtcgggtggtgagagccaggagctggtcgccttcatcgtcggctcggcgctgcggttccggctcggcgacgagatgcgctcgcggccgcgcttcgccccggtcttcctcgacgagggcttcgtgaaggccgactccgacttcgccggccgagcggtcaaggcgtggcgggggctgggcttccaactgatcgtcggggtgccgctcgacaaggtgaccggtctcgaaccacacatggacgagctgctggcgatcaccaagaacagcgccacccaccagtcgtggatcaccccgatcagggaccgggcccccgacgcgaccgagcgttcggcttccgacctcccgatggtctag

SEQ ID NO: 48047 - DNA, 1362 bp, Yonghaparkia sp. Soil809
  modified_base (652)..(652): a, c, t, g, unknown or other
atggaactcgacgagctggatcggctgtgggagcgtcatgccgcgtggcgcttggtgcgcgcgcgcaatgcacccctcgttctgtcgtttcttggcacgtacttcatcgaagcgaaccgaggggccgcgcccgccggtcagctcgtgtcggcgctcgacgacttcttgtacgtcgtgcatcgttccgagcccgaccgctaccccgccgagcctgcaacctacctcgaagactgggcggcagccgagtcagcctggctgcgccgcttctatccgtcagggtcagaagaggttcattacgacgttacgcccgcggttcagaaggcgtatgcgtgggcagagggtctgcgagtgagatcattcgtcggcaccgagtcgcgactgcagacggtcgtcgagcttctgcgcagcatcgttcacggtgctgaggtcgaccccgacagtcgtattgcccaactcgagcggcggcgcgacgccgtcgaagccgaactcgcagaagcgcgtgaaggaaaatttgaggtgctcgacgagacggctgtgcgcgaccgataccagcaattcgcgtcgacggcgcgcgaactgctgagcgacttccgtgaggtcgaggagaattttcgcacgctcgatcgttcggcccgcgagaagatcgcggggnctgatcagggtcgcagtttccaggccttctacgacttcctgctctcggagggtcggcaggacgagctggccactttggtggcgacggtgcagcgcatgccacagctttcggccgatcatcggctgcgtagcgtgcaccacgactggagcgatgccgccgagcgcacgcaacagactgtgcgcgcgctctctgagcagctacgccggtttcttgacgatcaggtgtgggtcgagaatcgccgcgtcatagacctggtgcgctcggtcgaggcatccgctcttgccctgcgcgacgcgcagccgcgcgatatcggcctggtcgtcgacgaaccgggcgtgccgatcgccctgccattcgagcggccactgtacgatccgcagcccgacgtggtggtcgacagcatgctctcgcccgacgagatcgacatcgccgaactaggcgacctgttcacacagcgtttcgtcgacacggcgcgcctcgcagagaacattcgcgccgtcgtgccgccgcgcaccacggtcgcgctcgatgaaatcgtagggctgtacccggtgcaggagggcgtggctgagcttcttggctacctcgcgctcgacgaagacgacatcacgatcgacgtcggcgacagcgagatcacgatcgatttcaatgacgccttcggtgaaacgaaacgggtgaggatgcggacggttcaggtgacacgcgcgtga

SEQ ID NO: 48048 - DNA, 552 bp, Yonghaparkia sp. Soil809
  modified_base (65)..(65): a, c, t, g, unknown or other
  modified_base (92)..(96): a, c, t, g, unknown or other
atgcgcgaagtcgtgtaccgcgaggtgccctcacacgaaggagcgtggcagacactacagcgccnaccccgccgctgtcgccgaccacttcnnnnngccacgctcgggatcgacgtcgttctcgacgaggccgaggggtacgcgtacctcgccacccgcgaacccgaagacggcgaagaaccgctgccgcgactcgtgcggcgccgcagcctcacctacaacgtgagcctgctcctcgtcctgttgcggaagcgaatggtcgagttcgagtcgtcgggcgaagaagggaagctcgtcttgacgagagatcaactcgtcgacatgttccgcgtgttccaagagtcgtcgagcaacgaagcccgggtcgctgaccaggctgatcgcacgatcgcacaggcggccgaactcggattcctccgcgagcttcgcggcgattccggcgcgtgggaggtgcgacgtatcttgaaggcgtacgtcgatgcgcaaaccctctctgacttcgccgaacgtctcgccgcttacgcgggtgctggcgaacgagcaccgaagtga

SEQ ID NO: 48049 - DNA, 3372 bp, Yonghaparkia sp. Soil809
gtgaccgacacgctgttctcggccctcgatatcccgacggccgctcaccagcgcaccggctatcggctgcagcgcatcgaattgttcaactggggcacgttcgacaagcacgtgtggtcgatgaacgccaacggtcagacatcgttgctgacgggggacatcggcagtggaaagtcgacgcttgtcgacgcgatcaccaccctgctgctgccggcgaatcgcatcgcctacaacaaggcagcgggcgccgacgtgagagagcgcacactgcgcagctacgtcgagggtcactacaagcacgaacgcaacgaggccacgggcgcgtctcggccggtcggtttgcgcgatcaccggtcgtactcggtgattctgggcgtcttcgccaacgagggctacggcgagagcgtgtcgatcgctcaggtcttccatcagaaagatcggatcggtcaacccgaccgcttcttcatcacagcatccgaagcgttatccatcgatcccgacttcaccggcttcggtttcgagctgaagacgttgcgagcacggttgcgcacacgcggcgccgatgtcgacaccacgttccccgactaccaccgccgggtgcggcgcctgctcgggatccgctcggagcaggcgatggaactgttccatcaaaccgtatcgatgaaatcggtcggcaacctcaacgacttcgtccgcgaccacatgctcgagcccgtcgacgcccagccaagagtgaaagcgatcgtcgatcacttcgagaatctcgtgaagtcacatgaggcggtgcgcaaggcgaccgaccaactcgcggtgctggtacccctcgtcgccgcggcagatcggttcgacgaaaccgcggcccgccacaaagagctcatcgatcagcgcagcgctgtcgcgccgtacatcactgagcgcgtgcgcgaactgctcgacggtgagattgttgcgcgcggcgccgaactcgcggcgctcgatgcgcagaagtctgatctcgcacaacgacgtcaagcgttcgtaccgacgcgtgatcggctcaagctcgagcgggctggggtcggtggcgaccggttgaaagagctggacgctgagattccccgagccgacgagacgcacgctcggcgcgccgaacgccgccgcagttacgacgaactgctgaatactgccgggttcgaccccgccaacgacggcgacgactttctggcgcgcgccgaagaagcaggccttcgacgcgcccgcctcaacgaccaacgagccgacatcacgacgcggcgagacccgctgttcgagagacgcacggatacgcgccgcgcgcgcgacactgcgaagcaggagatcgagagccttcggctgcgacgcaacagtctgcccgccgatctagatcgggtccggtcgacgctgtgcgacgccctggatctcaccgaagatgagctgccattcgccggcgagttgctcgaggtctctgacgactttgccgactggcgcggtgccgccgaacgcgttctgcggggcttcgcgctgaccatgctcgtgccgcaggatctgtacgcgcgaatctccacatgggtgaacgacaatcggctcaacgcgaaattggtgtatctgcgcgttcccgaacgccgaatacgcgcggttccgacggcccacaccggcaaccgacttgtcgatgccctcacgatcgaacccggcccattcggtgactacctcgcgtcagagctcgccgttcgcgcggatcacgtgcttgcggcatccgtcgatcaacttcgcaaagaggatcgggcggtgacccgcgaaggcctcgtgcgcgatcgagatcggcacgagaaagatgaccgcaacagcgccgccgacccgcgtcggtgggtgctcggccgcggcagcgagcagaagatcgccgccctgcagaccgagctcgatggttccattgccgagctcgagtctctcgagcaacagctgacggcgatcgacgacgagcaccgcacactgctgagtcgtgccgaggcgctcgccgcgctcgcgcagtaccgctcgtggtcagagatcgacgccgaggcctctgcctcgacggcctcggcgttgaaggccgagcgcgatcggctcgtcggcgggtcgtcgcaactcgcggcgatcgacgcgcagctcgaggagatcgatgcacgcgatgccgctcttggcgacgaatctgacgaggtcgtcgcccgcatcggcgcagcacgcgatgcgttggcgaaggcacgtttgcggcggcgcgccgaagacgaagctctcgctgcgatggggccttcggtcatcgagcaggcgcgcacgttgtactccgcactggccgaccgggtcaccagggtcaatgtgcgaaccgtcgaagactgtgaccggatgcgtggcacgctgatcgacacactcacgtctgccatcgagtcggctcagcgagagatgaacggctacacaactggcatccagcagcagatgggtgagtttctgcggcggtgggcagagcatcgtggcgagcttgatgcgagcgtgcggtcgatccccgagttccgtgcgttgcatgaacgcgtcacgcgcgatgatctgccccgattcgaggccgagtttcggcatgaacttgacaccaacgcagtgcgcgaactcgcgcagttcaatatgtggctgcgccgacaggccgaagagatacgcgggcgagttgagatcatcaacgaagcgctcgctgcaatcgactacaacccgggccgcataatcgtgctggtcgccgagccgaccgtcaatcaggacgtgcgacagtttcgctccgatctgcgggaggcgaccgccgacgtgctcgctgccgaagggaacgctgccgacgttgaacagcggttcgagcagattcgacacctcatcgagcgcctcaagggtcgcgttgggcacaccgatagtgatcgggtttggatgcggcgcgtcaccgacgtgcgcaactggtacacgttcgcagcgagcgagaaggatcgccgcagcggtgaggagttcgagcactacaccgactccgacggcaagtcaggagggcagaaggaaaagctcgcgtacacgattctcgcggcatctctcgcctatcagttcggactcgagtggggcgtcgagaagtcgcgcgactttcggtttgcggtcatcgacgaggccttcggccgagggtccgacgcgtcgacccgctacgcgctcgacttgttcgcaaagctcgggcttcagctgctcatcgtcacaccgttgcaaaaggtgcacgtcatcgaaccgtacgtaagcgcgattggcttcgtcgacaatccgaccggcgcagcatcgcgcgtgcatacgctcacgattgaggagtttcgaacaaagcagcggagccagggttga

SEQ ID NO: 48050 - DNA, 1155 bp, Yonghaparkia sp. Soil809
ttgagcgaccccgcacggtggtcgacgcccgcgaatatcgccgccgctgtgcgtcgtcgatggaccgatggcacgctcttgcgcgcattcgcaaccgatgacccgtttcgcgcgatagcaattccgctacgcgggccaagtgccggtgacctcggtgatcactttgacgccgcgcgtgagtggtcgaacgacctacggcatgcctcacgcggcgggcgcgcctacaccctactcacgggtcgtatcggcggccggctgaccggttccactgaggtgccaattcgagccgtggtcgaatcgtacgaacaggcgtggctgcttctgggcagccaagcggatgcggcggccttccgccaacttgttgattcttcagagcatgtgcctcgcgcgcggaagtgggctctcggttcaccactggcggcagtggcgctcgcaccaatctggcaatcagtgctgggcgcgtacacatggctcgacacgcatcggggttcgggccattatctgcgccaagtgagcgcaccgggcgtcgacacgaagttcatcgagcgacaccgcagcgccttgggttcgatgctgggagtgtccaccgcggcgggagccttcgcccgagagctcggactcgcaagtaagccagcgacggtgcgcctgcggttcgatcccgccgtgctcgacgtgccgagcggactcagtgaagccgtgctgcgcacagaggaactaggtgcgctcgacgctcatccacgtcgagcgctgatcgtcgagaacgaaatcacctaccttagcgttccggttcgaccgggatgcgtcgtgctttggggcaaaggctacgacgccgatcaaccggcatcgctccagtggctcagcggcaccgaggtcgtgtactggggcgacatcgacacccacgggttcgcgatcctcgaccgtgttcgggcacacctcccgaacgctcgctcagttctgatggaccgtgagacgttgctcgcgcacgaatcgacctggggccgtgaaccggcgccgaccgatgtcggactgtctcggctggatgctgccgagcgcatgttgtactccgatctcgtgacggatcgctacgggcctaccgtgcgcctcgagcaggagcggatcaattgggaatgggcgctcgaacggcttgagcagtag

SEQ ID NO: 48051 - DNA, 1491 bp, Pseudoxanthomonas dokdonensis
atgcatctccagcgcaggcccgggcccgcagacgcgatgacagcggtgcctgcgctgttcgccaacctgcccggcggcattttcggaccgctggcatcgcccaaccgcgaacactactggctgttgctgtgccgtttgttcgatgagttcttcggcccggacgcgccactgccgcccagtgacggcatcccgcgacgcgatatcaccgccgcggtcgagcgctacctgctgaccgacgatccgtgggaaagcgaggacggcgaagtctccgacgcaccgctcaacgtccgcgccaatgccatccatgaccgcttccgtggcgccggctggttgcgccaggaacgcatcggcgcgcgcgaaatggtctcgatgccgccgctggtgtcgcgactgctggcgaccttgatcgaattcggcgaacacgggccgaccttcgtctcggccaagatgcgctcggtcgaattgcagttgcagcagatcctcgaaggcaaggccgcgggcgacgcactggacgaggccgccgaccaggcacgccggctgctggtgtcgttgtcatcgatgagcctgcaggtacgcgacctgatgccggagttgagcaaggccgagaccaccgcccagttcgcccgccaatggtttgaacgctatgtcggccagttgttcattggcgactatgccgagctgcataccagcgatcatccgctggcccgacgcagcgcgatcctggcgatggccaggcaactgcaggaaccggcccagcgcgcgcgattgctggactggtaccgcgagcacctgaccgctggtgatgagcaacgcgccgcgctgcgcctgcagcgtggcctgcagcgcctgcatgagctggagcggatcgacgaatatctgggccggctcgatgacgacatccgccaggccaatcggcgggcgctggccttcctcgactaccgcctgcgtgcgccggatcggctggacgtgttgctgcagcgtgccgtgcgcggcgtcctggtcgccgcaccggagcaacagcggatgccggtcgctgctggcgcattgatggacgaaagccggctgcggccgccgcgtcgcaagccgcagccgattccacgcagcgccaacagcaacgcgccgccgacgccggaacaactggcacggctgtcactgttgcgacagatcaagcgcgcccgcctggtcaatgccgaggacatggcccgctatgtcggtcgccatctcggccaggccactcagatcgactcgcgccagttgagcattgattcgatacccgacctgcgcgcctaccagaccttgctgaccctggccttgcgcagccggcgcgtcggtggcctgcgccgcgaggatcccctgtcgcggctgctgcgtgggttccgggtcgaactgatcgacgccggcacggacgacagcagtgacaatgattttctgcacggcccggatttccgcatccatcggctcggcaccgctcctaaccggaagtccgcatga

SEQ ID NO: 48052 - DNA, 660 bp, Pseudoxanthomonas dokdonensis
atgaaacgcagttggaacaccctcagccagaactccaatggcctgtatgccgtcgctgatttcgagcgcgccgcctatcgtctggtcagcgaacaggtgctgtacgccagcgatgcccgttcgcgtgtggcctatcacctgatcgaggactatttcgccgatttcgtcgccgcgctggaaccgctcggcatccgtctggaacgcaacgcccattaccgctatgtggtggcactgcccagccacggcgaaggggtgccggtcaccctcgatgaaaccctggccctgctggtgctgcggcaacgctacgacaaagcgatgcgccagggcctgatcgaagatcacggcgaagtggtggtcgaactaccggacctgcaggaagcctggcaatcgatgaccggccgtccgctgcccgacatcggcagcttgcggaccctggcgcgcagcctcaaacgctggggtgtcggccggttggtggaatccgacgacgatccgcagccgttccatctgcgggtgcgcccggccatcgtcgatatcgtcggcgagcactggttgcagcggctggaccagcacaaccgggatggcggcgccgacgatgcgtcggccgacgagccctcaaatgccggccaggacaacatggaggacaacgatgcaactgcttga

SEQ ID NO: 48053 - DNA, 3432 bp, Pseudoxanthomonas dokdonensis
atgcaactgcttgagcgcatccatctggtgcagttcttcctgttcgaggcgcagacactggcgctggacccgaccaccgcgatcatcgctcccaacggcgccggcaagagcgcgttgctggatgccctgcagatcgtgctgctgggtggcgaccgcagccgtatccgcttcaatgcccaggccggcggcagccatcgcgcgcgcagcatccgcgactattgcctgggcgtctatcgcagcggtgaggaaggccgcaagcgccgcaccgccaccacctacatcagtctggtgttccgcgatcaggacagcggcgaggcattgaccgccggcatcgcgctgggcgcggccgccgatgagccggaacaccgcctgcacggcctgtatctgttgccgggggtggcgctggccttggacgaacacctggaacaggtcaagggcaaggagttgccgctgacctgggccgcattccgcgaacacatcaatcgccgctgcaagcaggctggtagctcggccgagctgcacacggtcagcgaacgcttcgtccgcgatctgctgctgcggctgcgcgcatcgccatcggccaacccggacctcaatgcctatcgcaaagccttcctcaacgccctgaacctgcaacgggtcgaagacgtcgatctgttcgtgcgcaccctggtcgccgaggatcgcccgaccgatatcggtcgcttccgggccctgctcgacagcttccgccagatcaaggaaaaaatcgaacaggtcaggcagcggattgaagccgccgatctggtcgaacagcaatacgccagaatcgcccagcaggcgacccgtgccgcctctgcccgcgcactggctgccgaatacgcccgcgatctgtacagcgaacaattgcaggcggcggaaaccggcgtcgaacaggcacaaacccaactggccgaccgccgccggcaactgagcgacagccgcgccgagcgcgaacatctgcgtgacgaacatgcacgtggccaagcccagctgcaaggcagccagggctatggtgaacaggcacaactggaagaactggccggacgcgatcgcgaacagctggtgcgcttgaagaaagacctgctgcgcgaagtcgcctttgtccgcgagcgcctgcgaggcattgccgcgctcgccatcgacggcatcgacgacaccctgctgcagaccgcactggcggattgggatggctggcatgcgcagttggccgcactggcggcggaagacgggctgccgtggtcgcctgaagatctgcacgcacaggtccagcgcagcctgcagcaggccacgccactgctggccgcggtcgatcgacatgcacgccgctgccatgcgagccacgacaaattgcgtgacgcgctggccagcgcgcgccagaaccagaagcgtctgtccgctggtcaggccgagctgcacccggataccgcgcgactgatgaattatctgcgcgacgccggcatcgaagcgcggccggtctgcgatctggtgcgggtcagcgacagcagctggcagcacgccatcgaaggctatctgcgtggcaatgtcgaagcgctgctggtcccggccagggatgaagaacgcgcggtcaagctgtaccgcggactgaagggcagcagttcggtgtacggggtcaagctggcgctgtccagccatgcccggcatcgccgtggcaacgacagcgccgaggccggcagcgtcgccgcgctgctggaaggcgacaacctcgaggcactcgcattcctgcgtcgccaactgggcgaactggcctgcgtcgacagcgaagccgaactggtcagcagccgccagggcctgacccgtgacggtctgctcgcacgtggtggcggcatcgagcgactgcgcctgccggcagccggcgatctgaaaatcggcgcgtccgacaaccgcgcgcgattgcgggtgctgcgcgaggagatcgagaccgccgaggcccagctgcggcagattgaaccgcagctgcgcagtgccgatgaggcccaacgcggtctggcgcggctggccgacgccaccaccgtcgcccagtcattgcacgaacaggtgctggaacaccggcaattggcggcgcgctattcaagccagcagcagcgccgccagtcgagcctggatccggatctgctgcacctgtcggaacagctgcaggcgttgtcgacccaattgcaggcgcaggaagcccgcaccgaacaactggttggccaggaagcactggctgccaatgcggtcgagcaggcccagcgtctgctggatggcctgcgcgaacaggaacaacgcgtcgcccgcgaagcggtggatgcgttcaagcatccggacgtggacccgaaccgggttgagcgcctgcgtgaagagctggatcagaaataccaagcgctggaagaacgcgcgcgccgttgcgaagaacggggcaaggatggcgacgcccagttggcccgactgctgcccggcgcctggagtggcctggcccagtacgcacgcgaccacggcatcgagctggattttgatggcgatgcctggcgcccagcacgcaagctgctgcaacacgagctgagccgtctgcgcgacaccgaactggtgcgttaccagggcgaagccgatgccgcctacgacaccgcggtggaaacctttcgcgccagcgtcgcagcgaccctcaacgacaacttcacccgcctcaaaacccagatcgccaccctcaaccggaccctgcgcgccagcccgccgttttccaaccacgagcgctaccagttccactatgaggtggtggcggagttccgcgagctgcatcgcttcatccagcgcgccgccgagatcggcagcgaggacagcctgttcggcaacgccggcgaagtgccggccgcgttccgtgagctgatcgaagacgccagcgcggcacgggctgcgtcgtcaccgttggacgattaccggcgcttcttccgctttgaagtacagatccgccaggacgaccgggtgatcggcaccctcagtgagcggatgcgctcgggctccggtggcgaacatcgcgctccgctgtacgtgatcgccggcgccgcgctggccgctgcctatggcaagagcgaggcgcacccgggcggattgggcctgatcctgctggatgaattcggcgacaagatcgacgcccagaatgcccgtgccaccagcaattatctgcgctcgctgggcctgcaactggtgctggccgcgccggacaccgcccagggcacgctcagtggcgtgctcgacagctatatcgaactgttccgcgacggcgatctgctgcaggccgaacggatcgaagtcaccgaagccgcgcgtgccctgttgctcagcgatcagttcgacctgcatccgcaactgctggaagaggaaacggagcgcatccagcgcgagagtgcggtgggctga

SEQ ID NO: 48054 - DNA, 1509 bp, Stenotrophomonas nitritireducens; identical to SEQ ID NO: 47770

SEQ ID NO: 48055 - DNA, 627 bp, Stenotrophomonas nitritireducens
atgaaacgcagctggaacaccctgagccagatgtccaacggcacctacgccgtgcaggacttcgagcgcgccgcctaccgcctggccaccgagcaggtgctgtacgccaccgacgcgcgttcgcgcgtggcctaccacctggtcgaagaccactaccccgatttcgtctccgcgctggagccgctgggcatccgcctggagcgcaacgcgcactaccgctacgtggtggcgctgccggcgcatggcgaaggcgcaccggtgacgctggacgaaaccctggccctgctggtgctgcgccagcgctacgacgaagcgatgcggcaaggcctgatcgaggatcacggcgaagtggtggtggagctgcccgaactgcaggaaagctggcaggccttgaccggccgcgcgatgcccgacgtcggcgcgctgcgcgcgctggcgcgcacgctcaagcgctggggcgtgagccgattggtggagtcggaaggcgacgacccgcagccgttccacctgcgggtgcgcccggccatcgtcgagatcgtcggtgaacagtggctgcagcgactggaccagcacaaccgcgacgaagcgggcgacgcggacgcggaggacgacgatgcagcagcttga

SEQ ID NO: 48056 - DNA, 3432 bp, Stenotrophomonas nitritireducens
atgcagcagcttgaacgcatccacctggtccagttcttcctgttcgaggcgcagagcctgcagctggacgcgaccagcgccatcatcgcgcccaacggcgccggcaagagcgccctgctcgacgccctgcagatcgtgctgctgggcggcgaccgcagccgcatccgtttcaacgcgcaggccggcggcagccaccgcgcgcgcaccatccgcgactactgcctgggcgtgttccgcagcggcgatgaaggccgcaagcgccgcaccgccaccacctacatctcgctggtgttccgcgacaccgagaccggcgtgccgttgaccgccggcatcgcgctcggcgcctcggtcgatgaacccgaacaccgcacgcatggcctgtacctgctgccgggcgtggcgctggagctggacgaacacctggagcgggtcaagggcaaggaactgccgctggcctggaataccttccgcgagcacatcgcgcgccgctgcaaggacgtgggcgaaacgccgcagctgcatcccaacgccgagcgcttcctgcgcgacctgctgctgcgcctgcgcgccagcccgtcggccagccccgacctcaatgcctaccgcaaggccttcctcaacgcgctgaacctgcagcgggtcgaggacgtggacctgttcgtgcgcaccctggtggccgaggaccggcccaccgacatcgcccgtttccgcgcgctgctggacagcttccgccagatcaaggaaaagatcgagcaggtgcggcagcggatcgacgccgccgaaggcgccgagcgccaatacgagaagatcgccgggcaggcgacccgcgccgcgtccgcgcgcgcgctggccgccgagtacgcgcgcgacctgtacagcgagcagctggaccaggccgagggcgcggtggcgcgcgcggaaggcacgctggccgatacccggcgcctgctggtcgatgcccgcggcgagcgcgacaccctgcgcgaggagcatgtccgcgccaatgcccgcctgcagggcagcgccggctatggcgaacaggcgcagttggacgagctgtccggacgcgaccgcgagcgtttggcgcagttgaagaaggatctgctgcgcgaagtcggcttcatcggccagcagttccgtcagctcgacgcgctggcgctggacgacgtcgacgccaaggcactggccgctgcccgcgccgactgggacgagtggcatgccgggctgtccacgctgtcgcccgaagacgcgctgccgtggacgccggaggaactgttcgcccgcgcccgccaggcgctgcgggcggccgcgccgctgcgcgagcaggtggaccgtcatgcccgccagctgcatgccgcgcacgacaaggcccgcgacgcgctggaaaccgcgcgccagaaccagaagcggctggccgccggccaggccgaactgcatccggacacggtgcggctgatgagctacctgcgtgacgccggcatcgacgcgcgcccggtctgcgatctggtgcgggtcaccgatgcctcgtggcagcacgccatcgaaggctatctgcgcagcaacgtcgaagccctgctgatcccggacaaggatgaagaacgcgcggtcaagctgtaccgcggcctttccggcgcgcgctcggtgtacggcgtcaagctggcgctgtcgagccaggcgcgcagttcgcgcggcgccgaagagccggccgcaggcagcgtcgccgcgctgctggaaggcgtcaacgccgacgcgctggccttcctgcgccgccagctcggcgaactgcgctgcgtggagaccgaggccgagctggtgcgcagccgccagggcctgacccgcgacggcctgctctcgcgcggcggcagcgtcgagcgcctgcgcctgccggcggccggtgacctgcgcatcggagcgtccgacaaccgcgcgcgcctgcgcgtgctgcacgaggaaatcgagaaggccgaggccgaggtgcgccgcatcgagccgagcctgcgccgtgccgacgactgccagcgcgggctggcgcggctggccgacgccgacgcggtggcgcaggcgctgcacgagcgcgtgctggaacaccgacaggtcgccgagcgttatcgcgccgcgcaggaaagccgccaggcctcgctcgaccccgatctgctgcggctgtccgagcaggtgcgcgaactgggcctgcacctggccgattgcgagaagcgcgccgacgacctgctgcgcaaggaagcggtggccgagtccaacctcgccagcacgcgcggcctgctcgacggcctgcgccagcaggaggaacgggtcacgcgacgcgcggtggaggccttcgccgaaccggacgtcgaccccaaccgggtcgagcgccagcgccaggagctggacgaaaaatacccgtcgttggaagagcgcgcacagcgctgcgaggagcgcgccaaggacagcgatgcccagcttgcgcgcctggtgccggtggcctggggcgaactggcgcaatatgcgcgcgaccatggcatcgagctggatttcgctgccgacgcctggcggcctgcacgggctctgctgcagcgcgaactgacccagctgcgcgacaccgaactggtgcagtacgaggaggaagcgcgccaggcctacgccaccgccgtggacactttccgcaccggtgtggcgtccaccctgtacgacaacttcacccggctcaagacccagatcgccacgctcaaccgcaccctgcgcgctagcccggccttctccaacaacgagcgctaccagttccattacgaggtggtgccggagttccgcgagctgcaccgcttcatccagcgcgctgccgacatcggcggcgaggacacgctgttcgaaagcgccggccaggtgcccgaggcgttccgcgcgctggtcgaggacaaggcggccacccacgtggccaactcgccgctggacgactaccgccgcttcttccgcttcgaggtgcagatccgccaggacgaccgcgtgatcggcagcctcagcgaacgcatgcgctcgggctccggcggcgaacaccgtgcgccgctgtacgtgatcgccggcgccgcgctggccgctgcctacggcaagagcgaggcgcagccgggcgggctggggctgatcctgctcgacgagttcggcgacaagatcgacgcgcagaacgcgcgcgccaccaccaactacctgcgctcgctgggcctgcagctggtgctggcggcgccggacaccgcgcagggcacgctgtccggcgtactggacagctacatcgaactgttccgcgacggcgacctgctgcaggccgaacgcatcgaagtcaccgaagcggcgcgtaccctgctgctgtccgaccagttcgacctgcacccggaactgctggcggccgagaccaaacgcatcgaacgcgagcaggccacggcctga

SEQ ID NO: 48057 - DNA, 1452 bp, Stenotrophomonas daejeonensis
ttgagtacgaccacccccacgaccacgccgccgctgttcacggtcgtgcccgccggcatcttcggcccgctggcctcggccaaccgccagaactactggtcgttgctgtgccggctgttcgacgagttcttcggcccggatgcgccggtgccgcccagccatggcttccagcggcgcgagatcaccgccgcgatcgagcgctacctgctcaccgacgacccgtgggaagacgaggacggccaggccccggacgcgccgctgaatacacgcgccaatgccatccacgaccgcttccgcgccgccggctggctgcgccaggagcgcatcggcgcacgcgagatggtgacgatgccgccgatggtggcgcagctgctttcgacgctggtggagttcagcgaacacggcccgaccttcgtctcggccaagatgcgctcggtggaactgcaattgcagcaggtggccgagggccgcatggatggcggcatcctcgatgaagccgccgatcaggcgcgccgcctgctggtgtcgctggcgtcgatgggcctgcaggtgcgcgacctgatgccggagctgagcaaggccgaaaccaccgcgcagttcgcgcggcagtggttcgagcgctacgtcggccagctgttcatcggcgactacgccgagctgcaccgcgccgaccacccgatggcgcggcgcagttcgattctggcgatggtgcagcaactggaaaccggcgcgcagcggcagacactggtggcgtggtaccgcgaacacgtcaccggcggcgacgaagcacgcgcgcagcatcgcctgtcgcgcagcctcggccgcctgcgtgaactggagcgcatcgacgaatacctgacccggctggacgaggacatccgccaggccaaccgccgcgcgctggccttcctcgactaccgcctgcgtgcgcccgacaggctcgacgtgctgctgcgccgtgcctgccgcggcgtgctgtcggcaccggaggaagctttgcgcttgccggtcgcgcccggcccgctgatggatgaaacccgtctgcgcgccccgcaccgcaagcccgtgccgatcccacgcagcgccaacgccaccacgccgcccacgcccgagcagttggcgcggctgtcgctgctgcggcggatgaagcgtgcgcggctggtcaacgccgagggcatggcgcgctacgtcggccgccacctgcagcacggcatggcgatcgaatcggcacaactggacatcgccagcatcgaggacctgcgcgcctaccagaccctgctgacgctggccctgcgcggcaaccgcatcggtggcctgcgccgcgaggacccgctgggccggctgctgcgcggcttccgcgtcgagctgctcgacgccggcgatggcaacgacaacgattacctgcgcggcctgcgcttccgcgtccagcggataggcacgatgccctcgtag

SEQ ID NO: 48058 - DNA, 627 bp, Stenotrophomonas daejeonensis
atgaaacgcagctggaacaccctcagccagatgtccaacggcacctacacggtgcaggacttcgagcgcgccgcctatcgccttgccaccgagcaggtgctgtacgccgccgacgcgcgctcgcgcgtggcctaccatctggtcgaagaccacctcgccgatttcaccgccgcgctggaaccgctgggcatccgcgtggagcgcaatgcgcactaccgctacgtggtcgcgctgccatcgcatggcgaaggcgcgccggtgacgctggacgaaacgctggcgctgctggtgatgcgccagcgctatgacgaagccatgcgccagggcctgatcgaggaccacggcgaagtggtgatcgagctgcccgaattgcaggaaagctggcaggcgctgaccggccgcgcgatgcccgaggtcggcacgctgcgcacgctggcgcgcaccctgaaacgctggggcgtgtgccggctggtggagtcggaaagcgacgacccgcagccgttccacctgcgggtgcgcccggccatcgtcgagatcgtcggcgagcagtggctgcaacggctggaccagcacaaccgcgacgaggatggcgagatggacgtggaggacgacgatgcagcagcttga

SEQ ID NO: 48059 - DNA, 3432 bp, Stenotrophomonas daejeonensis
atgcagcagcttgaatgcgtccatctggtccagttcttcctgttcgaggcgcagagcctgcggctggacggcaccagcgccatcatcgcgcccaacggcgcaggcaagagcgcgctgctggacgccttgcagatcgtgctgctgggcggcgaccgcagccgcatccgcttcaacgcgcaggctggcggcagccaccgcgcgcgcaccatccgcgattactgcctcggcgtgttccgcagcggcgaggaaggccgcaagcgccgcaccgccaccacctacatctcgctggtgttccgcgacaccgagaccggcacgccgctgaccgccggcatcgcgctgggcgcatcaagcgatgaacccgagcaccgcgtgcacggcctgtacctgctgccgggcgtggcgctggaactggacgaacacgtcgagcgcatcaacggcaaggaactgccgttggcgtggaacaccttccgcgagcatgccagccgccgctgcaaggaagtgggcgagacgccgcaactgcaccccaatgccgaacgcttcctgcgcgacctgctgctgcgcctgcgcgccggcccgtcggtcagccccgacctcaccgcctatcgcaaggccttcctcaacgcgctgaacctgcagcgcgtcgaggacgtggacctgttcgtgcgcacgctggtggccgaggaccggcccaccgacatcgcccgtttccgcgcgctgctggagagcttccgccagatcaaggagaagatcgaacaggtcaggcagcgcatcgacgccgccgaaggcgtggagcgtcagtacgagaagatcgcagggcaagccacccgcgccgcttccgcgcgcgccttggccgccgaatacgcacgcgacctctacagcgaacaactcgaccaggccgagggcgcgctcgccgatgcggaaaacgtactggccgatacccgccgcaacctcgcagacacccgcgtcgaacgtgacaccctgcgcgaagaacaagcgcgcgccaacacccgcctgcaaggcagcgccggctacggcgagcaggcgcaactcgacgaactggccggccgcgaccgcgaccgcctcgcgcagttgaagaaagacctgctgcgcgaagtcggattcatccgcgaccaataccgccaactcgacgcgctggcgctcgacggtatcgacgccgaaacgctggccgccgcgcgcgccgattgggatggctggcacgccgaactgtcggcgctcgccgccgaagacgtgttgccgtggacgccggaagacctgttcgcgcgtgcgcgccaggccctgcataccgccgtgccgctgcgcgaacgggtcgatcgctacgcccgccagctgcacgccgcccacgacaaggcgcgcgatgcgctgggaaccgcgcgccagaaccagaagcgtctggcggcaggccaggccgaactgcacccggatacggtgcgcctgatgagctacctgcgcgacgcgggtatcgacgcacgcccggtctgcgatctggtgcgcgtcaccgacgcgacgtggcagcacgccatcgaaggctatctgcgcagcaacgtcgaggcactgctgatccccgacaaagacgaggagcgggcggtcaagctgtatcgcggcctgtccggcgggcgctcggtgtatggcgtcaagctggcgctgtcgagtcaggcgcgcaactcgcatggtggcgaagaacccgccgctggcagcgtcgctgcgttgctggaaggcgtaaacgacgacgcgctggccttcctgcgccgccaacttggcgaactgcgctgcgttgaaaccgaagccgagttggtgcgtagccgccaaggcctgacccgcgacggcctgctctcgcgcggcggcagcatcgaacgcctgcgcctgcccgccgccggcgatctgcgcatcggcgcgtccgacaaccgcgcacgcctgcgcgtgctgcacgaggaaatcgaaaaagccgagcgcacggtgcgcgagatcgaaccgcaactgcgccgcgccgacgattgccagcgcggcttggcgcgcttggccgatgccgatgcagtggcgcaatcgctgcacgagcgtgtgctggaacaccggcaggtgggcgagcgctaccgcagcgcgcaggaaagccgccgcgcctcgctcgacccggatctgctgcgcctgtccgaacaggtgcgcgaactgaacctgcaactggccgactgcgaaaagcgcgccgatgcgctggtcgggcaggaagcggtggctgcctccaacctcgaacgcacgcgtggcctgctcgacggcctgcgccagcaggaagaactggtcgcgcgccgcgcggtggaagccttcgccgacccggatgtcgatcccaaccgggtcgaacgccagcgcgaggaactggacgagaaatatccctcgctggaagagcgcgcgcgccgctgcgaggaacgcgccagggacagcgatgcgcagttggctcggctgctgcccgaggcatggagtgggctggcgcagtacgcacgcgaccacgccatcgaactcgacttcgacgccagcgcatggcggcccgcgcgcagcctgctgcaacgcgaactggcgcaactgcgcgacaccgaactggtgcagtaccaagaagaagcgcagcaggcctacgccaccgcggtggacaccttccgcaccggcgtggcctcgacgctgtacgacaacttcacccggctcaagacccagatcaacacgctcaaccgcaccctgcgcgccagcccggcgttctccaacaacgagcgctaccagttccattacgaggtgctgccggagttccgcgaactgcaccgcttcatccagcgcgccgccgacatcggcggcgaggacaccttgtttgaaagtgcagggcaggtgcccgaggcgttccgcgccctggtcgaggacaaggcggccgcgcacgttgccaattcgccgctggacgactaccgccgcttcttccgcttcgaggtgcagatccgccaggacgaccgcgtgatcggcagcttgagcgaacgcatgcgctccggctccggcggcgagcaccgtgcgccgctgtacgtgatcgccggcgccgcgctggccgcggcctacggcaagagcgaggcgcagccgggcgggctggggctgatcctgctcgacgagttcggcgacaagatcgacgcgcagaacgcgcgcgccatcaccggctacctgcgctcgctgggcctgcaactggtgctggccgcgccggacaccgcgcagggcaccctgtccggcgtgctggacagctacatcgaactgttccgcgacggcgacctgttgcaggccgagcgcatcgaagtgaccgaagcggcgcgcgcgctgctgctgtccgaccagttcgacctgcacccggaactgctggcggccgaaaccgagcgcatcgagcgcgagcaggcggcgacgtga

SEQ ID NO: 48060 - DNA, 1470 bp, Stenotrophomonas chelatiphaga
atgaagcatcgcgaacgcatcatccgttaccgccacctgcgcgaacaaccgcaatggaagctgctcgccgccgaccatgcgccggagatcatcggcctgctgcaggccctgctgatggacggcgaacgcacgctggctgcgccggtgctgcacgagcgcctgcagcgcgcgctggaccagctcaacggcgaagagctgtcgcgtgagctgccgcgcaccgcgcaggcctacgtggcgcactggctggcccagggctggctggaacgacgccttcccgaaggcgccgaccaggaacagtacgaactgtccacccaggcgttgcaggcgatccgctttgccgacagcctggaacagagccgcgtcgccgctaccgaaagccgcttggcgctggtcatcaaccagctgtcccagctcgcggcgcagaccgaagcggacccggatgcgcggctgtccgcgctgcgcgacgagcgtgaccgcatcgatgcggaaatcgcccgcgtcggcgaaggccgcgtggccgcgctggatggcaagcgcgcgctggaacgcgcccgccagatcatcggcctggccgacgaactgaccgaagatttccgccgcgtacgcgacgacttcgaacgcctgaaccgtgaattccgcgaacgcatcatcgacgatgaaggtgagcgcggcgacgtgctgtccaagttgttcgaaggcgtggacgtgatcggcgagagcgacgccggccgcagcttccaggcgttctggcggctgctcaacgacgccgaacagagtgcgcagctggacgccgcgctggaatcggtgctggcgcgtggcttcgcgcggcgcctggaccgcaacgaacgcgcgttcctgcgcggcttcaccggcaccatgctggaacgcggcggccaggttcacgacgtgctgcagcacttcgcccgcagcctgcgcgggttcgtgcagagccgcggctacttggaacaacgccgcctcaaccagctgctgaagcaggcgcagggcgaggcactggccctgcgcgatgacttcccggcccaacgttcgatcggacgcgacctgcagctgaccaccagccggctgcgatcgtggtcgcagtggaagctgcacgatccgcgcagcgcgcaggtcgatggcagcgtgcagcgcaacgatgccgccgcgatcagcctggaaagcgtcggcgacctggtggcctcgtccgaaatcgatttccgtaccctgcgccgcgatctgcatgacctgctcggcatgcagccgaagctgagcatttcccaggccttgtcgcagcgcgaagcgccgcagggcctgggcagcgtgatcggctacctgtcgctgggcacgcgcttcggcaccgtggtggagggcgagcaggagctggcccactggcgcggtggcgatggccaatggcggcgcgcccgcatcccgctggtttggttcacccaggagaaacgccatgagctggaatga

SEQ ID NO: 48061 - DNA, 702 bp, Stenotrophomonas chelatiphaga
atgagctggaatgaagatccgatcgaatcctcccgcctgggcgagggcgaggatgccttcgacgccgagccggtggtggtcaccccgttgccccgccgcaacaacgacgtgctgtacctgggcgataccggtcggctgccgcaggacgcgcgccgcgcgctgtgccagctgctgatcgggccgagcatcgaccagcagcgccacgccaagctgtggccggcgctgctgcgcaacgaagccgccatccgcacctccctgtccgacctgttcctggaactggtgctggaccgcgagagcggcgtggccttcacccgtcaggccgataccgaagacctggattcgccggtgctgctgcgtacctcgccgctgaccttcatcgactcggtgctgctgctgtacctgcgccagcagctgggcgaagccgatgcgcgcggcaaccgcgcggtggtcgccgatgcagagatggccgaagcgctggcggtgtacgagaagaacctgtccaccgaccgtgccggcttcaaccgccgcgtggccagtgccgtgcagaagatgaaggacaaccacatcctgacccgcctggcgggccaggaagaccgccacgaagtctctcccgcattgaagctgctgttctctgccgaagatgtctccgcgctgtcggcggtgtaccgccagctgcgcgaaaccccggctgccgaagcctga

SEQ ID NO: 48062 - DNA, 3381 bp, Stenotrophomonas chelatiphaga
atggccatttccaagcacactcccgccctgttcaccgaaggcctgcccgacccgcgcacgcagcagttccgcatgcgccgcctgcaggtacacaactggggcaccttcaacggcctgaccgaagtgccaatcgctgagcgcggcttcctgttcgtgggccgctccggttcgggcaagtcgaccctgctcgatgcgatgtccgcgctgctggtgccgccggccatcgtcgacttcaacgccgctgcgcgcgaagccgagcgcagtggccgcgaccgcaacctggtgtcctacgtgcgcggtgcctgggccgaccagcaggatcgcggcaccggcgagatcgccacccagtacctgcgcaagggcgccacctggaccgcgctggtgctggaataccgcgccggcgatggccgcgtggtcagcctggtgcggctgttctggatcgccggcaacggcgccactgccggtgacgtgcgcaagcattacatggtggccgaacgcccgttcgacatcgcccgggacctcggtggcttcgacctggacctgcgcaagctgaagcagaagctggccgacgtgcaccacttcgacagcttcgccggctacgccgagcgcttccgccacctgctcggcatcgaaaacgagatggcgctgcgcctgctgcacaagacccagtcggccaagaacctgggcgacctgaatgtcttcctgcgcgacttcatgctggatacgccgaagaccttcgatgccgccgagcggctggtcaacgacttcgccgaactggatggtgcgcaccaggcggtggtcaccgcacgccgccaggtggaaaccctgctgccggcacgcgagcactacaccgaactgaagcagatcaagcgccgtcgcagcgacgatgaagtgctgaaactgggcatcgacagtttccgcgagtcgcgccgccagcagttgatcgatgcgcgcctgcgcgaactcgacacccgcgaccgtggcctgctgggcgaggaatcccagcgccgcgccgcgctcgacaaccacaccgccaagctgggcgaactggagctgcagcggcgccagcagggcggtgagcggatcgaggaactggaacgcgaacagggtcgtgccgaagccgagcgcgatcgtcgccaggccaagcaggcgcaggcccgcgatgccgccgcacagctgcagctggcgctaccggaggatgcacacggcttcgccgcactggtggaacaggcgtcgactgagctgctggaccgcaagcgcgcttcgtcggcgctggatgatgcgatcagcgagcggctgggcggccggcgcgatgacgagcgccgcttcggcgacgtgcgtgccgagctggacgccatgcagcgcaacacctccagcatccccgcgccgttgcagaagctgcgcgcgcggctggtggaagaaaccggcctgcccgaagcggcgctgccgttcgtcggcgagctgatccaggtgcgcgaggatgacctgccgtggcagggcgcgatcgaacgcgtgctgttcggtttcgcgcagtcgctgctggtcgacgacaagcactacaacgaggtcgctgactgggtgaaccgcactcacctcggcatgcgcttcacctactaccgcgtgcgtcgcaacgacgaagcgttcgcgcgtgacccgtcgccgcgttcgctgctgcacaagctggaactgcgcgaccacgtgttcgaaggctggctgcggcgcgagctgggcaagcgcttcgactacgagtgcgtggacgcgcgccagctgcgcaacgtcgaccgcggcatcacccgcgaaggccaggtcaagcatcccggcgaccgcttcgagaaggatgaccgcagcgcggtgaccgatcgccgccgctggctgttgggcttcaacaaccgcgacaagctggccgtgtacgagaaagaagcgcaggagctggcgaagcggatcgccggctgcgacgaagacgtcgcgcgcctgcgcgcccagcgcgacctcgacaacgagcgccggctggcgtgccaccagttggccggcatcagctgggacgagatcgacatcgccaccccgcagcagcgcctggccgacatcgaagcgaccctgctcgacctgcgcgaaggcaatgcggacctggaaaaactggcccgccagatcgacgcggcgcgctcggacatcgagcaggcacgacgcacctacgaagacacccgcgtggagcgtggccagctggtcaaggaacgtgaccgcctggaccgtgcccgccagcagagccgtgcgctggtgctgccggccctgggcagcacccaggaagccggcctgcaggaacgcctggaagcgttcggcgcgctcagcctggaaaccctggaagcgcacatgcgccaggtcagcaacgcgctgaacgaatccctgtcgtcctcgcagcaggacgtcaaccgggtcgagaaccagctgctgggctgcttccgccgcttcgtgcagggctggccggaagagtccggcgacttcaccgtatcggtggcctcggccgatgatttcctggccaggctggaacggctggaacgcgacggcctgccgcagcatgaagagcgcttcttcgacctgctgcagaaccagagcaagaacaacctgctggccctgcagcggcacagcgccgaagcgcgcaagtcgatcggccagcgcctggacgaggtcaacgccagcctggaacaggtgccgttcaaccgcggcaccctgctgaccatcgagctcagcgaccgccgcctgccggaagtactggagttccaccagcacctgcgcgacgtgctgtcccagcagcagaccgaacagcgcgaactggccgaagcgcagttcgccgtgctgcgccagctggtcacccggctgggctcgtccgaaggcgaggacaagcgctggcgcgaactggtgctggacgtgcgcatgcacgtggagttcatcggcgtggaactggatgccgccacccgccagcaggtggagatctaccgcagcggtgccggcaagtccggtggccagcgccagaagctcgccaccacctgcttggccgccgccctgcgttaccagctcggtggcgccgatggccagctgcccagctacgccgcggtggtcctcgacgaagccttcgacaaggccgacaacgagttcaccgcgctggcgatgaacatcttcgacaacttcggtttccagatggtggtcgccaccccgctgaaatcggtgatgacgctggagccgttcatcggcggcgcctgcttcgtggaaatcagcggccgccacgattccggtgtcctgctgatcgaatacgacgaagagggcaagcgcctcaagctgcccgaacgcagccgccagcaggccaacgaacccgagcccgcggacgcctga

SEQ ID NO: 48063 - DNA, 1470 bp, Stenotrophomonas pavanii
atgaagcatcgcgaacgcatctcccgttaccgccatctgcgcgaacagccccagtggaagctgcttgccgccgaccacgctccggaaatcatcggcctgctgcagggcctgttgatggatggcgagcgcacgctgccctcctcggtgctcaacgagcgcctgcaacgggcgctggaccagctcaatggcgatgaactgtcgcgcgagctgccacgtaccgcgcaggcctacatcgcgcactggctggcgcagggctggctggagcgccgcctgcccgaaggcgccgaccaggaacagtacgagctgtcgaccgcagcgctgcaggcgatccgcttcgccgacggcctcgagcaggcccgcgtggccgccaccgagagccgcctggcactggtcatcgagcagctctcgcagctggccgcgcagaccgagtccgaccccgacgcccgcctgtcggcgctgcgcgacgagcgcgaccgcatcgatgccgagatcgcccgcgtcggcgccggccgcgtcaccgcgctggacggcaagcgcgcgctggaacgtgcgcgccagatcatcggcctggccgacgagctgaccgaggatttccgtcgcgtgcgcgacgacttcgagcagctcaaccgcgagttccgcgaacgcatcatcgacgacgaaggcgagcgcggcgacgtgctgtcacagctgttcgaaggcgtggatgtgatcggcgaaagcgatgccgggcgcagtttccaggccttctggcgcctgctcaacgatgccgagcagagcgcccagctcgatgccgccctggaagcagtgctggcgcgtggcttcgcccgccgcctggaccgcaacgaacgtaacttcctgcgcggcttcaccagcaccatgcttgagcgtggcggccaggtacacgatgtgctgcagaacttcgcgcgcagcctgcgcggtttcgtgcagagccgtggctatctggaacagcgccgccttaaccagctgctgaagcaggcgcagtccgaggcgctggcactgcgtgacgagttccccgcacaacgcggcatcggccgtgacctgcagctgaccaccagccgcctgcgctcgtggtcgcaatggaagctgcacgatccgcgcagcgcccaggtcgatggcaacgtcgagtacaacgatgccgctgcgatcagcctggaaagcgtcggcgatctggtcgcttcgtccgaaatcgacttccgtaccctgcgccgcgacctgcacgacctgctcgacgcacagccgcggctcagcatcgcccaggccctgtcgcagcgcgaagcgccgcagggcctcggcagcgtcatcggctacctgtcgctgggcacgcgttttggcaacgtggttgccggcgagcaggagcttgcgcaatggcgaggcggcgacggccagatccgtcgcgcccgcatcccgctggtttggttcacccaggagagacgccatgagctggcatga

SEQ ID NO: 48064 - DNA, 702 bp, Stenotrophomonas pavanii
atgagctggcatgaagatcccatcgaagcaccgcaggccgagggggcggaagacgcctacgacgccgaaccggtggcgaccgtggcgcagccccgccgtggcaacgacgtgtactacctgggcgacaccgggcgcctgccgctggatgcgcgccgcgcgctgtgccagctgctgatcggccccagcatcgaccagctgcgccaccccaagctgtggcccgcgctgatccgcagcgaagcggccatccgctcatcgctggcggacctgttcctggaactggtgctcgaccgcgacagcggcgtggcgttcacccgccaggccgataccgaagacgtggatgcgccggtgctgctgcgcacctcgccgctgaccttcatcgactcggtgctgctgctgtacctgcgccagcagctggccgaggccgatgcgcgcggcaaccgcgcggtggtggccgacgccgagatggccgaagcgctggccatctacgagaagaacctgtccaccgaccgcgccggtttcaaccgccgcgttgcatcggcggtgcagaagatgaaggacaaccacatcctgacccgcctcagcggccaggacgaccgccacgaagtctcgccggcgctgaagctgctgttctccgccgaagacgtgtcccagctttcggcggtctaccgccagctgcgcgaaaccccggccgccgaggcctga

SEQ ID NO: 48065 - DNA, 3381 bp, Stenotrophomonas pavanii
atggctatctccaagcacactcccgccctgttcaacgaaggcctgccggacccgcgcctgcagcagttccgcatgcgccgcctgcaggtgcacaactggggcaccttcaacggcctgaccgaagtgccgatcgccgagcgcggcttcctgttcgtcggccgctccggctcgggcaagtcgaccctgctcgatgccatgtccgcgctgctgacgccgccggccatcgtcgacttcaacgccgctgcgcgtgaagccgagcgcagtggccgcgaccgcaacctggtgtcctacgtgcgtggcgcctgggccgaccagcaggacagcggcaccggcgagatcgccacccagtacctgcgcaagggtgccacctggaccgcactggtgctggaataccgcgccggcgatggccgcgtggtcagcctggtgcgcctgctgtggatctccggcaacggcacctcggccggcgatgtgcgcaagcactacatgatcgccgaacgtccgttcgacatcgccaaggatctcggtggcttcgacctggacctgcgcaagctcaagcagaagctgcccgacctgcaccacttcgacaccttctccggttacgccgagcgcttccgcgacctgctcggcatcgacaacgagatggcgctgcgcctgctgcacaagacgcagtcggcgaagaacctgggcgacctgaacgtcttcctgcgcgacttcatgctcgacacgccgaagaccttcgacgccgccgagcgcctggtcagcgacttcgccgagctcgatggcgcgcaccaggcggtggtcaccgcccgccgccaggtcgaaaccctgctgccggcgcgtgcctactacaacgacctgaaggaaatgcaccgccgtcgcggcgacgacgaagcgctgaagctgggtgtcgacagcttccgcgaaagccgccgccaggcgctgatcgaagcgcgcctgcgcgagatggatgtacgtgatcgcggcctgctgggcgaagaagcccagcgccgcgcggcgctcgacaaccacaccgaacggctggccgagctggaactgcagcgccgccagcagggcggcgaacgcatcgaggaactggaacgcgagcagggccgtgcggaagcggagcgcgatcgccgccaggccaagcgcgagcaggcaagcctggccgcgcagcagctgggggctgaactgccggacgacgcacacggcttcgccgagcttgtcgagcgtgcgcagaacgaactgcaggaccgccagcgtgcctcttcggcgctggacgatgcgatcagcgatcgcctgggtggcaagcgcgatgacgagcgccgtttcggcgaagtccgtgcggaactcgaagcgatgcagcgcacgccctccaacatcccggcaccgatgcagaagctgcgcgcgcgcctggccgaggaaaccggcattgccgaggcggcgctgccgttcgtcggcgagctgatccaggtccgctcggaagagcagggctggcagggtgccatcgagcgcgtgctgggcggcttcgcgctgtcgctgctggtcgatgacaagcactacaacgaggttgccgagtgggtgaatcgcactcaccttggcatgcgcttcacgtactaccgtgtccgccgcaacgatgaagcgttcgcacgcgagccgtcggcgaagtcgctgctgcacaagctggagctgcgcgagcacgtgttcgaaagctggctgcgccgcgagctggggaagcgtttcgactacgagtgcgtggatgcgaagcagctgcgcaacgtcgaccgcggcattacccgcgaaggccaggtcaagcatccgggtgaccgcttcgaaaaggacgaccgcagcgcggtgggcgaccgccggcgctggatcctcggcttcaacaaccacgacaaggtcggcgccttcgagcgcgaagcccaggaactcgccaaacgtatcgccagctgcgagaccgatatcgcgcgcctgcgcggccagcgggaccgcgacaacgaacgccgcctggcctgccacgagctggtcagcatcagctggaacgagatcgacgtcgccgcaccccagcagcgcctgaccgatatcgaggccaccctgcgcgacctgcgcgaaggcaacgccgatcttgccaggctggccaagcagatcgacgccgtgcgcgccgacatcgagcaggcccgccgcacgtacgaagacgtccgcgtcgagcgtggccagctggtcagggagcgcgatcgcctcgaccgcgcacgccagcagagccgtgcgctggtgctgccgaccctggcccaggagcaggaggccggcctcgccgagcgcctgcaggagcagggcccgctcagcctggaaacgctcgaagcgcacatgcgccaggtcagcaacgcgctgaacgagcagctgtcgtcctcgcagcaggacctcaaccgcatcgagaaccagctgatcggctgcttccgccgcttcatccagcagtggccggaggaatcgggcgacttcaccgcatcggtggcttcggccgaggacttcctcgcccgcctcgagcggctggagcgcgatggcctgccgcagcacgaggagcgcttcttcgatctgctgcagaaccagagcaagaacaacctgctggccctgcagcgccacagcgcagaggcacgcaagtcgatcggccagcgcctggatgaagtgaacgccagcctggaacaggtaccgttcaaccgcggcacgctgctgaccatcgaactgagcgaccgccgcctgccggaagtggccgagttccatcagcagctgcgcgaggtgctgtcgcagcagcagaccgagcagcgcgagctggccgaatcgcagttcaccgtgctgcgccagctggtcaaccgcctgggctcgcaggaaggcgaggacaagcgctggcgcgaactggtgctggacgtgcgcatgcacgtggaattcattggcgtcgagctggatgcggaaacgcgccagcaggtcgagatctaccgcagcggcgcgggcaagtccggtggccagcgccagaagctggccaccacctgcctggccgcggcgctgcgctaccagctcggcggtgccgacagccagctgcccagctatgccgccgtggtgctcgacgaagccttcgacaaggccgacaacgagttcaccgcactggcgatgaacatcttcgacaacttcggcttccagatggtggtcgcgaccccgctgaagtcggtgatgacgctggaaccgttcatcggcggcgcctgctttgtcgagatcagcggccgccacgactccggcgtgctgttgatcgagtacgacgaagaaggcaagcgcctgaagctgcccgagcgcagccgccagcaggccaacgaaccggaagaagccgaggcctga

SEQ ID NO: 48066 - DNA, 1461 bp, Stenotrophomonas maltophilia
ttgaccaccacatcccccgcgacattcccgtccctgttttcggtggtgccggccggcattttcggtccgctggcctcggccaaccgccagaactactgggcgctgctgtgccggctgttcgacgagttcttcggcccggatgcgccagtgccgcccagccacggttttccgcgccgcgagatcaccgcggcgatcgagcgctacctgctgaccgacgatccctgggaggacgaggacggacaggcgccggacgcgccgctgaacgtgcgggccgcggcgatccacgaccgcttccgcgatgccggctggctgcgccaggagcgcatcggtgcgcgcgagatggtgagcatgccgcgcatggtggccgagctgctgtcggccctggtggagttctgcgaacaggggccgaccttcgtccgcgccaagatgggctcgatcgaatcccagctgcagaaggtgaccgacggccatgccgacggcggcattctcgacgaggccgccgaccaggcgcggcgcctgctggtgtcgctggcctcgatgagcctgcaggtgcgcgacctgatgccggagctgagcagggccgagaccaccgcacagttcgcccggcagtggttcgagcgctatgtcggccagctgttcattggcgactacgccgagctccaccgtgccgaccatccgatggcgcggcgcagctcgatcctggcgatggtgcagcagctggaggccggcgcgcagcgcgaggcgctggtggcgtggtaccgcgaccacctcactggtggcgatgaagcgcgcgcgcagcagcgcctgtcacgcagtctggggcgcctgcgcgagctggagcggatcgacgaatacctgacccggctggacgaggatatccgccaggccaaccgccgcgcgctggcctttctcgactaccgcctgcgtgcgcccgacaagcttgacgtgctgctgcgccgcgcctgccgtggcgtgctgtccgcgccggaggaggtgctgcgcctgccggtggcgcccggtccgttgatggacgaaagccgcctgcgtccgccgcaccgcaaaccggtgccgattccgcgcagcgccaacgtcaccgcgccgcccacgcccgagcagctggcgcggctgtcgctgctgcggcggatgaagcgcgcgcggctggtcaacgccgaggacatggcgcgctatgtcggtcgccatctgcaacgcgccgcggtgctcgactcggacgcgctggatatcgccagcatcgaggacctgcgcgcctaccagaccctgctcacgctggccctgcgtggcaaccgcatcggcggtctgcgccgcgaggacccgctcggccgggtgctgcgcggcttccgcgtcgaactgctcgctaccggcgataccgacaccaacaattacctgcgcggcccgcgcttccgcatcgtgcgggtcggcgccaaacttccggaaaccgcatga

SEQ ID NO: 48067 - DNA, 624 bp, Stenotrophomonas maltophilia
atgaaacgcagctggaacaccctgagccagatgtccaacggcacctacacggtgcaggacttcgagcgcgccgcctatcgtctggccaccgagcaggtgctgtacgcggccgacacgcgcacccgcgtggcctaccacctggtcgaagaccactaccccgatttcgtcgccgcccttgagccgctgggcatccgcctggaacgcaacgcgcattaccgctacgtggtggcgctgccggtgcatggcgaaggcacgccggtgacgctggatgaaacactggccctgctggtactgcgccagcggtacgacgaagccatgcgccagggcctgatcgaggatcacggcgaggtggtggtggaactgcccgagctgcaggaaagctggcaggcgctgaccggccgggcgatgcccgacaccggcacgctgcgcgccctggcacgcaccctcaaacgctggggcgtatgccggctggtggaatcggaaggcgatgatccgcagccgttccacctgcgtacgcgtccggcgatcgtggagatcgtcggcgagcagtggctgcagcggctggaccagcacaatcgcgacgatgacggcgtggagacggaggacgacgatgcagcagcttga

SEQ ID NO: 48068 - DNA, 3432 bp, Stenotrophomonas maltophilia
atgcagcagcttgaacgcatccacctggtccagttcttcctgttcgaagcgcagagcctgcagctggatgccaccagcgcgatcatcgcgcccaacggcgccggcaagagcgcgctgctggatgcgttgcagatcgtgctgctcggcggcgaccgcagccgtatccgcttcaacgcccaggccgggggcagccaccgcgcgcgcaccatccgcgactattgcctgggcgtgttccgcaccggcgaggaaggccgcaagcggcgcaccgccacgacctacatctcgctggtgttccgtgacaccgcaagcggtgagccgctgaccgccggcatcgcgctgggtgcttcggtcgatgagcccgagcaccgggtgcatggcctgtacctgctgccgggtgtggcgctggagctggacgagcatctggaacgggtcaatggcaaggagctgccgctggcgtggaacaccttccgcgagcacgtcacccgtcgttgcaaggaggccggtgaaaccccgcagctgcatcccaatgccgaacgtttcctgcgcgacctgctgctgcggctgcgggccggcccgtcggtcactccggatctgaacgcctaccgcaaggcgttcctcaatgcgctgaacctgcagcgcgtggaggacgtggacctgttcgtgcgcacgctggtggccgaggaccggcccaccgacatcgcccgtttccgcgcgctgctggagagcttccgcctgatcaaggagaagatcgagcaggtcaagcagcgcatcgacgcggccgaaggcgtggagcggcagtacgagaagatcgccggccaggccacgcgcgccgcgtcggcgcgggcgctggcggccgaatacgcgcgcgacctgtacagcgagcagctggaccaggccgaaggcgcgctggccgaggcggagaacacgctcgtcgatacccgccgtcagctggccgatacccgggtcgaacgcgacaccctgcgcgaggagcaggcccgtgccaacgcgcgtctgcagggcagcgagggctacggtgagcaggcccagctggacgaactgtccggccgcgaccgcgaccgtctggcgcagctgaagaaagacctggcacgtgagctggcattcgccggtgagcagttccgccagcttgacgcgctcgcgctggagggggtcgacagcgacgcattcgcccgcgtgcgcggtcagtgggagcagtggcacaccgagttgctggcgctgtcggccgaggctgcgttgccgtggacgccggaagaactgtatgcacaggcgcggcaggcgctgcgcgcggccgcgccgctgcgtgagcaggtcgatcgccacgcccgccagttgcacggtgcccacgacaaggcccgcgaggcgctggaaaccgcgcggcagaaccagaagcggctggcggccggccaggccgagctcaatcccgaaaccgtgcggctgatgagctatctgcgcgacgccggcatcgatgcgcgcccggtgtgcgatctggtgcgggtcagcgacggcgcctggcagtacgccatcgagggttacctgcgcagcaatgtcgaggcgctgctgattcccgaccaggacgaggagcgcgcggtcaagctgtatcgcgggctgtccggcgggcgtgcggtctatggcgtgaagctggcgctgtccagccaggcacgcaattcgcggggggccgaaacgccgtccgccggcagcgtcgcggcgctgttggaaggcgtcaacgccgatgcactggcgttcctgcgccggcagctgggcgaactgcgctgcgtggagaccgaagccgagctggtgcgcagccgccagggcctgacccgtgacggcctgctctcgcgcggtggcagcatcgaacgtctgcgtttgccggcggccaccgacctgcgcatcggcgcgtcggacaaccgcgcgcggttgcgggtgctgcacgaggaaatcgagcgggccgagcaggaattgcggcagatcgagccgcggctgcgtcgtgccgatgactgccagcgcgggctggcgcgcttggccgatgccgacgcggtggcgcaggccctgcacgagcgcgtgctggagcaccgtcaggtcgccgagcgctaccgcagtgcgcaggaaacccggcgtgccgcgctcgacccggatctgctgcatctgtccgagcagttgcgggagctgaccgcgcaactgggccaatgtgaacagcgcgccgatgcgctggtcggcaaggaagcggtggcggcgtcgcagctggagcgcacccgcggcttgctggagggcctgcgccagcaggaggagctggtggtgcgtcgcgcggtggacgccttcgctgatccggacgtagacccgaaccgggtcgagcggcagcgcgaggagctggacgagaagtatccgtcgctggaagagcgggcccgccggtgcgaggagcgcgccagggacagcgatacgcaactggcacggctgctgcccgaggcctggagcggactggcgcagtacgcgcgcgatcacgcgctggagctggagttcgatgccagcgcctggcggcctgcgcgcggcctgctgcagcgtgagctcacccagctgcgcgacaccgaactggtgcagtacgaagccgaggcgcagcaggcctacgccacggcggtggacaccttccgcaccggcgtggcctccacgctgtatgacaacttcacccggctcaagacccagatcgccaccctcaaccgcaccctgcgcagcagtccggcgttctccaacaacgagcgctaccagttccactacgaagtggtgccggagttccgcgagttgcatcgcttcatccagcgggccgccgatatcggcggcgaggacaccctgtttgaaagtgccgggcaggtgcccgaggcgttccgcgcgctggtcgaggacaaggccgcggcacatgtggccaattcgccgctggacgactatcgccgcttcttccgcttcgaggtacagatccgccaggaggaccgtgtgatcggcagcctgagcgagcgcatgcgctcgggctccgggggtgagcatcgggcgccgctgtacgtgatcgccggcgccgccctggcggcggcctacggcaagagcgaggcccagcccggcgggctgggattgatcctgctggacgagttcggcgacaagatcgacgcccagaacgcgcgcgcgatcaccggctacctgcgctcgctgggcctgcagctggtgctggccgcgccggataccgcgcagggcacactgtccggtgtgctcgacagctacatcgagctgttccgcgacggcgagctgctgcaggccgaacggatcgaagtcaccgaagcggcgcgcacgctgctgttgtccgaccagttcgacctgcatccggaactgctcgccgcagagaccgagcgcatcgcgcgcgagcaggcgacggtgtga

SEQ ID NO: 48069 - DNA, 1251 bp, Stenotrophomonas maltophilia
gtgagccagatgccgggcggcggacaggacacgccggcccggcgcgtcctggaacgtctgctgcggcgcgccgaggcggccgcgctggccggtgacccgcagccggccagcttgtcgatgaccggcaagcgcgatgctgccgagtaccgcgcgctgcgcgggatggctgatttcgacgcgttccacggccgcatcgcgttggccgagcggtgcggcgcgatcacagtcgaacgtgatcgccaccgcgacgacggcgagcgcctgttgcggctgggcgtgcgcgatgccgctgcgctggcgcatgacctcgggggtgagctgctgcacgaacgggtggtgcgggccgaggcgttgctggccccttggcaggcctcggcgccggtactcgcccgggtcctggcggcgtggcgcggcggcggcaaggtgcgtgggaagggtccggatgcggccgttgatctggctgcggccgcgcaggcggtggacaccctgctggccgctgcgcgcagcgaccagatcctgcgcaaggccagcacccgcctgtttggcgacagcaagcggctggaggcgctgacgccgtggctggatctgctggtcaccggtgagctgttgcccagcggtctggagaacggggagatctgggcggcgttgggtttgcgcaaggagccgcagccattgctgctggccgggccgggggtgatcacgctggacgatggcagtggccatgtactgccgcagcgctggctgggatttccggtggatgccataggcggtatcaccaccggtgcccgtgcgctgctgagcatcgagaacctggccagcttccacgaagcggccagcgcgcgcggccaggcgccggtgctgctgttgtacaccggcgggatgccgtcgccggcctggcggcaggcctatgtccgcctgctggccggattgccggatgacgcggcggtgtatcactggggcgatatcgaccggggcggcttccgcattgcagccagactggcggaggtggcctcggacggcggacgccggctgcggccctggctgatggcaccggacacgttgccggcggagtgcagggctgctggccaatgccccgcgccggcggtgctggccacgatgtgcgagtgggcgcaccgtgcgggctggcccgaggtggcggccgggctgcagcgcacgccgctgctgctggagcaggaacgcctgcccccgcgcctgccgtggcccgacggcgcgggaatgaacccggagtaa

SEQ ID NO: 48070 - DNA, 1449 bp, Stenotrophomonas acidaminiphila
atcgccacgaccaccccgccgctgttctcggtcgtacccgccggcatcttcggcccgctggcctcggccaaccgccagaactactggtcgctgctgtgccggatgttcgacgagttcttcggcccggacgcgccggtgccgcccagccacggctttccgcgccgcgagatcaccgccgcgatcgagcgctacctgctcaccgacgacccgtgggaagacgaggacggccaggccccggacgcgccgctgaacatgcgtgccggcgccatccacgaccgcttccgcgccgccggctggctgcgccaggaacgcatcggcgcgcgcgagatggtgaccatgccgccgatggtggcgcagctgctgtccaccctggtggagttcagcgagcatggcccgaccttcgtctcggccaagatgcgttcggtggagctgcagctgcagcaggtcgccgaaggccgcctggatggcggcatcctcgacgaggccgccgaccaggcgcggcgcctgctggtgtcgctggcctcgatgagcctgcaggtacgcgacctgatgccggaactgagcaaggccgagaccaccgcgcagttcgcccggcagtggttcgagcgctacgtcggccagctgttcatcggcgactacgccgagttgcaccgcgccgaccacccgatggcgcggcgcagctcgatcctggcgatggtgcagcagctcgagtccggcgcgcagcgcgaagcgctggtggcctggtacggcgagcacgtgaccggtggcgacgccgcgcgcgcccagcagcggctgtcgcgcagcctggggcggctgcgcgagctggaacgcatcgacgaatacctggcccgcctggacgaggacatccgccaggccaaccgccgcgcgctggcattcctcgactaccgcctgcgcgcacccgaccggctcgacgtgctgctgcgccgcgcctgccgcggcgtgctgtcggcgccggaggacgcgctgcggctgccggtggcgccggggccgctgatggacgaggcgcgcctgcgcccgccgcaccgcaagccggcgccgattccgcgcagcgccaacgccaccacgccgccgacccccgagcagctggcgcggctgtcgctgctgcggcggatgaagcgcgcgcgcctggtcaacgccgaggacatggcgcgctacgtcggccgccacctgcagcagggcgcggcgatcgactcggcacggctggacatcgccagcatcgaggacctgcgcgcctaccagaccctgctcacgctcgccctgcgcggcaaccgcagcggcggcctgcgccgcgaggatccgctcggccggctgctgcgcggcttccgcgtcgagctgctcgatgccggcgatggcgacgacaacgattacctgcgcggcccgcgcttccgcatcctgcgggtcggcgcaaaactcccggaaaccgcatga

SEQ ID NO: 48071 - DNA, 627 bp, Stenotrophomonas acidaminiphila
atgaaacgcagctggaacaccctgagccagatgtccaacggcacctacgccgtgcaggacttcgagcgcgccgcctaccgcctggtcaccgagcaggtgctgtacgccgccgacacgcgttcgcgcgtggcctaccacctggtggaagaccattaccccgatttcgtcgccgcgctggagccgctgggcatccgcctggagcgcaacgcccactaccgctacgtggtggcgctgccggcgcatggcgaaggtacgccggtgacgctggacgaaaccctggccctgctggtgctgcgccagcgctacgacgaggccatgcgccagggcctgatcgaggaccacggcgaagtggtggtggaactgccggacctgcaggaaagctggcaggcgctgaccggccgcgcgatgccggacgtgggcgcgctgcgcgcgctggcgcgcacgctcaggcgctggggcgtgtgccggctggtggagtccgaaggcgacgacccgcagccgttccacctgcgcgtgcgcccggccatcgtcgagatcgtcggcgagcaatggctgcagcgcctggaccagcacaaccgcgacgaggcgggcgacgcgggcgtggaggacgacgatgcagcagcttga

SEQ ID NO: 48072 - DNA, 3432 bp, Stenotrophomonas acidaminiphila
atgcagcagcttgaacgcatccacctggtccagttcttcctgttcgaggcgcagagcctgcagctggacgcgaccagcgccatcatcgcgcccaacggcgccggaaagagcgcgctgctcgacgccctgcagatcgtcctgctgggcggcgaccgcagccgcatccgcttcaacgcgcaggccggcggcagccaccgcgcgcgcaccatccgcgactactgcctgggcgtgttccgcagcggcgaggaagggcgcaagcggcgcaccgccaccacctacatctcgctggtgttccgcgacaccgagaccggcgtgccgctgaccgccggcatcgcgctcggcgcctcggtcgatgaacccgaacaccgcacgcacgggctgtacctgctgcccggggtggcgctggagctggacgaacacctggagcaggtcaagggcaaggaactgccgttggcctggaacactttccgcgagcacatcgcccgccgctgcaaggacgcaggcgaaacgccgcagctgcatcccaatgccgagcggttcctgcgcgacctgctgctgcgcctgcgcgccagcccggcggccaaccccgacctcaatgcctaccgcaaggccttcctcaacgcgctgaacctgcagcgcgtcgaggacgtggacctgttcgtgcgtaccctggtggccgaggaccggcccaccgacatcgcccgcttccgcgcgctgctggacagcttccgccagatcaaggagaagatcgagcaggtccgccagcgcatcgacgccgccgaaggcgccgagcgccagtacgagaagatcgccgcgcaggccacccgcgccgcctcggcgcgcgcactggccgccgagtacgcccgcgacctgtacagcgagcaactggaccaggccgaaggcgcgctcgccgccgcggagaacacgctggccgatacccgccgccgccttgccgatacccgtgtcgaacgcgacaccctgcgcgaggaacaggcccgcgccaacgcacgcctgcagggcagtgccggctacggcgagcaggcgcagctggacgaactggccggccgcgaccgcgaccgccttgcccagctgaagaaggacctggtgcgcgaagtcggcttcgtgcgcgagcagttccgccagctcgatgcgctcgcgctcgacgacgtcgacagcaccgcgctggccgccgcgcgcgaagcgtgggatgtctggcacgccgaactgtcggcgctggccgccgaggacgcgctgccctgggctccgcaagacctgttcgcgcgcgcccgccaggcgctgcatgcggccgcgccgctgcgcgagcgtgtcgaccgccatgcgcgccagctgcatgccgcgcacgacaaggcgcgcgatgcgctggaaaccgcgcgccagaaccagaagcggctggctgccggccaggccgagctgaacccggataccgtgcggttgatgagctacctgcgcgatgccggcatcgacgcgcgcccggtgtgcgacctggtgcgggtcaccgacgcgacctggcagcacgccatcgaggggtacctgcgcagcaacgtcgaggcgctgctgatcccggacaaggacgaggaacgcgcggtcaagctgtaccgtggcctgtccggcgggcgctcggtgtatggcgtcaagctggcactgtccagccatgcacgcaggtcgcgtggcgccgacgagccggagagcggcagcgtcgccgcgcttctggaaggcgtcaatgccgacgcattggcattcctgcgccgccagctcggcgagctgcgctgcgtggagaccgaggccgaactggtgcgcagccgccagggcctgacccgcgacggcctgctcgcgcgcggcggcagcatcgaacgcctgcgcctgccggccgcgggcgacctgcgcatcggcgcgtccgacaaccgcgcacggctgcgggtgctgcacgaggaaatcgagaaggccgaacaggcgctgcgccagatcgaaccgcgcctgcgccgggccgacgactgccagcgcgggctggcacggctggccgatgccgacgccgtcgcccaggcgctgcacgagcgcgtgctcgagcatcgccaggtggccgagcgttaccgcagtgcgcaggaaagccggctggcggcgctggacccggacctgctgcgcctgtccgaacagctgcgcgaactgaatgcccagctcgccggctgcgagcagcgcgccgatgcgctggtcggccaggaggccgtggcggcggccaatctcgaacgcacccatggcctgctcgagggcctgcgccagcaggaggagctggtcgcgcggcgcgcggtggaagccttcgccgatccggacgtcgaccccaaccgggtcgagcgccagcgtgaggaactggacgaaaagcacccgtcgctggaagagcgcgcacgccgctgcgaggagcgtgccagggacagcgacgcgcagctggcgcggttgctgccggaggcctggagcggactggcgcagtacgcccgcgaccatgggctggaactggatttcgatgccagcgcctggcgcccggcgcgcatcgtgctgcagcgcgaactcacccagctgcgcgacaccgagctggtgcagtacgaggaggaggcgcgccaggcctatgccaccgcggtggacaccttccgcaccggcgtggcgtccaccctgtacgacaacttcacccggctcaggacccagatcgccacgctcaaccgcaccctgcgcgccagtccggcgttttccaacaacgagcgctaccagttccactacgaggtggtgccggagttccgcgacctgcaccgcttcatccagcgcgccgccgacatcggtggcgaggacacgctgttcgagagcgccggccaggtgcccgaggcgttccgtgcgctggtcgaggacaaggccgccacccacgtggccaattcgccgctggacgactaccgccgcttcttccgcttcgaggtgcagatccgccaggaggaccgggtgatcggcagcctcagcgaacgcatgcgctcgggctccggtggcgaacaccgcgcgccgctgtatgtgatcgccggtgccgcgctggccgcggcctacggcaagagcgaggcgcagccgggcgggctggggctgatcctgctcgacgagttcggcgacaagatcgacgcgcagaacgcacgcgccaccaccaactacctgcgctcgctgggcctgcagctggtgctggcggcgccggataccgcccagggcaccttgtccggcgtgctggacagctacatcgaactgttccgcgacggcgacctgctgcaggccgagcgcatcgaggtcaccgaggccgcacgtaccctgctgctgtccgaccagttcgacctgcacccggaactgctggcggcggagaccgagcgcatcgagcgcgagcaggcgacgtcatga

SEQ ID NO: 48073 - DNA, 1470 bp, Stenotrophomonas maltophilia
atgaagcatcgcgaacgcattgcccgttaccgccacctgcgcgaacagccccagtggaagctgcttgccgccgaccacgccccggaaatcatcggcctgttgcagggcctgctgatggacggcgagcgcacgttgccttcgtcggtgctcaacgagcgcctgcagcgcgcgctggaccagctggccggcgatgaactctcgcgcgagctgccgcgtaccgcgcaggcctacatcgcgcactggctggcccagggctggctggaacgccgtttgcccgaaggcgccgaccaggagcagtacgagctgtccaccgccgcactgcaggcgatccgcttcgccgacggcctcgagcaggcccgcgtggccgccaccgaaagccgcctggcgctggtcattgaacagctctcggcgctggctgcgcagaccgaagccgatcctgatgcgcgcctgtccgcgctgcacgacgagcgcgaccgcatcgatgccgaaatcgcccgggtcggcactggccgcgtggttgcgctggacggcaagcgcgcgctggaacgcacccgccagatcatcggcctggccgacgagctgaccgaggacttccgccgtgtgcgcgatgacttcgagcagctcaatcgcgatttccgcgaacgcatcatcgacgacgagggcgagcgcggcgatgtgttgtcgcagctgttcgaaggtgtggacgtcatcggcgagagcgatgccgggcgcagtttccaggcgttctggcgcctgctcaacgacgccgagcagagcgcccagctcgatgccgcgctggaagcggtgctggcgcgtggctttgcgcgccgcctggaccgcaacgaacgcaacttcctgcgcagcttcaccagcaccatgctcgaacgcggtggccaggtgcatgacgtgctgcagaacttcgcgcgcagcctgcgcggcttcgtgcagagccgtggctacctggaacagcgtcgcctcaaccagctgctgaagcaggcgcagtccgaagcactggctctgcgcgacgaattccccgcacagcgtggcatcggccgtgacctgcagttgaccaccagccgcctgcgctcgtggtcgcagtggaggctgcacgatccgcgcagtgcccaggtcgatggcaatgtcgagtacaacgacgccgcggccatcagcctggaaagcgtcggtgatctggtcgcttcgtccgaaatcgatttccgtaccctgcgccgcgacctgcacgacctgctcgatgcacagccgcggctcagcatcgcccaggccctgtcgcagcgcgaagcgccgcagggcctcggcagcgtcatcggctacctgtcgctgggcacgcgcttcggcaacgtggttgccggcgagcaggagcttgcgcaatggcgtggtggcgacggccagatccgtcgcgcccgcatcccgctggtttggttcactcaggagagacgccatgagctggcatga

SEQ ID NO: 48074 - DNA, 702 bp, Stenotrophomonas maltophilia
atgagctggcatgaagatcccatcgacgcaccgcaggccgacgtggcggaagacgcctacgaggccgagccggtggcggccgtggcgcagccccgccgtggcaacgacgtgtattacctcggcgataccgggcgcctgccgctggatgcgcgccgcgcgctgtgccagctgctgatcggccccagcatcgaccagctgcgtcacgccaaactgtggccggcgctgatccgcagcgaggcggccatccgctcgtcgctggcggacctgttcctggaactggtgctcgatcgtgacagcggcgtggcgttcacccgccaggccgataccgaagacgttgatgcgccggtgctgctgcgcacctcgccgctgaccttcatcgactcggtgctgctgctgtaccttcgccagcagctggccgaggccgatgcgcgcggcaaccgcgcggtggtcgccgatgccgagatggccgaagcgttggccatctacgaaaagaacctgtccaccgaccgcgccggcttcaaccgccgtgtcgcttcggcggtgcagaagatgaaggacaaccacatcctgacccgcctcagcggccaggaagaccgccacgaagtctcgccggcgctgaagctgctgttctccgccgaagacgtgtcccagctctcggcggtctaccgccagctgcgcgaaaccccggccgccgaggcctga

SEQ ID NO: 48075 - DNA, 3381 bp, Stenotrophomonas maltophilia
atggctatctccaagcacactcccgccctgttcaacgaaggcctgccggacccacgcctgcagcagttccgcatgcgccgcctgcaggtgcacaactggggtaccttcaacggcctgaccgaagtaccgatcgccgagcgcggcttcctgttcgtcggccgttccggctcgggcaagtcgaccctgctcgatgccatgtccgcgctgctgacgccgccggccatcgtcgacttcaacgccgccgcgcgtgaagccgaacgcagtggccgcgaccgcaacctggtgtcctacgtgcgtggcgcgtgggccgaccagcaggacagcggcaccggcgaaatcgccacccagtacctgcgcaagggcgccacctggaccgcgctggtgctggaataccgcgccggcgatggccgcgtggtcagcctggtgcgcctgctgtggatctccggcaacggcacctcggctggcgatgtgcgcaagcactacatgatcgccgagcgcccgttcgacatcgccaaggatcttggtggtttcgacctggacctccgcaagctcaagcagaagctgtccgacctgcaccacttcgacaccttctccggttacgccgagcgcttccgcgacctgctcggcatcgacaacgagatggcgctgcgcctgctgcacaagacgcagtcggcgaagaacctgggcgacctcaatgtcttcctgcgcgacttcatgctcgacacgccgaagaccttcgacgccgccgagcgcctggtcagcgactttgccgagctcgatggcgcgcaccaggcggtggtcaccgcgcgccgccaggtggaaaccctgctgccggcacgcgcctactacaacgacctgaaggaaatgcatcgccagcgtggcgacgacgaagcgctgaagctcggcgtcgacagcttccgcgaaagccgccgccaggcgctgatcgaagcgcgcctgcgcgagatggacgtgcgtgaccgtggcctgcttggcgaagaagcccagcgccgtgctgcactcgacaaccacaccgagcgcctggccgagctggaactgcagcgccgccagcagggcggtgagcgcatcgaggaactggaacgcgagcagggccgtgctgaagccgagcgcgaccgccgccaggccaagcgcgagcaggcacgccaggccgcgcagcagctgcaggctgaactgccggacgacgcccacggcttcgccgagctggtcgagcgcgcgcagaacgaactgcaggaccgccagcgtgcctcttcggcgctggacgacgcgatcagtgatcgcctgggtggcaagcgcgatgacgagcgccgcttcggcgaagtccgtgcggaactcgaagcgatgcagcgcacgccgtccaacatcccggccccgatgcagaagctgcgcgcgcgcctggccgaggaaaccggcatcgccgaagcggcgctgccgttcgtcggcgagctgatccaggtccgctcggaagagcagggctggcaaggggccatcgagcgcgtgctgggcggcttcgcgttgtcgctgctggtcgatgacaagcactacaacgacgtcgccgagtgggtgaaccgtacccacctgggcatgcgcttcacctattaccgcgtgcgccgcaacgacgatgcgtttgcgcgcgagccgtcggcgaagtcgctgctgcacaagctggaactgcgcgagcacgtgtttgaaagctggctgcgccgcgaactcggcaagcgcttcgactacgagtgcgtggacgccaagcagctgcgcaacgttgaccgcggcatcacccgcgaaggccaggtcaagcatccgggcgaccgcttcgagaaggacgaccgcagtgcggtgggtgaccgccgtcgctggattctcggcttcaacaaccacgacaaggtcggcgccttcgagcgtgaagcacaggaactggccaagcgcatcgccggctgcgagaccgacatcgcgcgcctgcgtggccagcgtgatcgcgacaacgaacgccgcctggcctgccacgagctggtcagcatcagctggaacgagatcgatatcgccgccccgcagcagcgcctcagcgatatcgaagcgacgctgcgcgacctgcgcgaaggcaatgccgacctcgccaagctggccaagcagatcgatgcggtgcgcgcggacatcgaacagtcgcgccgcacctatgaagacgtgcgtgtcgagcgcggccagctggtcaaggagcgcgatcgccttgaccgcgcacgccagcagagccgtgcgctggtgctgccgagcctggcccaggagcaggaagccggcctcgccgagcgccttcaggagcagggcccgctcagcctggaaacgctggaagcgcacatgcgccaggtcagcaacgcgctgaacgagcagctgtcttcctcgcagcaggacctcaaccgcatcgagaaccagctgatcggctgcttccgtcgcttcatccagcagtggccggaggaatcgggcgacttcaccgtctcggtggcctcggccgaggacttcctcgcgcgcctcgagcgcctggaacgcgatggcctgccgcagcacgaagagcgcttcttcgacctgctgcagaaccagagcaagaacaacctgctggccctgcagcggcacagcgccgaggcccgcaagtcgatcggccagcgcctggacgaagtgaacgccagcctggaacaggtgccgttcaaccgaggcacgctgctgaccatcgaactgaacgaccgacgcctgccggaagtcggcgagttccacctgcagctgcgcgaagtgctgtcgcagcagcagaccgagcagcgcgagctggccgaatcgcagttcaccgtgctgcgccagctggtcaaccgcctgggctcgcaggaaggcgaggacaagcgttggcgcgagctggtgctggacgtgcgcatgcacgtggagttcatcggcgtcgagctggatgcggaaacgcgccagcaggtcgagatctaccgcagcggcgccggcaagtccggtggccagcgccagaagctggccacgacctgcctggcggccgcgctgcgctaccagctcggtggcgccgacagccagctgcccagctacgccgcagtggtgctcgacgaagccttcgacaaggccgataacgagttcaccgcgctggcgatgaacatcttcgacaacttcggcttccagatggtggtcgccacaccgctgaagtcggtgatgacgctggaaccgttcatcggcggcgcctgcttcgtcgagatcagcggccgccacgactccggcgtgctgctgatcgagtacgacgaagaaggcaagcgcctgaagctgcccgagcgcagccgccagcaggccaacgaaccggaagaagccgaggcctga

SEQ ID NO: 48076 - DNA, 1470 bp, Stenotrophomonas maltophilia
atgaagcaccgcgaacgcatctcccgttaccgccatctgcgcgaacagccccagtggaagctgctcgccgccgaccacgctccggaaatcatcggcctgctgcaggggctgctgatggacggcgagcgcacgctgccttcgtcggtgctcaacgagcgcctgcaacgcgcgctggaccagctcaacggcgatgaactgtcgcgcgagctgccgcgtaccgcgcaggcgtatatcgcacactggctggcccagggctggctggaacgacgcctgcccgacggtgccgaccaggagcagtacgagctgtcgaccgcggcactgcaggcgatccgattcgccgacggcctcgagcaggcccgtgtggccgccaccgaaagccgcctggcactggtcatcgagcagctgtcgcagctggccgcgcagaccgagtccgacccggatgcacgcctgtcagcactgcgcgacgagcgtgaccgcatcgacgccgagatcgcccgcgtcggcgccggccgcgtgatcgcgctggacggcaagcgcgcgctggaacgcgcacgccagatcatcggcctagccgacgaactgaccgaagacttccgccgcgtgcgcgacgacttcgagcagctcaaccgcgatttccgcgaacgcatcatcgacgatgagggcgagcgcggcgatgtgctgtcgcagctgttcgaaggcgtggacgtgatcggcgaaagcgatgccgggcgcagtttccaggcgttctggcggctgctcaacgatgccgagcagagcgcccagctcgatgccgccctggaagcggtgctggcgcgtggctttgcccgccgcctggaccgcaacgaacgcaacttcctgcgcggtttcaccagcaccatgctcgagcgcggtggccaggtgcacgacgtgctgcagaacttcgcgcgcagcctgcgcggcttcgtgcagagccgtggttatctggagcagcgacgcctcaaccagctgctgaagcaggcgcagtccgaagcgctggcactgcgtgatgaattccccgcgcaacgcggcatcggccgcgacctgcagctgaccaccagccgcctgcgctcgtggtcgcagtggaagctgcacgatccgcgcagcgcccaggtcgatggcaacgtcgagtacaacgatgctgcggccatcagcctggaaagcgtcggcgatctggtcgcctcgtctgaaatcgacttccgtaccctgcgccgcgacctgcacgacctgctcgatgcacagccgcggctcagcatcgcccaggccctgtcgcagcgcgaagcgccgcaggggctcggcagcgtcatcggctacctgtcgctgggcacgcgcttcggcaacgtggtcgccggcgagcaggagcttgcgcaatggcgtggtggcgacggccagatccgtcgtgcccgcatcccgctggtttggttcacccaggagagacgccatgagctggcatga

SEQ ID NO: 48077 - DNA, 702 bp, Stenotrophomonas maltophilia
atgagctggcatgaagatcccatcgacgcagcgcaggccgacgtggcagaagacgcctatgaggccgagccggtggcggccgtggcgcagccccgccgtggcaacgacgtgtattacctgggcgacaccgggcgcctgccgctggacgcgcgccgcgcgctgtgccagttgctgatcggccccagcatcgaccagctgcgccacgccaagctgtggccggcgctgatccgcagcgaggccgccatccgctcgtcgctggccgacctgttcctggaactggtgctggaccgtgacagcggcgtggcgttcacccgccaggccgataccgaagacgttgacgcgccggtgctgctgcgcacctcgccgctgaccttcatcgactcggtgctgctgctgtacctgcgccagcagctggccgaggccgatgcgcgcggcaaccgcgcggtggtcgccgacgccgagatggccgaggcgctggccatctatgagaagaacctgtccaccgaccgcgccggcttcaatcgccgtgtcgcttcggcggtgcagaagatgaaggacaaccacatcctgacccgcctcagcggccaggaagaccgccacgaagtctcgccggcgctgaagctgctgttctccgccgaagacgtgtcccagctttcggcggtctaccgccagctgcgtgaaaccccggccgccgaggcctga

SEQ ID NO: 48078 - DNA, 3381 bp, Stenotrophomonas maltophilia
atggctatctccaagcacactcccgccctgttcaacgaaggcctgccggacccgcgcctgcagcagttccgcatgcgccgcctgcaggtgcacaactggggcaccttcaacggcctgaccgaggtgccgatcgccgagcgcggcttcctgttcgtcggccgctccggctcgggcaagtcgaccctgctcgatgccatgtccgcactgctgacgccgccggccatcgtcgacttcaacgccgccgcgcgtgaagccgagcgcagtggccgcgaccgcaacctggtgtcctacgtgcgtggcgcgtgggccgaccagcaggacagcggcaccggcgaaatcgccacccagtacctgcgcaagggcgcgacctggaccgcactggtgctggaataccgcgccggcgatggccgcgtggtcagcctggtgcgcctgctgtggatctccggcaacggcacctcggccggtgatgtgcgcaagcactacatgatcgccgagcgtccgttcgacatcgccaaggatctcggcggcttcgacctggacctgcgcaagctcaagcagaagctggccgacctgcaccacttcgacaccttctccggctacgccgagcgcttccgcgacctgctcggcatcgacaacgagatggcgctgcgcctgctgcacaagacgcagtcggccaagaacctgggcgacctcaacgtcttcctgcgcgacttcatgctcgacacgccgaagactttcgacgccgccgagcgcctggtcagcgacttcgccgagctcgatggcgcgcaccaggctgtggttaccgcccgccgccaggtggaaaccctgttgccggcacgcgcctactacaacgatctgaaggaaatgcaccgccagcgcggcgacgacgaagcgctgaagctcggcgtcgacagcttccgcgaaagccgccgccaggcgctgatcgaagcgcgcctgcgcgagatggacgtgcgtgaccgtggcctgctcggcgaagaagcccagcgccgtgccgcactcgacaaccacaccgaacgcctggccgaactggaactgcagcgtcgccagcagggcggtgagcgcatcgaggaactggagcgcgagcagggccgtgccgaagccgagcgcgaccgccgccaggccaagcgcgagcaggcacgccaggcggcgcagcagctgggggccgaactgccggacgacgcccacggcttcgccgaactggtcgagcgcgcacagaacgagctgcaggatcgccagcgtgcctcttcggcattggacgacgcgatcagtgatcgcctgggtggcaagcgcgatgacgagcgccgtttcggcgaagtccgtgccgaactcgaagcgatgcagcgcacgccgtccaacatcccggcgccgatgcagaagctgcgcgcgcgcctggccgaagaaaccggcatcgccgaagcggcactgccgttcgtcggcgagctgatccaggtccgctcggaggaacagggctggcagggcgccatcgaacgcgtgctgggtggcttcgcattgtcgctgctggtcgatgacaagcactacaacgaggtggccgagtgggtgaaccgtacccacctgggcatgcgcttcacctactaccgcgtacgccgcaatgatgaggcgttcgcccgggagccctcggccaggtcgctgctgcacaagctggaactgcgcgagcatgtgttcgaaggctggctgcgccgtgaactgggcaagcgcttcgactacgagtgcgtggatgccaagcagctgcgcaacgtcgaccgcggcatcacccgcgaaggtcaggtcaagcacccgggcgaccgtttcgagaaggacgaccgcagtgcggtgggcgaccgccgccgctggatcctcggcttcaacaaccacgacaaggtgggcgccttcgagcgcgaggcgcaggaactggccaagcgcattgctggctgcgagaccgacatcgcgcgcctgcgtggccagcgtgaccgcgacaatgaacgtcgcctggcctgccacgagctggtcagcatcaactggaacgagatcgacatcgctgccccgcagcagcgcctgagcgatatcgaagcgacgctgcgcgacctgcgcgaaggcaacgccgacctggccaagctggccaagcagatcgacgccgtgcgcgccgacatcgaacaatcccgccgcacctatgaagacgtccgcgtcgagcgtggacagctggtcaaggagcgcgatcgcctcgaccgcgcgcgccagcagagccgcgcgctggtgctgcccaccctggcccaggagcaggaagccggcctggccgagcgcctgcaggagcagggcccgctcagcctggaaacgctggaagcgcacatgcgtcaggtcagcaacgcactgaacgagcagctgtcgtcctcacagcaggatctcaaccgcatcgagaaccagctggtcggttgcttccgccgcttcatccagcaatggccggaggaatcgggcgatttcactgtgtcggtggcctcggccgaggacttcctcgcccggctggagcgcctggagcgagacggcctgccgcagcacgaagagcgcttcttcgacctgctgcagaaccagagcaagaacaacctgctggcgctgcagcgccacagtgccgaggcccgcaagtcgatcggccagcgcctggatgaagtgaacgccagcctggaacaggtgccgttcaaccgtggcacgctgctgaccatcgaactgagtgaccgtcgcctgccggaagtcggcgagttccagcagcagctgcgcgaggtgctgtcgcagcagcagaccgagcagcgcgaactggccgaatcgcagttcactgtgctgcgccagctggtcaaccgcctgggttcgcaggagggcgaagacaagcgctggcgcgaactggtgctggacgtacgcatgcacgtggagttcatcggcgtcgagctggacgcggaaacgcgccagcaggtcgagatctaccgcagcggcgccggcaagtccggtggccagcgccagaagctggccaccacctgcctggccgcggcgctgcgctaccagctcggcggcgccgacagccagctgcccagctacgccgccgtcgtgctcgacgaggccttcgacaaggccgacaacgagttcactgcgctggcgatgaacatcttcgacaacttcggcttccagatggtggtcgccaccccgctgaagtcggtgatgacgctggaaccattcatcggtggcgcctgcttcgtcgagatcagcggccgccacgactccggcgtgctgctgatcgagtacgacgaggaaggcaagcgcctgaagctgcccgagcgcagccgccagcaggccaacgaaccggaggaagccgaggcctga

SEQ ID NO: 48079 - DNA, 1470 bp, Stenotrophomonas maltophilia
atgaagcaccgcgaacgcatctcacgttaccgccatctgcgcgaacagccccagtggaagctgctcgccgccgaccacgctccggaaatcatcggcctgctgcaggggctgctgatggacggcgagcgcacgctgtcgtcgtcggtgctcaacgagcgcctgcagcgtgcgttggaccagctcaacggcgacgaactgtcgcgcgagctgccgcgtaccgcgcaggcctacatcgcgcactggctggcccagggctggctggaacgccgcctgcccgaaggcgccgaccaggagcagtacgagctgtcgaccgcggcactgcaggcgatccgcttcgccgatggcctggagcaggcccgcgtggccgccaccgaaagccgcctggcgctggtcatcgaacagctctcgcagttggccgcgcagaccgaatccgatccggacgcacgcctgtcggcactgcgcgacgagcgtgaccgcatcgacgccgagatcgcccgcgtcggcgccggccgcgtgatcgcgctggatggcaagcgcgcgctggaacgtgcgcgccagatcatcggcctggccgacgagctgaccgaggacttccgccgcgtgcgcgacgacttcgagcagctcaaccgcgatttccgcgaacgcatcatcgacgacgagggcgaacgcggggacgtgctgtcgcagctgttcgaaggcgtggacgtgatcggcgagagcgatgccggccgcagcttccaggcgttctggcgcctgctcaacgacgccgaacagagcgcccagctcgatgccgcgctggaagcggtgctggcacgtggttttgcgcgacgcctggaccgcaacgaacgcaacttcctgcgcggcttcaccagcaccatgcttgagcgcggtggccaggtgcacgacgtgctgcagaacttcgcgcgcagcctgcgcggcttcgtgcagagccgtggctatctggaacagcgccgcctcaaccagctgctgaagcaggcgcagtccgaagcgctggccctgcgcgacgagttccccgcacagcgtggcatcggccgtgacctgcagctgaccaccagccgcctgcgctcgtggtcgcagtggaggctgcacgatccgcgcagcgcccaggtcgatggcaacgtcgagtacaacgacgccgccgcgatcagcctggaaagcgtcggcgatctggtcgcttcatccgaaatcgacttccgcaccctgcgccgcgacctgcatgatctgctcgatgcacagccgcggctcagcatcgcccaggccctgtcgcagcgcgaagcaccgcagggtcttggcagcgtcatcggctacctgtcgctgggcacgcgcttcggcaacgtgatcgccggtgagcaggagcttgccgaatggcgtggtggcgacggccaggtccgtcgcgcccgcatcccgctggtttggttcacccaggagagacgccatgagctggcatga

SEQ ID NO: 48080 - DNA, 702 bp, Stenotrophomonas maltophilia
atgagctggcatgaagatcccatcgacgcaccgcaggccgacgtggcggaagacgcctacgaagccgaaccggtggcggccgtggcgcagccccgccgtggcaacgacgtgtactacctcggcgataccggacgcctgccgctggacgcacgccgcgcgctgtgccagctgctgatcggccccagcatcgaccagctgcgccacgccaagctgtggccggcactgatccgcagcgaggcggccatccgctcctcgctcgcggacctgttcctggaactggtgctcgaccgtgacagcggcgtggccttcacccgccaggccgataccgaagacgtggatgcgccggtgctgctgcgcacctcgccgctgaccttcatcgattcggtgctgctgctgtacctgcgccagcagctggccgaggccgatgcgcgcggcaaccgcgcggtggtcgccgatgccgagatggccgaagcgctggccatctacgaaaagaacctgtccaccgaccgcgccggcttcaaccgccgcgtcgcctcggcggtgcagaagatgaaggacaaccacatcctgacccgcctcagcggccaggaagaccgccacgaagtctcgccggcgctgaagctgctgttctccgccgaagacgtgtcccagctctcggcggtgtaccgccagctgcgcgaaaccccggccgccgaggcctga

SEQ ID NO: 48081 - DNA, 3381 bp, Stenotrophomonas maltophilia
atggctatctccaagcacactcccgccctgttcaacgaaggcctgccggacccgcgcctgcagcagttccgcatgcgccgcctgcaggtgcacaactggggcaccttcaacggcctgaccgaagtgccgatcgccgagcgcggcttcctgttcgtcggccgttccggctcgggcaagtcgaccctgctcgatgccatgtccgcgctgctgacgccgccggccatcgtcgacttcaacgccgccgcgcgtgaagccgagcgcagtggccgcgaccgcaacctggtgtcctacgtgcgtggcgcgtgggctgaccagcaggacagcggcaccggcgaaatcgccacccagtacctgcgcaaaggcgcgacctggaccgcactggtgctggaataccgcgccggcgatggccgcgtggtcagcctggtgcgcctgctgtggatctccggcaatggcacctcggccggcgacgtgcgcaagcactacatgatcgccgagcgtccgttcgacatcgccaaggatcttggcggcttcgatctggacctgcgcaagctcaagcagaagctgtccgacctgcaccacttcgacaccttctccggctacgccgagcgcttccgtgatctgctcggcattgataacgagatggcgctgcgcctgctgcacaagacgcagtcggcgaagaacctgggcgacctgaacgtcttcctgcgcgacttcatgctcgacacgccgaagaccttcgacgccgccgagcgcctggtcagcgacttcgccgagctcgatggcgcgcaccaggcggtggtcaccgcccgtcgccaggtggagaccctgctgccggcacgcgcctactacaacgacctgaaggaaatgcaccgccggcgtggcgacgacgaagccctcaagctcggcgtcgacagcttccgtgaaagccgccgccaggcgctgatcgaagcgcgcctgcgcgagatggacgtgcgtgaccgtggcctgctcggcgaagaagcccagcgccgtgccgcactggacaaccacaccgagcgcctggccgagctggaactgcagcgccgccagcagggcggtgagcgcatcgaggaactggagcgcgagcagggccgtgccgaagccgagcgcgaccgccgcaaggccaagcgcgaacaggcaagccaggccgcccagcagctgcaggccgaactgccggacgacgcccacggcttcgccgaactggtcgagcgcgcgcagaacgaactgcaggatcgccagcgtgcctcttcggcgctggacgatgcgatcagcgatcgcctgggtggcaagcgcgatgacgagcgccgcttcggcgaagtccgtgcggaactcgaagcgatgcagcgcacgccctccaacatcccggcgccgatgcagaagctgcgcgcgcgcctggccgaggaaaccggcattgccgaggcggcgctgccgttcgtcggcgagctgatccaggtccgctcggaagagcagggctggcagggcgccatcgagcgtgtgctgggcggcttcgcgttgtcgctgctggtcgatgacaagcattacaacgacgtcgccgagtgggtgaaccgtacccacctgggcatgcgcttcacctattaccgtgtgcgccgcaacgacgatgcgtttgcccgtgagccgtcggcgaagtcgctgctgcacaagctggaactgcgcgagcacgtgttcgaaagctggctgcgccgcgagctcggcaagcgattcgactacgagtgcgtggatgccaagcagctgcgcaacgtcgaccgcggcatcacccgcgaaggccaggtcaagcacccgggtgaccgcttcgagaaggatgaccgcagtgcggtgggcgaccgccgtcgctggatcctcggcttcaacaaccacgacaaggtgggcgccttcgagcgtgaagcacaggaactggccaagcgtatcgccagctgcgagaccgacatcgcgcgcctgcgtggccagcgtgaccgcgacaacgaacgtcgcctggcctgccacgagctggtcagcatcagctggaacgagatcgacatcgccgccccgcagcagcgcctgaccgatatcgaggccaccctgcgcgacctgcgcgaaggcaatgcggacctggccaagctggccaagcagatcgacgcggtgcgcgccgacatcgagcaggctcgccgtacctatgaagacgtccgcgtcgagcgcgggcagctggtcaaggagcgcgatcgcctcgaccgcgcgcgacagcagagccgtgcgctggtgttgccgagcctggcccaggagcaggaagccggccttgccgagcgcctgcaggaacagggcccgctcagcctggaaacgctggaagcgcacatgcgccaggtcagcaacgcgctgaacgagcagctgtcgtcctcgcagcaggacctcaaccgcatcgagaaccagctgatcggttgcttccgccgcttcatccagcagtggccggaggaatcgggtgacttcaccgtgtcggtggcgtcggccgaggacttcctcgcacgcttggaacgactcgagcgcgatggcctgccgcagcacgaagagcgcttcttcgatctgctgcagaaccagagcaagaacaacctgcttgcgctgcagcgccatagtgccgaagcccgcaagtcgatcggccagcgcctggacgaagtgaacgccagcctggagcaggtgccgttcaaccgtggcacgctgctgaccatcgaactgagcgaccgtcgcctgccggaagtcggcgagttccacctgcagctgcgcgaggtgctgtcgcagcagcagaccgagcagcgcgagctggccgaatcgcagttcaccgtgctgcgccagctggtcaaccgcctcggctcgcaggaaggcgaggacaagcgctggcgcgagctggtgctggacgtgcgcatgcatgtggagttcatcggtgtcgagctggatgcggaaacgcgccagcaggtcgagatctaccgcagcggcgccggcaagtccggtggccagcgccagaagctggccaccacgtgcctggcggcagcgctgcgctaccagctcggcggcgccgacagccagctgcccagctacgccgctgtcgtgctcgacgaagccttcgacaaggccgacaacgagttcaccgcgctggcgatgaacatcttcgacaacttcggcttccagatggtggtcgccaccccgctgaagtcggtgatgacgctggaaccgttcatcggtggcgcctgcttcgtcgaaatcagcggccgccacgattccggcgtgctgttgatcgagtacgacgaagaaggcaagcgcctgaagctgcccgagcgcagccgccagcaggccaacgaaccggaagaagcagaggcctga

SEQ ID NO: 48082 - DNA, 1371 bp, Kandleria vitulina DSM 20405
atgaatttctggaatctatttgatacctttgataatgagaaattctttaatcccttaacaggagaaaaccgtacaatctattttcagatcattcaggctttaatagcgatggctaatagtagagaagatctttatgaacaggatgctaaaaacaagatatttgattatcagtctcttcttgaagaagaagcaatgggaagcacacctaatgatatattaaaatattttgaagaatgtggatggatccgaagagaacagtcaagaaacggattagaatactatgttcgtatcacatctgagtgtcgtatcctgatggatggattgatgagtgtaagaagaggggctgacaacagtaaaggccatatctttgccatgtatgaaattgtcagagcggcaagcgatgatacatttggctaccgtcgattagaaccttacaagcagattctagagccattggaaatgcataagaatgccttgaaaaatgaacttattgatttacgtgataatatccttgcattaatcaagaagcttcttgataccaatgagctttctcatatgggacatcttttaagtaaagaagaaatgatcaaggatttctttaacaactactttagattaaagaatgatgggaatgtattggcttttattcctgtcatcatcaactattgtagaaagctagaatatgaagatgatgccttaatagaaaagatggtctatgatgcaccacgtgaagatcatgtcaaccaggaaacaattcgtttaagactcagcagcattataagctttttggattatagctatgaagataatatgaacatcattgaaaaccgtattgatgaatattatgtacttgctaatcagcgtatacgtatgcgtttgacttatcatgatagtcttcatccagctatagaacgtttcttccagattgtaaacaaccatcctgatctaatggaagaaagtgtagagaatattaataagaaatgtatcaatattgtcaatcagtcttttatagcaagacagtcatttgatttaaagaagaaaagagatatgcataaaggacgagtaatgccaattaagcccattgttattgatgaagatacaatcaagaaagaacaggaactattatctcgatcaataaatagagcctactctaaacataatgtcgcaaaatatatggatggatggcatattaaggagaaggtacatatcaataaggacatgatcaagaataagaaagatgtcttaaccttgattgctgcactgatgtatgtaaacaatgaagatttcccatatgaaatcaatattaccgatcaaagattagtgactgatttttgtgaaatgccagatatgattataaggagaagaaaataa

SEQ ID NO: 48083 - DNA, 618 bp, Kandleria vitulina DSM 20405
atgatagtagatgaagagatgtataaagttgctattagaaaactattaggttcaacttttatcatgcgaagaaaagataagaaggtctatgactacattatggataatgaacatcgagaattcattatgtctagactagaagaaatcggctatggattagagtggaatgaagaagatgaaattgtttcattaatcgatctctctttacaaaatggagaagagactccttataatttccatcgtttttctcctcataccatctatatgctttttgtattgatgcttatttatgaagaaaagaaagccaattgggtagaacgtattatcgtaaactttgaagaagtacaagatcgacttcagtcattgcatcttgacattacgccatctgaaaaaagaaatgcctataagcagtttagacgctataatttgatttcagttaaagatagagatcttcgtcttaatgtagaagaaggaggaacactagaaatctatccttctattatgttttgtatgaaagaagaacagtttgcattggttttaaaagatctagaagaaaaaataaaggaaagggaagaaggtgaagacaatgattacaatgacgagaacatggctgattaa

SEQ ID NO: 48084 - DNA, 3246 bp, Kandleria vitulina DSM 20405
atgacgagaacatggctgattaactggtatggatttgaaaacagcattgatcgtgtcggattaatgaccgatattaccggaaacaatggatcaggaaaatctgcctggcttgatgcgatcaagtatgcctacatcggtgatactggattcaacagttcatctgatgcgaaaggtacaggctcgaaaaaaagaacaattgattcttatgtaagaaagcttatcaatgcatcaagaaatgaatatggcagaccggtttctcaatataatgaagtctatgcctacatcatgcttgaatggtatgatgatctcaatgatcaatatttaattaccggatgtattatcaaagatgatgcagctaacactacagaaacaagatggttcaatattgaaaatatgtcactcgatgatattcatccattaagtgaagacaatattccttacacttttcagcagtttagaaaagtcaatgacatcagctatgcgcctaataaagatgaagcattcaatgaagcaatgtcactattgggattaaagatttctacttacaatgaaggaagaaagaattatttaagaaaacttaaatccattttgacttatgatccaaaagaagtaggaaagatcagtgatttcattaagaactatgttcttgatgatgaaaagaaagttgatatttctaaattaaagaaaaccaaggaagacattgatgaacttaatcgtacattaacacgtttagatgaagaaatcagttttatcaaaaagatcattgatcaatatgatcagtatcatcattatgatcatattcttcttcttgatgaaatcaagaatgcctacaagcgagttgtagaagcaaagaacactattgaggatatcaataatcaaattgaagaaaataaagaaaaaagagcaatttgtgaaaaagaaaatgaatccttaaatgatgaaatacttcttcttgctcaagaaatagaaggattagatgaaacattggatgaatgggatgtcactaagtcacttcatcattataaagatagagaatcacagcttgaagaaaagagaagacagcttcaatttaaaaagcgtgatctagaagagctgatgggacagcttagctatattgaaaagaagatcaatacatttagtgaagagaatcatctagatgcacttgatcataagatcatttctcaaataaagacaaagaaaaaagaagcaatctttaacttgcgtcgtattgttgaagagtgtgcttctatcaataatgcgaaaataccacttcttgaacaaaagaaaagaaatgttcatacacaaagtgtggaagaaaaggatattattgaagccttatcaaagaataagtttgtctaccatgaagcaaaagagaatctggctttaattaaagatatcaaggatgtctttaaaaagaaaaatattgattcaccagtagaaatggtctgcaagtatgttactgaaatagatgaagagtggagagcggttattgaaaactatcttggatggagaagatatgatatcatcgttgatccttcttatcttgatattgctcaacaggtaagaaacaagggaaattatcctcatgcaagattggtcaatacgtatcagctaaaagattttgaatgtgtagaacagtcattgatggaaaagctttctgtcagcaatattcatgctgctcgttatcttaagttccttcttggaaagattgtcgctattgaagatgacaatgtaaaagaatatccacgaggcatgaaaaaagatgggactgccagtcttaatatgacaatcttctctttagattttcatcatgtgaacgattatgtctttggagaaagtgcgttatctttaaatatagagaaacatgaaaaacatttgaatgaattgatggcatgtctttcttcattagaaaagaatcagcagtacgctcaggatttcaagaatgatttccaggcaatgctttctattttgcatgatcagtatgattttgatattgatcttcatatagaagaaaacaatgaggcattgcttgcatgtcaaagtcatgttgaagaactgacaagacagatgcatgaaaatattgattttgaaaacatccgtcatcaaagagaattagctcttgaaaagaagaagaacaatgaacaaaaagtagcgaataatcgctatgagatggacaatattgatcgacagatcaagaagctgaagagtgtgcttgatacacgtaaaaaagaagtagaagaagcaaagctggcattagaggatgcaagagagaaaaatgagattactgccaatgaggctattaatcaatatgaagattatctttcttctcataaagaaggcaatgttcttcctgaaagcaaggcaaaatctcttcataagaaaagagaacagctggttgcaggcattatgggattacagggagaatttggtggaaagtattattctgaagccactattgtcaatacgttagaagcagagaagatgttccgtcatcgttataatgatattcagatgggcaatattgaaatgatcaagacagatttgattgaaaagaaatctcattatcgtgaaaacttcaagaatgagtttgccttaaagatccttaagttctgtaatgatgccatgatggaattaaaacgacttaataaggaattaagtgaaacaggctatgatacacagtatgtctttgatgtacattttaaagatgattcatcagattatgcatcaatcattcgttttggtaagacattaagtgaaggtctgcttacttttacatcaggtaatgtcaatattgaagaattagatcaggaaatggatcagattgtagatgatatcatcaattctgatgatattgatgactacgctgattatcgtaactacttgtcttatgatattctcttcagcaatgatacaatcaagcagggaagcttatctaagcagattggcagcaactcgggtgccgaactgcagattccttatactttgatcttaatttcagctttattgatgatctataatcatcgtgataattcatcacgtattctctttattgatgaaccatttgaaaaacttagtcctgataatgtcatgaagatggtaagattcttcaaggaaaagaaactgcagtgtttcttctgttcagcaagcaatcttggcgatattggacaggaagcagatgtgattttacaggctataaaatatggaaaagacaatagcatgaaactattgccatatcattttaaatag

SEQ ID NO: 48085 - DNA, 1461 bp, Mycobacterium sp. H001
atgactgacctgacgatcgaagagctgttcgcgcacaacgacgacgtgcagaaatcccgggcggtcaggctattggccgctaagaatctggcgccgtacatcacgctcatggagcgccacctggaccgcagtgcgaaggtttccgaaccccagctggtggccaaactggaccgggatcttcacgcggtcggcctgggggagcagtctggactcgccctcatcaagagctgggcaagtgacggctggttgcaccgcgcgtcggatggcgccggtcccgacgccgagaacgtctgctcgttgaccgaggacgcacgcagtgcgctggccttcgtccggcgactgcgtcgtgccgacagcgtcgccaccggcgggtccatcgcgggcatcgcggcgggcctcaagcgggtcgcgactcaactggatggcgacccgtcgcggctgcgtgccgatatcgaggctcagatcgccgaattgcagagctacgtgcacgcgatcgacgacggataccgtcccgagccggacatcgttgatctcgaggatgaaacccgtgccatcgcctatcagatggagcaggtgatcaccgacatcgtgcgctacggcagcatgcagaacgagatcaccgccggactcatcgacgcggcggaggactccgattccgggttccgcgaccgtgcacgacggatgttcgccgactacgacgctctgtttgactcccgcgaacgcgcctcgtacgccgcctttacacgcaccatccaggacccagaccaacgtgccgccctgcgcagcgatatcgcctgtgtcgctgagggattacctgagctagacccgggtttgcgtgatgtcatgaagaacttcttcaagctggtttcccagcagatcgcggaagtctcccgcatcgagcagcgctgtgcgcaacgtatccggcgattcttcgccgccggcaccacggagcaggcgcgtggccgtgcgcggcagctcaacgatgccctggcctccgggcacgcgctgctcaaggtgtccaccgcggattccccgattgacgccgaactaccaattggccgctctgcggcggcgtccatcggtgccctgtcgttcaccatcaaggacacggcgccgccggtgctggcccaggaagcgccatcgggccccttggacttaagtggattctcggcattggcgacccaggtggacatggccgcactggccgagacggtgaacagagctgttatcggtggcccagtttccctgcccgacatgatttctcatgtcgacgcaccgtatctgggtgacgtgatcgtgctgtggtcgctggcactcaagcaggacaacacccttgatcgcgagtcggtcaaggtgaagttccggtccctggatggacaagaccgggtgatggaggtacctcagttgatgttccgtgaaccggtgttggcaaccctcgaagaggagggggcggcactgtga

SEQ ID NO: 48086 - DNA, 726 bp, Mycobacterium sp. H001
gtgacgacaacgcccctgggaaacatcaactttgacgatctgccgggtgtcgagccggatgcctcggcacccagaaccgtcaagggaccacggttcgatggcgacaccagcgagctgaccgacaaggcatgctgggcgttgcagaacctggtggcccggcgctatctgagcaaggacggccagccggagttgtgggcatcgatgatggagcaccgcaaggtgctggcctcgcgtttgtccgaattggatctgcggctacgagttttcgacgatcttgaggtcgcctacgccgaaccggcgcccttggagaaccccagcgcgtacggcgcccgggtgttgcgccgcgaacccctgggcacgtatgcctcgatcgttgcgctgcacctggccaagatcgcgaggaccgcgcacgacgagcaggtgctggtcagccgcgacgatatccatgagctgttcgccaatgtcagccacgacatcgaccgcgatgaagcgatgctgcgcgaccgcgtcgacgaagccatcaaacgcctgtcgaaggccgagatcctgcagcgcactcgcgatgacgagcacagctacaccatcagccccgtcatcaacgcgctgatgtccgcgcagatgatcgaggcgttgcaacgccaatacgagcagctgcagcgtggcggtaccgccccagaagactccaccgacgacgaagaagatggcgacaccgatgacgatgaatga

SEQ ID NO: 48087 - DNA, 3366 bp, Mycobacterium sp. H001
atgaatgagggcctgcccggcaggccgggtgatgcagccacccagcagttttggctgtcccgattgcaggtcatcaactggggtgtcttcgacgggtaccacaccatcgagttcagccgccgcggcacactgatcaccggctcctccggaagcggtaaatcttcactgctggacgcgatttcgctggcgtttctgtcctcgaaccgccgtaacttcaacgcgtcaagcgataccactgcggccggctcgagtatgggcaagcgcaccgtcgacaagtatgtgcgcggtctgtggggtgagctgaagaacccgggggagcggccaacgcagatgttcctgcgcggtaagggtgcggcatggtcggcgatcgcggtcacctattcaggcaccgatggtcgcgtgatcaccggcctcgtcctcaaatggcttgcgccgggctcagattcggattcctcgagccgctattacctgatcgacgccgatgccgatattcgtgacctgtgtaatgcctgggcgagtaagggatattcggccgcggttttcgatggcgcgggctggcgtggacacaagagcgaacgctggtatttggaacagctctacgccgccgttggcatccaaggttcctcggcagcccagcagctcttgggtaaggcaaagtcgctcaaaagcgttggtggcctggaacagttcgtccgcgagtacatgctcgacgagcccgagtccatggccgcgatctccgaggccctggggcagatcaccccgttggtggacgcgcgtgccgcactggcggtcgcgcagcgccagcgtcagacgctgggcgatatcgaacagattcagcagacgtacgccagcgacgcggcgcagctggccaccgtcgacgtggtggatcaccacaccgtccgcgactacgttgatcagcagcggctggcgctggccggtccggagatcgatctgttggacactgagatcacccggctcggcggcgaatgcgacgaaatccagtcgcgccaggatattctcaccggcgagcgggacaagctgctcggccggatcgccgccgccgacagtaatctcgcaccgctcaagagtgaactcgcacatgcgcgggcccgggccgaggaggtgtcgcgccgccgtaccgcgtacgacagcgccctgtgggacctcggccacgacgaagacgtcgaatccgctgaggaattcgaagccatgcgggtcgagagcctgcgcgcagtcacccggatcaatgcggaactcgaggcgggtcatgacgcctatgtgatggcggccggcgccttgtcgacagcgcgcgatcagctgcgggctgcttcctccgagctcaagcgcgttgaacatgtcggtacttcggtgcctcctgacgaggaccgcatgcgtggggaaatcgcggcggcgctgggccttaccgccaaggagctgccctacgtctgcgaattgatggatctgcgcccaggccaggaacggtggcgcagatcggtggagaaggtgctgcggtctaccggtctgtgcctgctggtgcccgatcagcaccaccggcaggtgctgcgatacgtcaacgagaacccgatgcgcggttacctgcagatggagcgggtgatcccttccggcgcgccgcggcgtgccgagccgggcaccctcgccgactgtctgcgcctgaccaaccccaatcacgaatgcgccagtgctgccatgaatctggtggcggctgtgggcgattacgtgctggttgattcacccgacgagttcagcaagcaccgccgggcggtcaccgatcagggcctgcgcaaggacggcgaccggcgcgcggtcaaggatgacaggcgcgagctgcgtgcctcccagtacatctatcagggcaacgcaggcgataagcgggccgcgctctccgatgatgtggtcgaggcgcagcaggccgttggtgacgccgagaagttcattggcgagatggacaccaagcgtgaggaactgcgctcggaggtggtgcggtggtccaagctgcacagccaatacgagtactggagccagatcgataccgattcggccgaagccgccgtggcacggcttcaggaccagtacgacgcgatgctggaggccaaccccgacctcaccggactgcagcagcaggccgattcctatctcgatgagatcaagaaactctccgaacgtatcggtgcgctcagaaggcaagaatccgaacatgattcgcgccgcacgagactactggatctgttggacaatttgaacccgcgcgaggtgggcgggcacacccgatccggtatcgaagcctatgttccgcagctgtcgtcaagcctggatgtgctggagccggacacctaccggttggagctgtggcgtcagatcgagaaggaccagtcggtgctgcgggaaagtgtcacccgttcacgcaacgagctgaaccggatcctcaacgcctacgaccgggacttcccggattcgattcccaacgacagtgagaacttcgacgagaagatccacgattacgtcgccttgtgccgccgaatcgacgagcgcgacctaccggctgcctacgaacagatgctgcgactcatcaccgagcaggcgcccaccgcagtcctgcggttgcatcagctcgccgaggaggaggcgcaccgcatcaccgaccagatcgaccgggtcaatagcggtttgggctcggtggagttcaacaggggaacccggttgaccttgcgtgccgagcccaaggcgcttgaggcggtgggcgagctcaacgagcgggcccggcggatttcgggacgggccgttgcggtttccatgggagacgagaaggccatccacgaccagtatcaggacatcctgcaactgcggaatctactggcggcggagactcccgaggccaggcaatggacgcgcgacgcgttggatgtgcgcaaccgcttcgtgttgtactgcgaggagcgcgacgccgccaccggcgaggcgattcgcacctacagcaatgcgggtgcgaattccggtggcgagcaagagaagctgatggcgttctgcctcgccggtgcgctgagcttcaacctcgccaaccccgaaaccggggacaatcggccggtctttgcgcagctgatgctcgacgaggcattctcgaagtccgatccgcagttcgcgcagcaggcgctatcggcgttccgtaagttcgggttccagttggtgatcgttgcgaccgtgcagaacacgaccactatccagccctacatcgacagcgtggtcatggtgtccaagcccgacggcccgggagttcggccggtcgcctcgacgcgcacggtgcctatcggggagctcggtgacgtgcggaaggcagtcaacgcccgctga

SEQ ID NO: 48088 - DNA, 1527 bp, Bradyrhizobium pachyrhizi
ttggcattgtttcgccatttgcacgacgacgcgttcctggccttttcgcgggaccacaaacatctctacgcggcatgtctgctggatcttcatgagcgcttcttctcgggcgcgcccgctttccctgcgccgcagcaggtcgttcacgcgatctacgacgtcatgcgggccaaccccgccttgtgggacgacggcgacgatttcggcgcgctgcctgaaatgatctcagcgcggcgccgccgcatccgcaaggtcgacgtcgcactcacatccgagaagggagacaaggcgctcggcctggcgcgccaactttacacgcggctcgtcgcatggggatggctcgaggaggaggagtacggacttcgggtgaccgtggacatggccatgggacccctgctcgtgatccagcgtctggcgagcctcaataaggacctctcccagcggttcggcggcttgatcgtgcaaatccgccttaatctggaagccgttgaaaagctcacacccgagattaccgaccgcaagcaacgcgaggccgcactcgccgtccgcgaggcgcgcaatcaggccgatcaattcaccaagagtctgcgggccattttggctgacctcaagcgtatccgacggacggtcatggaatcgaagaccgtgggcacccggctggaagcctttttcgaggagttcgtcgaccagctgctgctgaaggatttcgagtccatcctcaccgtcaaccatccgtaccgctttcgcgacgtgatcgtggatcttgctcgcagaatttcctacacgtccgagacgatgcaggtgctggccgaggaatacgccgcagcaagcatggcgtccgatctcgaagaggggcggatggctgcggctgacgatttgttggccatcgaaagcatcttcgagcagatcggcgagatgttcgatcggatcgagaccttccgcagacagctcgaggcacgtgttcgaaatactatcaagtacgcggagcgtggagcacagggactcgtcgggcgcgccggcgacctggtgcggcggctcgacgctctgctccgcaagggcaggcacgacgaggcaaccgtcgaatggaacgttgagccactgcggtcgccctggtctgaacaccatcaggcgccggctagacagccgcgccgccctgtcgaggcaagagaactcgccgggccgccgtcggatccgctctacgaactgcggaagcagcttcgcctggagtacatcgctcgcatcgcgccgcgccccgaggacgtcaaaagattcctcgaggggcaggttcctccgttcgcgaccaaggaggcgcgcttcatgcagatcggcaccgttgacgatttcctcgccttcgactgcgcccgacgttatgcgctaaccggcgacgtgccggcgcagatcgcggctggcttcgatctggagccaagccccgacacgcctccgcacgatagcgagtggctcaggtgcgcgaacttcgtggtcagacgatcgggtacgacggcgaaaggcagagcagtccatgcttag

SEQ ID NO: 48089 - DNA, 639 bp, Bradyrhizobium pachyrhizi
atgcttagcgaatttgacaacatcgagcgctctgccggtgcggagaaggcggccgatcttcggaaggcgttgcatttcttgctgcgacgacaattcgtgttcgccggggaccctcgcaccgggacggtctacaacacgatgatggatggccgcttccgcgacgtggtcgacggcttcttcgacagttgcggttatcgcgtccatcgcgatccggaggcgcagtgggcagggatcgtcgcgatggacgaggacgtgccgctaccccggatgaagctcgacgaaaccatcgttatgctcgtgctggccgcgtactggcagcaggaagtgaacgtcggggccgtcgaggaccgagccgtggtcgtcgcgacgctgaacgacctcttcgatcggtaccgggagatggcgcagcatagtgggggcggcgccatctccgcagcccgcttccgcgacattctgcgtgaggccgcccagcgtagtcttgtcgagatcggtgacttcgacgacgaacagcaggactgggaggtcaggatccggccgatgatcaagctgatcagcggcggtgacgcgctccaaaggctcgagcgctacgtcaaaagcgaggaagcccgctttccgcaggtcgcgggagatgacgcatga

SEQ ID NO: 48090 - DNA, 3438 bp, Bradyrhizobium pachyrhizi
atgatgcaactgcgccacctgactatggtgaactggcacctattcgatgttgccgacatcgaagtgaccggtcacgtgggcgtgctgggtgagaaccgctccggcaaatcgacgatcctcgatatggcgcaggtcgtcctcaccggcggcaaccgacgcttcctgcgcctgaacgcggtcgccggcgacggcggaagatcgcgcggcggctcgaagcgcagcgtcgtcgactactgcctcggcacgctgggcgaggatcagcgccggcgcgacgaggcgcgcacctacatcgcgctcggttttgaagacacggacggagcgcggccttccgtcaccatcggcatggcgctcgaagcccggaagtccgacagtagagagaccgtgctcgcgctgttcatcgcggtcggcgcggtgctcacgtccaatgacttcatcgaacagcgtggaaaggcactatttccagcgcaatgggaggacgcgcgcgcccgaatcatctccgccgtcggcgaaggtaatttcgtcaatcatcgcgatcgggcgagcgattatgtccgcgagtatatgcgccatctcctgccgcactcgccgtatggcgaacagaacgccaacgcgctgcagaaatcgatcgtcaacgccatgacgctcgaccacaaccagacagccacgcagttcgtgcggaactacatccttgaggacagcccgatcggtatcaaggaactgcgcgagtcgatccagacctaccgcaacattagcgacacgatccggaagatgcgcctcaagctggaggcactgaaggaactgaaggcgattctgacggcgctggaagaggcactggagaccaagttccgcgagcagtggattggcaagcgcgcggagtggcttgccgcccgcgccatcaaccgtgacttcagggtgaggctccggctcgcgaacgcgcagcgcgatgccgcggccggcgaactgaaattcttgaatgaagacatcagagcgatcgacgatgagctgcaacggcttaccgaggccatcgccgaacacgacgccaagactggcaggaagtcgctgcagcagaccgccgcggtggcggagcagtccgcgcaacgcgctgcagctgatttcaaggcgcgcatcgacaccatccggcgcctgcaaccgttgtgtgccatgggcgggcgcggcttcgacgatttcattccggccgtggaccggctgcttgccgctgtaggtgccgcctcggttgcggccgtttccgacgaactggttgcggccgaaaacgccctgacaatcttgggagggcaacgaatcgcgaagatcgacgaagcgcgtcaggaggtcatcgcaaaagcctcgcagttacgtacccagcgggatgacttgatggagcgggtccggcagcacgcctcgggaggggcgcgcgcgcacctcgagccggacaccgagcgcttatgtctccggcttcgccaaaaaggcatggcgccgcgtgtcttgtgcgaactgatcgaggtcgccgagccgggttggacgggtgccgctgaggcgcttcttggccgcgatcgcgatgcggtgttcgtcgacaggccgcatatcggcgatgcgaccgcgatcttcaaggaagggcggcgcgagttccggcgcacgtccctggtgagcctcaacaagctggagcaattcagggccaagccggagccaggaacgtttccttcgatcttccgcacggaggatccggacgcgctgtcgtttatcatgcgccggtatggctccgtgcgccttgcggacaccctggaccagttcaacaggccgggccgcgccatcatgaaggacggcctgtacgacgatggcctggtccgcacccatcgatcaatcgagccttcgcagcacaagatcggcaaggctgcccaggcgaacgcgctgcgcgcgctgcacgagcaggcggacgagttggaagtatcgctacgccaggccgcgaaggaagccgagatcgctgacgaagcgttcatggcgctgaaagccctatgcgacgcgcccgcaggcgatctgaagacctgcgcggcggccttcgccgcagtgcaggctaagatggcagatgctcaagcgaagctcgcggctctggacgacgccggcgacggcggtcttcgccagaaaaaacgtgcccagcagcaactgaaggaccgaaggatcgccgagcgcgagactcagcagactgccttcaacaaacacgacggcgacgtccgggcggcgaagagtaggctcggtgacggcgaaaacgtgcccggctccgaactcaatctgaagatcgcttggtcgcttttcgtcaagaatctgcccctctactctgcgtcaaaaggccggccggtatatcgggcgcgccttgatgcccgcgctcacaagaacgaggccgaccggcatcgcagcatggctgagaaggccgtcaaggacgccgacgcggcgaacgacgagcgcggtcggatcgaacggcaggtgcgcgagttcctggacggctatttcgacgatttcggcgtcagctcccagatcggcatcgagagcgagcctcttcaggaggtcaagccctggatggcgcaattaatcgaggagatcgagtccaacgaattgcggcggtacgaacgtcaggcccgtgacgcggccgagaaagcgtccatgttactgcgcggtgagttcattaatgcgctctcggctcggatcggcaagatggagcgggagctccagtcgctgaaccgcagcctctacgcgcaccccttccacaacgaacgatactcctttcaccgtacccaggtggtggaatttcagccgatcctgaagatcatcgagatcggcaagacctctcccgaggcgctcgacatgctcttccgcggcgacgtatcggatgacttcccccacaaggacacgatcctggcactcgaagcgctgctcgaagatcccgacaaggatttcacccagttcgaggattacagaaatttctacaccttcgagatccacatggaagacgtcggtaccggccgctcgacccgttgggagcagcgccgtggcaccggatcaggtgctgaacagcaggttccaatttacgtggccatcggcgcctcgcttgcggccgtctacggcagtgccgagcgtcgcgccggcaagccggcaggcttcgcgcttgcgatgttcgacgaagtcttttcgaaaatggacggcaagaaccagcgccagatgatgagcttctacaagaatctcggcctgcagttcgtgattgccgcgcctttcgagaagcgggtcgcggtgctagagcatatggacaccatcgtggaggtcgatcgcatcggcgagcagtcgagggcaacggtcgtctcgttgaaggaaaaggccaagcgcgaactgcgtgcgatcgatccggacctgatgtccgccgacgaccttgccgcacgtctggccgccgagtag

SEQ ID NO: 48091 - DNA, 1179 bp, Bradyrhizobium pachyrhizi
atggtgcgtcgtttcagtgaggcgaacggactattgaacgatctgctggaccgctacgaaggtgggaccgcgaaccccatcgcacatcccgactatgacgcatttcccaacgtggtggctgcggacgtcttcctgaggcagatcgcgcgggccgaggcggtcggcgccgttagtctcgcaaggggacgcggaaccaggcgggatcagattgtgcacgtcagacttcaagccgcggacgcgctctaccactatctcggacgcgttccggccgctcagatcgcccaagaggctggtaggcgcctctgtgcggacatcgcgctggattggcgcttggtggaagcggctgccgcgatagcggaaacttgggggcgagccaagagctggcacgggttcgcctcatccgatgtggacaagctccgcgacgccttcgccctcgcccaagcaattctggagaataggcatttggatgtcgattatcggaccttctcgcgaagaacggtcggcgatagcaaagccctcgaacgcatcgaaggcgcggtcgtccgacttcttggcggaatcctcgagctcccgcccggagcgcggccccgcgaggcgctgcgcacgatcggattggagcgcttcgcgccaccgcttctcatcgccggaaggatcgatctcgatggcgccgatttgtcccagatttctccacgctatctaggcatcccgcccaaggaggcggatcgcatccgattccggcggccaccagcctaccttctcaccatcgaaaatttcgcgagcttcaacagacatgtcgccgaagccgatccagatcgagagggagtgacgatgtacgtgggcggatacccctctctcgccacccagcaggcgctgcgcacgattacgcaaatggtgtctggaaacacgccgatcttccattggtcagacattgatccggatgggacgtggatattccacacgatcgagcgcgcagtcggacgtccgattcgaccccacctcatgagtgtcgaaatcgccgaaagatcggggcaggtgccactgaggaaggccgctccggcgcgatgtccaccagactccggtattgcgatgctcgcggcctatttagcaggagacggagcaaagacgcttgagcaagaggagctcaatcccgtcttaccggatcctaccgctccgccgtga

SEQ ID NO: 48092 - DNA, 1530 bp, Bradyrhizobium manausense
ttgtccttgttccgtcatttgcatgacgacgcgtttctggccttttcgcgtgatcacaagcacctgtacgcggcgtgtctgctcgacctccacgaacgcttcttttcgggcgcaccagcgttcccgacgccgcagcaggttgtccacgccatctacgacgtcatgcgggccaatcccgcactgtggagcgagggcgatgatttcggcaacctgccggaaatgatctcggccggtcgccgccgcatccgcaaggcggatgtcgcgctcgcctccgagaagggcgacaaagcgctcggtctggcacggcagctttacgcacggctgctcgcctggggatggctcgaagaagaggaatatggccttcgggtcaccgtggatatggcgatgggacctctcctgatcatccagcggctggcgagcctcaacaaggatctctcgcagcggttcggcggcttgatcgtgcagatccgcctgaacctggaagcggtcgaaaagctgaggcccgagatcaccgaccgcaagcagcgcgaagccgcgctcgccgtccgcgaggcgcgcaaccaggctgaccagttcaccaagagcctgcgggccattctggccgacctgaagcgaatccgacggaccgtcatggactcgaagacagtggctacccggttggaggccttcttcgaggagttcgtcgatcagctcctgctgaaggacttcgagtccatcctcaccgtcaaccatccgtaccgcttccgtgacgcaatcgtcgatcttgcgcggaggatctcctacaccccggacaccatgcaggtccttgccgaggagtacaccgcatccagcatggcagcggacgtcgaggatgggcggatggctgcggcggacgacctgctcgccatcgaaaacatcttcgaacagatcggtgaaatgttcgaacggatcgaggccttccgcaggcagctcgaagctcgggtccgcaacacgatcaagtacgccgagcgaggcgggcagggactcgtcggccgggccggcgacctcgtccgtcgactcgacgccctgctgcgggacggcaggcacgagaaggcgaccgtcgaatggagcatcgagccgctacggtcgccctggtcggagcaccatcaggcgccggccaggcaaccgcgccgccccgtcgagacaagggaactcgccgggccgccctcggacccgctctacgagctgcggaagaagctccgtctcgaatacatcgctcgcatcgcaccccgccccgaggacgtcagacgattcctcgagggccaggtgccgccattcgcgaccaaagaagcccgcttcatcgaaatcgattccgtggacgacttcctcgccttcgattgcgcccgccgatacgcactgacgggcgaggtcccggcgctgatcgcggccgggttcgatctggagccgtgtccggatacgccgccacacgacagcgaatggctaaggtgcgcgaacttcgtggtcaagcgatccggcccacaccgaaacgcgagggcggcccatgctcagtga

SEQ ID NO: 48093 - DNA, 639 bp, Bradyrhizobium manausense
atgctcagtgagttcgaaaacatcgagcgctcctccggcgcggagaaggcggccgacctccgcaaagcgctacacttcctgctgcggcggcagttcgtgttcgcgggagatccccggactgggactgtctacaacatgctcatggacggtcgcttccgcgacgtggtcgacgggttcttcgacagttgcggataccgtgtccatcgcgatccggaggcgcagtgggccggcattgtcgccatggacgaggacgtgccgctgcctcggatgaagctcgacggaaccatcgtcatgctggtgctggcagcaaattggcagcaggaggtgaacgtcggagcggtcgaagaccgtgccgtcgtggtcgccaccttgaatgacctgttcgaccgctaccgcgagatggcccaacatggcggcggaggcgcgatctcggccgcccgcttccgcgacatcctgcgcgaggccgcccagcgcagcctggtcgagatcggcgacttcgacgacgaacagcaggactgcgagatcaggatacgcccgatgatcaagctgatcagcggcggcgacgccctccaacggctcgagcgctatgtccgcagcgaggaggcccggtttccgcagcccgcgggacacgaggcatga

SEQ ID NO: 48094 - DNA, 3435 bp, Bradyrhizobium manausense
atgatgcagctacgccacgtcacaatggtgaattggcacctattcgacatcgccgatatcgacgtgactggacacgtcggggtccttggcgagaaccggtccggcaaatccacgatcctcgacatggcgcaggtcgttctcaccggcggaagccggcggttcctgcgcctgaacgcagtcgccggcgacagcggaaagtcgcgcagcggctcgaagcgcagcgtcgtcgactactgcctcgggacgctcggcgaagaccagcgccggcgcgacgaggcgcgcacctacatcgcgctaggcttcgaagacacggaaggcgctcggccgccggtcacgatcggtatggcgctcgaggcgcgcaagtccgacagcagggagaccgtgctggcgctgttcgtcgtcatcggggccgttctgagctccaaggatttcatcgaacagcgaggacagtcgcagttcccggcgcagtgggaagaagtgcgcgcccgggtcgtcgcgatggtcggcgacggcaacttcgttaatcaccgcgaccgggccggcgactacgtccgcgagtacatgcgtcatctcctgccgcattcgccctacggcgagcagaacgccagcgcgctgcagaaatcgatcgtcaacgccatgacgctcgatcacaaccagacggccacgcaattcgtgcggaactacatcctcgaggaaagttcgatcggcatcaaagagctgcgcgagtcgatccagacctaccgcaacatcagcgagaccatcaggaagatgcgcctcagactcgaagccctgagggcgcttcgggtcgtcctcgcagctctggaagaggcgctcgagaccaagttcagggaggagtggatcgccaaacgcgcggcctggctcgccgcccgagcgacgaacttggacttcaagaccaaacggcgtaccgagatggcgcgccgggatgccgcggcaaccgaactcgaatctatcgacgaggacgtcagggccatcgataacgagatcgaacgcctcaccgccgcaattgccgagcacgatgccaagaccggaagaaagtcgctgcagcagacggccgatgtggccgcgcaggcggcgcaccgcgcctcggcggacttcaaggcgcgcttggacaacatccatcgcctgcatccgctccgggcgatgtgtgcggacgctttcgaggacttcgtccctgcgctggagcggcttctgaccgtcgccaccggggtcgacatcgcgctcgcctccgacgagctttccgcggccgagaaatccttcgcggtcagcggcgcgaaatggctaccgaagatcgacgaagcgcgtcagatgatcattgcggacctttccgggctccgaggccggcgcgacgaggtgctcgaacgcatccgacagcatgcctccggaggggcgcgggcctatctcggcgatgacaccgaactgctctgccgcaggctccggcagaagggaatggccccgcgcgtgctctgcgacatgatcgaagtcgccgaacccgaatgggcgggagccgccgaggcgctcctcggccgcgaccgggaggccgtattcgtggacagagcggtcatcagcgctgccacggcgattttcaaggaaggccgccgcgagttccgccacgcatccctggtgagcctgaacaagctcgagcagtttagggccaagcctgaacgcggcactttcccgtccattttccggagccaggatccggacgcgatggcgttcatcatgcgccgctatggcacggtccgtctcgccgacacactcgaccaattcaacaggcccggcagggccatcatgaaggacggcctctatgacgacggactcgtcaggacccatcgctggatcgaagcctcgcagcacaagatcggaaaggcggcccaagcgaacgccctgcgcgccctgcaggatcgggccgaggaactagaccggatcctgaccgacaagagcaaggaggcccaggccgcggagcaggcctttgccgctctgaagaacatctgcgatggacaagacgatctgaatgcttgcgccgcagccttcgcggccgcgcagaccgagatcgccgaagcacaggccatgctcgatgcgctcgacggcgtgggcgacggcgggcttggcgacaagaagagagcgcagcagaagctaaaggacaagaggctcggcgagagaaagacccagcagagagtgtttggcgagcatgacggcgaggtcagatcggcggagaggaggctcggagagggcgagaacgtgcccggctccgagctgaacctccgggtcgctcggtcgatctaccgcaagacgtttccgctctattccgccgcgaagggcagggtcgtctaccgcgagcgcctcgatgccgtggcccaaaaaggcttcgcggagaaacaccgcgccatcgccgacaaggcgctaaaggatgcggacaattcggacaccgagcgctctcggatcgagcgacgggtccgcgagctcctttacgattacttcgaccagttcgggatgagctcgcaagtcggcgcggaaagcgagccgctacgggaggtgaagccttggatggagcagctcatctcggatatcgaatccaacgagctacaccagtacgaacggcaggcgcgggaagcggcggaaaaggcgtccacccttctgcgcggcgagttcatcaacgcgctcacggcccggatcggcaagatggagcgggagctgcagtcgttgaaccgtagcctttacgcacatcccttccacaacgagcgatattcgttccaccgcacgcaggtggtggaattccagcccatcctgaagatcatcgagatcgccaagacgtctccggaggcgcttgacatgctgtttcggggcgacgtgcccgacgactttccgcacaaggatacgatccttgcgctcgaggcgctgctcgaggaccccgacaaggactttacccagttcgaggactaccgcaacttctataccttcgaaatccacatggaggatgtcgcaaccggccgctcgacccgctgggagcagcggcgcggcaccggatccggcgccgaacagcaggtgcccatctacgtcgccatcggcgcttcgctggccgccgtctacggcagcgccgagcgtcgtgccggcaagcccgccggcttcgccctcgccatgttcgacgaggccttctccaagatggacggcaagaaccagcggcagatgatgagcttctacaagaacctcggccttcagttcgtgatagcggcgccgttcgagaagcgggtcgccgtgctcgagcacatggataccatcgtggaggtggatcggatcggcgaacagtccagggccaccgtggttgagctgaaagagaaggccaagcgcgaactgatggcaatcgatccggacctgatgtccgaagatgaactcgccacccgtctggccgccgagtag

SEQ ID NO: 48095 - DNA, 1200 bp, Bradyrhizobium manausense
atggcgcggcgcttcacggacgcgaacgggctgctgaacgacctggtcgaccgcttcgaggccggagccgcaagtccaatcgcccacccggactatgccgcgttcccatcggtggtcgtggcggacgccttcctgaaacagatcagggacgtcgaaagtgccggcgcggtctttcttggctggggccgcggcgccaagcgggaccaagtcgcacacgtgcggctggcctcggcggagatcctataccgatacctcggtcgcaccccggcgtcgcggattgcggaggacgccgccgcgcggcttgtcgccggatcggcgctgcacggccagctgaagaacagcgcttctcaaatcgccgagttatgggggcggggcaagacgtggcacggattcgcttcgtccgacgtcgacacgctgcgccacgcgttcgttctcgcccaagcgattctagacaacaagcatctcgatgtcgactacaagaccttctcgcgacggacagtggggcacagcaagacgcttgaacgcatcgagggtgccgtggtccggctcctgagcggcatcatgcaatttccgccgggcgcgcggccccgcgaggcactgcgggcaatcggactggagcgcttcgcaccgccgctgctgatcgcgggcaagatcgacctccaaggggccgatctgtccacaatcgctccgctctatctcgggatcgcacccaaggaggcagatcgcgtccgcttccgggagccgccagcctacgttttgacgatcgaaaacttcgcaagcttcaacaggcacatcgccgaggccgaccccggtcgactgggaatgacgatgtacgtcggcggatatccctcgctcgccacccaacaggccttgcggacgatcggaggaatggtgtccgaacagaccccgatctttcattggtcggacatcgatccggacggcacctggatcttccacacgatcgagcgcgccatcggacggccgatccgtccgcacctgatgagcgtcgaaatcgccgagcgctcgggacaggtgccgtccaaaaagtccgcccccgctcgatgcccaccggactctggtatcgcagcgctggcagcgtacctggccgaagatggcgcaaagacgctcgagcaggaggagcttgacccgatcttgcccggagtcgccacactcacgtcggcgcaaactaggcgagactaa

SEQ ID NO: 48096 - DNA, 1461 bp, Mycobacterium sp. H002; identical to SEQ ID NO: 48085

SEQ ID NO: 48097 - DNA, 726 bp, Mycobacterium sp. H002; identical to SEQ ID NO: 48086

SEQ ID NO: 48098 - DNA, 3366 bp, Mycobacterium sp. H002; identical to SEQ ID NO: 48087

SEQ ID NO: 48099 - DNA, 1461 bp, Mycobacterium sp. H072; identical to SEQ ID NO: 48085

SEQ ID NO: 48100 - DNA, 726 bp, Mycobacterium sp. H072; identical to SEQ ID NO: 48086

SEQ ID NO: 48101 - DNA, 3366 bp, Mycobacterium sp. H072; identical to SEQ ID NO: 48087

SEQ ID NO: 48102 - DNA, 1461 bp, Mycobacterium sp. H054; identical to SEQ ID NO: 48085

SEQ ID NO: 48103 - DNA, 726 bp, Mycobacterium sp. H054; identical to SEQ ID NO: 48086

SEQ ID NO: 48104 - DNA, 3366 bp, Mycobacterium sp. H054; identical to SEQ ID NO: 48087

SEQ ID NO: 48105 - DNA, 1461 bp, Mycobacterium sp. H003
atgactgacctgacgatcgaagagctgttcgcgcacaacgacgacgtgcagaaatcccgcgcggtcaggctattggccgctaagaatctggcgccatacatcacgctcatggagcgccacctggaccgcagcgcgaaggtttccgaaccccagctggtggccaaactggaccgggatcttgacgcggtcggcctgggcgagcagtccggactcgccctcatcaagagctgggcaagtgacggctggttgcaccgcgcgtcggatggcgccggtcccgacgccgagaacgtctgctcgttgaccgaggacgcacgcagtgcgctggccttcgtccggcgactgcgtcgtgctgacagcgtcgccaccggcgggtccatcgcgggtatcgccgcgggcctcaagcgggtcgcgactcaactggatggcgacccgtcgcggctgcgtgccgatatcgaggctcagatcgccgagttgcagagctacttgcgcgcgattgacgacggataccgtcccgagccggacatcgtcgatctcgaggatgagacccgggccatcgcctatcagatggagcaggtgatcaccgacatcgtgcgttacggcagcatgcagaacgagatcaccgccgggctcatcgacgcggcggaggactccgattccgggttccgcgaccgtgcacgacggatgttcgccgactacgacgccctgttcgactcccgcgaacgcgcctcgtacgccgcctttacacgcaccatccaggaccccgaccaacgtgccgctctacgcagcgatatcgcctgtgtcgctgagggattacctgagctagacccgggtttgcgtgatgtcatgaagaacttcttcaagctggtttcccagcagatcgcggaagtctcccgcatcgagcagcgctgtgcgcaacgtatccggcgattcttcgccgccggcaccacggagcaggcgcgtggccgtgcgcggcagctcaacgatgccctggccgccgggcacgcgctgctcaaggtgtccaccgcggattccccgattgacgccgaactacccatcggccgctctgcggcggcgtccatcggtgccctgtcattcaccatcaaggacacggcgccgccggtgctggctcaggaagcgccatcgggccccttggacttgagtggattctcggcactggcgacccaggtggacatggccgcactggccgatacggtgaacagagctgttgccggtggcccagtttccctgcccgacatgatttctcatgtcgacgcaccgtatctgggtgacgtgatcgtgctgtggtcgctggccctcaagcaggacaacacccttgatcgcgagtcggtcaaggtgaagttccggtccctggatggacaggaccgggtgatggaggtacctcagttgatgttccgtgaaccggtgttggcaaccctcgaagaggagggggcggcactgtga

SEQ ID NO: 48106 - DNA, 726 bp, Mycobacterium sp. H003
gtgacgacaacgcccctgggaaacatcaactttgacgatctgcccggtgtcgagccggatgcctcggcacccagaaccgtcaagggaccacggttcgatggcgacaccagcgagctgaccgacaaggcatgctgggcgttgcagaacctggtggcccggcgctatctgagcaaggacggccagccggagttgtgggcatcgatgatggagcaccgcaaggtgctggcctcgcgtttgtccgaattggacctgcggctacgagttttcgacgatcttgaggtcgcctatgccgaaccggctcccttggagaaccccagcgcgtacggcgcccgggtgttgcgccgcgaacccctgggcacgtatgcctcgatcgttgcgctgcacctggccaagatcgcgaggaccgcacacgacgagcaggtgctggtcagccgcgacgatatccatgagctgttcgccaatgtcagccacgacatcgaccgcgatgaagcgatgctgcgcgaccgcgtcgacgaagccatcaaacgcctgtcgaaggccgagatcctgcagcgcactcgcgatgacgagcacagctacaccatcagccccgtcatcaacgcgctgatgtccgcgcagatgatcgaggcgttgcaacgccaatacgagcagctgcagcgtggcggtgccgccccagaagactccaccgacgatgaagaagatggcgataccgatgacgatgaatga

SEQ ID NO: 48107 - DNA, 3366 bp, Mycobacterium sp. H003
atgaatgagggcgtacccggcaggccgggtgattcagtcacccagcagttctggctgtcccgactgcaggtcattaactggggtgtcttcgacgggtaccacaccatcgagttcagccgccgcggcacactgatcaccggctcctccggaagcggtaaatcttccctgctggacgcgatttcgctggcgtttctgtcctcgaaccgccgtaacttcaacgcgtcaagcgataccactgcggccggctcgagtatgggcaagcgcaccgtcgacaagtatgtgcgcggtctgtggggtgagctgaagaacccgggggagcggccaacgcagatgttcctgcgcggcaagggtgcggcatggtcggcgatcgcggtcacctattcgggcaccgatggtcgcgtgatcaccggcctcgttctcaaatggcttgcaccgggctcagattcggattcctcgagccgctattacctgatcgacgccgatgccgatattcgtgacctgtgtaattcctgggcgagtaagggatattcggctgcggttttcgatggcgcgggctggcgtggacacaagagcgaacgctggtatttggaacagctctacgccgccgtcggtatccaaggttcctcggcagcccagcagctcttgggtaaggccaagtcgctcaaaagcgttggtggcctggaacagttcgtccgcgagtacatgctcgacgagcccgagtccatggccgcgatctccgaggccctggggcagatcaccccgttggtggacgcgcgtgccgcactggcggtcgcgcagcgccagcgtcagacgctgggcgatatcgagcagattcagcagacgtacgccagcgacgcggcgcagctggccaccgtcgacgtggtggatcaccacaccgtccgcgactacgttgatcagcagcggctggcgctggccggtccggagatcgacctgttggacaccgagatcactcggctcggcggtgaatgcgacgaaatccagtcgcgccaggacattctcaccggcgagcgggacaagctgctcggccggatcgccgccgccgacagtaatctcgcaccgctcaagagtgaactcgctcatgcgcgggcccgggccgaggaggtgtcgcgccgccgtaccgcgtacgacagcgccctgtgggacctcggccacgacgaagacgtcgaatccgctgaggaattcgaagccatgcgggtcgagagcctgcgcgcagtcacccggatcaatgcggaactcgaagcgggtcatgacgcctatgtgatggcggccggcgccttgtcgacagcgcgcgaccagctgcgggctgcttcctccgagctcaagcgcgttgaacatgtcggtacctcggtgcctcctgacgaggaccgcatgcgtggggaaatcgcggcggcgctgggccttaccgccaaggagctgccctacgtctgcgaattgatggatctgcgcccaggccaggaacggtggcgcagatcggtggagaaggtgctgcggtctaccggtctgtgcctgttggtgcccgatcagcaccaccggcaggtgctgcgatacgtcaacgagaacccgatgcgcggttacctgcagatggagcgggtgatcccttccggcgcgccgcggcgtgccgagccgggcaccctcgccgactgcctgcgcctgaccaaccccaatcacgaatgcgccagtgctgccatgaatctggtggcggctgtgggcgattacgtgctggttgatacacccgacgagttcagcaagcaccgccgggcggtcaccgatcagggcctgcgcaaggacggcgaccggcgcgcggtcaaggatgaccggcgcgagctgcgcgcctcccagtacatctatcagggcaacgcaggcgacaagcgggccgcgctctccgatgatgtggtcgaggcgcagcaggccgttggtgacgccgagaagttcatcggcgagatggacaccaagcgtgaggaactgcgctcggaggtggtgcggtggtccaagctgcacagccagtacgagtactggagccagatcgataccgattcggccgaagccgccgtggcacggcttcaggaccagtacgacgcgatgctggaggcgaaccccgacctcaccggtctgcagcagcaggccgattcctatctcgatgagatcaagaaactctccgaacgtatcggtgcgctcagaaggcaagaatccgaacatgattcgcgccgcacgagactgctggacctgttggacaatttgaacccgcgcgaggtgggcgggcacacccgatccggtatcgaagcctatgttccgcagctgtcgtcaagcctggatgtgctggagccggacacctaccggttggagctgtggcgtcagatcgagaaggaccagtcggtgctgcgggagagtgtcacccgttcacgcaacgagctgaaccgaattctcaacgcctacgaccgggacttcccggattcgattcccaacgacagtgagaacttcgacgagaagatccacgattacgtcgccttgtgccgccgaatcgacgagcgtgacctaccggccgcctacgaacagatgctgcgactcatcaccgagcaggcacctaccgcagtcctgcggttgcatcagctcgcggaggaggaggcgcaccgcatcaccgaccagatcgaccgggtcaatagcggtttgggctcggtggagttcaacaggggaacccggttgaccttgcgtgccgagcccaaggcgcttgaggcggtgggcgagctcaacgagcgggcccggcggatttcgggacgggccgttgcggtttccatgggagacgagaaggccatccacgaccagtaccaggacatcctgcaactgcggaatctactggcggcggagactcccgaggccaggcaatggacgcgcgacgcgttggatgtgcgcaaccgcttcgtgttgtactgcgaggagcgcgacgccgccaccggcgaggcgattcgcacctacagcaatgcgggtgcgaattccggtggggagcaggagaagctgatggccttctgcctcgcgggtgcgctgagcttcaacctcgccaaccccgaaactggggacaatcggccggtctttgcgcagctgatgctcgacgaggcattctcgaagtccgatccgcagttcgcgcagcaggcgctatcggcgttccgtaagttcgggttccagttggtgatcgttgcgaccgtgcagaacacgaccaccatccagccctacatcgacagcgtggtcatggtgtccaagcccgacggcccgggagttcggccggtcgcctcgacgcgcacggtgcctatcggggagctcggtgacgtgcggaaggcagtcaacgcccgctga

SEQ ID NO: 48108 - DNA, 1461 bp, Mycobacterium sp. H063; identical to SEQ ID NO: 48105

SEQ ID NO: 48109 - DNA, 726 bp, Mycobacterium sp. H063; identical to SEQ ID NO: 48106

SEQ ID NO: 48110 - DNA, 3366 bp, Mycobacterium sp. H063; identical to SEQ ID NO: 48107

SEQ ID NO: 48111 - DNA, 1461 bp, Mycobacterium sp. H070; identical to SEQ ID NO: 48105

SEQ ID NO: 48112 - DNA, 726 bp, Mycobacterium sp. H070; identical to SEQ ID NO: 48106

SEQ ID NO: 48113 - DNA, 3366 bp, Mycobacterium sp. H070; identical to SEQ ID NO: 48107

SEQ ID NO: 48114 - DNA, 1461 bp, Mycobacterium sp. H079; identical to SEQ ID NO: 48105

SEQ ID NO: 48115 - DNA, 726 bp, Mycobacterium sp. H079; identical to SEQ ID NO: 48106

SEQ ID NO: 48116 - DNA, 3366 bp, Mycobacterium sp. H079; identical to SEQ ID NO: 48107

SEQ ID NO: 48117 - DNA, 1461 bp, Mycobacterium sp. H092; identical to SEQ ID NO: 48105

SEQ ID NO: 48118 - DNA, 726 bp, Mycobacterium sp. H092; identical to SEQ ID NO: 48106

SEQ ID NO: 48119 - DNA, 3366 bp, Mycobacterium sp. H092; identical to SEQ ID NO: 48107

SEQ ID NO: 48120 - DNA, 1461 bp, Mycobacterium sp. H101; identical to SEQ ID NO: 48105

SEQ ID NO: 48121 - DNA, 726 bp, Mycobacterium sp. H101; identical to SEQ ID NO: 48106

SEQ ID NO: 48122 - DNA, 3366 bp, Mycobacterium sp. H101; identical to SEQ ID NO: 48107

SEQ ID NO: 48123 - DNA, 1461 bp, Mycobacterium sp. H110; identical to SEQ ID NO: 48105

SEQ ID NO: 48124 - DNA, 726 bp, Mycobacterium sp. H110; identical to SEQ ID NO: 48106

SEQ ID NO: 48125 - DNA, 3366 bp, Mycobacterium sp. H110; identical to SEQ ID NO: 48107

SEQ ID NO: 48126 - DNA, 1461 bp, Mycobacterium sp. HXVII; identical to SEQ ID NO: 48105

SEQ ID NO: 48127 - DNA, 726 bp, Mycobacterium sp. HXVII; identical to SEQ ID NO: 48106

SEQ ID NO: 48128 - DNA, 3366 bp, Mycobacterium sp. HXVII; identical to SEQ ID NO: 48107

SEQ ID NO: 48129 - DNA, 1461 bp, Mycobacterium sp. HXXIII; identical to SEQ ID NO: 48105

SEQ ID NO: 48130 - DNA, 726 bp, Mycobacterium sp. HXXIII; identical to SEQ ID NO: 48106

SEQ ID NO: 48131 - DNA, 3366 bp, Mycobacterium sp. HXXIII; identical to SEQ ID NO: 48107

SEQ ID NO: 48132 - DNA, 1515 bp, Bradyrhizobium retamae
ttgtccttgttccgccatttgcacgacgacgcgttcctggtgttttcgagggaccacaagcacctttacgcggcctgcctgctggatctgcacgaacgcttcttcacgggggccccggcattcccgacgccgcggcgggtcgtgcacgccatctacgatgtcatgcgcgccaatccttcgctgtggaacgagggcgacggcgggctgccggacgtgatctcggcgggccgccgccggatccgtaaagccgacctcgctttcgcatccgagaaaggcgacaaggcgctcggcttggcccgacaactctactcgcgcctggtcgattggggctggctcgaggaagaggaatacggcctgcgggtcaccgtcgacatggcgatgggacccttgctggtgatccagcgactggcgagcctgaacaaggacctctcccaaagattcggcggcctgatcgtccagattcgtctgaacctcgaggcggtggagaagctcacgcccgaggtgaccgatcgcaagcagcgcgaagccgcgctcgcggtgcgtgaggcgcgcaaccaggccgaccagttcaccaagagccttcgggcgatcctcgccgacctcaagcggatcaggcggacggtcatggagtcgaagacggtcggtacccgcctggaggctttcttcgaggagttcgtcgatcagctcctgctgaaggacttccagtccatcctgacggtgaaccatccctaccgtttccgcgacgccatcgtcgacctggcgcgcagaatctcctacactccggacacgatgcaggtgctcgcagaggaatacgcggcggccagcatggcgtcagatgtcgaagacggccatacggccgccgccgacgacctgctggcgatcgagaacatcttcgagcagatcggcgagatgttcgagcgtatcgaaacgttccggcgacaactcgaagcgcgcgttcgtaataccatcaagtacgccgagcgcggcgcacaaggtctggtcggccgcgccggcgacctggtccgccgcctcgacgccctgctgcgggacggacgccacgaccaggcgaccgttgaatggagcgtcgagccgctggcctccccctggtcggagcaccatcaggcgccgacccgacagccccgccggcccgtcgaagcaagggagctctcggcgccaccatccgacccgctctacgaactgcggaagcaactccggctcgagtacatcgcgcgcatcgcgcctcgtccggaggacgtccgcaagttcctcgaagggcaggtcccaccgttcgggactaaggaagcgcgtttcgtcgaaatcgagacggtcgacgacttcctcgcgttcgactccgcccggcggtacgccctgacgggcgatgtgccaccgcaggtcgccggcggcttcgatctgcagccatcgcccgatactccgccgcacgacagcgaatggctcagatgcgccaatttcgtgatccgtcgcggcggcctccgcaagggagtagcgcatgcttag

SEQ ID NO: 48133 - DNA, 639 bp, Bradyrhizobium retamae
atgcttagcgaattcgagaacatcgagcgctcggcaggcgccgacaaggcagccgatctgcgcaaagcgctgcacttcctgctgcgccgccagttcgtgttcgcaggcgacccccggaccggcatcgtctacaatacgatcatggacgggcgcttccgcgacgcggtcgacggctttttcgacacctgcggctaccgcatccatcgcgatccggaagcccaatgggccggcatcgtcgccatggacgacaacgtgccgctgccgcggatgaaattggacgaaaccatcgtgatgctcgtcctcgccgcctattggcagcaggagatcaacgcgggcgcgatggaagaccgggcggtcgtcgtcaccaccctcaacgacctgttcgatcgctatcgggagatggtgcagcccaacgggggcagcgccttctcaagtcagcgcttccgcgacattctcaaggaggccgctcagcgcagcttggtcgagatcggagacttcgacaacgagcagcaggactgcgaggtccggatccggccgatgatcaagctcatcagcggcggcgacgccctgcagaggctcgagcgctacgtccgcagcgaggaggcccgctttccgcgggacgccggagacgaggcatga

SEQ ID NO: 48134 - DNA, 3438 bp, Bradyrhizobium retamae
atgatggaattgcggcaccttgccttggtgaactggcacctgttcgacgttgccgacatcgcggtcgccggccacatcggcgtgctgggcgagaacaggtcgggcaagtcgaccatcctggacatggcccaggtcgttctcaccggcggcaaccggcgcttcctgcgcctgaacgcggtggcgggcgatagcggaaagtcccgcagcggatccaagcgcagcgtcgtcgactactgcctcggtacgctcggcgaggaccagcgccggcgggacgaggcccgcacctacatcgcgctcggattcgaggataccgagcgcgagcggccgtcggttacgatcggcatggctctcgaggcgcggaagtccgacagcaaggagacggtcctcgcgctcttcgtcgccgtcggcacggtcttgacggccaaggacttcatcgagcgcaaaggggcgcagcagttccccgcgcaatgggaggacgtccgcgcccggatcgtcgcggcggtgggcgagcagaatttcgtcaatcaccgggaccgggccggcgactacgtgcgcgaatacatgcgccatctggtgccgcacgcgccctacggcgagcagaacgccagcgggctgcagaagtccatcgtgaacgcgatgaccctcgaccataaccagaccgccacccagttcgtccgggactacatcctggaagacagtcggatcggcatcaaggaactgcgcgagtcgatccagacctaccgcaacatcagcgagacaatccggaggatgcgggagaagctcgacgccctgaaggcgctgcgcgcaatcttggcgggcctggagaggactcttgagacgaaattccgcgaggaatggatcgccaggcgcgccaactggctggcggccagggcgaccaatcgcgacctgcgggccaggctgcgcgacgagaccgcgcagcgggccgcggcgacggccgagctcgccttcatcgacgaggacgtcaaggccatcgacagggagatcgaacgcctgacgacagcgatcgcggaacatgacgccaggacgggccggaaggaattggcgcagaccgccataatggccgatcaggccgcgcagtgggccctttccgaattcagggggcgggtggagaacatccaacggcttcgaccgctgctcgccatgtacggctgcggcttcgacgaattcattccctcggtcgcgaagctcctcggtgcagccaagaacgcggaaatcggagccgtggccgacgaactctcggcggccgagcaggggttcgtgtcgtcggcgccagcatggtcggccaaggtcgacgaggcgagacaggcgatcatggccgaggcgtcgaaattgcgcgcgcaacgcggcgatctgctcgaacgcatccgtcagcacgcctccggaggcgcgcgcgcgcatctcgagccggataccgaacggctgtgcctcagactccggcaaaagggaatggcgccgcgggtgctgtgcgagttgatcgaggtcgcggaccctgaatgggcgggagctgccgaagcgcttctcggccgcgaccgggacgcggtgttcgtcgaccgaccggacatcggcgcggcgacggcgatattcaaggaaggtcgccgcgaattccgtcacacctcgctggtaagcctcaacaagctggagcagttcagggctaagccggaccgcggaacgtttccctctatcttccgcaccgaggatccggacgcgctgtcgttcatcatgcgccgctacggctccgtgcgccttgccgacacgctcgaacagtttaacaagccgggccgggccatcatgaaggacggtctctacgacgacggcctggtacggacccatcgttcgatcgatccgtcgcagcacaagatcggcaaggcggctcaggcgaacgcgctgcgagcgctgcaggaccagacggaggcgctcgaggacgcggtttcccagaaggcgagggaagcggaagcagctgacgccgcgttcgcggcccttaggtccctttgcaccgacgggagcgccggcctgaagtcatgtgcggcagccttctccgccgccgaggccgagaaggctgatgcgcaggcaagattatccgccctgcacggggccggcgacggcggacttcgtgagaagaaggaggcgcagctggacctcaaagaacgccggcgcgtcgaacgggagacgcagcagagggctttcaacaagcacaatggcgaggtgcggctcatcgaagggaagctcggggacggagaaaacgtgcccggctccgaactcaacttgagagtcgcccaatcgatcttcctcaagaatcgctcactctacgccgcgatgaagggccgcgccgcctaccgatcgcgcctcgatacgcgtttgcaaaagagcgaagcggagaagcattgttccatcgcagataaagccctgaaagatgccgaggcgtcggacgtggagcgcaagggtatcgagcgccgggtgcgggaattcctggacggatacttcgacgatttcggcatgagttctcaagtcggcatcgaaagcgagccgctccaggaagtgaagccctggatggagcagttgatcgacgacatcgaatccaacgaactgcgcaggtacgaacggcaggcgcgcgaggcggccgagaaggcctcgacgctgctgcgcggcgagttcatcaacgccctgacctcaaggatcggcaagatggagcgggacctccagtcgctgaaccgtagcctccaggcccaccccttccacaacgagcgctactcgttccatcgcacacaagtcgtggaattccagccgatcctcaagatcatcgagatcggcaaaacctctccggaagcgctagacatgctcttccgcggcgacgtgcccgacgacttcccgcacaaggacaccattgtcgcgctcgaggcgctccttgaggatccagagaaggacttcacgcagttcgaggactaccggaacttctacaccttcgagatccacatggaggacgtcgccaccggccggtccactcgatgggagcagcgtcgtgggacgggatcgggcgccgagcagcaggtgccaatctatgtggcgatcggggcctcgctcgccgccgtctacggcagcgccgagcggcgcgccggcaagccgttgggttttgcgctcgccatgttcgacgaggcgttctccaagatggacggcagaaaccagcgccaaatgatggccttctacaagaagctcggcctgcaattcgtgatcgccgcgccgttcgagaagcgtgttgcggtgctcgagcacatggacaccatcgtcgaagtggatcgcatcggcgagcagtcgagggcgaccgtcgtttcgctgaaggtgaaggccaagcgcgagctcatggccatcgacccggatctcatgtccgacgaggacctcgccgcacggctggccgccgaatag

SEQ ID NO: 48135 - DNA, 1191 bp, Bradyrhizobium retamae
atgccgcgccgtttcaccgacgcaaaggaactgctaggcgaccttctcgaccggttcgaggccggcgcctcaagcccgatcgcgcaccccgactatgccgctttcccgtccgtcgtcgccgccgacgccttcctgaaacagatcaaggaggctgaagagatcggcgcggtctcgctcggctgggggcgcggcgccaggcgggaccaagtcgcacacgtgcggctgatgtcggcgggcgtcttgtatggacgtctcggccgcaccccggcgtcgcggatcgccgaagatgctgccgggcgtctcgtcgccggcttgtcgctgcacgatggactgaaggaaagcgctgcgggtatcgccgacgtctgggggcgagggaagacgtggcacggattcgcgtcgttcgacgtcgagaggctccgcgaggtgttcgcgctggcccaagcgattctggaccacaagcacctggacgtcgactacaagacgttctcccggaagacggtgggcgacagcaagacactcgaacgcaacgaaggcgccgtcgtacgacttcttagcggaatcctcgaatttccgccgggcgcgcgaccgcgcgaagcgttgcggactatcgggcttgagcgtttcgccccgccgcttctgatcgcggggcggatcgatctcgacggggccgatctgtcccggatctctccgcattatctcggaatcacgcccaaggaggcagatcgtatccgcttccgggagcccccggtctacgttctgacggtcgaaaacttcgcaagcttcaacaggcacatcgccgaggcggaccccgggcgactgggaacaacgatgtacgtgggtggatatccttcgctcgcgacgcaagaggcgctccgggtcatcgcaggaatggtgtccgaatgcacgccgatcttccactggtcggacatcgatccggacggcacctggatctttcagacgatcgagcgcgctatcggacgtccgatccgtccccacctcatgagcatcgaaatcgccaagcaatttggacaagttccggctaaaaaggccgcaccagcgcgatgcctatcggattctggcatagctgcgctcgccacttatctggcggaggagggcgccaagacccttgagcaggaagagctcgaccccgtcttgccccaagtcaccgctcggaggttagcactaacttag

SEQ ID NO: 48136 - DNA, 1416 bp, Bradyrhizobium lablabi
atgaagctgtttggttatcttccggagaccctcttcaagcctctgtcggggccgaagaagcacgtctacgcgcgcctgctgatgcgtctctacgagaggctctattcggcacggatcctcgagacgccgcttagggaagaggtcgtgaagcagatcgaaatcggtctctcggagtttgccataagatcgacgggcgagctttccgagggcgaccctgaagaagatcagaccacgagccaagctcattacctcgcctattatcgactgcgcgataccggttggctcacggaagagaccgagaagtggcgcacctacgtcgacatgaatccggacgcgttcatggtcctgggcgcgatcaccgatttcggcaacagccgggtgcgcgtcgccggcgccgttgtcgacgtcaaaaacaaccttgaggccgcgaaccgcgagccggaaaccatggcccaaggtctggccaacgcgcacgacaccgccttgcggttcgcccgcagcatgcgccggatcctcgccggcatgcgcgagattgaggaccgcattctgggcaatccgaacgcagcggccatcctccgcactttcttccaggactttgtcgacgggctgctgatcgccgactacaagcagctcaagacgtctaacaacccctaccgtcatcgccgcacgatcgcatcgcttgcgggcgatatgctcgcggacgccgagcgcatcggcaagatcgcgcgcgcctacatcgagcagggcgtcatggccccgggcgccacggtcgcgacggccgaagaacgcgtcatcgcggagctcgagaagatcaagagcgtgttcgaggacgtcggtcccttcatggacaagatcgaggacttccgcgatcgcctcgaacgccgcatccgcaccaccgtccactacatggatgtcatgggagagggggcggccgagcggatcgtccggttgatcgagcaactctcgaaaatcggcaccgacgaggtggagatccgcctgaggtcgccggatgtgggtctgccgatcacgtcgctcgcgctgtacacgccgcctcctccgaaggcgccgcccgagcggacgcgcttcaaggtcccgaaacaggatccttatctgcgcgcctacgtccaggccactaccgagttcgaccggatggtgcgcgtgtccgaccagaagctgctcgagttcgctcgccggcacatgcaaggccgcgacgccgtgtcatcatctgagatcgagatcgagagcattcccgatctcttcgcctatcgggccatcccgaatctggctgcggtcggtcgctctgtgcggctgggcgaattcacgatcacgctcgaggaggggcgcaccaccaacgactggatcgacgtgaccgccttccggatcgatagaacgaggaccacggccgatgctgcgtga

SEQ ID NO: 48137 - DNA, 642 bp, Bradyrhizobium lablabi
atgctgcgtgatctttccaaaatcatcgacgacgcggactccgaagggcagtacggcgaccagttgcagaaggaactgcgtcaggccgcccagacgctctggcgcgcccagttcatctacgagaacgattggggcgtgaagacctcctacgagctgctccgccgctacacgggctacttcgagaacctgttcgatgcgctcggttaccgcgtcgtgggcaggccgaacgacggctacgtcggcctggtggcgaacgagctgcctcagcgtcaaagcatgaaactcgacgagagcctgctcctgctggtgctgcggctgcactacgaggaggcgttcacgcggttcgaggccaaggaattcggcgaggtcgaggtcgagagcgagcagattctacagatctacgaggaccggacccatcgggagcgacccaacttcgggcgcgtaaaggaaatcctggccggcttcaggcagcgcgggctcgtccggatcgaggatagggacgacagaaacttcaccttgttcctgcggcctgccttgccgatggtggtctccaaggacacgctcggctccctcgaagagttcgtctcgcgctcgaccgcggcgacggcaaagaccgacgccgcgagcgaggtgcaggcgtga

SEQ ID NO: 48138 - DNA, 1212 bp, Bradyrhizobium lablabi
atgaccgacgttcgtacaacggatgccggcgtcgaattcttggagcgactgctggagcggagcgaacgcaaccctgatcgctcacggccagcttccgcggctccggagtacgacctgctttcgaccgcacagcaggtgagccggttccacgatctgatgtccgcggcggagaggttcggcgccgtcgaagtgcagcggggcaagagggaccgcagccacctgatcgagcgggtccgagtcctaaatcccgaactgctcgccaggcatctcggtcgcccgactgcgtcggcgacagcgcagcgcgttagacaagaattgcaacgagtggcagcgacaggagagccgtgggtcgccacactgttagacgagatggccgtccggtgggcacgcggagaggccgcttatcgtctgacggccgctcaggccgatgccgccaaggagttcttcacgctattggcgtccatctcgcgggaggaggctcgcggactggacgcgcgaaccttctccctcaaggcaacggatgacacaaaagccttcgatcgccacgcttcgcggcttgccgccatcatagccgttcggatcggccagcctggcgcagccgcggacgtggtctggacgcacatcggactggagcgtttcagtcaccctatttatctgagggggcccgttgccgtggaaggggcaagcggtcgtttggccgacggtcgcgcgaagcccttcgcctcaattcatccggagatgctctcgcaactatcggtctttgagcagccgacggcaatcctgacgatcgagaactacgcaagctttaaccggcaagtccgcgagatcgaggatggcagcctggtcgtatacaccggcggtttcccggcggcgggagtcaccgagctcctgtcgaaggttctggtgaccgtgccggccgaggtcccgttccttcactggggcgatgtggatgccggtggtctgcggattttcaggcatttggaggaaaacttgcctcgtgggccgcggccgcatctgatgaccaaggagctggccgagaaggccgggcagccggccaatccggaaccgagcctagcgtcgatcgcgagatccgaaagcgctatccgcaatttggctgactggctggcgtttggatccgatgtgcgccacctggagcaggaggcgctggagccgcggtccgtcgtgccagctgccgatcacggcctaggctga

SEQ ID NO: 48139 - DNA, 1509 bp, Aureimonas sp. AU20
atgaaggcgcggccgcccgcgcgcgagccgaccgcggtgacccgccccacgccccaggttcgcacgcccgagcttcgcacgaccaaggttcgaatgccgcttttcgacgtcctgccgcccgacctgttcaagcctttggcgtcgtcgtcgcgccggctttacgccgatctgctgctgcatcttcatcaccgcaccttcaccctgtccgcctcggtgccgcgccgggccgaagtgatcgccgagatcgacgccttcctggcgcgccgcgcgcccgaggacgccgcgctcgaggacgaggggccgaacaccaaggccgaggaacgcgcccgcaccgcctacgagaggctggtggaaaccggctggctggtggaatatcgcgagcgctatctgaagctggtcgatctcgaccccgaggcgagcggcctcctgcatcttctctccgacatcgagcgcggcgagacggtgagctatggtggcgcggtgctcagcgttctcagcgcgctggaaagcgcggctgcggacccggccgagcgctcggaaaacctgcgcaacgcgctacgcggggcgagcgagttcatggcgcatatgcgcacggtctcggtctcgctgcgccaggccgaagagcgcatcctgcgccagccctcgctgcgcgaggtgttccgccacttcttcgaaagcttcgtggaacgccatctcattcgcgacttcaagacgctgcacacgcgcgacaatccgttccgcttccgaggcggcatcctgcgtcaggccgctgacatgagcgccagtgccgagatggtcgccgcgctcggcgcagcctatacgcgggaagggcgggcgctgaacgtcgaggctggcgtcgcgcgcgtgcgcgaggaactcgccacgatcgcctccgtgttcgaggcggccgaggagcatctggccggcatcgacgccaccgtctcgcgcatcgagcggcgcatcgccaacacggcccgctacatggatcgcatccagcaccgctccgaggtcgggctggtggacgcgatgaaggccgtggccgctgccaagggcgacgaaatccccgtcggcatcgcgcttctaccccgcatcctgccgcttggccccgtgcatattcccgcgccgcgccgcgacaagccggccatcatccgcacagtcctcaccgagcgcgcgcccgacccggccgcgctgcgctacgccaaggcgaaggaggagtatgtccggcgcacgcgcgtcacgcccgagcgcctttcctcctatgtcgagcgcgcgctggcctcgcggccggagatgcgcgggcgcgacatgccgatcgaaagcgtggacgatttcgtcgcctttcagcggctgcgggagattccctcgattttcaacggcgccctggcgcgctcctacgagatcgtgctcctgaccgatcgctgcgccaacgactggatctcctgccaggacttcctgatccgccgccgcacactcgcggagacatcgaaggcgagccagaatgcagcgtga

SEQ ID NO: 48140 - DNA, 753 bp, Aureimonas sp. AU20
atgcagcgtgagatcgacgagttccgcgacatcgtggacggcgaatgggccggcggccacatggccggccgccgcccgaccggcgaggagctgacccgcgcgctgcaggtcctcatcacgcgccaatgcgtttattcccacacgcccggcatcgggcgcacctatgacatggtgcgcgcctatcccactttcttcgagcgctatttcggctcgctgggctaccggctggtgatctcgccgcgcgaccagatggtggcgctcaccgttcccgccgacgaggcgcgctacgacggcgtgttcgagcggctgcgcaaggacgagacgctggtgcttctggcgctgcgcctcctttgggaggaagccctcagggcgcacgaggtcggcgacggcggcgtggtggagaccaacaccgacgatctggtggaccggctcgtcgcggtgacgcagacaccgccccccgaggaaacaaggctcctcgacatcctgcgcatgttcgcccgccacggcgcgctgcggctcggcgagcgggaccggacgcgccgcgtctcgacgctggcgatcctgcccggcatcgccatcctggtgcccgactcctatgtccgggatctcctgctctgggcggtggagccgccccccggaacgagctcggcggcgggagacgagggcgctgaagccgtaagcgacgacgcgaatgagccggccggcgacgagccggcgaacgaaaccaagacggagggcgaggacgatgtatag

SEQ ID NO: 48141 - DNA, 3420 bp, Aureimonas sp. AU20
atgtatagcctgtcgcgcatctccctcatcaactggtatctgatcgacgccaaggacatcgagattcggggcgaggcggccttgatcggcccgacaggggccggcaagtcctcgatccaggacgcgatccagtccgtcatcaccggtgtcaaccagaaccggctgaacctcaacgccagcgcctccggccgttcctcgcgcagcgtgttggaatattgcctcggcatgacgggcgacccggccgaggacggcaaaccgctgcgcgcctcctgcgagacgattctcgcgctcaccttccgcaactactacacggaagagccgatcacggtcggcgtcgcgctttcggcccgccatggcgactcgcgcgaagaggtcctgtcgcgcttcgtgattccgggccatgccttctcggtggcgcatgtccggcggcgcgtgaagggcgtcaccaccgtcgcgccctggagcgagatcgcctcggcccttcgtgccgagcatcccggcatggaggagttccgcaactcggcggagaagttcaccgcccatatgctgggcctgatgcgcggcggcgcggcggtgcccaaccccaagcatttcctgcgcgccttttccaacgcgctcgccttcaagccgatcttcgacccgacgctcttcgtgcgcgatttcgtgctggagcccgatccgctcgatgtcgagcgggtgcgcacctcgatctccacctggcgcgagctggagcggctgatcgccgatgtcgaggcgcggcacaagcatgcgctgcgcatcgccgaccggttccgcctctgggccggggcgcggctatccgccgaccggcagcgctggcgcgccgccgcgctggaatcgcgccgactggcccacgaactcaaggcctcccgcgccgttctcgacgcgcgcgagggcgagttgcggctggagcgcggcgtgctcgacagccggcgcgactggattcggggctgggacgaggaaattcgctccaaggaggcgctgctgggcgccgccggtggcgaggcgcagcttcgccagatcgacgccgaggacaagctcgccgcgcgcgacctcgccgaggccgagaagcaatggacgcgcctgcgcgaggcgctggcccatctcgttcgccttcacgacgcgctcaagccgagcgatccgcgcgccagcgacgcggcgcgccaggcgttggccctagtgccggccgagcttccccccggcgaagcgctgcgcgggcgcggcgagcgcctgcaggcgctggtggaggaggcgacgcgggccgagagctggcagcacgagctggatgcgaaggccgacgcgctgctcgacgagacgcggcgcttgcaggagcggctggagcgggtcgagggcggcttgcagcgcccgcagggcgcgctgctttcgcgcgaggcgacgaagcttctctccgccctccagagcgacggcattcccgccatgccgctttgcgacgtggtagaggtggccgaccccagctggcaatatgccgccgaggccctgctcgggcgcgggcgcgaggcgatcatcgttcagccgccgctcctgcagcgggccttcgatctcatgtggagcgaccgcaacacgttctccggctgcacgctggtgaagacctcggcgacgcgctccaccaacgcccatgtgccggcgggcagcatcgtcgaggcgctgcgcaccgtggacgagcacgccaaggcctttctcgccgtgcgcatcggcgccttccgcaaggccgagaccgatgccgagctcgatcggctcgatcgcggcgtcatgcgcaacggcaagacctcgtcgggcatgggcctgtcggtgcagcgcgacctgcgcgagcttctgttcgggcgcggcgggggcgggggcgatctcacggatctgaaagccgaggcgatcgcgctgcgcgcccggctgaccgaggcgcgggaccggctgcgcaccgtgcgcgatgccggccgcctgctcgggccgcttctcgacaccctacgcgccgagcccggccccttcgatctcgaacatcgcctgggaacggccgcgcgccggcgcgacacgctgtcccgcgaccgcgccctggtcgaggagagcgacgccaaggggctgcgcgccgagcttgccgacattcgcgccgagcgcgacgcccatgccaaggaacttcgcgaggaggtggagccgcgcgtccaggcgctgcagcagatggtggcgaccgcgcgggccaagctcgacatggcgcggggccagttccgcgcggccgtcacgcagcgccgccggaccttcgcgctgctcgactcggagaccaatcgtgaattgctggcgatcgaccgcgagggcggcgaccagacggcccccgccttctgcggggctttgcgcgacgaggtaaaggcaggcgaggccaagcgcgcagacgtcatgtcctggctggccgcgctgcgcaacgaggcgcgcacgggggcggaggaggcctcggcggcggcgcggcgcgagcaattgtcggcgctgcgcgatctcgccgactatgccgcgacctggcgcgtctccgttccgccgatcgacgcggacggcatggcggcgggctgccgcttcgtcttcgccgaggcggagcgtctggaaaccaacgagttgcgcggctatcgcgactcctgcgccaaggcgggcgaggagatgcgccgcatcctgcgcgaggacttgctgacgcgcctgtccgacaagctcggcaaggtgacctaccggctggagggcatcaaccggctcctgaagcgccaccgcttcaccggccagacctatgccttcaccttcgccgtcaacggcaagttccaaaggatgcacgacctcgccctgaaggcgggggaaggggagctgaccgacgagattttcgagacctcgatggacgaggtcgaggcgatgatcgagggcggcgaggacgccgcgctgctggccgactatcgccaatactacacgttcgagatcgtcatgaccgacgcgaacggcggccgcacgacgctctcctcccgtgcgctcaagggttcgggcggcgaggcgcaggtgcccttctatgtcgccatcgccgcctcgctggcgctggcctatttccccggccatatcgcggggcgtccggtcggcatgggcctcgccctgttcgacgaggccttcaacaagctcgacgtgccgaacacgcaggcgctcctgcgcttcttccgcgatctcgggcttcaggttctgatcgccggcccggaggacaagcgcgccacgttcaccgaggtgctcgacacgatcatcctcgtcaacaaggcgctggacgggcgcgcggtctatatcgacaccgagcatcccggcgaggccgccaaggcggcactggccgagctcaatcccgaccatcgcggggtcgagggcttccgctcggcggccgaatag

SEQ ID NO: 48142 - DNA, 1353 bp, Pseudomonas aeruginosa; identical to SEQ ID NO: 43763

SEQ ID NO: 48143 - DNA, 663 bp, Pseudomonas aeruginosa
atggatggtgagcaacctgccatgagcgccaatatacaggtcgatgagcgacggactccgcaacgggtacgtgaggccgtacaggaaatgctcaagtacgggctgctggaagaaagccacaaacccaacctatatcgctcagcgctcaccaatatcgaggtggtggacagaatcctggagccgctcgaccttgccatgggggtcgacgaggttcgggggctggtgtttgttaccgttcgccagggcgaggtggctgagcaggatgactggtcgcaccccctcgtgcgtcggcaaagactgaatctggagcagtccctgctgatagccattctgcgacagcatttcatcgcgtacgaacaggaaagcggtacgggcgctagtcaggcgctggtggcggttgatgagctgattccccaattgcaggtttacctgggcgaactgggcagtgaggcgaaggagcgcaatcgcatcatcacgctgctggatcagctcaaggggcatggtttggtgtcggctctggacgcacatgatcgtgtcatcatccgtcccatcattacccacttggctaacccggagaacctgcaggcactcgtagtatggctgcgagagcaggtggagggtgcggttacgccggctgccggtggtgaggaggacgaggcgtga

SEQ ID NO: 48144 - DNA, 2940 bp, Pseudomonas aeruginosa
ctgggcgctgtgctctggttcgagggcaccagctcctcggcgtccgatctgaaaaaactttggctgttaagcgagtcccccgagcagacgctggagcactggctcagccagcatcacgcaggcggcatgcgggctctgcgtcagatggagaaggatgggatggggatctggccgtatcccagcaagaaagccttcctggccaggctgagggattacttcgaggtcggtgaaaacgctttcaccttgctcaaccgcgctgccggcctgaagcagctcaacagtattgatgagatctttcgagagctggtactggatgaccgctccgccttcgagcgggctgccgaggtcgccagcagcttcgatgatctaactgacatccaccgagaactggaaaccgctagaaagcagcagcgctcgttgcaacctgtcgccgatggctgggaacgttatagggccttgcaagaacagttgcaggataaacaagcgctcgaaggcatcctcccggtctggttcgccgagcaggggtatcgtctgtggttggctgaaaccaacaggcttgagaaggagcacaaacaggccgaactggatcaggcgcaatgcaggagtcagcttgagatccagaagggcgtggtcgatcaacatcgtcagcgctacctgcgagtagggggcgcagggatagatcaattacgcgggcgcattgctgattgggtcagggagtgcgataagcggcgcctgaaagccgagcaataccaacgcttggccaaggggcttggactcgcggatgagttatcggccgctgcgctcgaagaaaatcagcagcagatcgcggcacgcctggaaatactggcccagcaaactacagacgcgcgccagaaggcgttcgatgcaggtctcgtccagcaggaactcaatggccgcctgcagagcttacagcaggagcgtgctgaggttgagagacggccaggctcgaacctgcccgggcattttcatgcttttcgaggtgatctggcgcaggagcttggcgtcgatgagtcggccctgcctttcgttgccgagctggtgcaggtcaagcccgaggagctggcctggcggggtgccatcgagcgggcaatcggtagccaccggctccggatcttggtgccgcagggctcatcccaggccgcactgcgttgggtgaaccaacggcacaaccgcttgcatgtgcgcttgttggaggtaaaagagccgtcgtcgcgccccgttttcttcgacgatggctttacccgcaagctgaccttcaaggagcatccgtaccgagaagccgtaaaggcactactggcggacaatgaccgccactgcgtcgaaagcacggagcaattgcgtcatacccctcacgccatgacggcccaagggctgatgtcgggtaaagaacgcttcttcgacaagcaggaccagaagcgcctggatgaagactggctgaccggcttcgataaccgcgaccgtctggccttcttggctgagcagattcgcgaggtcaatgaacagctcgtgcccgccaagctggccctggatgctgcccagggcgatgtcggtcaattggagagtcaagcttcgctgctgcaacgcatcgaagagctgcagttcgacgatattgatcggccgggcgccgagcgtcagctgcagtcgctgcgtactcagctggacaccctgacgcgtcccgattctaaccttgccgtgatcaaagccgagctggatcaagccgaggccctgcgggagtctctggaccaacagctgcaacgactgattgagcagtgtgtgcagttgaaaactcaatttgaccaagccgcatctgctacccgtaaggcctatcgcggcgccgaaaaggggctgagcgatacacagcgtgaactggcgcaagcgcatttcccgatcctgagcacggatgacctcggcgatattgacgagctggaacgcaagcatacgcgtgagcttcaagggcaactcaaaacgctcggcgagaaactgggcgaccagaaaacagagcttgccaaacgtatgtccgacgccctgaaagcagacaccggggcgcttgcagaggtcgggcgagaactggtggatgtacccaggtatctggagcgtctccgtgtgctgaccgaggaagccctgcccgagaaactcaagcgcttcctggaatacctcaatcgctcctcggatgacggtgtcacccagctgctcagctatatcgaccatgaggtctcgatgatcgaggagcgcctggatgacctgaacagtacgatgcagcgtgtcgactttcagcccggacgctatctgcgcctggtggcgaaaaaggtcattcatgaaagcctgcgcaccttgcaacacgctcagcgccaactgaactcggcgcgcttcatcgatgatgaaggcgagagccattacaaggcattgcaggcgctcgttggcctgctcaaggatgcctgcgaacacagcaggaatcagggggccaaggcactgctggatccgcgcttccgcctggagttcgcggtatcggtgatcgatcgggaaggcaataatctcatcgaaacccggacaggttctcagggcggtagcggtggcgagaaggagatcatcgcctcctatgtactgaccgcttccctgagctatgcgctctgtcccgatggcagcagccggccgttgttcggcaccatcgtgctcgacgaggcgttctcgcgcagctcccatgcggtggccggtcggatcatcgcagcgctgagggagttcggcctgcacgctgtcttcatcacccccaacaaggaaatgcgcctgttgcgccaccatacgcgttcggcagtcgtcgttcatcggcgcggcgtggaatccagtctggtttccctgagctgggaagcgttggatgagcatcatcaacagcgcatcagggccatgcatgaagtcgcccactga

SEQ ID NO: 48145 - DNA, 1146 bp, Pseudomonas aeruginosa; identical to SEQ ID NO: 41754

SEQ ID NO: 48146 - DNA, 621 bp, Pseudomonas aeruginosa
atgggtgacagcggcgagttggcgctggatacccggcgcgccctggtgcagctacttgcgggaccttcgctcgacggacgtcgacatccaaagctctggccgatattggtgcgagacgaagcggtgatacgtcggcgccttgccgaactgtttctcgaactggtcatcgaccgggacgtacaagttgccttcacccgtcaggctgataccggcgaccttgaagtgccactcctgctgcgtcgcgcgcagctgaccttcattgactccattctgctgcttcaccttcgccagcgattgacccaagcggactcgcagggcgatcgtgccgtggtgtcgactgacgagatcatggagtttcttaccctctatgagcgtgcctccaacaccgaccgcgcagggttcgtgaaacgtgttcatgcatccatcgagaagatcaagaagcacagcatcctccagaaaattcgctcgagtgaagatcgtttcgagatttcgccaacgctgaagctcctcttctctgcagaagaaatacaagccctgacccacttgtatcagcgcatggccgccggtgagacgccagcgcaactggctcagaccgagtccgatgaggaggccgaccaatga

SEQ ID NO: 48147 - DNA, 3375 bp, Pseudomonas aeruginosa
atgatctcggaaccccaaaccgcgtccttgttcgcccgggagcaattccggatgactcgcctgcaggtttacaactggggcactttttctgacctgcatgacataccgatcagcgaacgaggctttctgtttgtcggtcgatcaggggctgggaaatcgacgcttctcgacgctttttcggcgttgctggtgccacctcgctggattgacttcaacgctgccgcgcgggaggctgaccgcagtggccgtgaccgaaacctcgtcacctacgtacgtggggcatgggccgaacagaaggatggagagtcgggtgagatcgccacccgctacttgcgctcggggacaacgtggtctgccctggcactgacctaccagaacgcattgggccagtctgtggtgctggttcaggtgttctggcttcgcggcaatgcgaatggaagcaccgacgtcaaacgccactaccttgtcctggagcgggcctttgacctgcgcgagctggaggacttcggtcaatccaacttcgacatccgaaagctcaagcagtctttccccgaggcgttcgctcgcgacgagtttcgtccctattgcgaacgattctgccgcctgctcggtatcgagagcgaaatggcgttgcgtttgctgcacaaaacccagtcggccaagaatctcggcgacctcaataccttcctgcgcgacttcatgctcgacaagcccgagaccttcgaggtggcggatcgcttggtcagcgaatttggtgaactcaatgctgcccaccaggcggtagtgacagctcgcgagcaggttcaaacgctcgcgccagcgcgggagcagtatcagcgcagagattcgttgatgctgcaacgcaatgggctggatgagcttcggctgggcgttgatggctaccgcgaaacccgccgcattgaactcctcaagcagcatgtcgagtccctggaggtgcaagccagcggctcggaaggtgaagtaagtcgacgtcagagcatcctggataaccacaccacaaccttgcgcaatctggagcgacagcaccgtgaagcaggcggtgatcagatcgagcaatgggaagcagagaaatctggtctggagggccagcgcacggatcgcctgcgcaaacgcggccaggctgaagatgcgtgcaagaagcttggctggagcctcccggattcgcctcaggccttcgctgaactgttgggcaacgcgcggcaggaagtcgaaaactgggagcagcgcagcaacgagaaccgcgaagaacagttccgcttggcaggtcaaaagaaagacgctgagacggcattttcgcaagcggtgaaggaggtgcaggcactccagcgccagccatcgagcattcctgccgatatgctcgaaatgcgccgagacatcgccgcagctattgggatatcagaatcggctctgcccttcgtcggcgaactcattgaggtgaagtctgacgaggccgagtggcaaggtgccatcgagcgcgtactgcacggatttgcgctctcactcttggtggacgaacgccagtattcggcgctggccaattacatcaacaacacccatcttgggcagcgtctggtgtactaccgaactggccgctcggagacctggcaggcgaagcccatcggcgctaactcgctcgtcctgaagctgaacgtcaaggagggtacgtatgccgattggctgcaggccgagctacggcaacgattcgattacgcgtgcgtcgactccattcagtcgttcaggagcgctgatcgagccatcacccgtgagggccaggtcaagcacagcaaaacccggcacgagaaggacgaccggagaagtgtcggcgaccgacgaaactgggtgctcgggttcgataaccgcgagaagcttgggctctttcaagcacaggcccaggagctggctgcgacgattacgcgcctcaggggagaaatcgaaaccctcgccgaccaagacaagaatcgtgcgacccgagcgatgcagtgccaaaccttggtgaatctccagtggcaggaaattgatgtagtaccgttgcttgaccgcatttccaccatcgaacaacagattcgcgaagcgcgggagggcaatacagccctactgcaaatcagtgagcggatcgacaagcaaaagaacttggttgatcaagcagacaaggacctccgagaagccaaggtcgcgcatgactcagttctcaagcagatcaacgacagcacgcagaagcttgaatcgctccttcaagatgcttccagagttccattgactccccaccagatcaaggggctcgacgaacgattcaccaagcagtcagacgcgatcaggctcgaaagcctcgacaaggtagcaaccgctgttgagagagggctcaacacagaaatcggtgagatcaaagatgagatcggcgattgcgagaaggaaattgaagcacgctttgccgatttcaaacggcagtggccaatggatgctgtggacatggacacgagcctcgccagcgcagcggactttttcgccaagttggttcgactggaaacggatggcctgcccgcctatgagcagcgattcttcgaactgctgcagaaccaaagccaccagaatctggcggcactgtccacctacctgaacgatgcgcgcaaagccatcctagagcggatggatctggtcaacgacagtcttggccaggtgccgttcaaccaaagcgccaatcaacgtacctatctccacatcgacgccagtgaccggcagcttgtcgacgtcaaggagttcaagcaggagatccagcaggcacttagccatgcgtggacggaggatcgcgagtttgccgaggcgcggttcctggccctgcggcgacttgttgatcgactcgccagtcaggaccccgagcagaaacgctggcgcgagactgtgctcgacgttcgacagcatgttgagtttatcggacgggagattgatgaaagcggcgtggaggtcgaaatttaccgcagcggtgctggcaaatcaggcggtcaacggcagaagctggccaccacgtgcttggccgcagccctgcggtatcagctgggagggaacgaccacggcgtgccgatgtatgcgcccgtcgtgcttgatgaagccttcgacaaggccgacaacgagttcaccgctttggcgatgaacatctttaccaatttcggatttcaaatggtggtcgctacgccgctgaagtccgtcatgaccctcgaaccattcatcggtggcgcctgcttcgtagatatcagcgaccggcgggtgtcaggcgtcctgttgatcgagtacgacggtgaccgccagcggttgaagctgccggagcacgctcgagaggaggctagcgttgaagcttcctga

SEQ ID NO: 48148 - DNA, 1164 bp, Pseudomonas aeruginosa; identical to SEQ ID NO: 45480

SEQ ID NO: 48149 - DNA, 1353 bp, Pseudomonas aeruginosa; identical to SEQ ID NO: 43230

SEQ ID NO: 48150 - DNA, 663 bp, Pseudomonas aeruginosa; identical to SEQ ID NO: 45023

SEQ ID NO: 48151 - DNA, 2940 bp, Pseudomonas aeruginosa
ctgggggccgtgctctggttcgaaggcacaagctcctcggcatcggatctgaaaaaactgtggctgttaagcgagtcccccgagcagactctggagcattggctcagccagcatcacgcaggcggtatgcgggctttgcgtcagatggagaaggatgggacgggtatctggccttatcccagcaagaaagctttcttggccaggctgagggattacttcgaggtcggtgaaaacgcattcaccttgctcaaccgcgctgccggcctgaagcagctcaatagcattgacgagatctttcgcgagttggtgctggatgaccgttccgccttcgagcgggccgccgaggtcgccggcagcttcgatgatctaaccgacattcaccgagaactggaaacggctagaaagcagcagcgctcattgcaaccggtcgccgatggctgggagcgttaccaggtcttgcaagaacagctgcacgataagcaggctctcgaaggtatcctcccggtttggttcgccgagcaggggtatcgactgtggttggctgaaaccaacaggctcgagaaggagtacaaaaaggccgaactggatcaggagcaatgcaaaagtcagcttgaggcccagaaaggtgtggtcgatcaacatcgccagcgctacctgcgagtagggggcgcagggatagatcaattgcgcgagcgcatcgctgattgggtgagggagtgcgataagcgcagcctgaaagccgagcaataccaactcttggccaaaggccttggactagcggatgagttatcggccgctgctctcaaggagaatcagcagcatatcgcggcacgcctggaaatactggaccaacaaattactgacgcgcgccaaaaggcgttcgacgcaggcctcgtccagcaggaactcaatggtcgcctacagaccttacagcaggagggtgctgaggttgagaaacggccaggctcgaacctgcccgggcaatttcatgctttccgaagcgatctggcgcaggcgcttggtgtcaatgagtcggccctgcctttcgttgccgagctggtgcaggtcaagcccgaggagctggactggcgtggcgccatcgagcgggcaatcggtagccaccggctacgcatcctggtgccgcaggactcatcccaggccgcactgcgttgggtgaatcaacggcacaaccgcttgcatgtgcgcttgttggaggtacaggagccgacgtcgcgccccgtgttcttcgacgatggttttacccgcaagctgaccttcaaggagcatccgtaccgagaagccataaaggcactgctggcggacaatgaccgccactgcgtcgaaagcccggagcaattacgtcatacccctcatgccatgacggcccaggggctgatgtcgggcaaagaacgcttcttcgacaagcaggaccagaagcgtctggacgaagactggctgaccggcttcgataaccgtgaccgtctggccttcctggctgagcagattcgcgaggtcaatgagcagctcgagccagccaagctcgccttggatgctgcccagggcgacgttcgtcagttggagactcaagcttcgctgctgaatcgtgtcaaagaactgcagttcgaggatattgatctgccgggtgcccagagtcagctggagtcgctgcgtacgcaactggccaccctgacgcgccccgattctaaccttgccatgatcaaggtcgagctggatgcggccgaggccctgcaggagtctctggatcaacagctccgccaactgatcgaacagtacgttcagttaaaaactcagtttgaccaggccgcatccgctacccgtaaggcctataacagcgcggagaaagggctgaacgatacgcagcgtgaactggcgcaagcgcatttcccgactctgaccgcggatgacctcggcgatattgtcgagctggagcgcaagcatacgcgtgagcttcaagggcagctcaaagcgcttggcgagaaactgggcgatcagaaatcagagcttgccaaacgtatgtctgatgccctcaaggtagacaccggggcgcttgcagaggtcgggcgagagctggtggatgtccccaggtatctggagcgtctgcgtgtgctgaccgaggaagccttgccagagaaactcaagcgcttcctggaatacctcaatcgctcctcggatgacggcgtcacccaactgctcagctatatcgaccatgaagtctcgatgatcgaggaacgcctggatgacctgaatagtacgatgcagcgtgtcgactttcagcccggacgctatctgcgcctggttgcaggcaaggtcatccatgaaagcctgcgcaccctgcagcgcgcccagcgccaactgaactcggcgcgtttcatcgatgatgaaggcgagagccattacaaggcattgcaggatcttgtggggttgctcaaggacgcctgcgaacacagcaggaatcagggagccaaggcgcttctggatccgcgcttccgcctggagttcgcagtatcggtgatcgatcgagaaagcaggaatgtcatcgaaacccgaacaggttctcagggcggtagcggtggcgagaaggagatcattgcctcctacgtgctgaccgcttccctgagctatgcgctttgtcccgacggcagcagccggccgttgttcggcaccatcgttctcgacgaggcgttctcgcgcagctcccatgcggttgcaggtcggatcatcgctgcgttgagggaattcggcctgcacgctgtcttcatcacgcccaacaaggaaatgcgcctgttacgccaccacacgcgttcggcagtcgtcgttcatcggcgcggcctggagtccagtctggtttccctgagctgggaagctttggatgagcatcatcaacagcgcatcaaggccatgcatgaagtcgcccactga

SEQ ID NO: 48152 - DNA, 1353 bp, Pseudomonas aeruginosa; identical to SEQ ID NO: 43230

SEQ ID NO: 48153 - DNA, 663 bp, Pseudomonas aeruginosa; identical to SEQ ID NO: 45023

SEQ ID NO: 48154 - DNA, 2940 bp, Pseudomonas aeruginosa
ctgggggccgtgctctggttcgaaggcacaagctcctcggcatcggatctgaaaaaactgtggctgttaagcgagtcccccgagcagactctggagcattggctcagccagcatcacgcaggcggtatgcgggctttgcgtcagatggagaaggatgggacgggtatctggccttatcccagcaagaaagctttcttggccaggctgagggattacttcgaggtcggtgaaaacgcattcaccttgctcaaccgcgctgccggcctgaagcagctcaatagcattgacgagatctttcgcgagttggtgctggatgaccgttccgccttcgagcgggccgccgaggtcgccggcagcttcgatgatctaaccgacattcaccgagaactggaaacggctagaaagcagcagcgctcattgcaaccggtctccgatggctgggagcgttaccaggtcttgcaagaacagctgcacgataagcaggctctcgaaggtatcctcccggtttggttcgccgagcaggggtatcgactgtggttggctgaaaccaacaggctcgagaaggagtacaaaaaggccgaactggatcaggagcaatgcaaaagtcagcttgaggcccagaaaggtgtggtcgatcaacatcgccagcgctacctgcgagtagggggcgcagggatagatcaattgcgcgagcgcatcgctgattgggtgagggagtgcgataagcgcagcctgaaagccgagcaataccaactcttggccaaaggccttggactagcggatgagttatcggccgctgctctcaaggagaatcagcagcatatcgcggcacgcctggaaatactggaccaacaaattactgacgcgcgccaaaaggcgttcgacgcaggcctcgtccagcaggaactcaatggtcgcctacagaccttacagcaggagggtgctgaggttgagaaacggccaggctcgaacctgcccgggcaatttcatgctttccgaagcgatctggcgcaggcgcttggtgtcaatgagtcggccctgcctttcgttgccgagctggtgcaggtcaagcccgaggagctggactggcgtggcgccatcgagcgggcaatcggtagccaccggctacgcatcctggtgccgcaggactcatcccaggccgcactgcgttgggtgaatcaacggcacaaccgcttgcatgtgcgcttgttggaggtacaggagccgacgtcgcgccccgtgttcttcgacgatggttttacccgcaagctgaccttcaaggagcatccgtaccgagaagccataaaggcactgctggcggacaatgaccgccactgcgtcgaaagcccggagcaattacgtcatacccctcatgccatgacggcccaggggctgatgtcgggcaaagaacgcttcttcgacaagcaggaccagaagcgcctggacgaagactggctgaccggcttcgataaccgtgaccgtctggccttcctggctgagcagattcgcgaggtcaatgagcagctcgagccagccaagctcgccttggatgctgcccagggcgacgttcgtcagttggagactcaagcttcgctgctgaatcgtgtcaaagaactgcagttcgaggatattgatctgccgggtgcccagagtcagctggagtcgctgcgtacgcaactggccaccctgacgcgccccgattctaaccttgccatgatcaaggtcgagctggatgcggccgaggccctgcaggagtctctggatcaacagctccgccaactgatcgaacagtacgttcagttaaaaactcagtttgaccaggccgcatccgctacccgtaaggcctataacagcgcggagaaagggctgaacgatacgcagcgtgaactggcgcaagcgcatttcccgactctgaccgcggatgacctcggcgatattgtcgagctggagcgcaagcatacgcgtgagcttcaagggcagctcaaagcgcttggcgagaaactgggcgatcagaaatcagagcttgccaaacgtatgtctgatgccctcaaggtagacaccggggcgcttgcagaggtcgggcgagagctggtggatgtccccaggtatctggagcgtctgcgtgtgctgaccgaggaagccttgccagagaaactcaagcgcttcctggaatacctcaatcgctcctcggatgacggcgtcacccaactgctcagctatatcgaccatgaagtctcgatgatcgaggaacgcctggatgacctgaatagtacgatgcagcgtgtcgactttcagcccggacgctatctgcgcctggttgcaggcaaggtcatccatgaaagcctgcgcaccctgcagcgcgcccagcgccaactgaactcggcgcgtttcatcgatgatgaaggcgagagccattacaaggcattgcaggatcttgtggggttgctcaaggacgcctgcgaacacagcaggaatcagggagccaaggcgcttctggatccgcgcttccgcctggagttcgcagtatcggtgatcgatcgagaaagcaggaatgtcatcgaaacccgaacaggttctcagggcggtagcggtggcgagaaggagatcattgcctcctacgtgctgaccgcttccctgagctatgcgctttgtcccgacggcagcagccggccgttgttcggcaccatcgttctcgacgaggcgttctcgcgcagctcccatgcggttgcaggtcggatcatcgctgcgttgagggaattcggcctgcacgctgtcttcatcacgcccaacaaggaaatgcgcctgttacgccaccacacgcgttcggcagtcgtcgttcatcggcgcggcctggagtccagtctggtttccctgagctgggaagctttggatgagcatcatcaacagcgcatcaaggccatgcatgaagtcgcccactga

SEQ ID NO: 48155 - DNA, 1182 bp, Pseudomonas aeruginosa; identical to SEQ ID NO: 44163

SEQ ID NO: 48156 - DNA, 1353 bp, Pseudomonas aeruginosa; identical to SEQ ID NO: 43230

SEQ ID NO: 48157 - DNA, 663 bp, Pseudomonas aeruginosa; identical to SEQ ID NO: 45023

SEQ ID NO: 48158 - DNA, 2940 bp, Pseudomonas aeruginosa; identical to SEQ ID NO: 45024

SEQ ID NO: 48159 - DNA, 1182 bp, Pseudomonas aeruginosa; identical to SEQ ID NO: 44163

SEQ ID NO: 48160 - DNA, 1353 bp, Pseudomonas aeruginosa; identical to SEQ ID NO: 43763

SEQ ID NO: 48161 - DNA, 663 bp, Pseudomonas aeruginosa; identical to SEQ ID NO: 48143

SEQ ID NO: 48162 - DNA, 2940 bp, Pseudomonas aeruginosa; identical to SEQ ID NO: 48144

SEQ ID NO: 48163 - DNA, 1146 bp, Pseudomonas aeruginosa; identical to SEQ ID NO: 41754

SEQ ID NO: 48164 - DNA, 1353 bp, Pseudomonas aeruginosa; identical to SEQ ID NO: 43230

SEQ ID NO: 48165 - DNA, 663 bp, Pseudomonas aeruginosa; identical to SEQ ID NO: 45023

SEQ ID NO: 48166 - DNA, 2940 bp, Pseudomonas aeruginosa; identical to SEQ ID NO: 48154

SEQ ID NO: 48167 - DNA, 1182 bp, Pseudomonas aeruginosa; identical to SEQ ID NO: 44163

SEQ ID NO: 48168 - DNA, 1449 bp, Arthrobacter alpinus
atgcgctccactgacaacgccgttgcacagtggcatgcgcaaaaacagctgcggttgagcccggcctggaagttacttcagggcgccccctggactctggcattcctgcgcgcggagttcaccgccaccacgcaacgcgtgccccttgaggagttccacgccgatctggcggacttcatgaaggaactgcgggaggaaaacctcagcctcaatgaggcgtggcaggcctcccactacgcagactcctgggtccgcagccaattcttggcacggcccatggtggacggcaagttccactacgaacccacggcggccacggcacgcgtgctggccttcattgacaccttgggcgggcgtcacaccaacttgaacagctcgcgtctgagcaccttgctgaacagcattgagacgctgtcgttgcaaagcgatcccaacccggagtcccgcattgccgccctcgaagcggaaatcctggaccggcaacgggagatcacagcactgaagaacggcgccaacccggcagtgctttccaacgattcggccgttgctgccactcgcagcgtgcttgatctggctgccagtctgcctgcggatttcaagcgaatgcgcgacggcgtcgaggtcatgttgcactcgatccgcaccgaaatcatggaatcctccctatccaagggtgttgccgtgggtcaggtgctggccggtgataaggcccttcgcgggaccgccgaaggtgaaacgttccgcggcttcaccgaattcctcaatgacccggtgcaacaggcccggttccggcaatccgtcaatgaggtgctggaacgggacttcacggatgcgcttactgccgaggagcgcaacaacctggcctcactggttcgggagatgcgtcggcaggctggcgaagtccacgccatctacggacgcctgtccgagagcctgcacgcctatgtccagtccgccgagttccaagaatcagtgctgctgcgtaaagccatccatgccgcagaactggcggtggccacggcgccgctggtatctcggacgcccgtggtggcgccgctgctgtactcccccaactttgaaaccttggccgggctgggaatcttcaacccagaggaccatgtgccgccacccaagctggccgccccgcctgcattaagtgatgccgatatccaccgcactccctccacaccggcgccggatatgcccaagctgctggccgccgtcgaacatgccagggaaacacgaaacggtactgccaccttggccgacgtctacacatccctgccggcggagctccagcacatcaacacaattcgcgggctaatcctggcggcgcgcggttccagcaacagcatcgacccggaccgcaccgaaacactgacattcacacagatcgacgggaccacgcgcaccgcaactgtccccctgttcaccttcacgaaggactaa

SEQ ID NO: 48169 - DNA, 663 bp, Arthrobacter alpinus
atgagcaccgagcgcacactctttcccggcgataccggctctttcccgctggacatgcgtcaggcgctggtgcggctgctgcgcggaccttacattgacgggacggccgatccggcgctgtggacaaccatcctcacgcatgcggtctcgctgcagcagtacctgagcgagatcttcttgctgttgagcgttgatactgagcgcaagatcgcactgctcgctcccgccgagatggacgccgttcacacgcagccgatcgtcgccaggaagccgctgcgccgtgaggagacgctgctggcgctgcgcctgcgggtattgctggacaggcatgcaggttcgggaacagatgtgagcatttcccgcgatggtgcgcgtgagattctggccgagcatcgccagcccggcgccgttgatgacaagcgcatggatgagcagaccgacgctgcgctggccaggctactgaatctcaagctgatcctgcctaccgagctcccccacgaataccgggtcagcaacgccctggcactggcgctgccgttcgattccattgaacagattccggcctatctggccgccctggatgcgggcacccagaacgaaccctttgatctggaccctgaccaccccgatgatacgaaccaacctctgcaggagatcttctaa

SEQ ID NO: 48170 - DNA, 3294 bp, Arthrobacter alpinus
gtgagcattgcaaccaccctgcccatcggcgaagaactcaaccccggacagttccggctgagccagatccaaattatcaactggggaaccttccatggacgccacagcatgtatgtggaccgcgccggcaccttgctcacgggccatccgggcgtgggaaagtccaccctctttgatggcatccagcacatcttctacgctgctccgcgcctgaatgagtctgcgcacgacgcctccaaccgtaaggaccgccgcaccacgtttagctatatgcgcgggcgcaagatcaagacggccgacggcgttgagtaccaacgtcccagcgccacctggagcgccacggccttggtcttcgaagacggtttgggccgtcacgtcaccattgcggcgctctttgatctgcctgcgaacggacttgagggtcaggtaggtaagcactatctgattcacaacaagcccttggacaccgaggcgttggagaagcacggcagccgccgcttttcgccgtcgtccctgcacgccgcgctgcccggagccgaggccttcgatgtccacaagacctttgccgagcgcttccggcgcaagctgggcatccacaatgacaaagctttcagcttgctacgtaccctgcaaaacggcaagggcttggacaagggtgtgaatcgattcttccgctacgaggtgctggacaagccggccaccctgagcgcagctgctgctgccgtggaggacttcagccacctgagcggaatctaccgccagctcgaggacgcccgcggccagcgcgatgcgctggctcccgtgccggaactgcaccaaaaactacgtgagctaggccaacagcataaccgcacagttgagctaaaaaacattcagttacccttgctgcgccagcagttccaaagcgagttgttggctgctcgggcggttgcgctgacggaagcgaagacgctgaagcaggtagagatcgtctccgccacacacgccaaggacgccctgagtgaaaccgtggcggcgctggccagccagcatgccagccacggtgggcaggctattgacggcttggaaaaggacattcgggctggcaagcgcgagctagcagagcggacgcgcattgaagctgccgtgcgggatgatctcgacggcgccggactcgtctatgactggagtgcgcagggccttgccggcgcccgcgcgggtgcggcagccggcgtcgaccatcaacagcaggagaccgcttcagcgcgtgccctcgagtaccaggctgtggcgaccagtgtaaacgtcaaggcgcaagaggctgcactacgggctgaaattgcttcctaccaacgccgcggctccaacattgactcgcgcagtgctgccgcccgccgcgccatttgcgccgcaaccggtttggacattgaagacatgccgtttgctggtgaactggtggatattggcagcgagcacagcgcttggcggccggcagcggagaaggtgctccgatcgctggctaccacgttgttggtccgcggcgccgatattggcgcagtgacaactgccatcaactctcttgacggacacggcaagttgcgctggatcaacctgggtattcccgcgaagccggccaaggcaggacgtgcgcatcttgtcacgaaacttgattttcacgcctccgacgccggatcatggcttcgcgagaagatcgccagcgactttgccttcacctgtgtggacgacgatgcagcactgcatgatcatgtgaaggcggtttctcggaccgggaccctgaagctcagctcttctctgtttgagcgggacacccgcaccatcaatccctccgattacttgctcggcttcaacaatgtggccaagattgctgaactggaagagcaagcacggctcctcgctgccgagcaggcagccgcggaagcatcggccacgcagagcagcttggccaaggactcctcagcacgcaggttggccaccctgaagcgaattgccgaagacgacaggagcttcgagcagctggattcggccgggcttgctgtgtctttggcggggttgacggcaacattagagcagaccattgcaggcagcaccaccctggcgcagctgagggattccctcaccaccgcccaaactgaactcgaggctgccgtgggccgggtagcggtgctgcaccatgacctctccagtatcgagaaggatctgacttccgcccaagacgtactggctgggggcgttcctggaagcgctgccgaggaatgggctcaggaggcctttgccccctatctgagcgacggcgaccctgccaccttggacgagctggaggtgctgctgagccatgtcgctgtggacctgggtgagcgcatcgccaccatcaaggagcgccagttccgcgcggaaggcgcactgaccgaaatcttcaaggcctttgcccgccagtttggcccgtccatgagcgcaagccatggcacaggcgccgaggctgcacctcattacgaagagttgtatgcgcgaatcgtttccgacggactgccgcagcgccaagacgagttcaaggaatacttcaacaaccgctcctacgaacgcttttctgacctcttgcaactactcgaggaagaacgcaggtccattgaggagcgcatcctgccactaaaccaaatcctggaggatgttcccttcgaaaagggaagcagactgcgattggaggtcaagaccagcattcctgacgaggcccgggtattccgccaagaactcaaggaggcactgggcaacgcttacacgcaggccaccgaggaaacgatggcttccagttatcagcaacttgagcgcctggtcaatgccttggcagaccctgcgttggcccattgggcagacaccgtgctggacgtgcgtcagcatgtcaccatcagctgcaacgaacaccggcccaacggggaggttgagacgggactcgagcccggcacactctccggcggtgagggtcagcgcttcacctccttcattatgggtgcagctttggcctaccagctggggatcgatgttcagggatacagcacctatgggaccgtcatgatcgatgaggctttcatacaggccaactccgagtacgccggagccggcatcaatgcgctgcaagagttcggcttccagctcctactggctgcccctgaggacaaggtggacctgtccaggcacctaggatcagtcacggacatcatcaagcacccacaggccaacgtctcgggctttgtctccacgggtcagtccccggcaaccgccaccgacatcatcctccgctaa

SEQ ID NO: 48171 - DNA, 1632 bp, Bifidobacterium longum subsp. longum
gtggccgatgtgatgcgggagctggaacggctgcgaccggtgtatgagacgggcgtcctgcggttgctgttgcgccagaacgcgatgctgtacgtgtcgctgctgcgttccacgttcgacccgctcaccggcgagctgccgcgcgagaccgtggaggagcggttcgcgcaaagtctgaacgctctggccgacgccggcgaatatgcgccgcgcgaggaccagaccttcgccgaggccgctcatcagatcctcgccgacctgacccgtgaaggcgaaggcgactacgcctggctcgccaactcgcatgatgcggcctcacaccgattcctctaccgtttgacggcccgcgcccaccgcgccatcgaggcgctgagcaggctcgaagacgaatcacgcgccctgtccggcgcgcaggccaacagcatcatcatggaaatcgagcacgcgcgcatgcagctgaccgccgaccccggcgagcgcatcaaactcctcaaccgtgaaatcaaggaacgcaagcacgagatcaaacgcatccaacagggcaagcagcatgccacgctgagcgaagcccaggtggaggacgtgatcgccgtgatccacaacacgctgcgcggcgtgcccatcgacctgcgcgaactcgtgctcgacgagcgggacaacggcgacgccttgcgccggcgcatgcaggccggcgacatcagcgtggacgagaacctgacccgctaccacgatgaataccgccgctcgttccgcgaatcagacagcggccgccgcttcgaggacgccttccaggtgatcatcaccgacgagggtcgccagcaaatcgacgaagccctgcgcgccatcgccaaaaccccgtatctggccggcgaatccggcgtgctgctcggccagatccgcgacgaactggcccgcatctacgacggcatcgaagccgtgcgccgccagatgcgcgtctccgacgaggcaatcagccggctcgtgcgccagcaaaccgacactcgctaccgtacgatgctcacccgcttgaaccgactgtacgcgcgcctcaacgcggatgcgaaaacccatatgggagacgcctcgcgcccgtacgacacggccacctcggacgcgctgttcgcgccattgccgatgcgcccggccaaatccatgacccgcgccaccgcacccggcctgagcgacctcgccgccgaagccccgcagtcgactccggtggccgatctgcgggacatggtcaacagcggcggcccccgactcctgcgcatggtcagcctcatccggcgcaacccggtgaccgttgacaggtccgatgacaggcccggcgcaaccctcgtggacatcgccgccagcttcaaccggctgcccgaaagcgaacgccgcgaaagcgagatcgtcggcttcctgggcgggctgggagccgtaagcggcaacgccatcgccgacgagccgtccactgacggcgtcggcgtcggggtcgacagcgacatcgccaccgagccggccccggcgcagcgcggcgataccgcgacctggcattgcgtatcgatcgacggcgagccccggaactggatcactagaccggtgctggccgacatggacgagctgagcatcattgtggaggaaggatga

SEQ ID NO: 48172 - DNA, 675 bp, Bifidobacterium longum subsp. longum
atgaccgtggccgaggaacacgaggaacacgaggagcatatggacaacgccaacccgtacgccctgttcgaaggcgacaccggcgacatgccggccgaggcacgcatggccgccatcgccctcaaacgtgaccgctatatcagcgggcccacctacgacaccgtgctcgacaaccgcgacgccgtcgtacgctccctgaacaacgacctgctcgacttggtgatcaacgaacgctaccgcatcatgtacgccacgcccgtggccggcgacgacgtgaccctgcgctcgctcaaaacccgtgtcagcctcaaacgcgaggaggccgcgctgctcgccttcctgcgcatccgcgtcctcgaatacgagaacgtgcacgccgaccccgccgactggctcgtcagctttgaggagatccgcgccgcgctcgccaccggcgccggctatctggccgcccgcaacgatgaggaaggcgtggcaaagcagatcggcgccatcgtctccgcgatgatcacctacgggtatttggtgcgcctggacgacgaagccatgtaccagatcacgccgctcgtgcccgtggtgctcgaccgcgaactggccgacacctggctcgacgtcgcggaacacggcgacggcgacacggaagatgacgatgacgacgagaagggagccgaatga

SEQ ID NO: 48173 - DNA, 3546 bp, Bifidobacterium longum subsp. longum
atgcaggcgacagacgtgcagatgatcgcggaccggtggatgctggaatcccgccgactcatcaactggggctcctatgagggctaccacgaattccgcccctccacggaccacaagctgccggtgaccctgctcgccggcgccagcgaatccggcaaatccacgctggtcgacgcgcagatctccctgctgtacccaaccggcacgccgttcaacaaggcctcgaactccggccgctccgaacgcagcgactacacctacctgcgcggcatggtcggcgtgggcagcaccgaaaccggcgacgagccgctctacctgcgcggccgcgacgagaacggcgcaccgcaacccgtgtggggcgccatcgtggacacctatcgcaaccagaccaccggccaggtgctctcctgcgccaaattcctctacctgatgcccggcgacggccgcggcgacgtgcgccgacagtacgtggtctggggcaagcccgtggaccccaggcgcatggaccaataccgtgacgccccgttcacgccggcccagctcaaagccacctaccccgactgcctcacattccccagcgccgaagcgttccacacacacatctggagcgcaatgggcctgagcgaggccgcctgccgactgctgcacaagatccagtccgccgacgcgccctcccggctcgacgacatcttcaaacaaggcgtgctcggcgtgcccgaagccctggacctggcccgcaccacggtcgaggactacgaacgttacgacgagaacttccacgccatggacgagaagacccgccgcatggacacgctgcgcggcatccaacaggcctacggcgaatacgccgccgcacgcggcaaggcccgcgccttcgaaccggtcaagccggccgtcgacggcacggtgccggccgtgctgcgcgactgggcattggcccgcatgcgcggcgaagtcgccgtccaactgcccgccgaccgcgccgaacaacagaacagcgaggcggaagccaagctgctgcgccgccgaaccgaagacctgcacacccgtctcgacatgatccgaggccagatgcagggtctggacggcggcaacctgacccgactcgaactcgaactcgaccaggcccgccgcaccctcgaagacgtgcaagccaaccgaacacgaatcgaacaaacgttcgcatccatcggcgagacgctgcccggcgacgaacaggcctggaacgaacgccgcatcaacgccgtgaacttcaaacgcgaatacaacaaacgagacggcgaatgcgaggaagccctcaccgccgccatcaacgcgcgggccggcgcacgcggcgacctcgaacgactgcaacgcgacttcgaccggcaacgctcccagcgcacccgcatctcccagcagatggacgaaacccgcgccatgctctgtcgcgccaccggactcacccccgccgaactgccgtacgtggccgaactcatggacgtgaacgaacacgaggaagactggcgtctcgccatgaacgtcgcctacgcgcccatcgcccagaccatcctcgtcgacaagctccacgaacagggcttcgccgccaaagtcagcaccatcgacccgcgcaccatgccccgacgcacctggcagttcgtggacaccgcacgccactacgacgacaccggcgcgcacgcgaacatactcaccggagaacaggacggcgactggctgtccggcaaactgcgctaccgcgacgactcgcccttcgccgactggctgcgctcgcagacccaggacgaacgattcgacgccctatgcgtcaccgccatcgacgacaccgaccgcaccaaccgtcaggtgcaggccgacggtcagatcaaatccggcgcacgcggccagcacggcaccaaagaccgcgcccaggtcatcggattcgtcaacgaaacctacctcaacgcgctcgcagcgcaggtcgacgccgcccgcaacgcgctcagccaagccgacaccgactacacggccgccaaaacacagtccgataacctccaccgcgaactcgaactggccaaccagctcgcctacacgtcctgggagcgcatcgacatcgccggcgcgcaacggaccatcacggacacgcaggacgccatcgcatccatcaaaaacgatcccaagctcgccgaactcgccaaacagcgcgacgaactgaacgccgaactcgaccgtgtggaacgccagcgcatcgaatccgaccaggccgcggcccgcgccggcagcgccgtcgaagcggcgctcatctggctgcgcgaccatgccgacaccggcacgacggacgccgccggtgccaccgccgacaatgacgatgacgccgcgtccggcccgctgccggacgaagtcacggcggcgctcgccgaatcctacgacaaccgattcgccggactggcggacgccgccatgcgcgcgcacatgatcatcggcgcgggcgcggcaggaacgcaggcaccgggggagagcttccccgaacgcaccatcgccggcatcggcaaggacatggcctcccgcatcaacctgctgaacggccaggccgatgccgcacgcaccggcgtcgaatcgaaaatgagcacctacatcgcgctctacgcggccgacgatgattcgctgaccgccagcgtggaggactaccggtactatctcgacgaactcgccagcctcacccagctggccgcggtcgccgccaccgacgccgaataccggcgctgcctcgaacagctgctcaggagcttcctgaccatcaaacgcgccatcgacacggatgccagcgacatccacgaccagcttgaccgcatcaacgccatgctcaaaggccagcagttcggtcccaagcacggcagcctgtccctgcacgcggacgtgcgccgtcccgagcgcaccttctgggcgcagctcatccgcgtcatcggcaccctgaacgattggaaatccgccgacgtcaacgattccgacgcctcgcgcaaggctttcgcggcctgcgcgccgatggtcgggctgctgcgcgccgaactcgcgcaggtcaaggacgcgaacggcgtgaaaagctacggcgcccgcaacctcgacccgcgttgccgctcgtccttctacgccatcgtgcatcatgccgacggcccggatgaacgcatcacctccaccggcggccgttcgggcggcgccttgcaggagcttacctcattcgtatacggcgcggcgctcatctacctgctcggcggcggcctgaccagcgagccctcgtacaccacgctgttcctcgacgaggcgctcatcaaggccgacggccgttacacgcagcgcgccctcacggtgctgccgcgcctcggattccaggtcatcgtctccgccccggaaagcaagaccggcgaaatcctcgaggtctccaccaaggcctacgtgacctacaaggaccccgacaccggcctcacctccctgcgcgaggccgtgctgcatcagaatgacatggacgatgaatcatcgtcggatatattgaaggatgacggggttgccgaatga

SEQ ID NO: 48174 - DNA, 1185 bp, Bifidobacterium longum subsp. longum; identical to SEQ ID NO: 43861

SEQ ID NO: 48175 - DNA, 1632 bp, Bifidobacterium longum subsp. longum
gtggccgatgtgatgcgggagctggaacggctgcgaccggtgtatgagacgggcgtcctgcggttgctgttgcgccagaacgcgatgctgtacgtgtcgctgctgcgttccacgttcgacccgctcaccggcgagctgccgcgcgagaccgtggaggagcggttcgcgcaaagtctgaacgctctggccgacgccggcgaatatgcgccgcgcgaggaccagaccttcgccgaggccgctcatcagatcctcgccgacctgacccgtgaaggcgaaggcgactacgcctggctcgccaactcgcatgatgcggcctcacaccgattcctctaccgtttgacggcccgcgcccaccgcgccatcgaggcgctgagcaggctcgaagacgaatcacgcgccctgtccggcgcgcaggccaacagcatcatcatggaaatcgagcacgcgcgcatgcagctgaccgccgaccccggcgagcgcatcaaactcctcaaccgtgaaatcaaggaacgcaagcacgagatcaaacgcatccaacagggcaagcagcatgccacgctgagcgaagcccaggtggaggacgtgatcgccgtgatccacaacacgctgcgcggcgtgcccatcgacctgcgcgaactcgtgctcgacgagcgggacaacggcgacgccttgcgtcggcgcatgcaggccggcgacatcagcgtggacgagaacctgacccgctaccacgatgaataccgccgctcgttccgcgaatcagacagcggccgccgcttcgaggacgccttccaggtgatcatcaccgacgagggccgccagcaaatcgacgaagccctgcgcgccatcgccaaaaccccgtatctggccggcgaatccggcgtgctgctcggccagatccgcgacgaactggcccgcatctacgacggcatcgaagccgtgcgccgccagatgcgcgtctccgacgaggcgatcagccggctcgtgcgccagcaaaccgacactcgctaccgtacgatgctcacccgcttgaaccgactgtacgcgcgcctcaacgcggatgcgaaaacccatatgggagacgcctcgcgcccgtacgacacggccacctcggacgcgctgttcgcgccattgccgatgcgcccggccaaatccatgacccgcgccaccgcacccggcctgagcgacctcgccgccgaagccccgcagtcgactccggtggccgatctgcgggacatggtcaacagcggcggcccccgactcctgcgcatggtcagcctcatccggcgcaacccggtgaccgttgacaggtccgatgacaggcccggcgcaaccctcgtggacatcgccgccagcttcaaccggctgcccgaaagcgaacgccgcgaaagcgagatcgtcggcttcctgggcgggctgggagccgtaagcggcaacgccatcgccgacgagccgtccactgacggcgtcggcgtcggggtcgacagcgacatcgccaccgagccggctccggcgcagcgcggcgatactgcgacctggcattgcgtatcgatcgacggcgagccccggaactggatcactagaccggtgctggccgacatggacgagctgagcatcattgtggaggaaggatga

SEQ ID NO: 48176 - DNA, 675 bp, Bifidobacterium longum subsp. longum; identical to SEQ ID NO: 41629

SEQ ID NO: 48177 - DNA, 3546 bp, Bifidobacterium longum subsp. longum
atgcaggcgacagacgtgcagatgatcgcggaccggtggatgctggaatcccgccgactcatcaactggggctcctatgagggctaccacgaattccgcccctccacggaccacaagctgccggtgaccctgctcgccggcgccagcgaatccggcaaatccacgctggtcgacgcgcagatctccctgctgtacccaaccggtacgccgttcaacaaggcctcgaactccggccgctccgaacgcagcgactacacctacctgcgcggcatggtcggcgtgggcagcaccgaaaccggcgacgagccgctctacctgcgcggccgcgacgagaacggcgcaccgcaacccgtgtggggcgccatcgtggacacctatcgcaaccagaccaccggccaggtgctctcctgcgccaaattcctctacctgatgcccggcgacggccgcggcgacgtgcgccgacagtacgtggtctggggcaagcccgtggaccccaggcgcatggaccaataccgtgacgccccgttcacgccggcccagctcaaagccacctaccccgactgcctcacattccccagcgccgaagcgttccacacacacatctggagcgcaatgggcctgagcgaggccgcctgtcgactgctgcacaagatccagtccgccgacgcgccctcccggctcgacgacatcttcaaacaaggcgtgctcggcgtgcccgaagccctggacctggcccgcaccacggtcgaggactacgaacgttacgacgagaacttccacgccatggacgagaagacccgccgcatggacacgctgcgcggcatccaacaggcctacggcgaatacgccgccgcacgcggcaaggcccgcgccttcgaaccggtcaagccggccgtcgacggcacggtaccggccgtgctgcgcgactgggcattggcccgcatgcgcggcgaagtcgccgtccaactgcccgccgaccgcgccgaacaacagaacagcgaggcggaagccaagctgctgcgccgccgaaccgaagacctgcgcacccgtctcgacatgatccgcggccagatgcagggtctggacggcggcaacctgacccgactcgaactcgaactcgaccaggcccgccgcaccctcgaagacgtgcaagccaaccgaacacgaatcgaacaaacgttcgcatccatcggcgagacgctgcccggcgacgaacaagcctggaacgaacgccgcatcaacgccgtgaacttcaaacgcgaatacaacaaacgagacggcgaatgcgaggaagccctcaccgccgccatcaacgcgcgggccggcgcacgcggcgacctcgaacgactgcaacgcgacttcgaccggcaacgctcccagcgcacccgcatctcccagcagatggacgaaacccgcgccatgctctgccgcgccaccggactcgcccccgccgaactgccgtacgtggccgaactcatggacgtgaacgaacacgaggaagactggcgtctcgccatgaacgtcgcctacgcgcccatcgcccagaccatcctcgtcgacaagcgccacgaacagggcttcgccgccaaagtcagcaccatcgacccgcgcaccatgccccgacgcacctggcagttcgtggacaccgcacgccactacgacgacaccggcgcgcacgcgaacatactcaccggagaacaggacggcgactggttgtccggcaaactgcgctaccgcgacgactcgcccttcgccgactggctgcgctcgcagacccaggacgaacgattcgacgccctatgcgtcaccgccatcgacgacaccgaccgcaccaaccgtcaggtgcaggccgacggtcagatcaaatccggcgcacgcggccagcacggcaccaaagaccgcgcccaggtcatcggattcgtcaacgaaacctacctcaacgcgctcgcagcgcaggtcgacgccgcccgcaacgcgctcagccaagccgacaccgactacacggccgccaaaacacagtccgataacctccaccgcgaactcgaactggccaaccagctcgcctacacgtcatgggaacgcatcgacatcgccggcgcgcaacggaccatcacggacacgcaggacgccatcgcatccatcaaaaacgatcccaaactcgccgaactcgccaaacagcgcgacgaactgaacgccgaactcgaccgtgtggaacgccagcgcatcgaatccgaccaggccgcggcccgcgccggcagcgccgtcgaagcggcgctcatctggctgcgcgaccatgccgacaccggcacgacggacgccgccggtgccaccgccgacaatgacgatgacgccgcttccggcccgctgccggacgaagtcacggcggcgctcgccgaatcctacgacaaccgattcgccgggctggcggacgcggccatgcgcgcgcacatgatcatcggcgcgggcgcggcaggaacgcaggcgccgggggagagtttccccgaacgcaccatcgccggcatcggcaaggacatgacctcccgcatcaatctgctgaacggccaggccgacgccgcgcgcaccggcgtcgaatcgaaaatgagcacctacatcgcgctctacgcggccgacgacgactcgctgaccgccagcgtggaggactaccggtactatctcgacgaactcgccagcctcacccagctggccgcggttgccgccaccgactccgaataccggcgctgcctcgaacagctgctcaggagcttcctgaccatcaaacgcgccatcgacacggatgccagtgacatccacgaccagcttgaccgcatcaacgccatgctcaaaggccaacagttcggtcccaagcacggcagcctgtccctgcacgcggacgtgcgccgtcccgagcgcgccttctggacgcagctcatccgcgtcatcggcaccctgaacgattggaaatccgccgacgtcaacgattccgacgcctcgcgcaaggctttcgcggcctgcgcgccgatggtcgggctgctgcgcgccgaactcgcgcaggtcaaggacgcgaacggcgtgaaaagctacggcgcccgcaacctcgacccgcgctgccgctcgtccttctacgccatcgtgcatcatgccgacggcccggatgaacgcatcacctccaccggcggccgttcgggcggcgccttgcaggagctcgcctcattcgtatacggcgcggcgctcatctacctgctcggcggcggcctgaccagcgagccctcgtacaccacgctgttcctcgacgaggcgctcatcaaggccgacggccgttacacgcagcgcgccctcacggtgctgccgcgcctcggattccaggtcatcgtctccgccccggaaagcaagaccggtgaaatcctcgaggtctccaccaaggcctacgtgacctacaaggaccccgacaccggcctcacctccctgcgcgaggccgtgctgtaccagaatgacatggacgatgaatcatcgtcggatatattgaaggatgacggggttgccgaatga

SEQ ID NO: 48178 - DNA, 1185 bp, Bifidobacterium longum subsp. longum
atggccggcatgaaagacatcgctgcgatcaccacatgcgtgaagaaacatatgcgttcacatatgtacgacatcgaaccggcatggccgtttcccgtgccggtgggattgccggaccaagcatttttggaaaccaatgcgattgcagtgcatgacaacaacaatgagatacggcaatgggcaagcaagaatggttgcgaaatcataaccaagcatcgcaccataggcacctctgtcgagttgatctccaaagtcgtcgttcctgacgaatcaatagccatgcgtgtggttggtcgtacgctggcggcggaatatcgcgaagcgcaccgccgcatagcatgtctggttgctgcttgtgacgttgctccggaaacaatcgaatcggccgctcgcatgacaggccatgaacagcctgacgacttcgatctgcttgtcagcgcagttcgatatttcaggcatcatgacgtgaccggtatgacgccgcgacagattccactgacaggattcagcggcaaatggctgaatgagtcaaaaaccaatcgtcgtaaggccatttgccgactgctcggtgtcgaaacgttgggtctgtcaaaacggccgaccgaactgcggttccgttatctcgatccggtccgcgacgatgctgagctcgaacgcatcatatggtgtccgtgggaaggcgaagcgttatccggcattaaatatgctgtcatcgttgagaacaaagacacgtatcagactatgccgccgattgcgcagggcatctgcatatggggttctggtcgcgctgtaagcgatgctgtacctgcggttcctgcactgcgtgacatgcgtatcgtgtattggggtgatatggatgcggatggactggaaatactttcgacattacgtgaatcaggtatcgaatgcgactccatcctgatggattgcgatgcatacgatcggtaccacagatttggtaccgatcgtactgaacgcagcgcgaagattgctatgcgggagcctaagccgacgcccggccttcaatcggcggagcgacgtctttatgaacgactgtgtgctgacaaaacaatcgcttatcggcgtatcgaacaggaacgcattcccatgcgtgatgcagttgacgaattacgcaagcttggcatccccgtggagtccattgaaaatcaggatttgccgatttag

SEQ ID NO: 48179 - DNA, 1473 bp, Pseudomonas citronellolis; identical to SEQ ID NO: 43373

SEQ ID NO: 48180 - DNA, 675 bp, Pseudomonas citronellolis; identical to SEQ ID NO: 44743

SEQ ID NO: 48181 - DNA, 3378 bp, Pseudomonas citronellolis
atgaacgatttttcgccacaggagctcgatttcgtggccgacgacagccgcgtcggctttcgcctgcagcggctggaagtcctgaactggggcacattcgaccggcgtgtctggcgctatgaactcgatgggcgcaacggcctgctgactggcgacatcggttcgggcaaatccaccctggtcgatgccgtcaccacgctgctggtgccggcgcaacgcatcgcctacaacaaggctgcaggcgccgagacgcgagaacgatcactgcggtcctacgtgctgggccactacaagagcgagcgcaacgaaaccaccggcagcacccgcccggtgtcgctacgcgacaccaccagctacagcgtgatcctgagtgtattccgcaacgaaggctacggccaggcggtcacactggcgcaagtcttctggtttcgcgaaccacagggtcagcctgcgcgcttgttcgtggctgtagagcgggaactgtccatcaccgagcacttttccggattcggcagcgacatcaacggcctgcgcaagaagttacgcgcgatgggctgcgaactgaacgacagcttcccgccctacggcgcctggttccgccgccgcttcggcatcgaacacgagcaggcactggaactgttccatcagacggtttccatgaaatcggttggcaatctgaccgatttcgtgcgcagccacatgctcgaaccgttcgacgtagggcgccgcatcgaggcactgctcggccatttcgatgacctcgaccgcgcccaccagtcggtactcaaggccaagcgccagatcgagttgttggctccgctggtggaggatggccttcgccacgggcaaatcaccggcgagatccaggcgctgcgccaaggacgcgatgcattacgcccgtactttgccggtttgaaggcagcattgctggagaggcgcctggaattgttgactcaggatgcgacgcgctgggatgcccgcatcaagcaattgggagagcaacgagacaacgcccgaatcgagcaggggaaactcgaaggcgcactgcgcgagaacggcggcgaccggctgcaacaactcgctgccgccattcagcagcaggaggccgagaaacagcaacggcaggagaaagccgacgcgtacaccacgctattgacgcgcattggcgaagcagcgccgggagacgaagctgctttcatgacacaaagatccaccatcggagaacacgccgaagcgctgcgtacaagcattgcggaccacgatacgcagatcaatgaagacggctatgcgctgcggcggggtcaggaagaacacaaagcgctcagcgacgagatcgacagccttgcgcgtcgcaagagcaatatcgacgcggcccaagtgcgtatccgcgaggcattgtgcaccgccctgtccatcgcagaggaagacctgccctttgccggtgaactgatccaggtgcgcgaggacgaacgcgactgggagggcgcggccgaacgcctgctgcatggcttcggcctgtccctgctggtgccggatgtgcactacaaggacgtggccgattgggtggaacgccagcaccttggcacgcgtctggtgtacttccacgtgcgtgcgcgcaagtccacgcaggccgtcagcctgcccccccagtcgctggtgcgcaagctgctcatcaagcccgacacgccgcactacgattggctggaacgcgaactgcaccaccgcttcgacctggcctgctgcgacaacaccgagcagttccgccgcgagacccgcgccatcacccgcgccggacagatcaaggacccgagcggacgccacgaaaaggacgaccgccgccgcatcgacgaccgcagccgctacgtgctgggctggagcaacgccgacaagctgcgcatcttgcgcgacgaacgcgagggcttggaacagcaactgggcgacatcggtctgcgcattgccaacacacagcgattgcgcgggcaatgccaggcgcaactggaagccttggctaagctcgaagtcttcacccgctacagcgaaatcgactggcaggcaccggcacgcgagattgcccggctgaccgaagaacgcgaccgcctcaaggcggcctccgataccctgcgggaactggaaagccaactggcgcaggtcgttgagcgcctgaaggagatcgaagacgatcttggcgaggcacaaggcaaacgcggagaaatccgcagcaaacacgaaactgcccaggcacagcatgcgcaggctctcgaaatccagacgcaagccgcactcgacgacatgttgctgcaatctcttgagggctggcgcgccgaagtcctgggcgaccaccagctcacggtggaatcctgcgacaaccgcgaacaggacgtgcgcaatggcttgcaggcgcgcatcgatgccgaagacaagcgtctctcacgcttgaccgaacgcatcatcaacgccatgcgcggtttcaaggaggccttcaaggcagagaccgccgagatcgacatcagcctggccgcgctgcccgagttcgagcgactgatgaaggatttgcagcacgacgacctgccgcgcttcgaagcgcgtttcaaggaactgctcaacgtcaataccatcaacgagatcgccaacttcaatgcccagctcgcgcgcgagcgggaaacgatcaaggagcgggtcgatgtcatcaaccaatccttgcaggtgatcgactacaaccccggacgctacatccggctgctggcgcaacccagccccgatgcggagatccgcgacttcctgcaggatctgcgtgcctgcaccgaaggcgcgctgagcggctcggaagacgaacagtattccgagaccaagttcctgcaggtcaaagccatcatcgaccgcttccgggggcgtgagggactggccgagatcgaccggcgctggatgcagaaggtgaccgacgtgcgcaacggcttcctgttttccgccagcgagcgctggcgcgaggacgatgccgagcacgaacactactccgactccggcggcaaatccggcgggcagaaggagaagctggcctataccgtgctggccgccagcctggcctaccagttcggcctggaatggggggcggtgcgctctcgctcgttccgttttgtcgtgatcgacgaagccttcgggcgcggctcggatgaatcggcccagtatgggctggaactgttccgccagctcaacctgcaactgctgatcatcacgccgctgcagaagatccacatcatcgagccatacgtgtccagcgtcggcttcgtgcacaacgaaggcggccgtgagtcgcggctgcgcagcctgagcatcgaggaataccgggcacagaaggctgccgccaggggcggcgctgtatga

SEQ ID NO: 48182 - DNA, 1206 bp, Pseudomonas citronellolis
atgacatggagccagcccgccgaccttcgcgcgcagatcgaacggctgtggcagcgcggcgagttgctgcgtgccgtggtcggcgacggcacgctgggctggccgttgcgtctgtcgctgaaatcgccgtccgccgccgatctcagcaaccgtttcgatgccgtgcgcggctgggtgcgcgacatcagcgccatgccactcgtgcgcatcgaatggcgcgagtggacgcaccgggtgcagggacggcagcgcctgccggatacgctctggatcgatacgctggaagacgcgctggcgatgatcggtaagaccggcgatgcccaccgattccaggcgctctggcagcaaactgccgaagcgcaacccgcactgctgccgtggctgcacagagcaccgttgcagaccttggcactggccgaacactggccgcgcctgctggccgtggtggcctgggtgcaaacccatccgcgccccggcgtctatcttcggcaggtcgatgctccgggcgtggacagcaagttcattgaagcgcatcgcggtacgctggctcagtggctggacctggccttgccgactgaagccattgagcctgctgcaaccgggatgaccgggtttgcccgtcgctacggctttctggaaaagcccgttcgcatccgcctgcgcttgctcgatccgcaactgccccaacttcccggctgcaccggcctgaccgacatcaccctggatgaggacagcttcgccgcgctcgcactgcctgcgcagcgtgtcttcatcaccgaaaacgaggtgaacttcctggcctttccgccggtgtccggtgccatcgtcgtgttcggtgctggctatggctggggagcgctcgcccgggccgactggctgcatcgcgcctctctgcactattggggagacatcgatacccatggctttgccattctggatagcctgcgcaagtatttcccgctggccgcttcgtttctcatggaccgctccaccctgatggcccacgcacttcaatggggtgaggagcccctcgacaaacgccatacgttgcccttgtcccgactggtcgatgatgaacccgctctctacgacgacttgcgcggtgatcgaatccggccacaactgcggctggaacaggaacgcatcggctatcgctggctgtgcgcggcgttggtcgcaacagtccgggacgatttccggccgtag

SEQ ID NO: 48183 - DNA, 1473 bp, Pseudomonas citronellolis; identical to SEQ ID NO: 43373

SEQ ID NO: 48184 - DNA, 675 bp, Pseudomonas citronellolis; identical to SEQ ID NO: 44743

SEQ ID NO: 48185 - DNA, 3378 bp, Pseudomonas citronellolis; identical to SEQ ID NO: 48181

SEQ ID NO: 48186 - DNA, 1206 bp, Pseudomonas citronellolis; identical to SEQ ID NO: 48182

SEQ ID NO: 48187 - DNA, 1497 bp, Marinobacter sp. LQ44
atggacgaacaaacccacctgagaacccgctcctatttagtagcccgacaccagaaccctgcctggaagcttctctcggcgacccgcgggcctctggtactcagttgcctgcaggcactagtggaacaaaaccgggaagaaatcctgttcgaggatgcccagcaaatgctgaccgatatcctgcgcgagcacgccaacagcgatgacctggatctgtcaaccgacgatccggccgccgatgccaggaaagaactacgttcctggattcgcaaggggctcatcgtcgagcgggacgggcggctggtggcgaccgatgccctgcaaaaagccctggtgttcgtggagggcctggacgagaaaatcatgacgtccaccgcgtcgcgcctagccaccgtgcagcgggagattgaaaacctggaaacccgccttaacccgaatgcacaaagccgtgccgaccatatacgacgcaagatcaaagacctggagcacgaactggctgaggtggaggctgggcgattcaaggtgctgcaaggcgcagaagcggcagaaggcatccgcgaagtctacaacctcgccaccagcctgcgggctgacttccgccgggtggaagactcctaccgggaggcggatcggcagttgcgccagtccattgtcagcgaacagcatcaccgaggtgaaatcgtcgaccgcctgctggacggccacgacacgctgctggaaaccgccgagggcaaggttttccacaacttcaacgagcagctcagccggtccaccgagctggacaacatgaaacaccggctgcggaccatcctgaagaatccggcaacccgccacgccctgtcccggcaacaacaggacgagttgcgatggctggtaatccgtctgatccaggaatctgctgccgttatccgcgcccgggcccgcagcgaaaaagacgtcaaaggcttcctcaaaaccgggctcgccgcagagaaccacagggtgggcgagctgctcaatggcatactgaacaccgcccttaacatcgactggtccagccataaggtccgcaagggcgacacgcccctgcctcccatcgctgtggcggtttccagtctgccactggttgagcgcctgcgattcaagtccgccaaggaagagcaggcacaaggcctggaactcaccgaccagggcgtcaacctcgaagaggtcgacgaagagttctggcgtgcctttgatggcctcgaccgggaagccctgtaccaggaaaccgtggaactgctgaaagtcaccgaccgccccatgagcatcggcgacctggccactcacctgccgccgacccacgacctggaaactatcgccctgtggctggccatggcccgtgaggcagaggtggaaatcaccgacgaccgagaagctgtggatatcactgacagcaacgggtacaaactgcgctttcacgtgccgcaactgacgctgacccggcaagccgcagaatccatcgactgggagctgtaa

SEQ ID NO: 48188 - DNA, 660 bp, Marinobacter sp. LQ44
ctggatcatgtcgatgaacaggcggctgccgaggctggccactacacacctggcaatgtcaaagcaaccgcccaggagctgctcaagttcggattgctggaagccgaccgcaaacccaacctctaccaaattgccatcacccagactgcggcaatcaatgagatcctggaacccttcgacctgcgcctgaaagtggacgacgtgcgtgggctggctttccttgtcgtttccgaacagctgttcagcgaaggcgaagaaaacgacgacgagtggtcccatccgctggtgcgccgccagcgcttgaccatggagcaatccctgttagtggccatactgcgccagcactttatcgcccacgaacaggaagccggacttggcgccggagaagccacagtggaactggatgagctactgccgcaactgcagctttacctgggcgacaccggcagcgacacccgcgaccagaagcgcctgcgcagcctgctggacaacctgaagaaccacggcatcgtctcggacaccgacgccaacgaccaagtggtcattcgcccgatcatcacccacctggcgaacccggaaaatctgcagaacctgctacatcatttccggcaactggccggccaacccaccccgcaagacgctgacggagaggatgtatga

SEQ ID NO: 48189 - DNA, 3324 bp, Marinobacter sp. LQ44
atgagccagccccagaccgacctctttgccgctgagatgctgccgcccacggcctatatcctgacccacctggacctctacaactggggccccttcggtggacggcattgcgccgagattgacccgaaaggcaccgctattatcggccccactggcagtggcaagaccaccctggtggacgcgttgatgaccctgctgacgcaccagccccggtacaacctggcgtccaccggcggccatgaaagcgaccgtgacctgatttcctatatccggggtgtatccggtgccggtaacaacagcggcgacaacagccatatcgcacgccccggaaaaaccgtaaccgccattagcgcccgtttcgccaacggcgacaaggccattcgtatcggcgccctgttctggatcgatggaagcagctccgccgccagcgacctgaaacgcctgtggctgttttcagaacaggacgaccagagtctggacacctggctggccattcaccacgagggtgccgcccgggagctcaaacaacatgccaaggataaccccggcttacaggccaacgacagcaaaaaagcctatctagcccaggtacggcgctttttcgaagtgggggaaaatgccttcaccctgctcaaccgtgccgccggcctcaagcaactaaacagcatcgacgaaatcttccgcgagctggtgctggacgatcactctgcctttgaccgggccgccgaggtggccagcgagttcgacgacttggcagcgatccacagcgaactggaaacggcccgcaagcaacaccagtctctgctgcccattgctgaaacctacgaaaagcatcagagcgccacgaacgaactggatcagcagttattgctgaaagacatcctgccaatctggtttgcgcaaaccggttacgagttatggaacggacgcaaacaggacctggaacgacagcttgatgagggcaaagaaactttcgaatcattgggcatcacggttgcgcaacttaacagcaaagccgacaccctgaaagacatttacctgcaggccggtggagcgagcatagagcagctaaaggatcagatctcccaacagaaacgatggacagaagagcgcgatcgccacgccagggattatcagaccctgaccggcaagcttgatctggacagtacactgagccccgaagcactggcccggaaccggcagctgagcgaggaaaagctgcgtgaactgtccgaacttgcggaggcgcaagacgaatccctgctcgatctgcgccttcgtcacggcaagctcaacgaaaccctgaccgaactcagcgaagaaatcgaccgcattaaggctcgtcccggctccaacatcgacggacgttaccaggaattccgcagcgaactggcagaggccctgaacctggacgaagacagcctgcccttcgtggcagagctggtggaagtcaaagctgaagaacgtgactggcgtggcgccgtcgaacgggccatcggcgggcaccggctgcgcctgctggtaccgccggcagccatgcaatcagccttggacaggatcaacaaccgagacaaccggcttcacgtgcgactgctggaggcccagacaccccagtctccggcacagttcatggatgacgggttcacccgcaagctgaacttcaaggaccacgcccaccgggaagccctcaaacagttgctggctggcatcgaccgccactgcgtggactcccccgaaaccctgcgccagacaccccatggcatgacccggcaggggctgatgtccggcaagaaaggccattttgaaaagcgggacaaccagcggctcgacaagggctggatgacgggattcaataaccgtgaccgactcgctgcgctcaacaacgagctgagcgaaacccgtaaagaagcgggcgctctggagcagcaactcaaagccgcccgcaaaaatctcagagacacacaggatcagataaaactctacgaactacttggcgataccgaattcaacgccatcgacctgccctgcgcacagcgtgaactggatgccctgcaaagccggctggaggcactgaccgcacccgactcggatgtggagaaagcccggcgggaattcgaaactgtcagccagcaactggaagaaagccggaaacaactgtcaaagcaggaaaccaaccaggccctgcttgaggaaaagcgcaaccaggccacggcccgctgcacggaactgctggaccggattggcgaaggcctcacggacgaccagcaaagcctggccgccaagcacttccgaaccccgaaacccgatcagtatgaacgcctggaagccctggaacggggccagcgcgagcaactggacaaaaccatcggcaaactgggcaagcagatccagggttacgaactcagcctgacccaactgatggaaaaggcgctcaccattgataccggggcgctgattgaaaccggcagcaacattcaggacatcccggaatacctggaacgcctgcgggtactggaagaagaagccctgccccagaagctggaacgcttcctcagctacctgaaccagtcatcggatcagggggtcacccagctgctggcccatatccagaaccaggtggccatcattgaagagcggatcgccgacctgaacgccaccctgcggcgggtagacttccaacctggccgctacctgcgcctggaaccccgccgggttacccatgaatccctgcgtcggctggagcgcgcacagcggcagctacgggcagatgccctgaaagacgaccagggcgaaagccattttaaggcgctgcaggccatggtggccctgctgcgggacgcggcagacaacaagcgcaccgtgggcgcccgggccctgctggatccacgctaccggctgcagttcgaagtgtcggtgttggaccgggaatccggcacggtaatcgaaacccgtaccggctcccagggtggcagcggtggcgagaaggaaatcatcgccagttacatcctcaccgcttcgctaagctatgcgctatgccccgacggtgctacccagcctctgttcggcaccatcgtgctggacgaagctttctccaagagttcccacgccgtggccgggcgaatcatttcggcactgaatgaatttggcctgcatccactattcgtcacgcccaacaaggagatgcgactgctacgggcccacacccgctcggccattctggtccaccgcaaagacctgcgggctaccctcacctccttgagctgggaagaactggaagcccacgcggagaaaatgacccggaaagcccatgaagtccccggctga

SEQ ID NO: 48190 - DNA, 1146 bp, Marinobacter sp. LQ44
atgaagtccccggctgaactggcaagccgcctggcccggcaatggcagaatgcggacctgcgggaacagcgtcttttgcggccggagagctggccgctcaccctgcccatcggcaagcccaccggggcagcggtccgggataaaatcgggcaagtgcgggaacatctgcggcaatggcgggaagtgacgatcgggcaggtccagtggcagccggtccgcttccagagcaccagcgaagccatcgacatccccacccactggacactggaatctcccagtcaatgggtgcaggccacgcggagcattgaagtcaagcgggagtacgacgctctgagtcgcctcgcctccgccatggacccacgctttcacgcactgatcatacgccggcgcagcctagttatggataagccagaaagcgacgttgttcgcagtggcgaggttgcccttcaactccagcctggctgcgccgacgaaaagcccctcagggcactgtctattgccggcactgacagcaagttttttgagcgcaaccgccagctcgttacgctgatgctggacatcctgttcgacggtcaggccagcgaaaccgggctggaagcctttctgggcgctgaagacgaaggccaccactggttactggtcacagacttggacggtactctgctgcccttctcacaaatgcgggtccgggcccgcgagcttcaaagcacgcctttacctggcgaacggctaattctggttgaaaacgaacgctgccttcaccagttacccaggctctccgatacggtcgcggtactcggctcggggctgaacctatcctggctcaacgcaacatggctaaaagaccgggcgaccgcctattggggcgacatcgacacctggggactgaccatgctggccagagcccggaaacaccttccgcttctcacaccactacttatggacggggttaccttcgacacgtttgcaggcgcacgtagtgttgaagaaccacagccagccacttcaatcgttccggcaggattgaccaaaagcgaggctgagctttaccaacggcttaaacagtcagatcggggccggctggagcaggagtttctgccggcaggtatcgttcatagggccatcggtgactgggccgaccgctga

SEQ ID NO: 48191 - DNA, 1488 bp, Corynebacterium glutamicum
atgaccgttgtatcgcacgcgcttgggtttaagcgatttaggcaggaatccctggagctgtctttgttgcgcagtgacaactttccggtggtgcttgccgtggtggcgcagtattttccgcagggggctatcgctaagccagcctcagagctgtatcagctgctcagtgatgatttcagggtgctgcgtgaagaaggatttgagctgccgaaaagcccgtcggattatgtgagtgattgggtgaagtcccggtggtttgtgcgtcgtcctggtagttcgcagactggcgagaccgtggaaccgagtgaagagctgctggcggtgctggattcggtgcagcggtgggataacccgcatcgaagtatttcggcgtctcgtattgaatcgttgacgcaggcgttgcagactttggcgttggaatcggaccccagcacagcgaaacgtttggctgagttagagcgtgaacgcgacaggattgaacgccagattgaagcggttcacgctggtgaatttgaagtcctcactaccgtgcagattggtgatcgggtagcagatattttggatctggcggcttctattcctgcagatttcgccagggtaaggcatgagcttagcgatctgaatcggaagctgcgcaggcagttgcttgatcctgaagattcccgtggtgatgttttggaagagatctttaggggagttgatttgattggggattccgatgcggggcgcagcttcaatagtttctttgatgttttgctcgatcgggaacgctcaagtctgattgatcgatggatcagagaagttctgggacgcgatgaggctattgatctggattcaaaattaaggacagggctataccgtattttccgggatatggaggatgccagcttcgaggtcaacggggaaatgacagggctggctcgaagtttgcgtcactatgtcactaccgaggagttcgcagagagccgacgcatgattcagttgcttcgcgatacccgcagtgccgctgctaaggccgccgaggctggtgaagtgacctcactcaatcacatggacacaccactcgtgcgcattggtatggatgttcgctcgattgcggggttgaaactgaagaacccaggtgaagaacgcgtcgaagatttgcctgagccagttgaagaacaagaactagacactgaagtcttgatggaacaaattcgggcaagcgagattgattttgaggaattggaagaggctgtttctttagttcttgccgagcaatcgcacgccacgatcaccgaggtgctagaacatttcccggcaacgcaaggtctcgccagcattgttggattgttatacctggcgatgcgtgatggtgttcccacaggtcacgcgcaaatagtggagtgggaaagtgatgatgccacacaccgccggcggattacaggatggcagttcatcaggggtttaaacagtgaagatttggcagaaagcgagataaataaatga

SEQ ID NO: 48192 - DNA, 639 bp, Corynebacterium glutamicum
atgaatgatcagctgtgggaaggcgacactggaacgctgacttttgggtccaggaaagctctggtgcaattactcaaaggtcccatggtgaatgctttgcagcacgttgaagtgtggcgggctatcaccacagatcaagatgcgctcaatgctgtgcttaacaatctgttcctcgagttggttcttgatgaggatgcgggtgttgcatttactcggcctgccaatggtggacaagaagtattggttggaaataacaaaactgaagcgatgcccaaagtgctgcgcacggagacgctgtcgcattttgatacgttgatcattttgattctgcgccaagaactcaccatggcgccaccgggggaacgagtcattgtggatcgtgaagaaatccgcgaacaagtgttgctctaccgcgttgatgaagagcgagatgaagccaaactagctaagcgattcgacgctgcatttaggcgcatcgtggattattcattagctaaaaagacagagacacctgaacgttttgaggtctcaccagcactgcgccagatttttgatgccgacacagtggcaggtgtgcgcgctgagtacgaaaaatttaacaaagcagcccatgacggaaatgaagaggaacagaagtga

SEQ ID NO: 48193 - DNA, 3336 bp, Corynebacterium glutamicum
gtgaccagcgaacaagctttagatcctatccacccaggtcagttccgtctttctcggattcagttgatcaattggggaaccttccacggaacggtggatattcctgtgaccagggaagggatcttagttaccggtggttcgggatcaggaaaatccacgctgattgatgcgatcacggcggtattgcttccgcaaggaaagctgaggtttaactctgccgcacaggctaataccccgcggaataaaggacgcagtttggttacctatatccgtggcgcttggcgtgcgcaggaggatccgctgcaggatcagattgtttctacctaccttcgccctcgtgctacctattcgctggttggattgacttattccaacggtgaaggcgtcgagcacaccttggtggctattttctatctgaaatcgggacacaatttaacctccgatatttcttcatattatggtgtgtttcccgttgatcaagacatcaatgcgctgctggatttcctgaaagagggcatcgataaacgccagatcagagctgctttcaaggaagccatctttagcgagcagcattctgtattctccggcaggtttagaagccgtttggggatctccagtgaggaagctttgctgttgttgcaccgcgcgcagtcggcgaaagatcttcaaagcttggatgatctatttcgggattacatgctggtggaaccggatacgttcagcattgccaaaactgccgtggaacaattccaagaccttgaaggtgcttatgagcaggtcgaagatattaaacggcagatccacaccctggatcctttggtgcagctgaagaatcggcgagagaaagcgcaacagtccaaagatcatgccaatgcactgaagaaggcgctgccgactgtcgggaatcgcattaagaaggaagagcaagaaacgctggttcgacaatttactgtcgagcaaacgcaggcgaagtcgaaggtggagtccgccaaaattgagacagatcgtgcccgcgaaatggaaaccctcgcgcacgacaacgtcaaacaaattgtgggggcgcagcatggaattttgagtgcgaagagggagggagccgtcgataagctaagaacaattagcgctgcgcgtgctggcctggacgcattggttaaggggctgggcggtacggcgccggaatcggcggaggagcttttggagctcaacaacgctgcgcggctgaccgtggatgagtatccggcggcgagggaagcgcttgaatctgcaggtcagaggaatgtagaggaccgaacccgtgcggttgatgagttcaaagcggcggatcaagagctgtcttctttgagtaaaggcagcagtaatattgagtaccgtttgctgcaggtgcgggaaaatttgtgtcaggatttgggcgtgagcccgcgggatatgccctttgccggtgagctgattgatccgaataatgcggaatgggaacccgttgtgcagcgcattttgggtggttttgctgcggaaatgttggtttctcatgggttgttgccacgggttcgggattgggtaaatgccaaacatttggcagcgctgctgaaattcaacggcgtggtgacaacgggggagtacaaaacctcgcgttttccggcggattccctgatccgaaaagttgatgttgtggagtcgccgtttcgggattgggtaaatcaagaattaggcaagcgttttaatattcggtgcgtgcgcactcctgcggaattgtcggcgctggggccacgcgatcagggcgtgactattttgggtgtgcgaaaatttgcgcagcagacaggcgatccgacgacgcgttgggaaaaagatgatcgccgaaagctgggggatcggtccacataccgtttgggttccaccaatgatgccaaggtggaaacgctcagagaggccgtgaaagccggcaaagcagttgtgcaggcagctgataatcgcattgctgcaaaccgtgctgagctgcgggaacttgaacggcagtatcaggcttcgcaagaaattttgaaagtgtcgtgggctcagattgatgtggaatcagccgacgcggcgattgctgagctggaccgattgctggaagagctgaacaacactccagaggccaccgagctttccgcgcgccatgaggcagcaaagcagacgcttgcgagggtttctgacttgcttgtcgcagctcagagtgaggaaaccgtggcgtcgatgaacctgaaacgcgccgaaactgaattgaaacggctcgaaagcctgccggttacggaggtttctgaagaaatcgcgcgggaagtggagaaactatttcttgccaacacccgccgggttcacgccgccaacgtggatgagcagaccattgcgctgcgcgaggatctggacaaacaaatcgatgccaatgaggcagaacttcgacgttgtgaaaaccaaattgttggcattttgcgcagctatattgaaacgtggcctgcgaaccgcgctgacttacaagccgaacctgagtttgttggtgaggccatcaaccgcctcggcgagcttcgtagcgatcgtttggcagaattcacggctaaattcctagggctcatgaacgagatgtctacccgaaacctcggccaaatctcgcggcgtctacgtgatgcgcgccgggaaatcgaggagcgcatcgagccgatcaacgcctccttggcgcagtcggaattcaacgaaggtcgcttcctgcacatcgacatccgtgatcaaagtggtccgattgtgagggaattccagcagaaacttgatgccgctaccagcggtgacctgggaaccagtaccgagaaacaagccttcgctcgctacgcgctgatcgctgaaatcatttccaaactcgcctcccacgactccgccgacgcccgctggcgcaacaccgttctagacacccgccgccacgttcgcttcatcggcctcgagcgcgattccgacggcgcaaccgtcaacacttacgtcgactccgcttcactttcaggcggacaagcccagaagctggtgtttttctgcctcgccgctgccttgcgctaccagctagccgaactcggcgcccactatcccacctacgccaccgtcattctggacgaagccttcgaccgcgccgaccccgccttcacccgccaaaccatgaacgttttccacagcttcggcttccacatggtgctcgcgaccccgctgaaactcatccaaaccctcggcgattatgtcggctccaccatcgtggtcagctacaccgaaaaaccaaatgcccagggcgcaatccagggcaattccagtttctctaggatcgagaaataa

SEQ ID NO: 48194 - DNA, 1107 bp, Corynebacterium glutamicum
atgccattgcttatcgacgacgccctccaccgcagcaaaaaatacttccacgcgcacttaagcgagctgctcctcggcgaatttgcaggcctcagcctgcccctgcacccaccgacggcagctaaagccgccgccgatattgatgccacgagggaatttatccgccaatgggagggacgcgatgacgtggaatatgccgtgcgaaactggtctcctgtgggcttaggtaaaactgaagtacccgttaggctgacgttgaacacgattgaggaattagttgtgtttgcgcaggtagaggatgaatggtcttcacttcacgagaggttttcacagctgtctggttttacagcggaggtggtggcgaaacatgtgtcgctgtggcgttcgctgtctaacgaggatctctccaaggcggtgttagttgtggaatggtttttggagaaccccaactctggcctgctgaaacgcgcagtcgcggttgaaggcgtgcacactaaatggcttgaaaaccaccgcgtactcattgaaacattagtggctgacaaacgtggtgaacctggtcgtgccgatcttggacttggtgacgccgaagctcgcgtccggctccgcttccattccgtagatgctcccgccgggctcacagacattgaagtaccgctttccagcctgtgtgaattacaagaaccgcaagtaattctgatggtggaaaacctcgattcatttctcgctttactcacttggccgggcgtaacaattgcttggggtgcgggctaccgtgcagtagacattgttcgaggaccctacttttctaatggtcggttgctgtactggggtgaccttgaccttgatggattcaaaattctcgatgccgtccgcagccacgttccccacaccgaatccgtgctgatgaaccctgaaaccgtctcccggtggcgataccttggcgttgccgaccgagaattcaaggcagagagctttgacaaccttcacgattttgaatctgacgcacttgacctactcatcacaggcggtgagctccgcattgaacaagaacgcatccgcctcgatgttgctgttgaagaaatcgagaaagtaattcgtgggtga

SEQ ID NO: 48195 - DNA, 1632 bp, Bifidobacterium longum subsp. longum
gtggccgatgtgatgcgggagctggaacggctgcgaccggtgtatgagacgggcgtcctgcggttgctgttgcgccagaacgcgatgctgtacgtgtcgctgctgcgttccacgttcgacccgctcaccggcgagctgccgcgcgagaccgtggaggagcggttcgcgcaaagtctgaacgctctggccgacgccggcgaatatgcgccgcgcgaggaccagaccttcgccgaggccgctcatcagatcctcgccgacctgacccgtgaaggcgaaggcgactacgcctggctcgccaactcgcatgatgcggcctcacaccgattcctctaccgtttgacggcccgcgcccaccgcgccatcgaggcgctgagcaggctcgaagacgaatcacgcgccctgtccggcgcgcaggccaacagcatcatcatggaaatcgagcacgcgcgcatgcagctgaccgccgaccccggcgagcgcatcaaactcctcaaccgtgaaatcaaggaacgcaagcacgagatcaaacgcatccaacagggcaagcagcatgccacgctgagcgaagcccaggtggaggacgtgatcgccgtgatccacaacacgctgcgcggcgtgcccatcgacctgcgcgaactcgtgctcgacgagcgggacaacggcgacgccttgcgccggcgcatgcaggccggcgacatcagcgtggacgagaacctgacccgctaccacgatgaataccgccgctcgttccgcgaatcagacagcggccgccgcttcgaggacgccttccaggtgatcatcaccgacgagggccgccagcaaatcgacgaagccctgcgcgctatcgccaaaaccccgtatctggccggcgaatccggcgtgctgctcggccagatccgcgacgaactggcccgcatctacgacggcatcgaagccgtgcgccgccagatgcgcgtctccgacgaggcgatcagccggctcgtgcgccagcaaaccgacactcgctaccgtacgatgctcacccgcttgaaccgactgtacgcgcgcctcaacgcggatgcgaaaacccatatgggagacgcctcgcgcccgtacgacacggccacctcggacgcgctgttcgcgccattgccgatgcgcccggccaaatccatgacccgcgccaccgcacccggcctgagcgacctcgccgccgaagccccgcagtcgactccggtggccgatctgcgggacatggtcaacagcggcggcccccgactcctgcgcatggtcagcctcatccggcgcaacccggtgaccgttgacaggtccgatgacaggcccggcgcaaccctcgtggacatcgccgccagcttcaaccggctgcccgaaagcgaacgccgcgaaagcgagatcgtcggcttcctgggcgggctgggagccgtaagcggcaacgccatcgccgacgagccgtccactgacggcgtcggcgtcggggtcgacagcgacatcgccaccgagccggctccggcgcagcgcggcgatactgcgacctggcattgcgtatcgatcgacggcgagccccggaactggatcactagaccggtgctggccgacatggacgagctgagcatcattgtggaggaaggatga

SEQ ID NO: 48196 - DNA, 675 bp, Bifidobacterium longum subsp. longum
atgaccgtggccgaggaacacgaggaacacgaggagcatatggacaacgccaacccgtacgccctgttcgaaggcgacatcggcgacatgccggccgaggcacgcatggccgccatcgcccttaaacgcgaccgctatatcagcgggcccacctacgacaccgtgctcgacaaccgcgacgccgtcgtacgctccctgaacaacgacctgctcgacttggtgatcaacgaacgctaccgcatcatgtacgccacgcccgtggccggcgacgacgtgaccctgcgctcgctcaaaacccgtgtcagcctcaaacgcgaggaggccgcgctgctcgccttcctgcgcatccgcgtcctcgaatacgagaacgtgcacgccgaccccgccgactggctcgtcagctttgaggagatccgcgccgcgctcgccaccggcgccggctatctggccgcccgcaacgacgaggaaggcgtggcaaagcagatcggcgccatcgtctccgcgatgatcacctacgggtatttggtgcgcctggacgacgaagccatgtaccagatcacgccgctcgtgcccgtggtgctcgaccgcgaactggccgacacctggctcgacgtcgcggaacacggcgacggcgacacggaagatgacgatgacgacgagaagggagccgaatga

SEQ ID NO: 48197 - DNA, 3549 bp, Bifidobacterium longum subsp. longum
atgatgcaggcgacagacgtgcagatgatcgcggaccggtggatgctggaatcccgccgactcatcaactggggctcctatgagggctaccacgaattccgcccctccacggaccacaagctgccggtgaccctgctcgccggcgccagcgaatccggcaaatccacgctggtcgacgcgcagatctccctgctgtacccaaccggtacgccgttcaacaaggcctcgaactccggccgctccgaacgcagcgactacacctacctgcgcggcatggtcggcgtgggcagcaccgaaaccggcgacgagccgctctacctgcgcggccgcgacgagaacggcgcaccgcaacccgtgtggggcgccatcgtggacacctatcgcaaccagaccaccggccaggtgctctcctgcgccaaattcctctacctgatgcccggcgacggccgcggcgacgtgcgccgacagtacgtggtctggggcaagcccgtggaccccaggcgcatggaccaataccgtgacgccccgttcacgccggcccagctcaaagccacctaccccgactgcctcacattccccagcgccgaagcgttccacacacacatctggagcgcaatgggcctgagcgaggccgcctgtcgactgctgcacaagatccagtccgccgacgcgccctcccggctcgacgacatcttcaaacaaggcgtgctcggcgtgcccgaagccctggacctggcccgcaccacggtcgaggactacgaacgttacgacgagaacttccacgccatggacgagaagacccgccgcatggacacgctgcgcggcatccaacaggcctacggcgaatacgccgccgcacgcggcaaggcccgcgccttcgaaccggtcaagccggccgtcgacggcacggtaccggccgtgctgcgcgactgggcattggcccgcatgcgcggcgaagtcgccgtccaactgcccgccgaccgcgccgaacaacagaacagcgaggcggaagccaagctgctgcgccgccgaaccgaagacctgcgcacccgtctcgacatgatccgcggccagatgcagggtctggacggcggcaacctgacccgactcgaactcgaactcgaccaggcccgccgcaccctcgaagacgtgcaagccaaccgaacacgaatcgaacaaacgttcgcatccatcggcgagacgctgcccggcgacgaacaggcctggaacgaacgccgcatcaacgccgtgaacttcaaacgcgaatacaacaaacgagacggcgaatgcgaggaagccctcaccgccgccatcaacgcgtgggccggcgcacgcggcgacctcgaacgactgcaacgcgacttcgaccggcaacgctcccagcgcacccgcatctcccagcagatggacgaaacccgcgccatgctctgccgcgccaccggactcacccccgccgaactgccgtacgtggccgaactcatggacgtgaacgaacacgaggaagactggcgtctcgccatgaacgtcgcctacgcgcccatcgcccagaccatcctcgtcgacaagcgccacgaacagggcttcgccgccaaagtcagcaccatcgacccgcgcaccatgccccgacgcacctggcagttcgtggacaccgcacgccactacgacgacaccggcgcgcacgcgaacatactcaccggagaacaggacggcgactggctgtccggcaaactgcgctaccgcgacgactcgcccttcgccgactggctgcgctcgcagacccaggacgaacgattcgacgccctatgcgtcaccgccatcgacgacaccgaccgcaccaaccgtcaggtgcaggccgacggtcagatcaaatccggcgcacgcggccagcacggcaccaaagaccgcgcccaggtcatcggattcgtcaacgaaacctacctcaacgcgctcgcagcgcaggtcgacgccgcccgcaacgcgctcagccaagccgacaccgactacacggccgccaaaacacagtccgataacctccaccgcgaactcgaactggccaaccagctcgtctacacgtcctgggagcgcatcgacatcgccggcgcgcaacggaccatcacggacacgcaggacgccatcgcatccatcaaaaacgatcccaagctcgccgaactcgccaaacagcgcgacgaactgaacgccgaactcgaccgtgtggaacgccagcgcatcgaatccgaccaggccgcggcccgcgccggcagcgccgtcgaagcggcgctcatctggctgcgcgaccatgccgacaccggcacgacggacgccgccggtgccaccgccgacaatgacgatgacgccgcgtccggcccgctgccggacgaagtcacggcggcgctcgccgaatcctacgacaaccgattcgccggactggcggacgccgccatgcgcgcgcacatgatcatcggcgcgggcgcggcaggaacgcaggcaccgggggagagcttccccgaacgcaccatcgccggcatcggcaaggacatggcctcccgcatcaacctgctgaacggccaggccgatgccgcacgcaccggcgtcgaatcgaaaatgagcacctacatcgcgctctacgcggccgacgatgattcgctgaccgccagcgtggaggactaccggtactatctcgacgaactcgccagcctcacccagctggccgcggtcgccgccaccgacgccgaataccggcgctgcctcgaacagctgctcaggagcttcctgaccatcaaacgcgccatcgacacggatgccagcgacatccacgaccagcttgaccgcatcaacgccatgctcaaaggccagcagttcggtcccaagcacggcagcctgtccctgcacgcggacgtgcgccgtcccgagcgcaccttctgggcgcagctcatccgcgtcatcggcaccctgaacgattggaaatccgccgacgtcaacgattccgacgcctcgcgcaaggctttcgcggcctgcgcgccgatggtcgggctgctgcgcgccgaactcgcgcaggtcaaggacgcgaacggcgtgaaaagctacggcgcccgcaacctcgacccgcgttgccgctcgtccttctacgccatcgtgcatcatgccgacggcccggatgaacgcatcacctccaccggcggccgttcgggcggcgccttgcaggagcttacctcattcgtatacggcgcggcgctcatctacctgctcggcggcggcctgaccagcgagccctcgtacaccacgctgttcctcgacgaggcgctcatcaaggccgacggccgttacacgcagcgcgccctcacggtgctgccgcgcctcggattccaggtcatcgtctccgccccggaaagcaagaccggcgaaatcctcgaggtctccaccaaggcctacgtgacctacaaggaccccgacaccggcctcacctccctgcgcgaggccgtgctgcatcagaatgacatggacgatgaatcatcgtcggatatattgaaggatgacggggttgccgaatga

SEQ ID NO: 48198 - DNA, 1185 bp, Bifidobacterium longum subsp. longum; identical to SEQ ID NO: 43861

SEQ ID NO: 48199 - DNA, 1632 bp, Bifidobacterium longum subsp. longum; identical to SEQ ID NO: 48195

SEQ ID NO: 48200 - DNA, 675 bp, Bifidobacterium longum subsp. longum; identical to SEQ ID NO: 48196

SEQ ID NO: 48201 - DNA, 3549 bp, Bifidobacterium longum subsp. longum; identical to SEQ ID NO: 48197

SEQ ID NO: 48202 - DNA, 1185 bp, Bifidobacterium longum subsp. longum; identical to SEQ ID NO: 43861

SEQ ID NO: 48203 - DNA, 1353 bp, Pseudomonas aeruginosa; identical to SEQ ID NO: 44160

SEQ ID NO: 48204 - DNA, 663 bp, Pseudomonas aeruginosa; identical to SEQ ID NO: 45023

SEQ ID NO: 48205 - DNA, 2940 bp, Pseudomonas aeruginosa; identical to SEQ ID NO: 48151

SEQ ID NO: 48206 - DNA, 1182 bp, Pseudomonas aeruginosa; identical to SEQ ID NO: 44163

SEQ ID NO: 48207 - DNA, 1353 bp, Pseudomonas aeruginosa; identical to SEQ ID NO: 42637

SEQ ID NO: 48208 - DNA, 663 bp, Pseudomonas aeruginosa
atggaggatgaccagcctgtcatgagcgccgctgtacaggtcgatgagcgccggacaccgcaacgggtacgcgaggccgtacaggagatgctcaagtacgggctgctggaagagagtcacaagcccaatctgtatcgctcagcgctttccaatatcgaggcggtcgacagaatcctggagccgctcgaccttgccatgggggtcgacgaggttcgcgggctggtattcgtcaccgttcgccagggcgaggtggccgagcaggatgactggtcgcaccccctcgtgcgtcggcaaaggctgaatctggagcagtctctgctgatcgccattctgcgacagcacttcatcgcgtacgaacaggaaagcggtacgggcgccagtcaggcgctggtggcggttgatgagctgattccccaattgcaggtttacctgggcgaactgggcagtgaggcgaaggagcgcaaccgcatcatcacgctgctggatcagctcaaggggcatggcctggtgtcggctctggacgcccatgatcgcgtcatcatccgccccatcattacccacctggccaacccggagaacctgcatgcactggtggcatggctgcgagagcaggtggagggtgcggctactccggccgccggtgatgaggaggacgaggcgtga

SEQ ID NO: 48209 - DNA, 2940 bp, Pseudomonas aeruginosa
ctgggcgccgtgctctggttcgagggcacaagctcctcggcatcggatctgaaaaaactttggctgttaagcgactcccccgagcagactctgcagcattggctcagccagcatcacgcaggcggcatgcgggcgctgcgtcagatggagaaggatgggacgggtatctggccttatcccagcaagaaagccttcctggccaggctgagggattacttcgaggtcggtgaaaacgcattcaccttgctcaaccgcgctgccggcctgaagcagctcaatagcattgacgagatctttcgagagatggtgctggatgaccgctccgccttcgcgcgggcttccgaggtcgccagcagtttcgatgatctgacagacattcaccgagagctggaaaccgccagaaagcagcagcgctcattgcaaccggtcgccgatggctgggagcgttatagggccttgcaagaacagctgcaggataaacaaactctcgaaggcatcctcccggtctggttcgccgaacaggggtatcgcctgtggttggctgaaaccagcaggctccagaaggaatacgaacaggccgaactggatcaggagcaatgcaggagccagcttgagatccagaagggcgtggtcgatcaacatcgtcagcgctacctgcgagttgggggcgcagggatagatcaattacgcgagcgcatcgctgactgggtcagggagtgcgataagcgcagcctgaaagccgagcaataccaacgcctggccaaggggcttggactagcggatgagttatcggccgttgctctcgaggagaatcagcagcagatcgcggcacgcctggaaatactgacccagcaaactactgaggcacggaaaaaggcgttcaatgcaggtctcgtccagcaggaactcaatggccgcctgcagaccttacagcaggagcgtgctgaggttgagcgacggccaggctcgaacctgcccgggcattttcatgcttttcgaggtgatctggcgcaggcgcttggcgtcgatgagtcgtccctgcctttcgttgccgagctggtgcaggtcaagcccgaggagctggcctggcggggtgcaatcgagcgggcaatcggcagccaccggctacggattctggtgccgcagggctcatcccaggccgcactgcgttgggtgaaccaacggcacaaccgcttgcatgtgcgcttgttcgaggtaaaggagccgtcgtcgcgccccgttttcttcgacgatggttttacccgcaagctgaccttcaaggagcatccgtaccgagaagccttgaaggcactactggcggacaatgaccgacattgcgtcgaaagcacggagcaattgcgtcataccccgcatgccatgacggcccaggggctgatgtcgggcaaagaacgcttcttcgacaagcaggatcagaagcgcctggatgaagactggctgaccggcttcgataaccgcgaccgtctggcctttctggctgagcagattcgcgaggtcaatgaacagctcgcgcctgccaagctgggcttggatgctgcccaggacgatgtccgtcagttggagagtcaagcttcgctgctgcaacgcgtcgaagaactgcagttcgaggagattgatcggccgggcgccgagcgtcagctggcgtcgctgcgtactcagctggacaccctgacgcgccccgattccgaccttgccatgatcaaggccgagctggatgaagccgaggttctgcaggactctctggaacaacagatgcaacaactgatcaggcagtgcgttcagttgaaaactcagtttgaccaggccgcatccgctactcgtaaggcttatcgcggtgccgagaaggggctgagtgacacgcagcgtgaactggcgcaaacgcatttcccgaccctgaccgcggatgacctcggcgatattgtcgagctggagcgccagcatacgcgcgagcttcagggggaactcaaaacgctcggtgagaaactgggtgaccagaaatcggagcttgtcagacgcatgtccgacgcactgaaggcagacaccggtgcgctgtcagaggtcgggcgagagctggtggacataccgagatatctggagcgtctacgtgtgctgaccgaggaagccctgcccgagaaactcaagcgcttcctggaatacctcaatcgttcctcggatgacggcgtcacccaactgctcagctatatcgaccatgaagtctcgatgatcgaggagcgtctggatgacctgaacagtacgatgcagcgtgtcgactttcagcccggacgctatctgcgtttggttgcgaaaaaggtcatccacgaaagcctacgcaccttgcaacaggcccagcgccaactgaactcggcgcgtttcatcgatgatgaaggcgagagccattacaaggcattgcaagcgctcgttgggctgctcaaggacgcctgcgaacacagcaggaatcagggagccaaggcacttctggacccgcgcttccgcctggagttcgcggtatcggtgatcgatcgggaaagcaggaacgtcatcgaaacccgaacaggttctcagggcggtagtggtggcgagaaggagatcatcgcctcctatgtgctgaccgcttccctcagctatgcgctctgtcccgacggcagcagccggccgttgttcggcaccatcgtgctcgacgaggcgttctcgcgcagttcccatgcagttgccggtcggatcatcgcggcgctgagggaattcggcctgcacgctgtcttcatcacgcccaacaaggaaatgcgcctgttgcgccaccatacgcgttcggcagtcgtcgttcatcggcgcggcgtggaatccagtttggtttccctgagctgggaagcgcttgatgagcatcatcaacagcgcatcaaggccatgcatgaagtcgcccactga

SEQ ID NO: 48210 - DNA, 1158 bp, Pseudomonas aeruginosa
atgaagtcgcccactgacatcggtcgcagcctggccaggcaatggcagcgctccagtatccggttggatcgcttgctcaatcccggcagctggccgcaatgcttcaacatcggtaagccttcggcgcgagtcttcgctgaaaacatccatgcggtgctccagcatgtggaaaactggcggagcttgaaagtggggaaggtcgactgggagtcagtcagctatcgagctgggctggccccaatttccttgccgatgcgctggcacttgggtagtccctccgaatggattgccgcggccaatgatccaacggtcagccgggaatacgctcaactcgaatatctggtcgagcaggtagacagtgcctttcatgcgctgctggtggctcaacgcagcctgtggttgacgaagccgtttgaagaagtcgtcgccacggcgcaactcgccacccgcttgtcgccaggctgtgcccgaggccgtccactgcgcctgcttgccgagcacggcgtagacaccaagtttttcgagcgtaacgccagcttgctgacccggctcctcgacgagcgtttcgaaggcgcggcgtccgagcaaggtctgacgacgtttctggatgcctttgaagaaagcagtcattgggtactagtcgttcctcttcagcctgagctgctgcccttcaagcggcttaggctcacgactgcggaactggctgaaaccccgcttcctggttcgcggttgctggtggtggaaaatgagcaatgtgttcacttgctgcccgaaaccttgccggacaccctggctgtgctgggtgcaggactcgatttgcagtggttggcgtctgcgcacttagccgggaaacagatcgcctactggggcgacatggacacctggggcttgttaatgctggcgcgagcgaggcttcatcaaccagcggtcgaagcactattgatggagcaggagctgtttgaacagcactcaccgggcaatgcagttgttgagccggccaaagcgcgggagtcggccccacctggtttgctggctgacgaagcggatttctatcggtatctgctggtgcaagagcgaggacgtcttgagcaggagtacctgccaaaggtacaagttgagcgcgctatcgagcagtgggctagggcggtccctgtatag

SEQ ID NO: 48211 - DNA, 1422 bp, Pseudomonas aeruginosa
atggaccccaatatcccgcctctgttcgagcacttgcccaaagacctgtttcgcccattggctgcggccaacaacctgcgctactgggatgtgctgtgtcggctcatggatgcgatgtggggagaaggtggtctctcggcaggtgaagaggtgcccaagtcagtcgtcatccgaaccattgagtcattccttgttgcggatgacccatgggaggagatggacagcaccctcaatgtcactggcagggcgcatctgattttcgcttcgctccaggcaagcggctggctaagtcagcggcggcgaggggtcgtggaccatgtcaccgtcaggcctgttgtggcacggttcttcaaccacctgaccgagttcgccaaccaaacaccagagttgctgggaattcgggtccactcgatcttcgtttccctgcgcgaagtgaacaccggaaaagcgcccggcctttatcacgaggctgcccgccaggccaagcagtgcatggcgcacatctctaataccagctgccgcatccaggatctgatgggtgagcttgcgacgaagacgtcgatgggcgagttcgttcgtggctatttcgaggactacatcgagaaggtcttcattgccgactacagcgactttcgcaccaacaaccacccgctgcagttccgctcccagatcattgcactcgttcgccagttccagcacgacgaggatcagcgacaggcgctgatcggctggtatgccgcgaataaaaccgacaacgacgattttctacgcgccgaagtgctttatgagcgagacacccaacagcttcttcgtcttcgcgatgtcgaggagcatctgcagcggctggatgaggaggtgcgcgatgcccaccagatggccattgcgctcttcgaatacaaactgcgttcgcctggcaacttcgacaagctcatagagcgagccattgacgcagtagaagtcttgggggaagggcacgatgcgctcccgggtatgtcaggcctctatcacgcatccgaagtgggtctggccaagcctcgcactgcgccacgcgttcacgagcccacggtcgttgaagagtacatcccaaccatcgaagagcttgccatggaagcgcttcgacagcgaatgaatgccaaccgacacgtgaccccgctgaagcttgccgattacgtgacgcggcacataggaccggagttgagagtgagctcgagccaactggtcatcgagtccatcaccgatctctgctgctaccagcgattgctgctgatcgcctcacgcgatgcctgcccgcctggtaagcgcaaggatgacgtgcacctgcagatgatccccgccatgcacgtcgagtttgtccccgatgccatgactcgtaatgagtacatggaacaccaagaattcatgattcatgtgagggtgccttga

SEQ ID NO: 48212 - DNA, 603 bp, Pseudomonas aeruginosa
atggtcagttgggagcgattggcagaacagtcagatgtcgggcacgtcagcgctgacttcgagagagcggcttatcggctgatggtggagcagatcctgtatgcgaatgacaaattcagccgagtcgcataccacctgatcgtcaaacacctcgccgcgttccgggaggtgatgtccatgctgggcgttcacttgatccacaacgctcaccattcctacgtcgctgccatccccaaccacaacgtcgccgaaaaaatgcgcctgagcgagactcgtctggcactcgtgctgcgccgcatttacgacgatcgaatgcagtcggcagagatcgctgacggagaggctttcgtttcacttgaagagttggagcgcgcctacaaggagtggctgaagcgggagcttcccgagcgaggtgagttgcgggagctgacacaggccatgaagcgatacggtttggttcgaatcttggaggctgacgatgtgcagccctacaagatcgtgatccgcccaggcatcgtggatgtgttgagtgaaggggcgctgcatcaattggcagcacacgcgccgatcaaggatgagggtgccgacgatgatcttgcttga

SEQ ID NO: 48213 - DNA, 3426 bp, Pseudomonas aeruginosa
atgatcttgcttgaaaggatcaacctgattcagttcttcctatacgaggccaaagatgtcgacatcgggaggaacactgctttcctgggaccaaacggcactggaaagactgcgctgcttgatgccatccaagtggtcatgttggcggcagacgggaaccgcatcagcttcaacgcagccagcgacagcaagaaaaaacgttctcgcagccttcgagactactgcctgggctcaattgtgccaggtggcagctcctatcagcggacgtccgcaaatacctacgttggtttggttttccgcgactccgtcaccggagtacctttcaccgctggcgtatcgctccaggcccacgtcgaggatgccaaggccgatgtgaatgggtatttcatcctgccaggcgtagcgctcacggccaggcagtacctccagaccgaaggccaacgggagaccgttatgccctggaggatctttcagcacatggcttctgagttgtgccgttcaggggcccataccacggctcatatcacgccacacaatcgggacgatttcattcgccgcctgttgatcgatcacctggcgggccctggtgacaagccgaactcgcagtcattccgcgcggcattttctcgatccctcaagctcaacgaagacatcgtcgatctgaacgaaacgttgcgacagcatctcatcgaaccgatgccgacgaagatcaccgagttccgtgagcgcctgaatgaggtccgcgacatgcgtgacctgatcagacggctcagaacgcgaatcgacgaggccgccaccgccgcgagcacctatgccgtagtgctgcaagagcgaacctccgaggccaacctggcagccctgaagcacgtctatgcgacagagcgcactgctgaagcagtggatgcgggcgaaatcgaacaggaaaagctcgaaaagtcacgggagcgggcgaggcaggaactggaacgggcgcgcacccaagcgagtctagccagtaccgcacgagacctagcgctgacggcgctcatctccaatcccgagtaccagcagcaagcaggccacgcgggtgagctctcgctgctggagaaacactttggagagaaacaagagcagatccgagcgcagtttgaggccatgcaaaatgccctcgcggcggcctgcgaccttcccgaggtagagtccagccgaagctcctttgaagaagcgagcgagcagttgcgaggcctcgaacagttgatcgagtcggattccattcccgctctcgaatcgctccagcgcgcgcttcaagcggtgagccaggccttcgacgtggtgcgccgtgccacagcggatgcagagaccaaagctgaacaagcaagagagcaataccgtgatgctgagatcgctcgcactcgggccggccatgggctcaccagcctgagcgaaaagacaaccacactacttcggatcttggccaatgccggtattgatgccactcccgtttgcgacctggtgaccgtttccgatccggagtggcagggagctatcgagtcatggctgggacgccatgtagaggctttgctgatccctgagggcaaggaattagaggccatcaaggtctatcgcagccgagccgccgatggcatctatcgcgtcaaactggccctcccttcgcgcatacgcgattggcgtgcaagcgacagtgaaccttacgccgctcaactgattcagggtcagaaccagctcgccgtacgctacctgcagggagagctcgggcggacaaccttagccgaatccaacgagcagctacgagtcggcacgaaggccatttccaaggatggcatggtcagttcaggaggtggcgtggaacgccgccaactgcctaaggcgtctgagctcaagctgggccgcaaagatgtcagcgcaatgcgtcagcatgccgaacaagcgttccaagcagcagaggcacagtgcagccaggctgataaggcagccgctcggttggagaacgccctgcagcgactcaccccgtttgcagatgcagaatcgttgcaagccagccttgagagcaccgtcctggcgaaggctcaagcgagcgctcacgcttcccatctgagagagcaactgacacgcacgcagtcagttgcgctgagcgagctgaatgagaaaaaactgcgcgccgacgaagctgcagccgctgccagcgggcaggtcgtctcctgggcggaagaaggggcgggcctcgacaagcagttgacgctcttgggtgggcagctaggtgcgttgagggcgcagctggtactggataccgctcgggaacgagaaagccgacaaaacccgctctataaccccaacgaagtggagcgccatcgtaagcgactggatggacgccatagcgacgactggagtgcgaagctgaacgggctggagcaagcaattgccagcgcgggtgggagggcaggcaactgcgatcgagatgcctggaatctgctttccacctacctgaaggattacaacctacagaacacggacatcaaaagcagtgattggatgggcgcctaccgtttcatcctggaggatcagcagcgactcgtggaccttgagctggtcgagcacgaggagcgagcggaagaggcctatcaggccgccgcgagggtctttcgttccgatgtcgcccaggcactgctggcaggctttgaccgtattgaagagcagattgcgggcctcacctcgatcctcacgagcgcgccggctttctctaacaacgagcggtacgaattcaaatacaaggtggtcgaggagcacaaaagcctccatgaattcctgctgcgagttcgtacgcatggctctgaagatgacctattcggcgggcctggcgaggtgccggaggagtttcgtgcactcgtcgaaggtgacagcagttccccgttgctgaacgaagccagccccctgaacgaccaccgtcgcttcttcagctacgacgttgaggttttccacggctcagaaagcctgggtttactgagcaaacgttttgaacaggcttcagggggggagcaccgaactccggtgtacctcatattcggtgccgctctggcggcttgctatgggaagtcgaaggacagtctcagcggcggcggcatcatgctgctggacgaggccttcgagaaaatggatccgcagaacatccgggccaccgtgcagtttctcaatgccctcggcctgcagttgatcttggcaggccctgagtccgaccaaggcaagctcggcgcttttttgagcatctactacgacatgtcacgcttcgggggcaggaacgtcttcatgaagaaaaacgtggttcacgatgctgctcgtgagctgctgcaaagcgacaactacttgctcaatccggagctgctacagcaggaaatcgaccgcctgaaagaggaacagaatgaacctggttga

SEQ ID NO: 48214 - DNA, 1353 bp, Pseudomonas aeruginosa; identical to SEQ ID NO: 43230

SEQ ID NO: 48215 - DNA, 663 bp, Pseudomonas aeruginosa; identical to SEQ ID NO: 45023

SEQ ID NO: 48216 - DNA, 2940 bp, Pseudomonas aeruginosa; identical to SEQ ID NO: 45024

SEQ ID NO: 48217 - DNA, 1182 bp, Pseudomonas aeruginosa; identical to SEQ ID NO: 44163

SEQ ID NO: 48218 - DNA, 1353 bp, Pseudomonas aeruginosa; identical to SEQ ID NO: 43230

SEQ ID NO: 48219 - DNA, 663 bp, Pseudomonas aeruginosa; identical to SEQ ID NO: 45023

SEQ ID NO: 48220 - DNA, 2940 bp, Pseudomonas aeruginosa
ctgggggccgtgctctggttcgaaggcacaagctcctcggcatcggatctgaaaaaactgtggctgttaagcgagtcccccgagcagactctggagcattggctcagccagcatcacgcaggcggtatgcgggctttgcgtcagatggagaaggatgggacgggtatctggccttatcccagcaagaaagctttcttggccaggctgagggattacttcgaggtcggtgaaaacgcattcaccttgctcaaccgcgctgccggcctgaagcagctcaatagcattgacgagatctttcgcgagttggtgctggatgaccgttccgccttcgagcgggccgccgaggtcgccggcagcttcgatgatctaaccgacattcaccgagaactggaaacggctagaaagcagcagcgctcattgcaaccggtcgccgatggctgggagcgttaccaggtcttgcaagaacagctgcacgataagcaggctctcgaaggtatcctcccggtttggttcgccgagcaggggtatcgactgtggttggctgaaaccaacaggctcgagaaggagtacaaaaaggccgaactggatcaggagcaatgcaaaagtcagcttgaggcccagaaaggtgtggtcgatcaacatcgccagcgctacctgcgagtagggggcgcagggatagatcaattgcgcgagcgcatcgctgattgggtgagggagtgcgataagcgcagcctgaaagccgagcaataccaactcttggccaaaggccttggactagcggatgagttatcggccgctgctctcaaggagaatcagcagcatatcgcggcacgcctggaaatactggaccaacaaattactgacgcgcgccaaaaggcgttcgacgcaggcctcgtccagcaggaactcaatggtcgcctacagaccttacagcaggagggtgctgaggttgagaaacggccaggctcgaacctgcccgggcaatttcatgctttccgaagcgatctggcgcaggcgcttggtgtcaatgagtcggccctgcctttcgttgccgagctggtgcaggtcaagcccgaggagctggactggcgtggcgccatcgagcgggcaatcggtagccaccggctacgcatcctggtgccgcaggactcatctcaggccgcactgcgttgggtgaatcaacggcacaaccgcttgcatgtgcgcttgttggaggtacaggagccgacgtcgcgccccgtgttcttcgacgatggttttacccgcaagctgaccttcaaggagcatccgtaccgagaagccataaaggcactgctggcggacaatgaccgccactgcgtcgaaagcccggagcaattacgtcatacccctcatgccatgacggcccaggggctgatgtcgggcaaagaacgcttcttcgacaagcaggaccagaagcgtctggacgaagactggctgaccggcttcgataaccgtgaccgtctggccttcctggctgagcagattcgcgaggtcaatgagcagctcgagccagccaagctcgccttggatgctgcccagggcgacgttcgtcagttggagactcaagcttcgctgctgaatcgtgtcaaagaactgcagttcgaggatattgatctgccgggtgcccagagtcagctggagtcgctgcgtacgcaactggccaccctgacgcgccccgattctaaccttgccatgatcaaggtcgagctggatgcggccgaggccctgcaggagtctctggatcaacagctccgccaactgatcgaacagtacgttcagttaaaaactcagtttgaccaggccgcatccgctacccgtaaggcctataacagcgcggagaaagggctgaacgatacgcagcgtgaactggcgcaagcgcatttcccgactctgaccgcggatgacctcggcgatattgtcgagctggagcgcaagcatacgcgtgagcttcaagggcagctcaaagcgcttggcgagaaactgggcgatcagaaatcagagcttgccaaacgtatgtctgatgccctcaaggtagacaccggggcgcttgcagaggtcgggcgagagctggtggatgtccccaggtatctggagcgtctgcgtgtgctgaccgaggaagccttgccagagaaactcaagcgcttcctggaatacctcaatcgctcctcggatgacggcgtcacccaactgctcagctatatcgaccatgaagtctcgatgatcgaggaacgcctggatgacctgaatagtacgatgcagcgtgtcgactttcagcccggacgctatctgcgcctggttgcaggcaaggtcatccatgaaagcctgcgtaccctgcagcgcgcccagcgccaactgaactcggcgcgtttcatcgatgatgaaggcgagagccattacaaggcattgcaggatctcgtggggttgctcaaggacgcctgcgaacacagcaggaatcagggagccaaggcgcttctggatccgcgcttccgcctggagttcgcagtatcggtgatcgatcgagaaagcaggaatgtcatcgaaacccgaacaggttctcagggcggtagcggtggcgagaaggagatcattgcctcctacgtgctgaccgcttccctgagctatgcgctttgtcccgacggcagcagccggccgttgttcggcaccatcgttctcgacgaggcgttctcgcgcagctcccatgcggttgcaggtcggatcatcgctgcgttgagggaattcggcctgcacgctgtcttcatcacgcccaacaaggaaatgcgcctgttacgccaccacacgcgttcggcagtcgtcgttcatcggcgcggcctggagtccagtctggtttccctgagctgggaagctttggatgagcatcatcaacagcgcatcaaggctatgcatgaagtcgcccactga

SEQ ID NO: 48221 - DNA, 1182 bp, Pseudomonas aeruginosa
atgaagtcgcccactgacatcggtcgcagcttggccaggcaatggcagcgttctagtgttcggttggaccgcttactcaattctgctagctggccgcaaagcttcaacatcggcaagccttcggcacgactattctctgacaacatccggacggtgcttcggcatgtggaaaattggcggagcgtgaaagtgggtaaggtcgactgggaacccgtcagctaccgagcagggttggctccaatttccttgccaatgcgctggcacttgcgcagtccctccaaatggattgccgcaaccgacgatccttcggtcagccaggaatacgctcaactcgagtatctggtcgagcaggtagatagttcctttcatgctctgctggtggcgcaacggagcctgtggttgacgaagccctctgaagaagtcatcgctacagcgcagctcgccactcaactatctccgggctgcgctcaaggccgcccattgcgcctgcttgcagagcacggagtggacaccaagtttttcgagcgaaacgctatcttgctgacgaaactcctcgatgagcgcttcgaaggcgcggcgtccgagcaaggtctgacgacttttctggatgcctttgaagaaaccagtcattgggttctagtcgttcctcttcagcctgagctgctgcccttcaagcggatcaggctcacgacttcggaactggccgaaacctcacttcccggttcgcgattgctcgtggtggaaaatgagcaatgtgttcacttgctacccgaaacgctgccggacaccctcgctgttctgggcgcagggctcgatttgcagtggttggcgtctgcgcatctggccgggaaacagatcgcttactggggcgacatggatacctggggcttactgatgctggcgcgagcgagacaccatcaacctgcagtcgaagcactgctaatggaccgggagctgtttgaccagcactccttgggaagcgcggtcgtcgagccagctaaagctcaggaattggctcccgaaggattgatgaccgacgaagctgatttctatcggtatctccttgcacaggagcgggggcgccttgagcaggagtatctgccacgcaggcaagtcgaacaggctattagtaaatggtttggagagtcggtagcgccggctcatcctgagcgaacggcttga

SEQ ID NO: 48222 - DNA, 1455 bp, Pseudomonas aeruginosa; identical to SEQ ID NO: 44590

SEQ ID NO: 48223 - DNA, 756 bp, Pseudomonas aeruginosa; identical to SEQ ID NO: 44216

SEQ ID NO: 48224 - DNA, 3387 bp, Pseudomonas aeruginosa
atgcttgaggctagcgaggtaagtctgagtgagttgttcagcaccggtcagatccgtctagccgagctgtcggtatacaactggggctccttccatggcctgcattccgcgaagatagaccccgagggcaccctcattaccggtgacaacggtgccggtaagtcgacactcattgatgggttgatggcgctgttgctgccctccagcaaggcgtcgttcaacatcgcggctgctcaaggcgaccgtacggatcgtaccttgatgtcctatgtgcgaggaaactatggcaaggcccatgatggcagcgagacggctacgctgctgaaacgctcaggggcgaccgcaacggggcttcgggcactgtaccaagcggacgatggttcgaagatcaccttggcggccctattctggattacccaggccagcaactcgctcaacgacctcaaacgcctttttgtggtgggtaagcgcgatgtgggcttggatgagctgttgcatctcttcggtgagggcaatgcccgtgtgctgaaacagcacctcaaagaggacccgctggtcgaggcattcgattcgtttaccgagtatcaagagacctatgtgcgactcctgtgcatggagaaccgtaacgcaccagccctgctctcccgggcgctgggtttgaagaagattgatgacctcaccagcttgattcgagatctggtcctggagcccagtcaggtcaaggagcatgcccggcttgcggtcagtgaattcgatgacttggtcagcgtccatagcgaactcgatgatgctcggcgacagcgggatgccctgattgagttgccagagaccagccaagcgctaaatcaggccagggaggagatgcggcggatctcagctgagctagccggcctgccggtctactttggcgaacagtgctctcgactgtggcaaatgcgcctgaagaaatatgaggcggaactgcttcagttggcagaggaaatgacccgccttggcgctttggaggagcaagcaacggaacgggtacaggcattgttccatgcctaccagtcgcaaggtggtgagcgactggaggggctgcggaaggacttgaaagcggcaacgcaggtgcatcacgacagcgtgcgcgatgcgcgcctgtatcagatggatgtacgagaccttagtctgcccgacacgctgtcgctcgacgtattcaagcaaaatcaggtgagagcgcaaacggaactggcggatatgccggcgttgcgtcaagcgcgccaggatcagttcgcttcgtcggcagcgaacctctcccgtgagcaaacacagctcaaggagctggtaggtgaaatcgaagacatggagtcgcgaccggactccaacattgaaccttcctatcagaagctccgcgaccaactggtagagagcttgtcgctagatcctgcggaggttgttttcgttggcgagctgatcgatgtcctggaggcgcatcgaccttggcaaggcgccattgaacgggcgctgggagggcatcgcaccacactgctggtgcctgatgagcgatatcgcctggtgaccaagtggctgaacactcgccacacgggtctccatgtcagggtgcaggttgttccgctgaaccagcatccgcaggttgctgagttcctaccggatggctttctaaaaatgctggattggaagccgcacccctatcgtgattggctgaaaaagcacctctcacgcttcgacctgcactgtgtggcatcaactgaaatactggaccagaccgacttctcgatgaccatccagggcttggtgcacctggataaagggcgatttgagaagaaggaccagcagcgcattgataacccacgtttctggtgtttgggattcagcaacaaggggcgtctagcgacgttaaggaaggatcgtgtcgagttggaggcagatgtcaagaagttggcccagcttacagcaaatgcgcgcacggccatggacgacctcgagaagcacactcgggtgtgggagcgcatcacccagctcacctgggcggcaattgatgtccagtcagcgcaagatcggatgcagtcgctgagggcggatctagaggcgcttgaacggcctgatagtgaattgggagtggcgaaggctcggtgggagcaggcaggtgctgagctgaaggaagtacaaggcaagaaagaactggtcagcaaaaaagtcggggggctggagagcgacaagctcaaggcgaaccaacaactggaactggcgttagatgccgcccggaccggtttggtggatgaggtcagggagttgctttctaagcgtgtgggacagctagaccttgacgatttggagatggtttcagaactcgaaaatcgccatcgatcagcgctggaagaggcccgtaagggggtccacaaccgagagtttcgagcatcgaacaaggctagcgggattgtctccgagttcaaaacaaaatggccgctcatcgccaatgattggctcgccggcgtggatgccctagaagagtacgtcgatcacctggcccatttggagcaggaaggattgccagacctggtcgagcgtttccgagagcgcttgaaccgcaacgcaacacagtcgcttgctcgaatcagccaaaccatccaggccgaacgtgaggacatccaggaccgaatcgaaacgatcaacgatgttctggagcgcacggaatttcggcagggaacctaccttcgtctgggaagtcggccagaaatcttcgaacacgtgaaagcattcaatgcaaagttgatgcgcgtgctggcgcgggctggaagtgacgatcatgaggctcgctttgtcgagctgaaggagctgatcgagaaactggagaaagccaccaatcctgcaacctcgggcaatctagagagtctgcgactgttggactcgcgctaccagctgtccttcttcgccgaggaagtagagaaaggcagcaaaaaggtacgcgatgtgctggagtcttccagtggtaagtcaggcggggaaaaggagtcgtttgccggcaccatcgtagccgccagcttagcttacgtgctgacgcccgacggcagcgaccgtccgctctactgcaccgtgttcctggatgaggcgttctccaataccgccgaggcggtgagtcgccgggtgctcaaagttttccgggaattgaagatccacgtgaatctgatcactccatacaagaacctcaaccttgcacgtgaatcggcgcgctcgctgttgatcgcagagcgtgaccaggacaagcatgagagtcggctctgtgaggtcacctggaaggaaattgacgagcagttggcgcgtcatgaacagcaggggctgcaaaaggcagccagttcactggggatcgaagtggagccagatctgtga

SEQ ID NO: 48225 - DNA, 1194 bp, Pseudomonas aeruginosa; identical to SEQ ID NO: 44218

SEQ ID NO: 48226 - DNA, 1353 bp, Pseudomonas aeruginosa; identical to SEQ ID NO: 43741

SEQ ID NO: 48227 - DNA, 663 bp, Pseudomonas aeruginosa; identical to SEQ ID NO: 45502

SEQ ID NO: 48228 - DNA, 2940 bp, Pseudomonas aeruginosa; identical to SEQ ID NO: 45503

SEQ ID NO: 48229 - DNA, 1182 bp, Pseudomonas aeruginosa; identical to SEQ ID NO: 44163

SEQ ID NO: 48230 - DNA, 1353 bp, Pseudomonas aeruginosa; identical to SEQ ID NO: 43741

SEQ ID NO: 48231 - DNA, 663 bp, Pseudomonas aeruginosa; identical to SEQ ID NO: 45502

SEQ ID NO: 48232 - DNA, 2940 bp, Pseudomonas aeruginosa; identical to SEQ ID NO: 45503

SEQ ID NO: 48233 - DNA, 1182 bp, Pseudomonas aeruginosa; identical to SEQ ID NO: 44163

SEQ ID NO: 48234 - DNA, 1407 bp, Pseudomonas aeruginosa
ctgaactcgtcgcgccgcgagctcttcgcgacctgccttcggttgctctatgaccgattgcacggtcctgcggcggattatgcacacaacctcggacgggacgatttgaccgagctggtgctgcctgtggtcaaggagcatctggctaggcccgtcgaggctgcggaccaggatgagttttcttccgccgatgccaacgaccccctccagatgaccggattggtcatccgggctctgctgaaagatggctggctcgaaaaggggatcgagcgagaaggcctggtcactagcttcaggttctccaggacgggcaagctgttcgctgaagccttctggtcgttgcaccggccaagccggagccgacagcgcaacatgcggagctgtcgcaacgcactggcagcggcgctgagcaggaacgatgcccatgacctggtagacgcatacgaattcgccgaaaaggtaattgaggacctgacggagggtatcgaccttttcaaggatctcgcacgaagcttgatgcgcgaggcgtcgttggtagtccgctgggacgacttcgtggagttcttacagcgtttccgtcgtgactactccaagcagctaacggcggacagcgccacgctgaaccgccaatcgattcggcagaatctggaaaagctgcgaaccgaagtcaccgccgctcagtaccggcgattcgagaatgaccttcgggagattgccaactgggcggtgagtgagcacaccggggactcagtgttcgaatggatgctcgagcgtatcggagaaatggtggacgctgcgtgcgacaccaagcagcccatgtttgtgaagtccatggaggcctacgtccgccgggttaccggccttatccagcaatcgatgatgctgcgaaccggacacaaccgccacagcttcatggcggtgatccagcgcctggcaaattcgccacaggatattcaggactcaatcctgtccagaattgccgccgacatggcggcggtcgagattcggctacttgatccctctgcactcaagctccgctccgctacccagcggcgcaaatctctcacggtgaccatcaggccgcgccccactcgggaggcccgattggaggccgcaatgatgcgggccgaagccgaaaccttctcaattcccaacgaggatattgtggcagtgctccgccaggagctgcgcctagtcggcagaggaatacggctgtcctcattgccccgtgaaaccgcaaggcaggccgttcgcttgttccaggcggtcgaggcagtacggagcgcgaagtgcaatgatctggttgccaccaaacttgcactccgcttcgacaccgacttttacagcggctgcgattatctcatcgacttcagggagcgagggaatgaacctgatttccaccgttaa

SEQ ID NO: 48235 - DNA, 678 bp, Pseudomonas aeruginosa
atgaacctgatttccaccgttaactcgcaattgaatttgcacaacctgagcctcgaccgttttcggcagatcgtcactcgcctgctggcacagggggtaatcgtccgtgatgacgatcggaacgagcagttcctctacgacgatgcccggagagtggagccgctgctccttgactatttcgacattgcgggccttcgtctccaccatgacagccacgcctgcttctttcggctctatgcgccaggcgcgcgcgtggacggactgccagatgacgacgtcgatccggtgccggcattgaaggcgaagctcactccggactttgtcgccgcggcactggcgctgcgtttcatctaccaggagcacctcaatgcggggagcattgagctgaatggcgaagcgatgatctcgcttgaggaccttgctgcgacgatgcagacgcaactgcgccgaaacctgccgtcgacagcaggggagaaaatggagctgctggggcagctgcggcggcacaagatcctgcgtttcaacgccagcttcagcatcactgacgaggatgcattccttgcgattcggccgatgatcctgggagtcgtcacgaatgacgcccttttatcagcattggacgccgatggggtgatcgaagtgcaggccaccgtcgaggagcaggaccgtgaagattga

SEQ ID NO: 48236 - DNA, 3648 bp, Pseudomonas aeruginosa
gtgaagattgaccatctgattcttggtaactgggggcaaattgaaccgggggactaccagctcggcgacatgaccttgctgaccggagggagtggcgccggcaaatccaccttcctggatgctctgcagatgctgatgacagcgggctacaagggcatccttcacttcaacccagcccagggcgaagtaacccaggaccagcggcagaagactaagaggaacctggagtcttacgtggttggagccgagtacagcaagttttcgaggccggacggtgctcagacctatgtaggcgcagtgttcatgccggacaagggggaggaggggggcaaacccttcacggcgcttgtcgccgcctcggcacgggtcgacaccgttgggagcagccgaatccccgtgctggagcgttctgaggtgttgatcattttggatggcgtccgtctctccgtggctgagttgttcaaggacggatcgcagcaggaatgggtggcggtcgaggaggtggtccgcatgctcagagggaagggctacaaccccatccaattcccaggcaaacgcgactatctctgtgctttgtatggccgcttccgcggaaaaagcggtattacgtgggaggacgccagagcggctgccaaggcctgggtagagtccatcgcatacaagaagattggctcggtgaatgacctggtcaaagacgaaattctcgcctttgacggcaaggctctccaggagggcatcgaacgcatcagcggtttgatgaagcaagtcaccaacctccggaaggagagtgagcgcttgcaggcgacgcatgaccgactcgccttgctgaccgaaaagattaccgacacgatcattggccacgagtctgttctcaagcatgaagtagctctgaggcacctgaacgtgctgcgcgtcgatgctgcccttgagtcataccgcaaccaggtggagcaccaacgagcagccatcctggagagcgagacgcagcttgtgggcctgaacgatcagaagatcgaactcaatcgccaagtgggcgccctaaacaccaaactaatggggttccaagtccatcaggaaaagcagagcctcgaggcacaagccaagctggctgcaacagcagcagctcagtgtgtttcggctttactgcacggtcttgaccaggctcggaatctatcgacggctgcagaaaatgtcctaggccggcacattcccgttgagatggcgggaatgtcccaggccatggaggcagttaccgctgcacaccgcggattagagcgtgttcaattgcaggggatgaacagccagttgctgatgctggccgctcagtcagacctcgataccggcatgctccgggacgtggccgcccaatgcaccagcattcaaaccggttgggggcggctgtactcagccctggcagggacggatgaacccagcctgcttctgcagtgttacgccgctcagtcgccggtctccgaagctatccgtcaactcggtaacgagctgagagacaaggaaagcgcccgggcgcggatagtgaccggcggtggaaactaccccaaatgggtcagtgttgcgctggaccgtatgcgggaggccatgcccagcgccaacgtgcaggtgctttgcgacctgattgaaccggcctccgaccaatggcaagcggcaatcgaaggttatctggctgacgcccgtttcaacttcgttgtgcccgccgagtttgaacgggaagcgatcgacacggcccagcggctgggactgaaaaccaaggtcatccagggcgagtactgccaacagcatgctgacccatcgcgagtgccagcagaatcgattatccacgagctgaccaccgagcatcgcatagccaaggcctatctcatcgaacaatacggtcgagtcgtgaaagtggcctccagcaaggagctgaggcatacgccgcgtggcctcaccatgaatgggaagggcagtggatcccggacgatgttcagcgcgaaagatgtggagttggtctttggcaagaaggcccgagcagtggccatcgagaggctgtcagccgagattgccgagcttgagcagcagctcagcacagtacgaggccatcaaactgacctgcaggaaatcatcaccgtggtccagcgcttgcagaagcccgtgttggagttccaatcgcttcaggacgcagcaacggaccttgaaaagatccgtcaggcgttggccagacttgacctcaccgaaatcgtgaatctcgaggccgagatcgcgaagctgaacacagatttgcaggcggtcgaagttgctagcaataaactcgtcggtgcggtggcggtgtccatgagcagcattgaggagtggaacgggacgattacctcgctggaggagcgtagacccgcagtggtgcagtcgttgaccaacgaagtcgaccgggtacagaacctttgcgacgtgaatcgggcccacgtggtgaacctattcctggattctacctatgaactcgctgccacatggcaagggcgcgaggacaacctggaatctgcaatacctagcatgcgtgcgaagacatccctcaaggcgggcaatgtcaggcatgacctggccgagcacaatcgggtcgcccggcaagatgagcgctttaccagcggcgtaccggatgttctggaacaggatcgcttcgatccggtgtatggccatttggtcctgttgcggggcgaagtcctggccacacttgcggacttgaagaacattggtctcctgaacaatgcccaagatcttgccgacgctgaagcctctttccgcgatgtgtttaccaagcagttttgcgtcgagatccgcggtaaggtggaggagggcgtccgtgagttgcgaatactcaacaacgaactacggaatctgaagtttggatccgatcgttttgagatcgagtggtcaaaatgggtgccggaattctacgagtactacaccttctttggtgccgtggccgagatggccgcctccaatgaggcccatgacctgtttggttctgcatcgctcaccgaaaaccagattgccgtccgggacaggctgatcgatttgctactggatgacgatcatgagcgtgcaaccaaggagctgatgcggatcgcggattatcgcaactaccgcgtctacgacatagcgaatcactccgacagtgggggagcgatcaagttgtcggagtggggcaccgggtcgggtggtcagctcgaaacgcctgcgtacatcgtcagggccgcagtggtaaccaacaagctgaaggtcttcgacaaaggccccagcctcaagctgctggtgaacgatgagtccttcgcgcgcatggatgaaactcgtgcgcgcgcggtcttgggattcttacgtgacaatctcaatttgcaggtgatctgtgctgttcccaccatgaaggccggggccattcgtgatgaattcacccgcgaattcacctttacccgtctgtctccggtggagaatggggagctcgacttcatttcggaatgtgattcccgcgagttgcgaccggacaagatgcgatcgatgtgggagcagcagcgcagggtggcaagggagcaggcccgcatgaggttcgagatggagaatcctctggagccggacgaggagccagcgcaagaggctgtcccatga

SEQ ID NO: 48237 - DNA, 705 bp, Pseudomonas aeruginosa
atggcggccgtcgtacagcagctcaatagattgactggacttgcgaaggagcctttgtttctacgtgaggtatccgcccagttgttctggggcatgtccaaggtactggataatcgtcaagcgatggtggcagcgatccttggcctgcctgaatgcccgtttgcggaggcgcccgtacagctgcaggtgttcctgccacatggcggctgggatggcgtcctgtttatcgagaaccaggtgtcgtttgagcgtgcgattcgctcggtgaatgctgaaacccaccggttggccatggtgcacacttccggattcaaaggttcagccattcgcttgcggcaggtggcgacgtcatcgctgttcttttcgaatctgggcagccaagagccccttcatactgaaggctttggccgctggctctatggccaagaatctggggagtctcaattctggggagacctggattgggccggtatggcgattctggtggcgctccggttgagctttcctgggaccgtcgcctggcagccgggctaccaaccgatgttggtcagtttgacaagcggggatggccatcaccctgaagaggctgacaagcgtggccagacgccggtctgcagcaccgggtgcgagtacgcagacaacagcttgatccctgcgctgcagaccctgaatgtcttcgtcgaccaagaagcgttcaggatttga

SEQ ID NO: 48238 - DNA, 1455 bp, Pseudomonas aeruginosa; identical to SEQ ID NO: 44081

SEQ ID NO: 48239 - DNA, 756 bp, Pseudomonas aeruginosa
atgaacgaagaagagcagcattcccaacaggcccctgccctgttcgaccagtatcgaacgaatcggcctgaaacgccgtcaatcagcggcgaggtggagacgtttgaggatgctcccgttgagcggcccgtcgttgggggggctgaagtcggcatgccactggaagcccggcgcgctctggtgctgttacttcgccaaggggtggtgatggccgaaagcaaacgtctggcgttcgaagcgctgtgccggcacgaggtcctcatcgcagagcacttgggcaacatgttcatgcgcatgttgctggacatgaaggccggtatcgccatcctgctccagcaggaggtggcagagcaggacgaggagactgacgaagcgtcacgcttgatcaacaaacgcacgctcagcctctatgacacgctgctgttgctggtgctgcgtaagtactaccaggagcgagaaacagcgggcgaacagaagatcatcattgatatcgagcggatcgaggcattgatgacgccctttttgccgctgacctacagctcccgctccgagcggaggacgctcaacggatcgcttgccttgttgaaagataagcgtctcatcagtgcggttcgtggggatgacgagcggtttgagatcacctctgtgatccgctatgtcgtcaatgccgattttcttgaacgtctgttgaaagagtacgaacgcctagccggtaatgcgggcgtcaaaacgggcgacgaggtgcaggatgcttga

SEQ ID NO: 48240 - DNA, 3387 bp, Pseudomonas aeruginosa
atgcttgaggctagcgaggtaagtctgagtgagttgttcagcaccggtcagatccgtctagccgagctgtcggtatacaactggggctccttccatggcctgcactccgcgaagatagaccccgagggcaccctcattaccggtgacaacggtgccggtaagtcgacactcattgatgggttgatggcgctgttgctgccctccagcaaggcgtcgttcaacatcgcggctgctcaaggggaccgtacggatcgtaccttgatgtcctatgtgcgaggaaactatggcaaggcccatgatggcagcgagacggctacgctgctgaaacgctcaggggcgaccgcaacggggcttcgggcactgtaccaagcggacgatggttcgaagatcaccttggcggcccttttctggattacccaggccagcaactcgctcaacgacctcaaacgcctttttgtggtgggtaagcgcgatgtgggcttggatgagctgttgcatctcttcggtgagggcaatgcccgtgtgctgaaacagcacctcaaagaggacccgctggtcgaggcattcgattcgtttaccgagtatcaagagacctatgtgcgactcctgtgcatggagaaccgtaacgctccagccctgctctcccgggcgctgggtttgaagaagattgatgacctcaccagcttgattcgagatctggtcctggagcccagtcaggtcaaggagcatgcccggcttgcggtcagtgaattcgatgacttggtcagcgtccatagcgaactcgatgatgctcggcgacagcgggatgccctgattgagttgccagagaccagccaagcgctaaatcaggccagggaggagatgcggcggatctcagttgagctagccggcctgccggtctactttggcgaacagtgctctcgactgtggcaaatgcgcctgaagaaatatgaggcggaactgcttcagttggcagaggaaatgacccgccttggcgctttggaggagcaagcaacggaacgggtacaggcattgttccatgcctaccagtcgcaaggtggtgagcgactggaggggctgcggaaggacttgaaagcggcaacgcaggtgcatcacgacagcgtgcgcgatgcgcgcctgtatcagatggatgtacgagaccttagtctgcccgacacgctgtcgctcgacgtattcaagcaaaatcaggtgagagcgcaaacggaactggcggatatgccggcgttacgtcaagcgcgccaggatcagttcgcttcgtcggcagcgaacctctcccgtgagcaaacacagctcaaggagctggtaggtgaaatcgaagacatggagtcgcgaccggactccaacattgaaccttcctatcagaagctccgcgaccaactggtagagagcttgtcgctagatcctgcggaggttgttttcgttggcgagctgatcgatgtcctggaggcgcatcgaccttggcaaggcgccattgaacgggcgctgggagggcatcgcaccacactgctggtgcctgatgagcgatatcgcctggtgaccaagtggctgaacactcgccacacgggtctccatgtcagggtgcaggttgttcgactgaaccagcatccgcaggttgctgagttcctacaggatggctttctaaaaatgttggattggaagccgcacccctatcgtgattggctgaaaaagcacctctcacgcttcgacctgcactgtgtggaatcgactgaaatactggaccagaccgacttctcgatgaccatccagggcctggtgcacctggataaagggcgatttgagaagaaggaccagcagcgcattgataacccacgtttctggtgtttgggattcagtaacaaggggcgtctagcggcgttaaggaaggatcgtgtcgagttggaggcagaggtcaagaagttggcccagcttacagcagatgcgcgcatggccatggatgacctcgagaagcacactcgggtgtgggagcgcatcgcccagctcacctgggcggcaattgatgtccagtcagcgcaagatcggatgcagtcgctgagggcggatctagaggcgcttgaacggcctgatagtgaattgggagtggcgaaggctcggtgggagcaggcaggtgctgagctgaaggaagtacaaggcaagaaagaactggtcagcaaaaaagtcggggggctggagagcgacaagctcaaggcgaaccaacaactggagctggcgttagatgccgcccggaccggtttggtggatgaggtcagggagttgctttctaagcgtgtgggacagctagaccttgacgatttggagatggtttcagaactcgaaaatcgccatcgatcagcgctggaagaggcccgtaagggggcccacaaccgagagtttcgagcatcgaacaaggctagcgggattgtctccgagttcaaaacaaaatggccgctcatcgccaatgattggctcgccggcgtggatgccctagaagagtacgtcgatcacctggcccatttggagcaggaaggattgccagacctggtcgagcgtttccgagagcgcttgaaccgcaacgcaacacagtcgcttgctcgaatcagccaaaccatccaggccgaacgtgaggacatccaggaccgaatcgaaacgatcaacgatgttctggaacgcacggagtttcggcagggaacctaccttcgtctgggaagtcggccagaaatcttcgaacacgtgaaagcattcaatgcacagttgatgcgcgtgctggcgcgagctggaagtgacgatcatgaggctcgctttgtcgagctgaaggagctgatcgagaaactggagaaagccaccaatcctgcaacctcgggcaatctagagagtctgcgactgttggactcgcgctaccagctgtccttcttcgccgaggaagtagagaaaggcagcaaaaaggtacgcgatgtgctggagtcttccagcggtaagtcaggcggggaaaaggagtcgtttgccggcacgatagtagccgccagcttggcttacgtgctgacgcccgacggcagcgaccgtccgctctactgcaccgtgttcctggatgaggcgttctccaataccgccgaggcggtgagtcgccgggtgctcaaagtcttccgggaattgaagatccacgtgaacctgatcactccatacaagaacctcaaccttgcacgtgaatcggcgcgctcgctgttgatcgcagagcgtgaccaggacaagcatgagagtcggctctgtgaggtcacctgggaggaaattgacgagcagttggcgcgtcatgaacagcaggggctgcaaaaggcagccagttcactggggatcgaagtggagccagatctgtga

SEQ ID NO: 48241 - DNA, 1194 bp, Pseudomonas aeruginosa; identical to SEQ ID NO: 44178

SEQ ID NO: 48242 - DNA, 1353 bp, Pseudomonas aeruginosa; identical to SEQ ID NO: 43741

SEQ ID NO: 48243 - DNA, 663 bp, Pseudomonas aeruginosa; identical to SEQ ID NO: 45502

SEQ ID NO: 48244 - DNA, 2940 bp, Pseudomonas aeruginosa; identical to SEQ ID NO: 45503

SEQ ID NO: 48245 - DNA, 1182 bp, Pseudomonas aeruginosa; identical to SEQ ID NO: 44163

SEQ ID NO: 48246 - DNA, 1353 bp, Pseudomonas aeruginosa; identical to SEQ ID NO: 43741

SEQ ID NO: 48247 - DNA, 663 bp, Pseudomonas aeruginosa; identical to SEQ ID NO: 45502

SEQ ID NO: 48248 - DNA, 2940 bp, Pseudomonas aeruginosa; identical to SEQ ID NO: 45503

SEQ ID NO: 48249 - DNA, 1182 bp, Pseudomonas aeruginosa; identical to SEQ ID NO: 44163

SEQ ID NO: 48250 - DNA, 1353 bp, Pseudomonas aeruginosa; identical to SEQ ID NO: 43741

SEQ ID NO: 48251 - DNA, 663 bp, Pseudomonas aeruginosa; identical to SEQ ID NO: 45502

SEQ ID NO: 48252 - DNA, 2940 bp, Pseudomonas aeruginosa; identical to SEQ ID NO: 45503

SEQ ID NO: 48253 - DNA, 1182 bp, Pseudomonas aeruginosa; identical to SEQ ID NO: 44163

SEQ ID NO: 48254 - DNA, 1353 bp, Pseudomonas aeruginosa; identical to SEQ ID NO: 43741

SEQ ID NO: 48255 - DNA, 663 bp, Pseudomonas aeruginosa; identical to SEQ ID NO: 45502

SEQ ID NO: 48256 - DNA, 2940 bp, Pseudomonas aeruginosa; identical to SEQ ID NO: 45503

SEQ ID NO: 48257 - DNA, 1182 bp, Pseudomonas aeruginosa; identical to SEQ ID NO: 44163

SEQ ID NO: 48258 - DNA, 1353 bp, Pseudomonas aeruginosa; identical to SEQ ID NO: 44179

SEQ ID NO: 48259 - DNA, 663 bp, Pseudomonas aeruginosa
atggatgatgaacagcctcttatgagcgccgctgttcaggtcgatgagcgccggacgccgcaacgggtacgtgaggccgtacaggaaatgctcaagtacgggctgctggaagaaagtcacaagcccaatctgtatcgctcggcgcttgccaatatcgaggcggtcgacacaatcctggaacccctcgacctggccatgggggtcgacgaggttcgcgggctggtgttcgtcaccgttcgtcagggcgaggtggccgagcaggatgactggtcgcacccccttgtgcgcaggcaaaggctgaacctggagcagtccctgctgatcgccattctgcgccagcatttcatcgcctacgaacaggaaagcggtacgggcgccactcaggcactggtagctgttgatgagctgattccgcaattgcaggtttacctgggcgagctgggcagtgaggcgaaggagcgcaatcgcgtcatcacgctgctggatcagctcaaggggcatggtttggtgtcggctctggacgcccatgaccgcgtcatcatccgccccatcattacccacttggccaacccggagaacctgcaggcactggtggtttggctgcgcgagcaggtggagggcgcgactaccccggctgccgctgctgaggaggacgaggcgtga

SEQ ID NO: 48260 - DNA, 2940 bp, Pseudomonas aeruginosa
ctgggcgctgtactctggttcgagggcaccagctcctcggcgtccgatctgaaaaaactgtggctgttaagcgagtcccccgagcagacgctggagcattggctcagccaacatcacgcaggcggcatgcgggcgttgcgtcagatggagaaggatgggacgggtatctggccgtatcccagcaaaaaagccttcctggccaggctcagggattacttcgaagtcggtgaaaacgccttcaccttgctcaaccgcgctgccggcctgaagcagctcaatagcattgatgagatctttcgcgagttggtgctcgatgaccgctccgctttcgggcgggctgccgaggtcgctactagtttcgatgatctaacggacattcaccgggaactggaaaccgctagaaagcagcagcgctcattacaaccggttgccgatggctgggagcgttacaaggccttacaagaacagctgcaggataaacaggtgctcgaaggcattcttccggtctggtttgccgagcaggggtatcgcctatggttggctgaaaccaataggctagagaaggagcacaagcaggctgagctggatcgagaacactgcgagcgtcgacttgatgcccagaagggcgtggtcgatcaacatcgtcagcgctacctgcgcgtaggtggcgcagggctggatcaattacgcgggcgcatcgcggattggctcagggagtgcgataagcggcgcctgaaggccgagcagtaccaacgcctggccaaggggcttggactggcggaggcattatcggccgcagccctcgaggagaatcagcagcagatcgcggcgcgcctggaaatactgacccagcagattactgacgcgcggcaaacggcgttcgatgcgggtctcgtccagcaggagctcaatggccgcctgcaggccttacagcaggagcgtgccgaggtggagagacggccaggctcgaacctgcccgggcatttccatgcttttcgaggagatctggcgcaggcgcttggcgtcgatgaatcggccctgcctttcgtcgccgagctggtgcaggtcaagcccgaggaactggcctggcggggtgccatcgagcgggcaatcggcagccaccgcctgcgtatcctggtgccgcatggcgcgtccgaggctgcactgcgttgggtgaaccaacggcataaccgcctgcatgtgcgcttgctggaggtcaaggagccgtcgtcgcgccccgtgttcttcgacgatggctttacccgcaagctgaccttcaaggagcatccgtaccgagaagccgtgaaggcactgctggcggacaacgaccgacattgtgtggaaagcccggagcaattgcgtcataccccgcatgccatgacggcccaggggctgatgtcgggtaaggaacgcttcttcgacaagcaggaccagaagcgcctggatgaaggctggctgaccggcttcgacaaccgcgaccgtctggccttcctgactgaacaaattcgcgaggtcaatgaacagctcgcgcctgccaagctggccttggatgccgcccagggcgatgtccgcaagttggaggatcaagcttcgctgctgcagcgcgtcgaagaactgcagttcgaggagattgatctgccgggcgccgagcgtcagctggagtcgctgcgtgctcagctggacaccctgacacgccccgactctgacctcgcccttatcaaggctgagctggatgaagctgaggcattgctggactctctggatcgacagaggcaacaacttatcgagcagtgcggtcagttgaaaattcagttcgagcaggccgcatccgctacccgtaaggcttatcgcggcgccgaaaaggggctgagcgatacgcaacgtgagttggcgctagcgcacttcccgacgctgagcgctgctgacctcggcgatattgtcgagctggagcgcaagcatacgcatgagcttcaagggcagctcaaagcgctgggtgagaaactgggcgatcagaaatccgagcttgccaaacgtatgtccgacgccctgaaggttgacaccggtgcgctgtcagaggtcgggcgggagctggtggacgtaccaaagtatctggagcgtctacgtgtgctgaccgaggaagccctgcccgagaaactcaagcgcttcctggaatacctcaatcgttcctcggatgacggcgtcacccagctacttagctatatcgaccatgaagtctcggtgattgaggagcgtctggatgacctgaacagtacgatgcagcgtgttgactttcagcccgggcgctatctgcgcttggttgcgacaaaggtcatccatgcaagcctgcgcaccttgcaacaggctcagcgccaactgaactcggcgcgtttcatcgatgatgaaggcgagagccattacaaggcattacaggagctcgttggactgctcaaagatgcctgcgagcacagcaggaatcagggcgccaaagcgcttctggatccgcgcttccgcctggagttcgcggtctcagtgattgatcgagaaagcaagagtgtcatcgaaacccgaacaggttctcaggggggtagtggtggcgagaaagagatcatcgcctcctatgtgctgaccgcttccctcagctatgcgctctgtcccgacggcagcagccggccgttgttcggcaccatcgtgctcgacgaggcgttctcgcgcagctcccatgcggttgccggtcggatcatcgcagcgctgagggaattcggcctgcatgctgtcttcatcacgcccaacaaggaaatgcgcctgttgcgccaccatacgcgttcggccgtcgtcgttcatcggcgcggcgtggaatccagtctggtttccctgagctgggaagctttggatgagcatcatcaacagcgtagcaaggccatgcatgaagtcgcccactga

SEQ ID NO: 48261 - DNA, 1158 bp, Pseudomonas aeruginosa; identical to SEQ ID NO: 44182

SEQ ID NO: 48262 - DNA, 1353 bp, Pseudomonas aeruginosa
atggaggatgcgctgcaagcgctgtccgaaatgctggctgcttatgccagccaggatctttacgagatcgacccggatgcaacgcacatccaggcaggtcgtgaactccgtgaatggatcaagcggcgccttgttgtagagcgagagggccgcatctatgcaaccgacgcgctggagtccgccatacagttcgtcgactcgttggatagtcgtatcatgacctccacggcctctcgcctttcggtggtccagcgcgagattgaaaacctggaaacgggtctgaaccccagcccaagtggccgtattgccagcctgcgccgccgaatccaggacttggagcacgagctagcgcaggtagaagctggccacgtcgtcgtgctggacgaagctcaggcgatagagggtatacgcgaggtatataacctggccaccagcctgcgcgtagactttcgacgagttgaagactcttggcgcgaagctgatcgcgccttgcggcaatccatcatcagcgagcagtctcaccgtggagaaatcgtcgatcggttgctggacggtcaagatgcgttactcaacacaccggaaggacgtgtcttcgaaagtttccagcagcaactgaggcagtccgccgagctggaagtcatgcgtgagcgcttgcgtaccatccttcgtcatccagcggttccgaaggcactgaatcgtccccagcaacgtgagctgcgttggctggcgttacgcttggttcgggagtcgcaggctgtgcttcaggcgcgtgcccgaagcgagcgcgatgtacgtggcttcatgaagacgggcctggccgccgagcatcatcgcgtcggacagttactcaacgatttcttcaatctagcgctcagcgtcgactggcaacgccaggccgtgcgtcgtagcactgtccgtttgccgccggttggcgtagccattaccggagtcccagcgattgagcgtctacgtttcaagaccctggatgacgatgacacgggcgagctggatctgagtctgaagccagcggggctggaacagattgacgatgacttctgggatgctttcgacgggttggatcgcgaagcgctgattcatgacaccctggcggtgctggtggagcaggggcgacctgtgagtctcggggagcttgcgtctttgcttccacctgctcacgacctggaaacctttgcgctctggttggctatggcgcgcgaggcaggtactgaggtgctgacagaggagcgtcagctcgtggagctagttgacgaggatgagcaacgctggcgcttcaatctgccttatgtcggactcgaccacgaggcactcaaggacatcgattgggagttgtga

SEQ ID NO: 48263 - DNA, 663 bp, Pseudomonas aeruginosa
atggatgatgaacagcctctcatgagcgccgctgtacaggtcgatgagcgccggacgccgcaacgggtacgggaggccgtacaggaaatgctcaagtacggtctgctggaagagagtcacaagcccaacctgtatcgctcagctctttccaatatcgaggcggtcgacagaatcctggagccgctcgaccttgccatgggggtcgacgaggttcgggggctggtgttcgttatcgttcgccagggcgaggtggccgagcaggatgactggtcgcaccccctagtgcgtcggcaaaggctgaatctggagcagtctctgctgatagccatcctgcgccagcagttcatcgcctacgaacaggaaagcggtacgggcgccagtcaggcatcggtagtggtcgatgagctgattccccaattgcaggtttacctgggcgagctgggcagtgaggcaaaggagcgcaatcgcatcatcacgctgctggatcagctcaaggggcatggcctggtgtcggctttggacgcccatgatcgcgtcatcatccgtcccatcattacccacttggctaacccggagaacctgcaggcactcgtggcatggctgcgagagcaggtggagggcgcggcgacgccggctgccgatggcgaggaggatatggcatga

SEQ ID NO: 48264 - DNA, 2940 bp, Pseudomonas aeruginosa
ctgggggccgtgctctggttcgaaggcacaagctcctcggcatcggatctgaaaaaactgtggctgttaagcgagtcccccgagcagactctggagcattggctcagccagcatcacgcaggcggtatgcgggctttgcgtcagatggagaaggatgggacgggtatctggccttatcccagcaagaaagctttcttggccaggctgagggattacttcgaggtcggtgaaaacgcattcaccttgctcaaccgcgctgccggcctgaagcagctcaatagcattgacgagatctttcgcgagttggtgctggatgaccgttccgccttcgagcgggccgccgaggtcgccggcagcttcgatgatctaaccgacattcaccgagaactggaaacggctagaaagcagcagcgctcattgcaaccggtcgccgatggctgggagcgttaccaggtcttgcaagaacagctgcacgataagcaggctctcgaaggtatcctcccggtttggttcgccgagcaggggtatcgactgtggttggctgaaaccaacaggctcgagaaggagtacaaaaaggccgaactggatcaggagcaatgcaaaagtcagcttgaggcccagaaaggtgtggtcgatcaacatcgccagcgctacctgcgagtagggggcgcagggatagatcaattgcgcgagcgcatcgctgattgggtgagggagtgcgataagcgcagcctgaaagccgagcaataccaactcttggccaaaggccttggactagcggatgagttatcggccgctgctctcaaggagaatcagcagcatatcgcggcacgcctggaaatactggaccaacaaattactgacgcgcgccaaaaggcgttcgacgcaggcctcgtccagcaggaactcaatggtcgcctacagaccttacagcaggagggtgctgaggttgagaaacggccaggctcgaacctgcccgggcaatttcatgctttccgaagcgatctggcgcaggcgcttggtgtcaatgagtcggccctgcctttcgttgccgagctggtgcaggtcaagcccgaggagctggactggcgtggcgccatcgagcgggcaatcggtagccaccggctacgcatcctggtgccgcaggactcatcccaggccgcactgcgttgggtgaatcaacggcacaaccgcttgcatgtgcgcttgttggaggtacaggagccgacgtcgcgccccgtgttcttcgacgatggttttacccgcaagctgaccttcaaggagcatccgtaccgagaagccataaaggcactgctggcggacaatgaccgccactgcgtcgaaagcccggagcaattacgtcatacccctcatgccatgacggcccaggggctgatgtcgggcaaagaacgcttcttcgacaagcaggaccagaagcgtctggacgaagactggctgaccggcttcgataaccgtgaccgtctggccttcctggctgagcagattcgcgaggtcaatgagcagctcgagccagccaagctcgccttggatgctgcccagggcgacgttcgtcagttggagactcaagcttcgctgctgaatcgtgtcaaagaactgcagttcgaggatattgatctgccgggtgcccagagtcagctcgagtcgctgcgtacgcaactggccaccctgacgcgccccgattctgaccttgccatgatcaaggtcgagctggatgcggccgaggccctgcaggagtctctggatcaacagctccgccaactgatcgaacagtacgttcagttaaaaactcagtttgaccaggccgcatccgctacccgtaaggcctataacagcgcggagaaagggctgaacgatacgcagcgtgaactggcgcaagcgcatttcccgactctgaccgcggatgacctcggcgatattgtcgagctggagcgcaagcatacgcgtgagcttcaagggcagctcaaagcgcttggcgagaaactgggcgatcagaaatcagagcttgccaaacgtatgtctgatgccctcaaggtagacaccggggcgcttgcagaggtcgggcgagagctggtggatgtacccaggtatctggagcgtctgcgtgtgctgaccgaggaagccttgccagagaaactcaagcgcttcctggaatacctcaatcgctcctcggatgacggcgtcacccagctgctcagctatatcgaccatgaagtctcgatgatcgaggaacgcctggatgacctgaatagtacgatgcagcgtgtcgactttcagcccggacgctatctgcgcctggttgcaggcaaggtcatccatgaaagcctgcgcaccctgcagcgcgcccagcgccaactgaactcggcgcgtttcatcgatgatgaaggcgagagccattacaaggcattgcaggatctcgtggggttgctcaagaacgcctgcgaacacagcaggaatcagggagccaaggcgcttctggatccgcgcttccgcctggagttcgcagtatcggtgatcgatcgagaaagcaggaatgtcatcgagacccgaacaggttctcagggcggtagcggtggcgagaaggagatcatcgcctcctacgtgctgaccgcttccctgagctatgcgctctgtcccgacggcagcagccggccattgttcggcaccatcgttctcgacgaggcgttctcgcgcagctcccatgcggttgcaggtcggatcatcgcggcgttgagggaattcggcctgcacgctgtcttcatcacgcccaacaaggaaatgcgcctgttacgccaccacacgcgttcggcagtcgtcgttcatcggcgcggtctggagtccagtctggtttctctgagctgggaagctttggatgagcatcatcaacagcgcatcaaggccatgcatgaagtcacccactga

SEQ ID NO: 48265 - DNA, 1182 bp, Pseudomonas aeruginosa
atgaagtcacccactgacatcggtcgcagcttggccaggcaatggcagcgttctagtgttcggttggaccgcttactcaattccgctagctggccgcaaagcctcaatattggtaagccttcggcacgactattctctgacaacatccggacggtgcttcggcatgtggaaaattggcggagcgtgaaagtgggtaaggtcgactgggaacccgtcagctaccgagcagggttggctccaatttccttgccaatgcgctggcacttgcgcagtccctccgaatggattgccgcaaccgacgatccttcggtcagccaggaatacgctcaactcgagtatctggtcgagcaggtagatagttcctttcatgctctgctggtggcgcaacggagcctgtggttgacgaagccctctgaagaagtcatcgctacagcgcagctcgccactcaactatctccgggctgcgctcaaggccgcccattgcgcctgcttgcagagcacggagtggacaccaagtttttcgagcgaaacgctatcttgctgacgaaactcctcgatgagcgcttcgaaggcgcggcgtccgagcaaggtctgacgacttttctggatgcctttgaagaaaccagtcattgggttctagtcgttcctcttcagcctgagctgctgcccttcaagcggatcaggctcacgacttcggaactggccgaaacctcacttcccggttcgcgattgctcgtggtggaaaatgagcaatgtgttcacttgctacccgaaacgctgccggacaccctcgctgttctgggcgcagggctcgatttgcagtggttggcgtctgcgcatctggccgggaaacagatcgcttactggggcgacatggatacctggggcttactgatgctggcgcgagcgagacaccatcaacctgcagtcgaagcactgctaatggaccgggagctgtttgaccagcactccttgggaagcgcggtcgtcgagccagctaaagctcaggaattggctcccgaaggattgatgaccgacgaagctgatttctatcggtatctccttgcacaggagcgggggcgccttgagcaggagtatctgccacgcaggcaagtcgaacaggctattagtaaatggtttggagagtcggtagcgccggctcatcctgagcgaacggcttga

SEQ ID NO: 48266 - DNA, 1455 bp, Pseudomonas aeruginosa; identical to SEQ ID NO: 44175

SEQ ID NO: 48267 - DNA, 756 bp, Pseudomonas aeruginosa; identical to SEQ ID NO: 44216

SEQ ID NO: 48268 - DNA, 3387 bp, Pseudomonas aeruginosa; identical to SEQ ID NO: 44584

SEQ ID NO: 48269 - DNA, 1194 bp, Pseudomonas aeruginosa; identical to SEQ ID NO: 44178

SEQ ID NO: 48270 - DNA, 1353 bp, Pseudomonas aeruginosa; identical to SEQ ID NO: 44160

SEQ ID NO: 48271 - DNA, 663 bp, Pseudomonas aeruginosa; identical to SEQ ID NO: 45023

SEQ ID NO: 48272 - DNA, 2940 bp, Pseudomonas aeruginosa; identical to SEQ ID NO: 48151

SEQ ID NO: 48273 - DNA, 1182 bp, Pseudomonas aeruginosa; identical to SEQ ID NO: 44163

SEQ ID NO: 48274 - DNA, 1353 bp, Pseudomonas aeruginosa; identical to SEQ ID NO: 44160

SEQ ID NO: 48275 - DNA, 663 bp, Pseudomonas aeruginosa; identical to SEQ ID NO: 45023

SEQ ID NO: 48276 - DNA, 2940 bp, Pseudomonas aeruginosa; identical to SEQ ID NO: 48151

SEQ ID NO: 48277 - DNA, 1182 bp, Pseudomonas aeruginosa; identical to SEQ ID NO: 44163

SEQ ID NO: 48278 - DNA, 1353 bp, Pseudomonas aeruginosa; identical to SEQ ID NO: 42083

SEQ ID NO: 48279 - DNA, 663 bp, Pseudomonas aeruginosa
atggatgatgaacagcctgtcatgagcgccgctgtacaggtcgatgaacgccggacgccgcaacgggtacgtgaggccgtacaggaaatgctcaagtacgggctgctggaagaaagccacaagcccaacctgtatcgctcagcactttccaatatcgaggcggtcgacagaatcctggagccgctcgacctggccatgggagtcgacgaggttcgggggctggtgtttgttatcgttcgccagggcgaggtggccgaggaggatgactggtcgcaccccctcgtgcgtcggcaaaggctgaatctggagcagtctctgctgatagccattctgcggcagcatttcatcgcatacgaacaggaaagcggtacgggcgccagtcaggcactggtagcggttgatgagctgattccccaactgcaggtttacctgggcgaactgggcagtgaggcgaaggagcgcaatcgtattatcacgctgctggatcagctcaagggtcatggtttggtgtcggctctggacgcccatgatcgcgtcatcatccgccccatcattacccacttggccaacccggagaacctgcaggctctggtggcatggctgcgcgagcaggtggagggcgcggctactccggttgctggtgctgaggaggatgaggcgtga

SEQ ID NO: 48280 - DNA, 2940 bp, Pseudomonas aeruginosa
ctgggtgctgtgctctggttcgagggcacaagctcctcggcgtccgatctgaaaaaactttggcttttaagcgagtcccccgagcagacgctggagcattggctgagccagcatcacgcaggtggcatgcgggcgctgcgtcagatggagaaggatgggacgggtatctggccttatcccagcaagaaagctttcttagctaggctaagggattacttcgaagtgggtgaaaacgccttcaccttgctcaaccgcgctgccggcctgaagcagctcaacagtattgatgagatctttcgagagttggtgctggatgatcgctctgccttcgagcgggctgccgaggtcgcaagcagcttcgatgatctaacggacattcaccgagagctggaaaccgctagaaagcagcagcgctcattgcaaccggtcgccgatggctgggagcgttacaaggccttgcagcaacagttacacgataaacagacgctcgaaggcattcttccggtctggttcgccgaacaggggtatcgcctgtggttggctgaaaccaacaggcttgagaaggcgcaaaaacaggccgaactgaatcaggagcaatgcaggggacagtttgatatccagaagggcgtggtcgatcagcatcgtcagcgctacctgcgagtaggcggtgcagagatagatctattgcgcgcgcgcatcgcggattgggttcgggagtttgataaacggcgcctgaaagccgagcagtaccagcgtttggccaaagggctaggactcgtggtggagttatcagccgctgcgctcgaggaaaatcagcagcagatcacggcacgcctggaagtactggccgagcaaattactgaggcacggcaaaaggcgttcgatgcaggcatcgtccagaaagaactcgatggccgcctgcagagcttgcagcatgagcgtgccgaggttgagcgacggcccggctcgaacctgcctgggcattttcatgcttttcgaggtgatctggcgcaggcgctttgcgtcgatgaatcggcccttcctttcgtcgccgaactggtgcaggtcaagcccgaggagctggcttggcggggggccatcgagcgggcaatcggtagccaccggctgcgtatcctggtgccgcagggctcgtccgaggctgcattgcgctgggtgaaccaacgacacaaccgcttgcatgtgcgcttgttggaggtcaaggagccgtcatcgcggccagtgttctttgacgatggttatacccgcaagctgactttcaaggagcatccgtaccgagaagctgtaaaggttctactggcggacaacgaccgacattgcgtggaaagcacagagcaattgcgtcataccccttacgccatgacggcccaggggctgatgtcgggcaaagagcgcttcttcgacaagcaggaccagaagcgcctcgatgaagactggctgaccggcttcgataaccgcgaccgtctggccttcctgactgaacaaattcgcgaggtcaatgaacagctcgcgcctgccaagctggccttggatgctgcccagggcgatgtccgcaagttggaggatcaagcttcgctgctgcagcgcgtcgaagaactgcagttcgaggagattgatctgccgggcgccgagcgtcagctggagtcgctgcgtgctcagctggacaccctgacacgccccgactctgacctcgcccttatcaagtctgagctggatgaagctgaggcattgctggactctctggatcgacagaggcaacaacttatcgagcagtgcggtcagttgaaaattcagttcgagcaggccgcatccgctacccgtaaggcttatcgcggcgccgaaaaggggctgagcgatacgcaacgtgagttggcgctagcgcacttcccgacgctgagcgctgctgacctcggcgatattgtcgagctggagcgcaagcatacgcatgagcttcaagggcagctcaaagcgctgggtgagaaactgggcgatcagaaatccgagcttgccaaacgtatgtccgacgccctgaaggttgacactggtgcgctgtcagaggtcgggcgagagctggtggacgtaccaaagtatctggagcgtctacgtgtgctgaccgaggaagccctgcccgagaaactcaagcgcttcctggaatacctcaatcgttcctcggatgacggcgtcacccagctacttagctatatcgaccatgaagtctcggtgatcgaggagcgtctggatgacctgaacagtacgatgcagcgtgttgactttcagcccgggcgctatctgcgcttggttgcgacaaaggtcatccatgcaagcctgcgcaccttgcaacaggctcagcgccaactgaactcggcgcgtttcatcgatgatgaaggcgagagccattacaaggcattacaggagctcgttggactgctcaaagatgcctgcgagcacaacaggaatcagggcgccaaagcgcttctggatccgcgcttccgcctggagttcgcggtctcagtgattgatcgagaaagcaagagtgtcatcgaaacccgaacaggttctcaggggggtagtggtggcgagaaagagatcatcgcctcctatgtgctgaccgcttccctcagctatgcgctctgtcccgacggcagcagccggccgttgttcggcaccatcgtgctcgacgaggcgttctcgcgcagctcccatgcggttgccggtcggatcatcgcagcgctgagggaattcggcctgcatgctgtcttcatcacgcccaacaaggaaatgcgcctgttgcgccaccatacgcgttcggccgtcgtcgttcatcggcgcggcgtggaatccagtctggtttccctgagctgggaagctttggatgagcatcatcaacagcgcatcaaggccatgcatgaagtcgcccactga

SEQ ID NO: 48281 - DNA, 1158 bp, Pseudomonas aeruginosa; identical to SEQ ID NO: 44210

SEQ ID NO: 48282 - DNA, 1353 bp, Pseudomonas aeruginosa
atggaggatgcgctgcaagcgctgtccgaaatgctggctgcttatgccagccaggatctttacgagatcgacccggatgcaacgcacatccaggcaggtcgtgaactccgtgaatggatcaagcggcgccttgttgtagagcgagagggccgcatctatgcaaccgacgcgctggagtccgccatacagttcgtcgactcgttggatagtcgtatcatgacctccacggcctctcgcctttcggtggtccagcgcgagattgaaaacctggaaacgggtctgaaccccagcccaagtggccgtattgccagcctgcgccgccgaatccaggacttggagcacgagctagcgcaggtagaagctggccacgtcgtcgtgctggacgaagctcaggcgatagagggtatacgcgaggtatataacctggccaccagcctgcgagcagactttcgacgagttgaagactcttggcgcgaagctgatcgcgccttgcggcaatccatcatcagcgagcagtctcaccgtggagaaatcgtcgatcggttgctggacggtcaagatgcgttactcaacacaccggaaggacgtgtcttcgaaagtttccagcagcaactgaggcagtccgccgagctggaagtcatgcgtgagcgcttgcgtaccatccttcgtcatccagcggttccgaaggcactgaatcgtccccagcaacgtgagctgcgttggctggcgttacgcttggttcgggagtcgcaggctgtgcttcaggcgcgtgcccgaagcgagcgcgatgtacgtggcttcatgaagacgggcctggccgccgagcatcatcgcgtcggacagttactcaacgatttcttcaatctagcgctcagcgtcgactggcaacgccaggccgtgcgtcgtagcactgtccgtttgccgccggttggcgtagccattaccggagtcccagcgattgagcgtctacgtttcaagaccctggatgacgatgacacgggcgagctggatctgagtctgaagccagcggggctggaacagattgacgatgacttctgggatgctttcgacgggttggatcgcgaagcgctgattcatgacaccctggcggtgctggtggagcaggggcgacctgtgagtctcggggagcttgcgtctttgcttccacctgctcacgacctggaaacctttgcgctctggttggctatggcgcgcgaggcaggtattgaggtgctgacagaggagcgtcagctcgtggagctagttgacgaggatgagcaacgctggcgcttcaatctgccttatgtcggactcgaccacgaggcactcaaggacatcgattgggagttgtga

SEQ ID NO: 48283 - DNA, 663 bp, Pseudomonas aeruginosa; identical to SEQ ID NO: 45502

SEQ ID NO: 48284 - DNA, 2940 bp, Pseudomonas aeruginosa; identical to SEQ ID NO: 45503

SEQ ID NO: 48285 - DNA, 1182 bp, Pseudomonas aeruginosa; identical to SEQ ID NO: 44163

SEQ ID NO: 48286 - DNA, 1353 bp, Pseudomonas aeruginosa; identical to SEQ ID NO: 43230

SEQ ID NO: 48287 - DNA, 663 bp, Pseudomonas aeruginosa; identical to SEQ ID NO: 45023

SEQ ID NO: 48288 - DNA, 2940 bp, Pseudomonas aeruginosa; identical to SEQ ID NO: 45024

SEQ ID NO: 48289 - DNA, 1182 bp, Pseudomonas aeruginosa; identical to SEQ ID NO: 44163

SEQ ID NO: 48290 - DNA, 1455 bp, Pseudomonas aeruginosa; identical to SEQ ID NO: 44215

SEQ ID NO: 48291 - DNA, 756 bp, Pseudomonas aeruginosa; identical to SEQ ID NO: 44216

SEQ ID NO: 48292 - DNA, 3387 bp, Pseudomonas aeruginosa; identical to SEQ ID NO: 44217

SEQ ID NO: 48293 - DNA, 1194 bp, Pseudomonas aeruginosa; identical to SEQ ID NO: 44218

SEQ ID NO: 48294 - DNA, 1353 bp, Pseudomonas aeruginosa; identical to SEQ ID NO: 43741

SEQ ID NO: 48295 - DNA, 663 bp, Pseudomonas aeruginosa; identical to SEQ ID NO: 45502

SEQ ID NO: 48296 - DNA, 2940 bp, Pseudomonas aeruginosa; identical to SEQ ID NO: 45503

SEQ ID NO: 48297 - DNA, 1182 bp, Pseudomonas aeruginosa; identical to SEQ ID NO: 44163

SEQ ID NO: 48298 - DNA, 1353 bp, Pseudomonas aeruginosa; identical to SEQ ID NO: 44235

SEQ ID NO: 48299 - DNA, 663 bp, Pseudomonas aeruginosa; identical to SEQ ID NO: 44272

SEQ ID NO: 48300 - DNA, 2940 bp, Pseudomonas aeruginosa; identical to SEQ ID NO: 44273

SEQ ID NO: 48301 - DNA, 1182 bp, Pseudomonas aeruginosa; identical to SEQ ID NO: 44163

SEQ ID NO: 48302 - DNA, 1455 bp, Pseudomonas aeruginosa; identical to SEQ ID NO: 44215

SEQ ID NO: 48303 - DNA, 756 bp, Pseudomonas aeruginosa; identical to SEQ ID NO: 44216

SEQ ID NO: 48304 - DNA, 3387 bp, Pseudomonas aeruginosa; identical to SEQ ID NO: 44217

SEQ ID NO: 48305 - DNA, 1194 bp, Pseudomonas aeruginosa; identical to SEQ ID NO: 44218

SEQ ID NO: 48306 - DNA, 1455 bp, Pseudomonas aeruginosa; identical to SEQ ID NO: 44215

SEQ ID NO: 48307 - DNA, 756 bp, Pseudomonas aeruginosa; identical to SEQ ID NO: 44216

SEQ ID NO: 48308 - DNA, 3387 bp, Pseudomonas aeruginosa; identical to SEQ ID NO: 44217

SEQ ID NO: 48309 - DNA, 1194 bp, Pseudomonas aeruginosa; identical to SEQ ID NO: 44218

SEQ ID NO: 48310 - DNA, 1353 bp, Pseudomonas aeruginosa; identical to SEQ ID NO: 44160

SEQ ID NO: 48311 - DNA, 663 bp, Pseudomonas aeruginosa; identical to SEQ ID NO: 45023

SEQ ID NO: 48312 - DNA, 2940 bp, Pseudomonas aeruginosa; identical to SEQ ID NO: 48151

SEQ ID NO: 48313 - DNA, 1182 bp, Pseudomonas aeruginosa; identical to SEQ ID NO: 44163

SEQ ID NO: 48314 - DNA, 1353 bp, Pseudomonas aeruginosa; identical to SEQ ID NO: 42637

SEQ ID NO: 48315 - DNA, 663 bp, Pseudomonas aeruginosa; identical to SEQ ID NO: 48208

SEQ ID NO: 48316 - DNA, 2940 bp, Pseudomonas aeruginosa; identical to SEQ ID NO: 48209

SEQ ID NO: 48317 - DNA, 1158 bp, Pseudomonas aeruginosa; identical to SEQ ID NO: 48210

SEQ ID NO: 48318 - DNA, 1461 bp, Pseudomonas aeruginosa; identical to SEQ ID NO: 44187

SEQ ID NO: 48319 - DNA, 708 bp, Pseudomonas aeruginosa; identical to SEQ ID NO: 44188

SEQ ID NO: 48320 - DNA, 3375 bp, Pseudomonas aeruginosa; identical to SEQ ID NO: 48147

SEQ ID NO: 48321 - DNA, 1164 bp, Pseudomonas aeruginosa; identical to SEQ ID NO: 45480

SEQ ID NO: 48322 - DNA, 1353 bp, Pseudomonas aeruginosa; identical to SEQ ID NO: 44160

SEQ ID NO: 48323 - DNA, 663 bp, Pseudomonas aeruginosa; identical to SEQ ID NO: 45023

SEQ ID NO: 48324 - DNA, 2940 bp, Pseudomonas aeruginosa; identical to SEQ ID NO: 48151

SEQ ID NO: 48325 - DNA, 1182 bp, Pseudomonas aeruginosa; identical to SEQ ID NO: 44163

SEQ ID NO: 48326 - DNA, 1353 bp, Pseudomonas aeruginosa; identical to SEQ ID NO: 44160

SEQ ID NO: 48327 - DNA, 663 bp, Pseudomonas aeruginosa; identical to SEQ ID NO: 45023

SEQ ID NO: 48328 - DNA, 2940 bp, Pseudomonas aeruginosa; identical to SEQ ID NO: 48151

SEQ ID NO: 48329 - DNA, 1182 bp, Pseudomonas aeruginosa; identical to SEQ ID NO: 44163

SEQ ID NO: 48330 - DNA, 1461 bp, Pseudomonas aeruginosa
gtgaaagcagacaaagccatcgcgacctaccggcgcatgcgggcgcagccgctgtggcgtctgcttgcctcgactaccgggcccaccgtcattggcctgctccaatctcatctatatgagagcgagcgaagcctccctgcctccatttttcacgaacgcatcgcaagggatctggaagagctgcgcgcccaaggcgaagactttccccaaacggcacaggcgtatgtcgccagctggctcgccgatgggttcctcgagcgacgcttcccggctggggcttcagaagaggaatatgaactctccacggcggccgtcgaagccattcggtttgtatctggactggcgcagccgcactccgccgcgaccgaaagtcgcctgacgctcgtcatcgaggccttggcccgacttgccgaggacaccgacaccgacaagttccgccgcatcgaccggctcatggccgagcaagcccgcatcgacaaggagattgacgccatccagaaggggcagatgcgcgtgctgccccatacaacggcgctcgagcgcacgcgggagatcatcacgctggccgacgatctggccggtgatttccgccgtgtccgcgatcagttcgaccagctcaatcgcgatctccgtgaacgcatcatggacaacgatggcaatcgaggggatgtgctggattcgctgttcgccggaatcgatttgatttcagagagcgacgccggaaggactttctctgctttctggcgcttgcttaccgacccagaacaggcggccacgcttgatcaggcacttgatagcgttatgtcgcgggagttcgtggggcagctcgaggccaaggagcgacgattccttctgcggctaacgcgcacccttcttgagcagggcggcatggttcacgaggtgctccagaccttcgcgcgcagcctgaagcacttcgtccagagtcgtgaatacctcgaacaacgtcgactcaatcacctgctgaaagacgctcagcgcgcagcactgagcctgaaggatgaagtcagggccacagaaaccctccagtacacgctggaactcacgagcagtcggttgcgctccttgtctcaatgggttctgcacgacccatccctgcaagcattgcctgggcagatggcagaaggagacgcgccgcctatcgatctagagtctgtgagcgaactggtcgcacagtccgagatcgacttccgaacactgaaggccaacgtcctggcagtcctggagcaacggtcccaggcatcaattgccgacgtgctggaacagttccccgctgcacaggggctgggcagcgtcgtcgggttacttgcgttgggtagtcggcatgggttcaaggccgaccacactgaaaccgtaggctgggttggaggcgacgataagcgtcgtagcgcccgaattccaaagatcttctttttgagggagcgggccaatgaactggtctga

SEQ ID NO: 48331 - DNA, 708 bp, Pseudomonas aeruginosa
atgaactggtctgagaacgacgaatcggcaatgccagtcgaagcacaagcacccgatgatgctcaggcacctgccaacaccctgttcctgggcgacagcggcgagttggcactggatacccggcgcgccctggtgcagctgctggcagggccatcgctcgacggacgtcggcatccaaaactctggccgatcttggtaagagacgaagcggtgatccgtcggcgtcttgccgagctgtttctcgaactggttatcgaccgagacgtacaagtggcgttcacgcgccaggcagacaccggcgaacttgaggtgcctctcctgttgcgtcgtgcccagctgacgttcattgactccattctgctgctccaccttcgccagcgattgacccaggcggactcgcagggcgaccgtgccgtggtgtcgacatacgagatcacggagtttctctccctctatgagcgcgccgccaacaccgaccgtgcagggttcgtgaaacgggttcatgcctccatcgagaagatcaagaagcacagcattcttcagaaaattcgctcgagtgaggatcgcttcgagatttcgccgacgctgaagctcctcttctcggcagaggaaatacaagcgctgacgcacctgtatcagcgaatggctgccggagaagcgccagcgcagctggttcagactgaagctgatgaggaggctgaccaatga

SEQ ID NO: 48332 - DNA, 3375 bp, Pseudomonas aeruginosa
atgatctcggaaccccaaaccgcctccttgtttgcccgcgagcagttccggatgacccgcctgcaggtttacaactggggtactttctccggcctgcacgacgtgccgatcagcgagcgaggctttctgtttgtgggtcgatccggcgctggaaagtcgacactgctcgatgcattttcggcgttgctgacaccacctcgctggatcgatttcaacgctgctgcacgcgaggcggaccgcagcggtcgtgaccgaaacctcgtcacctacatacgtggtgcgtgggctgaacagaaggatggggagtcgggagagatcgcgacccgctacctgcgcgcagggacgacctggtcatccttggcactgacctaccagaatgccttgggtcagtctgtggtgctggttcaggtgttctggttgcggggcaatgcaaacggcagtaccgacgtcaaacgccactaccttgtcatggaacgggcctttgacctacgcgagctggaggactttggccaatccaacttcgacatccggaagctcaagcagtctttccctgaggcattcgcccgcgacgaatttcgcccctattgcgaacggttctgccgtctgctcggcatcgaaagcgaaatggcactgcgtttgctgcacaaaacccagtcggccaaaaacctcggcgatctcaataccttcctgcgcgacttcatgctcgacaagcccgaaaccttcgaggtggcggatcgcttggtcagcgagtttggagaactcaatgcggcccaccaggcggtcgtcacggctcgcgagcaggttcaaacgctcgcgccagcgcgggagcaatatcagcgcagggattcgttgatgctgcagcgcaatggcttggatgagcttcggcttggcgttgatggctatcgggaaacccgacgcattgagctcctcaaggagcacgtggcatccctagaggtgcaagccgacggctcagagggtgaagtggggcggcgtcaaagcaccctggataaccacgccgcaatcttgcgcgatctggagcgacagcaccgtgaggcaggcggtgatcagatcgagcaatgggaggccgagaaatcagggctggaaggccagcgcacagatcgtctgcgcaaacgcggtcaggccgaagaggcatgcaagaagctggagtggagtctcccggattcgcctcaagccttcgcggaactgttgggcaacgcgcgacaggaggtcgaaaactgggagcagcgcagcaacgatagccgcgccgagcagttccgcctggacagagaaaagaaggatgccgagactgcgttttcgcaagcactgaaagaggtgcaggcacttcagcgccagccatcgaacattccagccgacatgctggaaatgcgccgaaacattgccgctgccatcgggatctctgagtccgcgctgccattcgttggggaactcatcgaggtgaagcccgacgaggccgaatggcagggggccatagagcgcgtactgcacgggttcgcgctctcgctcctggtagacgaacgccagtattcggcattggccaatcacatcaataccacccacgttgggcagcgcttggtgtattaccggactggccgcccggagacgtggcaggccaagcctatcggggccaattcgctcgtcctcaagctgaacgtcaaggaagggacgtatgccgactggcttcaggccgaactacggcaacgcttcgattacgcgtgcgtcgactctattcagtccttcaggagcgcagatcgcgccatcacccgtgaaggccaggtcaagcacagcaaaacccggcatgagaaagacgaccgcagaaatgtcggcgaccggcgaaactgggtgctcgggttcgacaaccgcgagaagcttgcgctcttccaaacccaggcgcaggagctggctgacaccatatcgcgcctcggcggggagatcgacaagctttccgaccaggacaagaatcgtgcggcccgagcgatgcagtgccagactctggtgaatctccagtggcaggaaatagatgtgctcccattactggatcgcatctccaccattgaacggcagatccgcgaagcgcgggaatgcaatacagccctactgcaaatcagccaacggatcgacaagcaaaaggacctggttgagcaggctgacaaggatctccgcgaagccaaggtcgcgcatgactcagttctcaagcagatcaaagacagcacgcaaaaactcgaatccctccttcaagatgcttccagagtttcattgcccccccaccaaatcaaggggctcgacgaacgattcaccaagcagtcagacgtgatcaggctcgatagcctcgacaaggtaacaacagctgttgagagaggactcaacacagaaatcagtgagatcaaagatgaaatcgccgattgcgagaaggaaatagaagcacgctttgccgatttcaaacggcaatggccgatggacgcgggcgacatggacacgagccttgccagcgcgccagacttcttcgccaagctggttcggctggagacggatggtctgcccgcctatgagcagcggttctttgagttgctgcagaaccaaagtcaccagaacctggcggcgctttccacctacctgaacgatgcgcgtaaggcgatcctggaacggatggatctggtcaacgacagtcttggccaggtgcccttcaaccagagcaccaatcaacgcacctatctccacatcgacgccagtgaccggcagcttgtcgacgtcaaggagttcaagcaagagatccagcaggcgctgagccatgcatggacggaggatcgagagtttgccgaggcgcggttcctggccttgcgacgacttgttgatcgactcgccagtcaggaccccgagcaaaagcgctggcgcgagactgtgctcgatgttcgacagcacgttgagttcatcgggcgggagatagatgaaagtggtgtcgaggtcgagatctaccgcagcggagcaggtaagtctggtggccaacggcagaagctggccaccacgtgcttggccgcagccctgcgatatcaactgggtggtaacgaccacggcgtgccgatgtatgcccccgtcgtgctggatgaagccttcgacaaggcggataacgagttcaccgcgttggcgatgaacatctttaccaatttcggattccagatggtggtcgccacgccgctgaagtcggtcatgacccttgagccattcatcggtggcgcctgctttgtggatatcagcgatcggcgcgtctcaggcgtcctgctgatcgagtacgacggtgatcgtcagcggttgaagctgccagagcacgcacgagaggaggctagcgttgaagcttcctga

SEQ ID NO: 48333 - DNA, 1455 bp, Pseudomonas aeruginosa; identical to SEQ ID NO: 44590

SEQ ID NO: 48334 - DNA, 756 bp, Pseudomonas aeruginosa; identical to SEQ ID NO: 44216

SEQ ID NO: 48335 - DNA, 3387 bp, Pseudomonas aeruginosa; identical to SEQ ID NO: 44217

SEQ ID NO: 48336 - DNA, 1194 bp, Pseudomonas aeruginosa; identical to SEQ ID NO: 44218

SEQ ID NO: 48337 - DNA, 1455 bp, Pseudomonas aeruginosa; identical to SEQ ID NO: 44175

SEQ ID NO: 48338 - DNA, 756 bp, Pseudomonas aeruginosa; identical to SEQ ID NO: 44216

SEQ ID NO: 48339 - DNA, 3387 bp, Pseudomonas aeruginosa; identical to SEQ ID NO: 44584

SEQ ID NO: 48340 - DNA, 1194 bp, Pseudomonas aeruginosa; identical to SEQ ID NO: 44178

SEQ ID NO: 48341 - DNA, 1353 bp, Pseudomonas aeruginosa; identical to SEQ ID NO: 44160

SEQ ID NO: 48342 - DNA, 663 bp, Pseudomonas aeruginosa; identical to SEQ ID NO: 45023

SEQ ID NO: 48343 - DNA, 2940 bp, Pseudomonas aeruginosa; identical to SEQ ID NO: 48151

SEQ ID NO: 48344 - DNA, 1182 bp, Pseudomonas aeruginosa; identical to SEQ ID NO: 44163

SEQ ID NO: 48345 - DNA, 1353 bp, Pseudomonas aeruginosa; identical to SEQ ID NO: 44160

SEQ ID NO: 48346 - DNA, 663 bp, Pseudomonas aeruginosa; identical to SEQ ID NO: 45023

SEQ ID NO: 48347 - DNA, 2940 bp, Pseudomonas aeruginosa; identical to SEQ ID NO: 48151

SEQ ID NO: 48348 - DNA, 1182 bp, Pseudomonas aeruginosa; identical to SEQ ID NO: 44163

SEQ ID NO: 48349 - DNA, 1353 bp, Pseudomonas aeruginosa; identical to SEQ ID NO: 43741

SEQ ID NO: 48350 - DNA, 663 bp, Pseudomonas aeruginosa; identical to SEQ ID NO: 45502

SEQ ID NO: 48351 - DNA, 2940 bp, Pseudomonas aeruginosa; identical to SEQ ID NO: 45503

SEQ ID NO: 48352 - DNA, 1182 bp, Pseudomonas aeruginosa; identical to SEQ ID NO: 44163

SEQ ID NO: 48353 - DNA, 1353 bp, Pseudomonas aeruginosa; identical to SEQ ID NO: 43741

SEQ ID NO: 48354 - DNA, 663 bp, Pseudomonas aeruginosa; identical to SEQ ID NO: 45502

SEQ ID NO: 48355 - DNA, 2940 bp, Pseudomonas aeruginosa; identical to SEQ ID NO: 45503

SEQ ID NO: 48356 - DNA, 1182 bp, Pseudomonas aeruginosa; identical to SEQ ID NO: 44163

SEQ ID NO: 48357 - DNA, 1353 bp, Pseudomonas aeruginosa; identical to SEQ ID NO: 43763

SEQ ID NO: 48358 - DNA, 663 bp, Pseudomonas aeruginosa; identical to SEQ ID NO: 48143

SEQ ID NO: 48359 - DNA, 2940 bp, Pseudomonas aeruginosa; identical to SEQ ID NO: 48144

SEQ ID NO: 48360 - DNA, 1146 bp, Pseudomonas aeruginosa; identical to SEQ ID NO: 41754

SEQ ID NO: 48361 - DNA, 1353 bp, Pseudomonas aeruginosa; identical to SEQ ID NO: 44160

SEQ ID NO: 48362 - DNA, 663 bp, Pseudomonas aeruginosa; identical to SEQ ID NO: 45023

SEQ ID NO: 48363 - DNA, 2940 bp, Pseudomonas aeruginosa; identical to SEQ ID NO: 48151

SEQ ID NO: 48364 - DNA, 1182 bp, Pseudomonas aeruginosa; identical to SEQ ID NO: 44163

SEQ ID NO: 48365 - DNA, 1353 bp, Pseudomonas aeruginosa; identical to SEQ ID NO: 44160

SEQ ID NO: 48366 - DNA, 663 bp, Pseudomonas aeruginosa; identical to SEQ ID NO: 45023

SEQ ID NO: 48367 - DNA, 2940 bp, Pseudomonas aeruginosa; identical to SEQ ID NO: 48151

SEQ ID NO: 48368 - DNA, 1182 bp, Pseudomonas aeruginosa; identical to SEQ ID NO: 44163

SEQ ID NO: 48369 - DNA, 1353 bp, Pseudomonas aeruginosa; identical to SEQ ID NO: 43763

SEQ ID NO: 48370 - DNA, 663 bp, Pseudomonas aeruginosa; identical to SEQ ID NO: 48143

SEQ ID NO: 48371 - DNA, 2940 bp, Pseudomonas aeruginosa; identical to SEQ ID NO: 48144

SEQ ID NO: 48372 - DNA, 1146 bp, Pseudomonas aeruginosa; identical to SEQ ID NO: 41754

SEQ ID NO: 48373 - DNA, 1455 bp, Pseudomonas aeruginosa
atgagcctacatgagcagcaggcgcgtttcaggcgactgctcttcgaacatgcggcgtggcgtctgctacacgcagagaatgcgcccatcattcttgcctttatcaatgatctcttcgctcaagacagcgaagtgccattcgggaaagcacgtgtcgcgctagaggcggagcttccgatctggcaggaggtctatggcctgcacgacaacgcgggcacctatctgcgccaatggatccaggcgggctggttgcgcgagcttgatgacaagctcacccgaaccgatgccttcgagttggcactgcgctttgctcagagcttggatcagcgagacagtaataccacggcctcccatctgcgtattgtgcaagacaccgtacgagatttggctgtcgccctgagcccaaacccggaagagcgaatcactctgctgacggcccgccggcaggaactcgatctggagattgagcgcttgcagatgggcgaggtgccagagctgagcgcgccggagcagcgtgagcgcatccggggactgtatcagttgacgtcagtgctcacgggcgactttcgccggttggaggacgaaattcgccaactagatcagcgtatgcggatccgcatgatcgagtcggagtctgggcgcggtgaggtggtgaaggcgctgatagagcatgaaggtgaactgctccagaccgatgccggacaggccttcgacggcttctatcagttgctctgtgatcagaatcgaatcactgaattccgtgagcaaatccgctcgatcttggcacgtccggcatcccagtatctgaagtcagacgaattgcgttacctatcccatctggtccgcgagttgggcaaggaaagtgagcgggtattccaggtccgtcgccggaccgaggagagcctgcgggcttttgtggaaagcggcgttcagcaagagcgccgtgcagtcgagcgactgcttcgccaactggagcggctggcggtgaatttcaaagaccaggaggtgagcctgcgcgagccggtagttgtggacctccccacgggcagtctgcgcgtgcgttctccgtccagtattcacctacgattgcctgaagaacgcctggatacgcggcaggtggccgcaaataccaatagtcacgtcgccagtctcggcatgctggatcacctcaacacggtcaaggtgctggaagtggcccaggatgtgaagcagttgctcactgagcacggcccgatgacggtggcgagcatcgttagtcaccgccccatcaccggaggattggaagagctggtggcgcacgtgcggatcgccaaagcagtcagcgctgtggtgttggaacaccctgaaagtctggtggtagtggatcggaccggcaattggattcgggccaacattccttctttgctgatgtccgccgagcagtttccaacggatttggaggaactcgccttatga

SEQ ID NO: 48374 - DNA, 756 bp, Pseudomonas aeruginosa
atgaacgaggaagagcagcattcccaacaggcccctgccctgttcgaccagtatcgagcgaatcggcctgacacgccgtcagtcagcggtgaggtggagacgtttggggatgctcccgttgagccgcccgtcgttggggactctggggtcggcatgccactggaagctaggcgcgccctggtgctgttactccgccaaggggtggtgatggccgatagcaaacgcctggcgttcgaagcgctgtgccggcacgagggcctgatcgcagagcacttgggcaacatgttcatgcgcatgttgttggacatgaaggccggtatcgccatcctgctccagcaggaggtgacagagcagggcgaggaggccgacgaagcgtcacgcctgatcaacaagcgcacgctcagcctctatgacacgctgctgttgctggtgctgcgcaagtactaccaggagcgagaaacagcgggcgaacagaagatcatcattgatatcgagcggatcgaggcattgatgacaccctttttgccgctgacctacagctcccgctccgagcggaggacgctcaacggatcgcttgccttgttgaaagataagcgtctcatcagtgcggtccgtggggatgacgagcggtttgagatcacctcggtgatccgctatgtcgtcaatgccgattttcttgaacgtctgttgaaagagtacgaacgcctagccggtgatgcggacgtcaaaacgcgcgaagaggtgcaggatgcttga

SEQ ID NO: 48375 - DNA, 3387 bp, Pseudomonas aeruginosa
atgcttgaggcaagcgaggtaagtctgagtgagttattcagcaccggtcagatccgtctagccgagctgtcggtatacaactggggctccttccatggcctgcattccgcgaagattgaccccgagggcaccctcattaccggtgacaacggtgccggtaagtcgacactcattgatgggttgatggcgcttctgctgccctccagcaaggcgtcgttcaacatcgcagctgctcaaggggaccgtacggatcgcaccttgatgtcctatgtgcgaggaaactatggcaaggcccatgatggcagcgagacggctaccctgctgaaacgctcaggggcgaccgcaacggggcttcgggcgctgtaccaagcggacgatggttcgaagatcaccttggcggccctgttctggattacccaggccagcaattcgctcaacgacctcaaacgcctttttgtggtgggtaagcgcgatgtgggcttggatgagctgttgcatctcttcggtgagggcaatgcccgtgtgctgaaacagcacctcaaagaggactcgctggtcgaggcattcgattcgtttaccgagtatcaagagacctatgtgcgactcctacgcatggagaaccgtaacgctcctgccctgctctcccgggcgctgggtttgaagaagattgatgacctcaccagcttgattcgagatctggtcctagagcccagtcaggtcaaggagcatgcccggcttgcggtcagtgaattcgatgacttggtcagcgtccatagcgaactcgatgatgctcggcgacagcgggatgccctgattgagttgccagagaccagccaagcgctgaatcaggccagggaggagatgcggcggatctcatctgagctagccggcctgccggtctactttggcgaacagtgctctcgactgtggcagatgcgcctgaagcaatacgaggcggaactgcttcagttggcagaggaaatgacccgccttggagctttggaggagcaagcaacggaccgggtacaggcattgttccatgcctaccagtcgcaaggtggtgagcgactggaggggctgcggaaggacttgaaagcggcaacgcaggtgcatcacgacagcgtgcgcgatgcgcgcctgtatcagatggatgtacgagaccttagtctgtccgacacgctgtcgctcgacgtattcaagcaaaaccaggtgagagcgcaaacggaactggcggatgtgccagcgttacgtcaagcgcgccaggatcagttcgcttcgtcggcagcgaacctctcccgtgagcaaacacagctcaaggagctggtaggtgaaatcgaagacatggagtcgcgaccggactccaacattgaaccttcctatcagaagctccgcgaccaactggtagagagcttgtcgctagatcctgcggaggttgttttcgttggcgagcttatcgatgtcctggaggcgcatcggccttggcaaggcgccattgaacgggcgttgggagggcatcgcaccacactgctggtgcctgatgagcgatatcgcctagtgaccaagtggctgaacactcgccacacgggtctccatgtcagggtgcaggttgttcggctgaaccagcatccgcaggttgctgagttcctaccggatggctttctaaaaatgctggattggaagccgcacccctatcgtgattggctgaaaaagcacctctcacgcttcgacctgcactgtgtggcatcgactgaaatactggaccagaccgacttttcgatgaccatccagggcctggtgcacttggataaagggcgatttgagaagaaggatcagcagcgcattgataacccacgtttctggtgtttgggattcagtaacaaggggcgtctagcggcgttaaggaaggatcgtgtcgagttggaggcagaggtcaagaagctggcccagcttacggcagatgcgcgcacggccatggacgacctcgagaagcatactcgggtatgggagcgcatcgcccagctcacctgggcggcaattgatgtccagtcagcgcaagatcggatgcagtcgctgaaggcggatctagaggcgcttgagcagcctgatagcgagctgggagtggcaaaggcacggtgggagcaggctggtgctgaacttaaagagatccaagagcagaagggtgctgtcagcaaaaggattggtgggctggatagcaatgtgactcaggcgaaccagcagctggaccaagctttcgagcaggctaaggctgggttgacagatgaagtacgtgagttgctcatcctacgtgttgggcagctacatcttgaggacttggatggtgttgcagagcttgaaggtcgccatcgttcagagctggaggacacgcgaaagcgaacccaaacccgtgaggttagggcttctactaaggcgagcggaatcgtctccgatttcaaggcgaagtggccgctcatcgccaatgattggctcgctggcgtcgatggtctggaggagtatctcgatcacctgacccacttggtacaggagggattgccagacctggtggagcgtttccgagagcgcttgaaccgcaacgcaacccagtcgctggcgcgaatcagtcaaacgattcaggccgaacgtgaggacatccaggaccgaatcgaaacgatcaacgatgtcctggagcgcacagagttcaggcagggaacctaccttcgtctgggaagccgggcagaaaccttcgaacacgtgaaagcgttcaatgggcagctaatgcgtgtgctggcgcgagccggtagtgacgatcatgaagctcgctttgtcgagctgaaggaccttattgagaaactggagaaggccaccaatcctgcgacctcgggcaatctggaaagtctgcgactgttggactcgcgctaccagctgtccttcttcgccgaggaggtagagaaaggcagcaaaaaggtacgcgatgtgctggagtcttccagcggtaagtcaggcggggaaaaggagtcgtttgccggcaccatcgtagccgccagcttggcttacgtgctgacgcctgacggcagcgaccgtccgctctactgcactgtgttcctggatgaggcgttctccaacaccgccgaggcggtgagtcgccgggtgctcaaggtcttccgagaactgaagatccacgtgaatctgatcactccatacaagaacctcaaccttgcacgtgaatcggcgcgctcgctgttgatcgcagagcgtgaccaggaaaagcatgagagtcggctctgcgaggtcacctgggaggaaattgacgagcagctggcgcgtcatgaacagcagggtctgcaaaaggcagccagttcactaggcatcgaagtggagccagctctgtga

SEQ ID NO: 48376 - DNA, 1194 bp, Pseudomonas aeruginosa
gtgagggattggggacggcttccagatgacgttgttgaggagctgcgccgactggagtgggaccatacaggccggctgcgggagcgactcttgggtgcgcgaccttttcccattccttgcttgctgaagccgccaaccggtagccaggcgcttgaggatcttgaccatttccatggctatatcgcggcctggcggaaatggccgtggccccatcaagtggcatgggtgacgaagcgatttcggcaactgggtgaatgcgaagtccccatcaggttggagatcgaatcaacgcaagccctcatcgctgcgctgggggctgaggctgttgaacgaagcaggggctgggcggagcgaatggagccgttgctctcgttggataaggctctgttcactaccctcatcaagcagcttggagagctggagaagctctgcatgactgacatccatttgcttgcgtgcctgctgccgcaactccagtgtggaatgggccagcgtcgatacttgcgggccctgccactacagagggtggatacgaagttcgtggagctgaaccagagcctaattgccgctctcttggattcgatgcacgaccaagaggtttccgctcatggcgggttagaggcttggctaggctgccgcgccacgccatccaactggcttcacgtgaaaccactttgccctgacgtgaaaggccgccttgctgggcttgatctcgttcggctgtcctttgagcaactgatgacctatccgttgcccgctcggagtgtgctggtgatcgagaatcttcaggctggctacggacttcctgagctaccagacaccattgcagtgttcggaggaggggcaaataccgcctggctacaagccgagtggctgaaggacagaagggtaggttactggggggatctcgatacatgggggctgaaattcctcgccgatgcacggttgaggcagccccatgttgaggcagtgatgatggatcgcgacacgctgatcgcccatgttgagcgcggggtgtgcgaagatcgaccagccgagctaccggactacggcctgactcttgccgagcggtccctgtttgaggagctgcgttctgctacacacggagttggtcgactagaacaggagcggttgtcgcaagactacgtagagcagcaactagccgcctggactcatgcctctgctgggttatag

SEQ ID NO: 48377 - DNA, 1353 bp, Pseudomonas aeruginosa; identical to SEQ ID NO: 44235

SEQ ID NO: 48378 - DNA, 663 bp, Pseudomonas aeruginosa; identical to SEQ ID NO: 44272

SEQ ID NO: 48379 - DNA, 2940 bp, Pseudomonas aeruginosa; identical to SEQ ID NO: 47756

SEQ ID NO: 48380 - DNA, 1182 bp, Pseudomonas aeruginosa; identical to SEQ ID NO: 44163

SEQ ID NO: 48381 - DNA, 1353 bp, Pseudomonas aeruginosa; identical to SEQ ID NO: 44179

SEQ ID NO: 48382 - DNA, 663 bp, Pseudomonas aeruginosa; identical to SEQ ID NO: 48259

SEQ ID NO: 48383 - DNA, 2940 bp, Pseudomonas aeruginosa; identical to SEQ ID NO: 48260

SEQ ID NO: 48384 - DNA, 1158 bp, Pseudomonas aeruginosa; identical to SEQ ID NO: 44182

SEQ ID NO: 48385 - DNA, 1353 bp, Pseudomonas aeruginosa; identical to SEQ ID NO: 42083

SEQ ID NO: 48386 - DNA, 663 bp, Pseudomonas aeruginosa; identical to SEQ ID NO: 48279

SEQ ID NO: 48387 - DNA, 2940 bp, Pseudomonas aeruginosa; identical to SEQ ID NO: 48280

SEQ ID NO: 48388 - DNA, 1158 bp, Pseudomonas aeruginosa; identical to SEQ ID NO: 44210

SEQ ID NO: 48389 - DNA, 1455 bp, Pseudomonas aeruginosa; identical to SEQ ID NO: 44081

SEQ ID NO: 48390 - DNA, 756 bp, Pseudomonas aeruginosa; identical to SEQ ID NO: 44082

SEQ ID NO: 48391 - DNA, 3387 bp, Pseudomonas aeruginosa; identical to SEQ ID NO: 44177

SEQ ID NO: 48392 - DNA, 1194 bp, Pseudomonas aeruginosa; identical to SEQ ID NO: 44178

SEQ ID NO: 48393 - DNA, 1353 bp, Pseudomonas aeruginosa; identical to SEQ ID NO: 43741

SEQ ID NO: 48394 - DNA, 663 bp, Pseudomonas aeruginosa; identical to SEQ ID NO: 45502

SEQ ID NO: 48395 - DNA, 2940 bp, Pseudomonas aeruginosa; identical to SEQ ID NO: 45503

SEQ ID NO: 48396 - DNA, 1182 bp, Pseudomonas aeruginosa
atgaagtcgcccactgacatcggtcgcagcttggccaggcaatggcagcgttctagtgttcggttggaccgcttactcaattctgctagctggccgcaaagcttcaacatcggcaagccttcggcgcgactattctctgacaacatccggacggtgcttcggcatgtggaaaattggcggagcgtgaaagtgggtaaggtcgactgggaacccgtcagctaccgagcagggttggctccaatttccttgccaatgcgctggcacttgcgcagtccctccgaatggattgccgcaaccgacgatccttcggtcagccaggaatacgctcaactcgagtatctggtcgagcaggtagatagttcctttcatgctctgctggtggcgcaacggagcctgtggttgacgaagccctctgaagaagtcatcgctacagcgcagctcgccactcaactatctccgggctgcgctcaaggccgcccattgcgcctgcttgcagagcacggagtggacaccaagtttttcgagcgaaacgctatcttgctgacgaaactcctcgatgagcgcttcgaaggcgcggcgtccgagcaaggtctgacgacttttctggatgcctttgaagaaaccagtcattgggttctagtcgttcctcttcagcctgagctgctgcccttcaagcggatcaggctcacgacttcggaactggccgaaacctcacttcccggttcgcgattgctcgtggtggaaaatgagcaatgtgttcacttgctacccgaaacgctgccggacaccctcgctgttctgggcgcagggctcgatttgcagtggttggcgtctgcgcatctggccgggaaacagatcgcttactggggcgacatggatacctggggcttactgatgctggcgcgagcgagacaccatcaacctgcagtcgaagcactgctaatggaccgggagctgtttgaccagcactccttgggaagcgcggtcgtcgagccagctaaagctcaggaattggctcccgaaggattgatgaccgacgaagctgatttctatcggtatctccttgcacaggagcgggggcgccttgagcaggagtatctgccacgcaggcaagtcgaacaggctattagtaaatggtttggagagtcggtagcgccggctcatcctgagcgaacggcttga

SEQ ID NO: 48397 - DNA, 1455 bp, Pseudomonas aeruginosa; identical to SEQ ID NO: 44081

SEQ ID NO: 48398 - DNA, 756 bp, Pseudomonas aeruginosa; identical to SEQ ID NO: 48239

SEQ ID NO: 48399 - DNA, 3387 bp, Pseudomonas aeruginosa; identical to SEQ ID NO: 48240

SEQ ID NO: 48400 - DNA, 1194 bp, Pseudomonas aeruginosa; identical to SEQ ID NO: 44178

SEQ ID NO: 48401 - DNA, 1455 bp, Pseudomonas aeruginosa; identical to SEQ ID NO: 44590

SEQ ID NO: 48402 - DNA, 756 bp, Pseudomonas aeruginosa; identical to SEQ ID NO: 44216

SEQ ID NO: 48403 - DNA, 3387 bp, Pseudomonas aeruginosa; identical to SEQ ID NO: 44217

SEQ ID NO: 48404 - DNA, 1194 bp, Pseudomonas aeruginosa
gtgagggattggggacggcttccagatgacgttgttgaggagctgcgccgactggagtgggaccatacaggccggctgcgggagcgactcttgggtacgcgtcctttccctattccttgcttgctgaagccgccaaccggtagccaggcgcttgaggatcttgaccatttccatggctatatcgcggcctggcggaaatggccgtggccacatcaagtggcatgggtgacgaagcgatttcggcaactgggtgaatgcgaagtcccgataaggttggagatcgaatcaacgcaagccctcatcgctgcgctgggggctgaggctgttggacgaagcagaggctgggcggagcgaatggagccgttgctctcgttggataaagctttgttcactactcttatcaagcagcttggagagctggagaagctctccatgactgacatccatttgctggcgtgcctgctgccgcaactccagtgtggaatgggccagcgtcgatacttgcgggccctgccactacagaaggtggatacaaagttcgtggagttgaaccagagcctaattgccgctctgttggattcgatgcacgaccaagaggtttccgctcatggcgggttagaggcttggttaggctgccgcgccacaccatccaactggcttcacgtgaaaccactttgccctgacgtgaaaggtcgccttgctgggcttgatctcgttcggctgtcctttgagcaactgatgacctatccgttacccgctcggagtgtgctggtgatcgagaacctccaggctggctacgggcttcccgagctaccaggcaccattgcagtgttcggaggaggcgcaaataccgcctggctacaagccgagtggctgaaggacagaagggtaggttactggggggatctcgatacatgggggctgaaattcctcgccgatgcacggttgaggcagccccatgtagaggctgtgatgatggatcgcgacacgctgatcgcccatgttgagcgcggggtgtgcgaagagcgaccagccgagctaccggactatggcttgactcttactgagcgctctctttttgaagagctgcgctctggtcgacacggagttggtcgactagaacaggagcggttgtctcaagactacgtagagcagcaacttgacgtctggcttcatgccatcgctacgatatag

SEQ ID NO: 48405 - DNA, 1353 bp, Pseudomonas aeruginosa
gtggaggatgcactccaggcactcgcgacaatccttgcagcctatgccagccaggaactttacgagatcagtcccgaggatacgcacctgcaggctggtcgcgaactgcgagagtggatcaagcgccgcctgatcatcgagcgcgagggacggatctacgcaaccgatgctctggaggtcgccatccagttcgtggagtccctggacagtcgcatcatgacctccaccgcctcccgcctctcggtggtccagcgtgagatcgagaatctggagaccggcctgaatccgagcaaggaaagccgcatcgccagtctgcgccgtcgaatcaaggatctggagctcgagctggagcaggccgaggccggacagataagcgtgctggacgaggcccaagcgatcgaaggcatccgcgaggtctacaacctggcgattgggctgcgcgccgattttcgccgggtcgaagactcctggcgcgaggcggatcgtgcactgaggcaatcgatcatcagcgagcaatatcaccgtggcgaaattgtcgaccgactgctcgatggccaggacgcgctgctgaatacgccagaaggtcgcgtgttcgacagtttccaacaacagctacgccagtccatcgagctggacaacatgcgtgtacgtctgcgcaccatcctccgccacccgactattcccaaagccctgaaccgctcgcagcaagtggaactgcaatggctggtcttgcgcctcgtccaggaaacgcaaagcgtcctccaggctagggcacgcagcgaacgggacgtgaaaggcttcatgaaaaccggcctcgccgcagagcatcaccgggtaggacacctgctgaacgagatcttcaacttggcgctcaatatcgactggcagcgccaatcggtacgccgccaggccatcccgctcccgccggttggcgtagctatcaccagtgtgccggctgccgagcgtttgcgcttcaaggctctggacgatgaagtgcgaagcgagctgaacctgcatgacaagcaggctggactggatcagattggcgatgacttctgggacgcctttgacgggctggatcgagaaacgctgatccgcaacacattaagcgtactggccgagcagcgcaggcctgtgagtctcggcgaactggcacatctgctgcctcccgcgcatgacctggaaacattcgcgctctggctgggaatggcgcgcgaggctggcatcgaggtgctggataaagagaaggaaacagtggagttggtggacgaagagcaacgtcgctggatcttccacttgccgtatgccgggctggaaagcgaggcgctcaaggatatcgactgggagttgtga

SEQ ID NO: 48406 - DNA, 657 bp, Pseudomonas aeruginosa
atcgagttagccgaggcgctcgataaatctgtcgatgagcccagaacaccgcggcggactcgcgaaaccgttcaggaattgctcaagtacggactgctggaagaaagccacaaacccaacttgtatcgcacagcgctcacccagcacgaagatatagcccgagttctggagcccctcgacctgcgcatgggtgtcgatgaggtacgcggcttggtattcgtgaccgtacggcaggacgaaacggccgagcaggatgaatggtctcacccactggtacgcaggcagcgtctgaatctggaacagtccctgctgatcgccatcctgcgtcaacacttcattacctatgaacaggaaagcgggaccggcgctagccacacacaggtcgccgtcgacgacctgattccgcaactgcaggtctatctcggcgatctaggcagcgatgcccgagaaagaactcgtgttattggcctgctggatcagctcaaaggccatggcttggtctctgctctggacacccatgatcgggtgatcatccgccccatcatcgcgcacctggccaacccggagaaccttcaggccctgctggcgtggctgcaggcacagatcgagaagtcgaacgagaccactgagccggctgctggcgaggagatggaatga

SEQ ID NO: 48407 - DNA, 1143 bp, Pseudomonas aeruginosa
atgaagtcgcccagtgatatcggccagagcctggcccgccaatggcaacagccgcgcatccggcgggagcgcctgctcgatcccggcggctggccccgcgacttcaccatcggcaaaccctcggctggcctcttctcggccaatccccaggccgtgcagcgacatgtcgaagcctggcggcaagtgcggatcggtgaggttacgtgggaacccgtcgactaccgtgccgccctcggaccggtccagatgcccatgacctggaggctgcgcagcccgtcggagtgggttgctgctagcggcgatcccgaagtgatgcgggaataccggatactcgaggcgctggtggagcagaccgaccgctgctttcacaccctactggtcagccagcgcagtctctggctgaaaaaatcagccgacgaggtcatcaccactgcacgactggcagcccgactgtcgccgggctgcgcacaaggacgccccttgcgcatgctggccgagctcggcgtggacaccaagttcttcgagcgcaacaccgccctgctgaccaagctgctcgacgagcgcttcgaaggcgaggtgtccgcacaggggctgacgaccttcctggatgccttcgaagacagcagccactgggtactggtcgctccgctgtcacccggcctgctgccgttcaaaaggctcaggctgaccaccgctgaactggcggaagtcgatctgccctgctcccgtgtgctggtggtagagaacgaacagtgcatccaccagttgcccgagctaccggacaccatcgcgattcttggcgccggactggatctgcagtggctgggctccccgtacttggccggcaagtccctcggctactggggtgacatggacacctgggggctgctgatgctggcacgcgcgaggcagcgacagccggccatcaaggcgctgctgatggcgcggtcgatctttgatcggtatgaatcgaccagtgcggtcgctgagccagtcaaggcccaggacgcggcacccgatggcctacagccgtgcgaggccgacttctatcgatacctgcttaggcgcgagcgtggtcgcctggaacaggagtacctgccaaaggacctggtggaaaatgctatcgctacatggactatgtga

SEQ ID NO: 48408 - DNA, 1353 bp, Pseudomonas aeruginosa; identical to SEQ ID NO: 43763

SEQ ID NO: 48409 - DNA, 663 bp, Pseudomonas aeruginosa; identical to SEQ ID NO: 48143

SEQ ID NO: 48410 - DNA, 2940 bp, Pseudomonas aeruginosa; identical to SEQ ID NO: 48144

SEQ ID NO: 48411 - DNA, 1146 bp, Pseudomonas aeruginosa; identical to SEQ ID NO: 41754

SEQ ID NO: 48412 - DNA, 1455 bp, Pseudomonas aeruginosa; identical to SEQ ID NO: 44590

SEQ ID NO: 48413 - DNA, 756 bp, Pseudomonas aeruginosa; identical to SEQ ID NO: 44216

SEQ ID NO: 48414 - DNA, 3387 bp, Pseudomonas aeruginosa; identical to SEQ ID NO: 44217

SEQ ID NO: 48415 - DNA, 1194 bp, Pseudomonas aeruginosa; identical to SEQ ID NO: 44218

SEQ ID NO: 48416 - DNA, 1353 bp, Pseudomonas aeruginosa; identical to SEQ ID NO: 43741

SEQ ID NO: 48417 - DNA, 663 bp, Pseudomonas aeruginosa; identical to SEQ ID NO: 45502

SEQ ID NO: 48418 - DNA, 2940 bp, Pseudomonas aeruginosa; identical to SEQ ID NO: 45503

SEQ ID NO: 48419 - DNA, 1182 bp, Pseudomonas aeruginosa; identical to SEQ ID NO: 44163

SEQ ID NO: 48420 - DNA, 1353 bp, Pseudomonas aeruginosa; identical to SEQ ID NO: 43741

SEQ ID NO: 48421 - DNA, 663 bp, Pseudomonas aeruginosa; identical to SEQ ID NO: 45502

SEQ ID NO: 48422 - DNA, 2940 bp, Pseudomonas aeruginosa; identical to SEQ ID NO: 45503

SEQ ID NO: 48423 - DNA, 1182 bp, Pseudomonas aeruginosa; identical to SEQ ID NO: 44163

SEQ ID NO: 48424 - DNA, 1455 bp, Pseudomonas aeruginosa; identical to SEQ ID NO: 44175

SEQ ID NO: 48425 - DNA, 756 bp, Pseudomonas aeruginosa; identical to SEQ ID NO: 44216

SEQ ID NO: 48426 - DNA, 3387 bp, Pseudomonas aeruginosa; identical to SEQ ID NO: 44584

SEQ ID NO: 48427 - DNA, 1194 bp, Pseudomonas aeruginosa; identical to SEQ ID NO: 44178

SEQ ID NO: 48428 - DNA, 1353 bp, Pseudomonas aeruginosa; identical to SEQ ID NO: 43741

SEQ ID NO: 48429 - DNA, 663 bp, Pseudomonas aeruginosa; identical to SEQ ID NO: 45502

SEQ ID NO: 48430 - DNA, 2940 bp, Pseudomonas aeruginosa; identical to SEQ ID NO: 45503

SEQ ID NO: 48431 - DNA, 1182 bp, Pseudomonas aeruginosa; identical to SEQ ID NO: 44163

SEQ ID NO: 48432 - DNA, 1353 bp, Pseudomonas aeruginosa; identical to SEQ ID NO: 42637

SEQ ID NO: 48433 - DNA, 663 bp, Pseudomonas aeruginosa; identical to SEQ ID NO: 48208

SEQ ID NO: 48434 - DNA, 2940 bp, Pseudomonas aeruginosa; identical to SEQ ID NO: 48209

SEQ ID NO: 48435 - DNA, 1158 bp, Pseudomonas aeruginosa
atgaagtcgcccactgacatcggtcgcagcctggccaggcaatggcagcgctccagtatccggttggatcgcttgctcaatcccggcagctggccgcaatgcttcaacatcggtaagccttcggcgcgagtcttcgctgaaaacatccatgcggtgctccagcatgtggaaaactggcggagcttgaaagtggggaaggtcgactgggagtcagtcagctatcgagctgggctggccccaatttccttgccgatgcgctggcacttgggtagtccctccgaatggattgccgcggccaatgatccaacggtcagccgggaatacgctcaactcgaatatctggtcgagcaggtagacagtgcctttcatgcgctgctggtggctcaacgcagcctgtggttgacgaagccgtctgaagaagtcgtcgccacggcgcaactcgccacccgcttgtcgccaggctgtgcccgaggccgtccactgcgcctgcttgccgagcacggcgtagacaccaagtttttcgagcgtaacgccagcttgctgacccggctcctcgacgagcgtttcgaaggcgcggcgtccgagcaaggtctgacgacgtttctggatgcctttgaagaaagcagtcattgggtactagtcgttcctcttcagcctgagctgctgcccttcaagcggcttaggctcacgactgcggaactggctgaaaccccgcttcctggttcgcggttgctggtggtggaaaatgagcaatgtgttcacttgctgcccgaaaccttgccggacaccctggctgtgctgggtgcaggactcgatttgcagtggttggcgtctgcgcacttagccgggaaacagatcgcctactggggcgacatggacacctggggcttgttaatgctggcgcgagcgaggcttcatcaaccagcggtcgaagcactattgatggagcaggagctgtttgaacagcactcaccgggcaatgcagttgttgagccggccaaagcgcgggagtcggccccacctggtttgctggctgacgaagcggatttctatcggtatctgctggtgcaagagcgaggacgtcttgagcaggagtacctgccaaaggtacaagttgagcgcgctatcgagcagtgggctagggcggtccctgtatag

SEQ ID NO: 48436 - DNA, 1353 bp, Pseudomonas aeruginosa; identical to SEQ ID NO: 44160

SEQ ID NO: 48437 - DNA, 663 bp, Pseudomonas aeruginosa; identical to SEQ ID NO: 45023

SEQ ID NO: 48438 - DNA, 2940 bp, Pseudomonas aeruginosa; identical to SEQ ID NO: 48151

SEQ ID NO: 48439 - DNA, 1182 bp, Pseudomonas aeruginosa; identical to SEQ ID NO: 44163

SEQ ID NO: 48440 - DNA, 1353 bp, Pseudomonas aeruginosa; identical to SEQ ID NO: 43741

SEQ ID NO: 48441 - DNA, 663 bp, Pseudomonas aeruginosa; identical to SEQ ID NO: 45502

SEQ ID NO: 48442 - DNA, 2940 bp, Pseudomonas aeruginosa; identical to SEQ ID NO: 45503

SEQ ID NO: 48443 - DNA, 1182 bp, Pseudomonas aeruginosa; identical to SEQ ID NO: 44163

SEQ ID NO: 48444 - DNA, 1353 bp, Pseudomonas aeruginosa; identical to SEQ ID NO: 43741

SEQ ID NO: 48445 - DNA, 663 bp, Pseudomonas aeruginosa; identical to SEQ ID NO: 45502

SEQ ID NO: 48446 - DNA, 2940 bp, Pseudomonas aeruginosa; identical to SEQ ID NO: 45503

SEQ ID NO: 48447 - DNA, 1182 bp, Pseudomonas aeruginosa; identical to SEQ ID NO: 44163

SEQ ID NO: 48448 - DNA, 1353 bp, Pseudomonas aeruginosa; identical to SEQ ID NO: 43230

SEQ ID NO: 48449 - DNA, 663 bp, Pseudomonas aeruginosa; identical to SEQ ID NO: 45023

SEQ ID NO: 48450 - DNA, 2940 bp, Pseudomonas aeruginosa; identical to SEQ ID NO: 48151

SEQ ID NO: 48451 - DNA, 1182 bp, Pseudomonas aeruginosa; identical to SEQ ID NO: 44163

SEQ ID NO: 48452 - DNA, 1353 bp, Pseudomonas aeruginosa; identical to SEQ ID NO: 43230

SEQ ID NO: 48453 - DNA, 663 bp, Pseudomonas aeruginosa; identical to SEQ ID NO: 45023

SEQ ID NO: 48454 - DNA, 2940 bp, Pseudomonas aeruginosa; identical to SEQ ID NO: 45024

SEQ ID NO: 48455 - DNA, 1182 bp, Pseudomonas aeruginosa; identical to SEQ ID NO: 44163

SEQ ID NO: 48456 - DNA, 1353 bp, Pseudomonas aeruginosa; identical to SEQ ID NO: 44160

SEQ ID NO: 48457 - DNA, 663 bp, Pseudomonas aeruginosa; identical to SEQ ID NO: 45023

SEQ ID NO: 48458 - DNA, 2940 bp, Pseudomonas aeruginosa; identical to SEQ ID NO: 48151

SEQ ID NO: 48459 - DNA, 1182 bp, Pseudomonas aeruginosa; identical to SEQ ID NO: 44163

SEQ ID NO: 48460 - DNA, 1353 bp, Pseudomonas aeruginosa; identical to SEQ ID NO: 44160

SEQ ID NO: 48461 - DNA, 663 bp, Pseudomonas aeruginosa; identical to SEQ ID NO: 45023

SEQ ID NO: 48462 - DNA, 2940 bp, Pseudomonas aeruginosa; identical to SEQ ID NO: 48151

SEQ ID NO: 48463 - DNA, 1182 bp, Pseudomonas aeruginosa; identical to SEQ ID NO: 44163

SEQ ID NO: 48464 - DNA, 1455 bp, Pseudomonas aeruginosa; identical to SEQ ID NO: 48373

SEQ ID NO: 48465 - DNA, 756 bp, Pseudomonas aeruginosa; identical to SEQ ID NO: 48374

SEQ ID NO: 48466 - DNA, 3387 bp, Pseudomonas aeruginosa; identical to SEQ ID NO: 48375

SEQ ID NO: 48467 - DNA, 1194 bp, Pseudomonas aeruginosa; identical to SEQ ID NO: 48376

SEQ ID NO: 48468 - DNA, 1353 bp, Pseudomonas aeruginosa; identical to SEQ ID NO: 43763

SEQ ID NO: 48469 - DNA, 663 bp, Pseudomonas aeruginosa; identical to SEQ ID NO: 48143

SEQ ID NO: 48470 - DNA, 2940 bp, Pseudomonas aeruginosa; identical to SEQ ID NO: 48144

SEQ ID NO: 48471 - DNA, 1146 bp, Pseudomonas aeruginosa; identical to SEQ ID NO: 41754

SEQ ID NO: 48472 - DNA, 1353 bp, Pseudomonas aeruginosa; identical to SEQ ID NO: 44179

SEQ ID NO: 48473 - DNA, 663 bp, Pseudomonas aeruginosa; identical to SEQ ID NO: 48259

SEQ ID NO: 48474 - DNA, 2940 bp, Pseudomonas aeruginosa; identical to SEQ ID NO: 48260

SEQ ID NO: 48475 - DNA, 1158 bp, Pseudomonas aeruginosa
atgaagtcgcccactgacatcggccgcagcctggccaggcaatggcagcgctccagtgtgcgcctggagcgtttgctcaatgccgctagctggccgcaaagcctcaacatcggcaaaccttcgccacgcctgttcactgacaacatccaggcagtgctcctgcatgtggagaactggcggagcgtaaacgtgggtaaagtcgactgggaacccgtcagctaccgagctgggcttgtccccatttccttgccgatgcgctggcatttgcgcaacccttccgaatggattgcagcgaccaatgatccgagggtctgcgaggaatacgctcaactcgagcatctggtcgagcaggtcgacagtgcctttcatgcgctgctggtggcgcaacgcagcctgtggttgacgaagccgtttgaagaagtcgtcgccacggcgcaactcgccacccgcttgtcgccaggctgtgcccgaggccgtccactgcgcctgcttgccgagcacggcgtagacaccaagtttttcgagcgtaacgccagcttgctgacccggctcctcgacgagcgtttcgaaggcgcggcgtccgagcaaggcctgacgacgtttctggatgcctttgaagaaagcagtcattgggtactagtcgttcctcttcagcctgagctgctgcccttcaagcggcttaggctcacgactgcggaactggctgaaaccccgcttcctggttcgcggttgctggtggtggaaaatgagcaatgtgttcacttgctgcccgaaaccttgccggacaccctggctgtgctgggtgcaggactcgatttgcagtggttggcgtctgcgcacttagccgggaaacagatcgcctactggggcgacatggacatctggggcttgttgatgctggcgcgagcgaggcttcatcaaccagcggtcgaagcactattgatggagcaggagctgtttgaacagcactcaccgggcaatgcagttgttgagccggccaaagcgcgggagtcggccccacctggtttgctggctgacgaagcggatttctatcggtatctgctggtgcaagagcgaggacgtcttgagcaggagtacctgccaaaggtacaagttgagcgcgctatcgagcagtgggctcgggcggtccctgtatag

SEQ ID NO: 48476 - DNA, 1353 bp, Pseudomonas aeruginosa; identical to SEQ ID NO: 43763

SEQ ID NO: 48477 - DNA, 663 bp, Pseudomonas aeruginosa; identical to SEQ ID NO: 48143

SEQ ID NO: 48478 - DNA, 2940 bp, Pseudomonas aeruginosa; identical to SEQ ID NO: 48144

SEQ ID NO: 48479 - DNA, 1146 bp, Pseudomonas aeruginosa; identical to SEQ ID NO: 41754

SEQ ID NO: 48480 - DNA, 1455 bp, Pseudomonas aeruginosa; identical to SEQ ID NO: 44590

SEQ ID NO: 48481 - DNA, 756 bp, Pseudomonas aeruginosa; identical to SEQ ID NO: 44216

SEQ ID NO: 48482 - DNA, 3387 bp, Pseudomonas aeruginosa; identical to SEQ ID NO: 44217

SEQ ID NO: 48483 - DNA, 1194 bp, Pseudomonas aeruginosa; identical to SEQ ID NO: 44218

SEQ ID NO: 48484 - DNA, 1353 bp, Pseudomonas aeruginosa; identical to SEQ ID NO: 43230

SEQ ID NO: 48485 - DNA, 663 bp, Pseudomonas aeruginosa; identical to SEQ ID NO: 45023

SEQ ID NO: 48486 - DNA, 2940 bp, Pseudomonas aeruginosa
ctgggggccgtgatctggttcgaaggcacaagctcctcggcatcggatctgaaaaaactgtggctgttaagcgagtcccccgagcagactctggagcattggctcagccagcatcacgcaggcggtatgcgggctttgcgtcagatggagaaggatgggacgggtatctggccttatcccagcaagaaagctttcttggccaggctgagggattacttcgaggtcggtgaaaacgcattcaccttgctcaaccgcgctgccggcctgaagcagctcaatagcattgacgagatctttcgcgagttggtgctggatgaccgttccgccttcgagcgggccgccgaggtcgccggcagcttcgatgatctaaccgacattcaccgagaactggaaacggctagaaagcagcagcgctcattgcaaccggtcgccgatggctgggagcgttaccaggtcttgcaagaacagctgcacgataagcaggctctcgaaggtatcctcccggtttggttcgccgagcaggggtatcgactgtggttggctgaaaccaacaggctcgagaaggagtacaaaaaggccgaactggatcaggagcaatgcaaaagtcagcttgaggcccagaaaggtgtggtcgatcaacatcgccagcgctacctgcgagtagggggcgcagggatagatcaattgcgcgagcgcatcgctgattgggtgagggagtgcgataagcgcagcctgaaagccgagcaataccaactcttggccaaaggccttggactagcggatgagttatcggccgctgctctcaaggagaatcagcagcatatcgcggcacgcctggaaatactggaccaacaaattactgatgcgcgccaaaaggcgttcgacgcaggcctcgtccagcaggaactcaatggtcgcctacagaccttacagcaggagggtgctgaggttgagaaacggccaggctcgaacctgcccgggcaatttcatgctttccgaagcgatctggcgcaggcgcttggtgtcaatgagtcggccctgcctttcgttgccgagctggtgcaggtcaagcccgaggagctggactggcgtggcgccatcgagcgggcaatcggtagccaccggctacgcatcctggtgccgcaggactcatcccaggccgcactgcgttgggtgaatcaacggcacaaccgcttgcatgtgcgcttgttggaggtacaggagccgacgtcgcgccccgtgttcttcgacgatggttttacccgcaagctgaccttcaaggagcatccgtaccgagaagccataaaggcactgctggcggacaatgaccgccactgcgtcgaaagcccggagcaattacgtcatacccctcatgccatgacggcccaggggctgatgtcgggcaaagaacgcttcttcgacaagcaggaccagaagcgtctggacgaagactggctgaccggcttcgataaccgtgaccgtctggccttcctggctgagcagattcgcgaggtcaatgagcagctcgagccagccaagctcgccttggatgctgcccagggcgacgttcgtcagttggagactcaagcttcgctgctgaatcgtgtcaaagaactgcagttcgaggatattgatctgccgggtgcccagagtcagctggagtcgctgcgtacgcaactggccaccctgacgcgccccgattctaaccttgccatgatcaaggtcgagctggatgcggccgaggccctgcaggagtctctggatcaacagctccgccaactgatcgaacagtacgttcagttaaaaactcagtttgaccaggccgcatccgctacccgtaaggcctataacagcgcggagaaagggctgaacgatacgcagcgtgaactggcgcaagcgcatttcccgactctgaccgcggatgacctcggcgatattgtcgagctggagcgcaagcatacgcgtgagcttcaagggcagctcaaagcgcttggcgagaaactgggcgatcagaaatcagagcttgccaaacgtatgtctgatgccctcaaggtagacaccggggcgcttgcagaggtcgggcgagagctggtggatgtccccaggtatctggagcgtctgcgtgtgctgaccgaggaagccttgccagagaaactcaagcgcttcctggaatacctcaatcgctcctcggatgacggcgtcacccaactgctcagctatatcgaccatgaagtctcgatgatcgaggaacgcctggatgacctgaatagtacgatgcagcgtgtcgactttcagcccggacgctatctgcgcctggttgcaggcaaggtcatccatgaaagcctgcgcaccctgcagcgcgcccagcgccaactgaactcggcgcgtttcatcgatgatgaaggcgagagccattacaaggcattgcaggatcttgtggggttgctcaaggacgcctgcgaacacagcaggaatcagggagccaaggcgcttctggatccgcgcttccgcctggagttcgcagtatcggtgatcgatcgagaaagcaggaatgtcatcgaaacccgaacaggttctcagggcggtagcggtggcgagaaggagatcattgcctcctacgtgctgaccgcttccctgagctatgcgctttgtcccgacggcagcagccggccgttgttcggcaccatcgttctcgacgaggcgttctcgcgcagctcccatgcggttgcaggtcggatcatcgctgcgttgagggaattcggcctgcacgctgtcttcatcacgcccaacaaggaaatgcgcctgttacgccaccacacgcgttcggcagtcgtcgttcatcggcgcggcctggagtccagtctggtttccctgagctgggaagctttggatgagcatcatcaacagcgcatcaaggccatgcatgaagtcgcccactga

SEQ ID NO: 48487 - DNA, 1182 bp, Pseudomonas aeruginosa
atgaagtcgcccactgacatcggtcgcagcttggccaggcaatggcagcgttctagtgttcggttggatcgcttactcaattctgctagctggccgcaaagcttcaacatcggcaagccttcggcacgactattctctgacaacatccggacggtgcttcggcatgtggaaaattggcggagcgtgaaagtgggtaaggtcgactgggaacccgtcagctaccgagcagggttggctccaatttccttgccaatgcgctggcacttgcgcagtccctccgaatggattgccgcaaccgacgatccttcggtcagccaggaatacgctcaactcgagtatctggtcgagcaggtagatagttcctttcatgctctgctggtggcgcaacggagcctgtggttgacgaagccctctgaagaagtcatcgctacagcgcagctcgccactcaactatctccgggctgcgctcaaggccgcccattgcgcctgcttgcagagcacggagtggacaccaagtttttcgagcgaaacgctatcttgctgacgaaactcctcgatgagcgcttcgaaggcgcggcgtccgagcaaggtctgacgacttttctggatgcctttgaagaaaccagtcattgggttctagtcgttcctcttcagcctgagctgctgcctttcaagcgtatcaggctcacgacttcggaactggccgaaacctcacttcccggttcgcgattgctcgtggtggaaaatgagcaatgtgttcacttgctacccgaaacgctgccggacaccctcgctgttctgggcgcagggctcgatttgcagtggttggcgtctgcgcatctggccgggaagcagatcgcttactggggcgacatggatacctggggcttactgatgctggcgcgagcgagacaccatcaacctgcagtcgaagcactgctaatggaccgggagctgtttgaccagcactccttgggaagcgcggtcgtcgagccagctaaagctcaggaattggctcccgaaggattgatgaccgacgaagctgatttctatcggtatctccttgcacaggagcgggggcgccttgagcaggagtatctgccacgcaggcaagtcgaacaggctattagtaaatggtttggagagtcggtagcgccggctcatcctgagcgaacggcttga

SEQ ID NO: 48488 - DNA, 1353 bp, Pseudomonas aeruginosa; identical to SEQ ID NO: 44179

SEQ ID NO: 48489 - DNA, 663 bp, Pseudomonas aeruginosa; identical to SEQ ID NO: 48259

SEQ ID NO: 48490 - DNA, 2940 bp, Pseudomonas aeruginosa; identical to SEQ ID NO: 48260

SEQ ID NO: 48491 - DNA, 1158 bp, Pseudomonas aeruginosa; identical to SEQ ID NO: 44182

SEQ ID NO: 48492 - DNA, 1455 bp, Pseudomonas aeruginosa; identical to SEQ ID NO: 44081

SEQ ID NO: 48493 - DNA, 756 bp, Pseudomonas aeruginosa; identical to SEQ ID NO: 44082

SEQ ID NO: 48494 - DNA, 3387 bp, Pseudomonas aeruginosa; identical to SEQ ID NO: 44177

SEQ ID NO: 48495 - DNA, 1194 bp, Pseudomonas aeruginosa; identical to SEQ ID NO: 44178

SEQ ID NO: 48496 - DNA, 1353 bp, Pseudomonas aeruginosa; identical to SEQ ID NO: 43741

SEQ ID NO: 48497 - DNA, 663 bp, Pseudomonas aeruginosa
atggatgatgaacagcctctcatgagcgccgctgtacaggtcgatgagcgccggacgccgcaacgggtacgggaggccgtacaggaaatgctcaagtacggtctgctggaagagagtcacaagcccaacctgtatcgctcagcgctttccaatatcgaggcggtcgacagaatcctggagccgctcgaccttgccatgggggtcgacgaggttcgggggctgttgttcgttatcgttcgccagggcgaggtgaccgagcaggatgactggtcgcaccccctagtgcgtcggcaaaggctgaatctggagcagtctctgctgatagccatcctgcgccagcagttcatcgcctacgaacaggaaagcggtacgggcgccagtcaggcatcggtagtggtcgatgagctgattccccaattgcaggtttacctgggcgagctgggcagtgaggcaaaggagcgcaatcgcatcatcacgctgctggatcagctcaaggggcatggcctggtgtcggctttggacgcccatgatcgcgtcatcatccgtcccatcattacccacttggctaacccggagaacctgcaggcactcgtggcatggctgcgagagcaggtggagggcgcggcgacgccggctgccgatggcgaggaggatatggcatga

SEQ ID NO: 48498 - DNA, 2940 bp, Pseudomonas aeruginosa
ctgggggccgtgctctggttcgaaggcacaagctcctcggcatcggatctgaaaaaactgtggctgttaagcgagtcccccgagcagactctggagcattggctcagccagcatcacgcaggcggtatgcgggctttgcgtcagatggagaaggatgggacgggtatctggccttatcccaggaagaaagctttcttggccaggctgagggattacttcgaggtcggtgaaaacgcattcaccttgctcaaccgcgctgccggcctgaagcagctcaatagcattgacgagatctttcgcgagttggtgctggatgaccgttccgccttcgagcgggccgccgaggtcgccggcagcttcgatgatctaaccgacattcaccgagaactggaaacggctagaaagcagcagcgctcattgcagccggtcgccgatggctgggagcgttaccaggtcttgcaagaacagctgcacgataagcaggctctcgaaggtatcctcccggtttggttcgccgagcaggggtatcgactgtggttggctgaaaccaacaggctcgagaaggagtacaaaaaggccgaactggatcaggagcaatgcaaaagtcagcttgaggcccagaaaggtgtggtcgatcaacatcgccagcgctacctgcgagtagggggcgcagggatagatcaattgcgcgagcgcatcgctgattgggtgagggagtgcgataagcgcagcctgaaagccgagcaataccaactcttggccaaaggccttggactagcggatgagttatcggccgctgctctcaaggagaatcagcagcatatcgcggcacgcctggaaatactggaccaacaaattactgacgcgcgccaaaaggcgttcgacgcaggcctcgtccagcaggaactcaatggtcgcctacagaccttacagcaggagggtgctgaggttgagaaacggccaggctcgaacctgcccgggcaatttcatgctttccgaagcgatctggcgcaggcgcttggtgtcaatgagtcggccctgcctttcgttgccgagctggtgcaggtcaagcccgaggagctggactggcgtggcgccatcgagcgggcaatcggtagccaccggctacgcatcctggtgccgcagggctcatcccaggccgcactgcgttgggtgaatcaacggcacaaccgcttgcatgtgcgcttgttggaggtacaggagccgacgtcgcgccccgtgttcttcgacgatggttttacccgcaagctgaccttcaaggagcatccgtaccgagaagccataaaggcactgctggcggacaatgaccgccactgcgtcgaaagcccggagcaattacgtcatacccctcatgccatgacggctcaggggctgatgtcgggcaaagaacgcttcttcgacaagcaggaccagaagcgtctggacgaagactggctgaccggcttcgataaccgtgaccgtctggccttcctggctgagcagattcgcgaggtcaatgagcggctcgagccagccaagctcgccttggatgctgcccagggcgacgttcgtcagttggagactcaagcttcgctgctgaatcgtgtcaaagaactgcagttcgaggatattgatctgccgggtgcccagagtcagctggagtcgctgcgtacgcaactggccaccctgacgcgccccgattctaaccttgccatgatcaaggtcgagctggatgcggccgaggccctgcaggagtctcttgatcaacagctccgccaactgatcgaacagtacgttcagttaaaaactcagtttgaccaggccgcatccgctacccgtaaggcctataacagcgcggagaaagggctgaacgatacgcagcgtgaactggcgcaagcgcatttcccgactctgaccgcggatgacctcggcgatattgtcgagctggagcgcaagcatacgcgtgagcttcaagggcagctcaaagcgcttggcgagaaactgggcgatcagaaatcagagcttgccaaacgtatgtctgatgccctcaaggtagacaccggggcgcttgcagaggtcgggcgagagctggtggatgtccccaggtatctggagcgtctgcgtgtgctgaccgaggaagccttgccagagaaactcaagcgcttcctggaatacctcaatcgctcctcggatgacggcgtcacccaactgctcagctatatcgaccatgaagtctcgatgatcgaggaacgcctggatgacctgaatagtacgatgcagcgtgtcgactttcagcccggacgctatctgcgcctggttgcaggcaaggtcatccatgaaagcctgcgcaccctgcagcgcgcccagcgccaactgaactcggcgcgtttcatcgatgatgaaggcgagagccattacaaggcattgcaggatcttgtggggttgctcaaggacgcctgcgaacacagcaggaatcagggagccaaggcgcttctggatccgcgcttccgcctggagttcgcagtatcggtgatcgatcgagaaagcaggaatgtcatcgaaacccgaacaggttctcagggcggtagcggtggcgagaaggagatcattgcctcctacgtgctgaccgcttccctgagctatgcgctttgtcccgacggcagcagccggccgttgttcggcaccatcgttctcgacgaggcgttctcgcgcagctcccatgcggttgcaggtcggatcatcgctgcgttgagggaattcggcctgcacgctgtcttcatcacgcccaacaaggaaatgcgcctgttacgccaccacacgcgttcggcagtcgtcgttcatcggcgcggcctggagtccagtctggtttccctgagctgggaagctttggatgagcatcatcaacagcgcatcaaggccatgcatgaagtcgcccactga

SEQ ID NO: 48499 - DNA, 1182 bp, Pseudomonas aeruginosa; identical to SEQ ID NO: 44163

SEQ ID NO: 48500 - DNA, 1353 bp, Pseudomonas aeruginosa; identical to SEQ ID NO: 43230

SEQ ID NO: 48501 - DNA, 663 bp, Pseudomonas aeruginosa; identical to SEQ ID NO: 45023

SEQ ID NO: 48502 - DNA, 2940 bp, Pseudomonas aeruginosa; identical to SEQ ID NO: 48486

SEQ ID NO: 48503 - DNA, 1182 bp, Pseudomonas aeruginosa
atgaagtcgcccactgacatcggtcgcagcttggccaggcaatggcagcgttctagtgttcggttggatcgcttactcaattctgctagctggccgcaaagcttcaacatcggcaagccttcggcacgactattctctgacaacatccggacggtgcttcggcatgtggaaaattggcggagcgtgaaagtgggtaaggtcgactgggaacccgtcagctaccgagcagggttggctccaatttccttgccaatgcgctggcacttgcgcagtccctccgaatggattgccgcaaccgacgatccttcggtcagccaggaatacgctcaactcgagtatctggtcgagcaggtagatagttcctttcatgctctgctggtggcgcaacggagcctgtggttgacgaagccctctgaagaagtcatcgctacagcgcagctcgccactcaactatctccgggctgcgctcaaggccgcccattgcgcctgcttgcagagcacggagtggacaccaagtttttcgagcgaaacgctatcttgctgacgaaactcctcgatgagcgcttcgaaggcgcggcgtccgagcaaggtctgacgacttttctggatgcctttgaagaaaccagtcattgggttctagtcgttcctcttcagcctgagctgctgcctttcaagcgtatcaggctcacgacttcggaactggccgaaacctcacttcccggttcgcgattgctcgtggtggaaaatgagcaatgtgttcacttgctacccgaaacgctgccggacaccctcgctgttctgggcgcagggctcgatttgcagtggttggcgtctgcgcatctggccgggaaacagatcgcttactggggcgacatggatacctggggcttactgatgctggcgcgagcgagacaccatcaacctgcagtcgaagcactgctaatggaccgggagctgtttgaccagcactccttgggaagcgcggtcgtcgagccagctaaagctcaggaattggctcccgaaggattgatgaccgacgaagctgatttctatcggtatctccttgcacaggagcgggggcgccttgagcaggagtatctgccacgcaggcaagtcgaacaggctattagtaaatggtttggagagtcggtagcgccggctcatcctgagcgaacggcttga

SEQ ID NO: 48504 - DNA, 1455 bp, Pseudomonas aeruginosa; identical to SEQ ID NO: 44081

SEQ ID NO: 48505 - DNA, 756 bp, Pseudomonas aeruginosa; identical to SEQ ID NO: 44082

SEQ ID NO: 48506 - DNA, 3387 bp, Pseudomonas aeruginosa; identical to SEQ ID NO: 44177

SEQ ID NO: 48507 - DNA, 1194 bp, Pseudomonas aeruginosa; identical to SEQ ID NO: 44178

SEQ ID NO: 48508 - DNA, 1353 bp, Pseudomonas aeruginosa; identical to SEQ ID NO: 43763

SEQ ID NO: 48509 - DNA, 663 bp, Pseudomonas aeruginosa; identical to SEQ ID NO: 48143

SEQ ID NO: 48510 - DNA, 2940 bp, Pseudomonas aeruginosa; identical to SEQ ID NO: 48144

SEQ ID NO: 48511 - DNA, 1146 bp, Pseudomonas aeruginosa; identical to SEQ ID NO: 41754

SEQ ID NO: 48512 - DNA, 1353 bp, Pseudomonas aeruginosa; identical to SEQ ID NO: 44160

SEQ ID NO: 48513 - DNA, 663 bp, Pseudomonas aeruginosa; identical to SEQ ID NO: 45023

SEQ ID NO: 48514 - DNA, 2940 bp, Pseudomonas aeruginosa; identical to SEQ ID NO: 48151

SEQ ID NO: 48515 - DNA, 1182 bp, Pseudomonas aeruginosa; identical to SEQ ID NO: 44163

SEQ ID NO: 48516 - DNA, 1353 bp, Pseudomonas aeruginosa; identical to SEQ ID NO: 43741

SEQ ID NO: 48517 - DNA, 663 bp, Pseudomonas aeruginosa; identical to SEQ ID NO: 45502

SEQ ID NO: 48518 - DNA, 2940 bp, Pseudomonas aeruginosa; identical to SEQ ID NO: 45503

SEQ ID NO: 48519 - DNA, 1182 bp, Pseudomonas aeruginosa; identical to SEQ ID NO: 44163

SEQ ID NO: 48520 - DNA, 1353 bp, Pseudomonas aeruginosa; identical to SEQ ID NO: 43741

SEQ ID NO: 48521 - DNA, 663 bp, Pseudomonas aeruginosa; identical to SEQ ID NO: 45502

SEQ ID NO: 48522 - DNA, 2940 bp, Pseudomonas aeruginosa; identical to SEQ ID NO: 45503

SEQ ID NO: 48523 - DNA, 1182 bp, Pseudomonas aeruginosa; identical to SEQ ID NO: 44163

SEQ ID NO: 48524 - DNA, 1353 bp, Pseudomonas aeruginosa; identical to SEQ ID NO: 44235

SEQ ID NO: 48525 - DNA, 663 bp, Pseudomonas aeruginosa; identical to SEQ ID NO: 44272

SEQ ID NO: 48526 - DNA, 2940 bp, Pseudomonas aeruginosa; identical to SEQ ID NO: 47756

SEQ ID NO: 48527 - DNA, 1182 bp, Pseudomonas aeruginosa; identical to SEQ ID NO: 44163

SEQ ID NO: 48528 - DNA, 1455 bp, Pseudomonas aeruginosa; identical to SEQ ID NO: 48373

SEQ ID NO: 48529 - DNA, 756 bp, Pseudomonas aeruginosa; identical to SEQ ID NO: 48374

SEQ ID NO: 48530 - DNA, 3387 bp, Pseudomonas aeruginosa; identical to SEQ ID NO: 48375

SEQ ID NO: 48531 - DNA, 1194 bp, Pseudomonas aeruginosa; identical to SEQ ID NO: 48376

SEQ ID NO: 48532 - DNA, 1353 bp, Pseudomonas aeruginosa
atggaggatgcgctgcaagcgctgtccgaaatgctggctgcttatgccagccaggagctttacgagatcgacccggatgcaacgcatctccaagcaggccgtgaacttcgtgaatggatcaagcggcgccttgtcgtagagcgagagggccgtatctacgcaaccgacgcgttggagtccgccatccagttcgttgactcgctggatagtcggatcatgacctccacggcatctcgcctgtcggtggttcagcgcgagatcgaaaacctggaaacgggtctgaaccccagcccaactggccgtattgccagcctgcgccgccgaatccaggatttggagcacgagctagcgcaggtagaagctggccacgtcatcgtgctggatgaagcgcaggcgatagagggcatacgcgaggtatataacctcgccaccagcctgcgcgcggactttcgacgagttgaagactcttggcgcgaggcggatcgcgcccttcgacactccatcatcagcgagcagtctcaccgtggagagatcgtcgatcggttattggatgggcaagatgccctactcaacacgccggaagggcgtgtctttgaaagcttccagcagcaactgaggcagtccgctgagctggaggccatgcgtgagcgcttgcgcaccatccttcgtcatccagcggttccaaaggctctgaatcgtccccagcaacgtgagctgcgttggttggcgttacgcctggttcgggagtcgcaggctgtgctccaagctcgcgcccgaagcgagcgcgatgttcgcggcttcatgaagacggggttggccgccgagcatcatcgcgtcggacagttacttaacgacttcttcaatctagcgctcagcgtcgactggcaacgtcagtcagagcgccgtaagcctgttcgtttaccgccggttggcgtagccattaccggtgtcccggcaatagagcgtcttcgcttcaagaccctgggtgacgatgacacgggcgagctggatctgagtttgaagcctgcggggttggaacagattgatgacgacttctgggatgccttcgatgggctggatcgtgaagcgctgattcatgacaccctggctgtgctggtggagcaggggcgccctgtgagtctcggggagcttgcgtctttgcttccacctgctcacgacctggaaacctttgcgctctggttggcgatggcgcgtgaggcaggcatcgaggtgctgacagaggagcgtcagctcgtggagctagttgacgaggatgagcaacgctggcgcttcaatctgccttacgtcggacttgaccacgaggcactcaaggacatcgattgggagttgtga

SEQ ID NO: 48533 - DNA, 663 bp, Pseudomonas aeruginosa
atggatgatcaacaggctctcatgagttccactacacaggtcgatgatcggcggacgccgcagcgggtacgtgaggccgtacaggaaatgctcaagtacggtctgctggaggagagtcacaagcccaacctgtatcgctcagcgctttccaatatcgaggcggtcgacagaatcctggaacccctcgaccttgccatgggggtcgacgaggttcgggggctggtgttcgtcaccgttcgccagggcgaggtggccgagcaggatgactggtcgcaccccctcgtgcgtcggcaaaggcttaatctggagcagtccctgctgatagccattctgcgacagcatttcatcgcgtacgaacaggaaagcggtacgggcgccagtcaggcattggtagcggttgatgagctgattccccaattgcaggtttacctgggcgaactgggcagtgaggcgaaggagcgcaatcgcgtcatcacgctgctggatcagcttaaggggcatggtttggtgtcggctctggacgcacatgatcgcgtcatcatccgccccatcattacccacttggccaacccggagaacctgcaggcactggtggcatggctgcgagagcaggtggagggtgcggctatgccggctgctgatggcgaggaggacatggcatga

SEQ ID NO: 48534 - DNA, 2940 bp, Pseudomonas aeruginosa
ctgggcgctgtgctctggttcgagggtacaagctcctcggcatcggatctgaaaaaactttggctgttgagcgaatcccccgagcagactctggagcattggctcagccagcatcacgcaggcggcatgcgggcgctgcgtcagatggagaaggatgggacgggtatctggccttatcccagcaagaaagccttcctagccaggctgagggattacttcgaggtcggtgaaaacgcattcaccttgctcaaccgcgctgccggcctgaagcagctcaatagcattgacgagatctttcgagagttggtgctggatgaccgctccgccttcgatcgggctgccgaggtcgccagcagcttcgatgatctgaccgacattcatcgagaactggaaaccgctagaaagcagcagcgttcgttgcaacctgtcgccgatggctgggagcgttaccgggtcttgcaagaacaattgcaggataaacaggctctcgaaggcattcttccggtctggttcgccgagcagggatatcgcctgtggttagctgaaaccaacaggcttgagaaggagcacaaacaggccgaactggatcaggggcaatgcaggagtcagcttgagatccagaagggcgtggtcgatcaacatcgtcagagctacctgcgagtagggggcgcagggatagaccaattacgcgagcgcatcgctgattgggtcagggagtgcgataagcggagcctgaaagccgagcaataccaacgcttggccaaagggcttggactagcggatgagttatcggccgctgctttcgaggaaaatcagcagcagattgcggcacgcctggaaatactggcccagaaaaccacagacgcgcgccagaaggcgttcgatgcaggtctcgtccagcaggagctcaatggtcgcctacagaccttacagcaggagcgtgctgaggttgagagacggccaggctcgaacctgcccgggaattttcatgcttttcgaagcgatctggcacaggcgcttggcgtcgatgagtcggccctgcctttcgtcgccgagctggtgcaggtcaagtccgaggagctggcctggcggggggccatcgagcgggcaatcggtagccaccggctccgtattctggtaccgcagggctcatcccaggcggcactgcgttgggtgaaccaacgtcacaaccgcctgcatgtgcgcctgttggaggtcaaggagccatcgtcgcgccctgtgttcttcgatgatggttttacccgcaaactgaccttcaaggagcatccataccgagaagccgtaaaggcattactggcggacaacgaccgacattgcgtagaaagcacggagcaattgcgtcataccccgcacgccatgacggcccaggggttgatgtcgggcaaagagcgcttcttcgacaagcaggatcagaagcgcctggatgaagactggctgaccggcttcgataaccgcgaccgtctggccttcctggctgagcagattggcgaggtcaatcaacagcttgcgcctgccaagctggccctggattctgcccagggcgatgtacgtcagttggagaatcaagcttcgctgctgcaacgcgtcgaagagctgcatttcgaggatattgatctgccggccgccgagcgtcagctgcagtcgctgcgtacacagctagacaccctgacgcgccccgactccgaccttgccatgatcaaggccgaactggatcaagccgaggccctgctggactctctggatcaacagctgcaacgactgatcgagcagtgcgtgcagttgagaactcagttcgagcaagccgcatccgctacccgtaaggcctatcgtggtgccgaaaaggggctgaacgatacgcagcgtgaactagcgcaaacgcatttcccgaccctgacggcagataacctcggcgatattgtcgagctggagcgccagaatacgcgtgagctgcaagggcagctcaaagcgctcggcgataaactcggcgatcagaaaacagagctagccaaacgtatgtccgacgccctgaaggtggacaccggggcgcttgcggaggtcgggcgagaactggtggacctacccaggtatctggaacgtcttcgcgtgctgaccgaggaagccctgcccgagaaactcaagcgcttcctggaatacctcaatcgttcctcggatgacggcgtcacccagctgctcagctatatcgaccatgaagtttcgatgatcgaggagcgcctggatgacctgaacagtacgatgcagcgtgtcgactttcagcccggacgctatctgcgcctggtggcgaaaaaggtcatccatgaaagcctgcgcaccttgcaacaggctcagcgccaactgaactcggcgcgcttcatcgatgatgaaggcgagagccattacaaggcattgcaggcgctcgttgacctgctcaaagatgcctgcgagcacagtaggaaccagggcgccaaggcgcttctggatccgcgcttccgcttggagttcgcggtttcggtgatcgatcgcgaaagcaagagtgtcatcgaaacccgaacaggttctcagggcggcagtggtggcgagaaggagatcatcgcttcctatgtgctgaccgcctccctgagctatgcgctctgtcctgacggcagcagccggccgttgttcggtaccatcgtgctcgacgaggcgttctcgcgcagctcccatgcagttgccggtcggatcatcgcggcgctgagggagttcggcttgcacgctgtctttattacgcccaacaaggaaatgcgtctgttgcgccaccatacgcgttcggcagtcgtcgttcatcggcgcggtttggaatccagtctggtctccctgagctgggaagcgttggatgagcatcatcaacagcgcatcagggccatgcatgaagtcgcccactga

SEQ ID NO: 48535 - DNA, 1158 bp, Pseudomonas aeruginosa
atgaagtcgcccactgaaatcggccgcaacctggccaggcaatggcagcgctccagcgtgcgcttggaacgcttgctcaatcccggtagctggccgcaaaccctcaacatcggcaaaccttcggcacgcctgttcactgacaacatccaggcggtgctccggcatgtggagaactggcggagcgtgaacgtgggtacagtcgactgggaacccgtcagctaccgagcagggctggcccccatttccttgccgatgcgctggtacttgcgcggcccctccgaatggattgccgcgaccaatgatccaacggtcagccaggaatacgctcaactcgagtatctggtcgagcaggtagatagtgcctttcatgcgctgctggtggcacaacggggcttatggttgacgaagccccctgaagaagtcgtcgccacggcgcaactcgccacccggttgtctccaggctgtgcccgaggccgtccactgcgcctgcttgcagagcacggcgtagacaccaagtttttcgagcgcaacgccagcttgctgaccaggctcctcgacgagcgcttcgaaggcgcggcgtccgagcagggcctgactacttttctggatgcctttgaagaaagcagtcattgggttctggtcgttccccttcagcctgagctgctgcccttcaagcggctcaggctcaccacttcggaactggccgaaaccccacttcccggttcgcgcttgctggtggtggaaaatgagcaatgtgttcacttgctgcccgaaaccttgccggacaccctggctgtgctgggctcaggactcgatttgcagtggttagcgtccgcgcacctggccgggaaacagatcgcatactggggcgatatggatacctggggcttgctgatgctggcgcgagcgagactccatcaaccagcggtcgaagcactattgatggagcaggagctgtttgaacagcactcactggtgagcgcagtcgtcgagccgaccaaagctctggagtcggccccacctggtttgctggctgacgaagcggatttctatcagtatctgctggtgcaagaacgagggcgtcttgagcaggagtacctgccaaaggtacaagttgagcgcgctatcgagcagtgggctcggaaggtccctgtatag

SEQ ID NO: 48536 - DNA, 1353 bp, Pseudomonas aeruginosa; identical to SEQ ID NO: 43741

SEQ ID NO: 48537 - DNA, 663 bp, Pseudomonas aeruginosa; identical to SEQ ID NO: 45502

SEQ ID NO: 48538 - DNA, 2940 bp, Pseudomonas aeruginosa; identical to SEQ ID NO: 45503

SEQ ID NO: 48539 - DNA, 1182 bp, Pseudomonas aeruginosa; identical to SEQ ID NO: 44163

SEQ ID NO: 48540 - DNA, 1353 bp, Pseudomonas aeruginosa; identical to SEQ ID NO: 43767

SEQ ID NO: 48541 - DNA, 663 bp, Pseudomonas aeruginosa
atggatgacgaacaacctgtcaggagcgccgctgtacaggtcgatgagcgccggacgccgcaacgagtacgggaggccgtacaggaaatgctcaagtacggtctgctggaagagagtcacaagcccaacctgtatcgctcagcgctttccaatatcgaggcagtcgacagaatcctggagccgctcgaccttgccatgggggtcgacgaggttcgggggctggtgtttgttaccgttcgccagggcgaggtggccgagcaggatgactggtcgcaccccctagtgcgtcggcaaaggctgaatctggagcagtctctgctgatagccatcctgcgccagcagttcatcgcctacgaacaggaaagcggtacgggcgccagtcaggcatcggtagtggtcgatgagctgattccccaattgcaggtttacctaggcgagctgggcagtgaggcaaaggagcgcaatcgcatcatcacgctgctggatcagctaaaggggcatggcctggtgtcggctttagacgcccatgatcgcgtcatcatccgtcccatcattacgcacttggctaacccggagaacctgcaggcactcgtggcatggctgcgagagcaggtggagggcgcggcgacgccggctgccgatggcgaggagggtatggcatga

SEQ ID NO: 48542 - DNA, 2979 bp, Pseudomonas aeruginosa
attgcggccacgctcgagcgtgatggtgcgcaggtacgactaggggccgtgctctggttcgaaggcacaagctcctcggcatcggatctgaaaaaactgtggctgttaagcgagtcccccgagcagactctggagcattggctcggccagcatcacgcaggcggtatgcgggctttgcgtcagatggagaaggatgggacgggtatctggccttatcccagcaagaaagccttcttggccaggctgagggattacttcgaggtcggtgaaaacgcattcaccttgctcaaccgcgctgccggcctgaagcagctcaatagcattgacgagatctttcgcgagttggtgctggatgaccgttccgccttcgagcgggccgccgaggtcgccggcagcttcgatgatctaaccgacattcaccgagaactggaaacggctaggaagcagcagcgctcattgcaaccggtcgccgatggctgggagcgttaccaggtcttgcaagaacagctgcacgataagcaggctctcgaaggtatcctcccggtttggttcgccgagcaggggtatcgactgtggttggctgaaaccaacaggctcgagaaggagtacaaaaaggccgaactggatcaggagcaatgcaaaagtcagcttgaggcccagaaaggtgtggtcgatcaacatcgccagcgctacctgcgagtagggggcgcagggatagatcaattgcgcgagcgcatcgctgattgggtgagggagtgcgataagcgcagcctgaaagccgagcaataccaacgtttggccaaaggccttggactagcggatgagttatcggccgctgctctcaaggagaatcagcagcagatcgcggcactcctggaaatactggaccagcaaattactgacgcgcgccaaaaggcgttcgacgcaggcctcgtccagcaggaactcaatggtcgcctacagactttacagcaggagggtgctgaggttgagaaacggccaggctcgaacctgcccgggcaatttcatgctttccgaagcgatctggcgcaggcgcttggtgtcaatgagtcggtcctgcctttcgttgccgagctggtgcaggtcaagcccgaggagctggactggcgtggcgccatcgagcgggcaattggtagccaccggctacgcatcctggtgccgcaggactcatcccaggccgcactgcgttgggtgaatcaacggcacaaccgcttgcatgtgcgcttgttggaggtacaggagccgacgttgcgccccgtgttcttcgacgatggttttacccgcaagctgaccttcaaggagcatccgtaccgagaagccataaaggcactgctggcggacaatgaccgccactgcgtcgaaagcccggagcaattacgtcatacccctcatgccatgacggcccaggggctgatgtcgggcaaagaacgcttcttcgacaagcaggaccagaagcgtctggacgaagactggctgaccggcttcgataaccgtgaccgtctggccttcctggctgagcagattcgcgaggtcaatgagcagctcgagccagccaagctcgccttggatgctgcccagggcgacgttcgtcagttggagactcaagcttcgctgctgaatcgtgtcaaagaactgcagttcgaggatattgatctgccgggtgcccagagtcagctcgagtcgctgcgtacgcaactggccaccctgacgcgccccgattctgaccttgccatgatcaaggtcgagctggatgcggccgaggccctgcaggagtctctggatcaacagctccgccaactgatcgaacagtacgttcagttaaaaactcagtttgaccaggccgcatccgctacccgtaaggcctataacagcgcggagaaagggctgaacgatacgcagcgtgaactggcgcaagcgcatttcccgactctgaccgcggatgacctcggcgatattgtcgagctggagcgcaagcatacgcgtgagcttcaagggcagctcaaagcgcttggcgagaaactgggcgatcagaaatcagagcttgccaaacgtatgtctgatgccctcaaggtagacaccggggcgcttgcagaggtcgggcgagagctggtggatgtacccaggtatctggagcgtctgcgtgtgctgaccgaggaagccttgccagagaaactcaagcgcttcctggaatacctcaatcgctcctcggatgacggcgtcacccagctgctcagctatatcgaccatgaagtctcgatgatcgaggaacgcctggatgacctgaatagtacgatgcagcgtgtcgactttcagcccggacgctatctgcgcctggttgcaggcaaggtcatccatgaaagcctgcgcaccctgcagcgcgcccagcgccaactgaactcggcgcgtttcatcgatgatgaaggcgagagccattacaaggcattgcaggatctcgtggggttgctcaagaacgcctgcgaacacagcaggaatcagggagccaaggcgcttctggatccgcgcttccgcctggagttcgcagtatcggtgatcgatcgagaaagcaggaatgtcatcgagacccgaacaggttctcagggcggtagcggtggcgagaaggagatcatcgcctcctacgtgctgaccgcttccctgagctatgcgctctgtcccgacggcagcagccggccattgttcggcaccatcgttctcgacgaggcgttctcgcgcagctcccatgcggttgcaggtcggatcatcgcggcgttgagggaattcggcctgcacgctgtcttcatcacgcccaacaaggaaatgcgcctgttacgccaccacacgcgttcggcagtcgtcgttcatcggcgcggtctggagtccagtctggtttctctgagctgggaagctttggatgagcatcatcaacagcgcatcaaggccatgcatgaagtcacccactga

SEQ ID NO: 48543 - DNA, 1146 bp, Pseudomonas aeruginosa; identical to SEQ ID NO: 43770

SEQ ID NO: 48544 - DNA, 1323 bp, Pseudomonas aeruginosa; identical to SEQ ID NO: 44958

SEQ ID NO: 48545 - DNA, 663 bp, Pseudomonas aeruginosa; identical to SEQ ID NO: 45502

SEQ ID NO: 48546 - DNA, 2940 bp, Pseudomonas aeruginosa
ctgggggccgtgctctggttcgaaggcacaagctcctcggcatcggatctgaaaaaactgtggctgttaagcgagtcccccgagcagactctggagcattggctcagccagcatcacgcaggcggtatgcgggctttgcgtcagatggagaaggatgggacgggtatctggccttatcccagcaagaaagctttcttggccaggctgagggattacttcgaggtcggtgaaaacgcattcaccttgctcaaccgcgctgccggcctgaagcagctcaatagcattgacgagatctttcgcgagttggtgctggatgaccgttccgccttcgagcgggccgccgaggtcgccggcagcttcgatgatctaaccgacattcaccgagaactggaaacggctagaaagcagcagcgctcattgcagccggtcgccgatggctgggagcgttaccaggtcttgcaagaacagctgcacgataagcaggctctcgaaggtatcctcccggtttggttcgccgagcaggggtatcgactgtggttggctgaaaccaacaggctcgagaaggagtacaaaaaggccgaactggatcaggagcaatgcaaaagtcagcttgaggcccagaaaggtgtggtcgatcaacatcgccagcgctacctgcgagtagggggcgcagggatagatcaattgcgcgagcgcatcgctgattgggtgagggagtgcgataagcgcagcctgaaagccgagcaataccaactcttggccaaaggccttggactagcggatgagttatcggccgctgctctcaaggagaatcagcagcatatcgcggcacgcctggaaatactggaccaacaaattactgacgcgcgccaaaaggcgttcgacgcaggcctcgtccagcaggaactcaatggtcgcctacagaccttacagcaggagggtgctgaggttgagaaacggccaggctcgaacctgcccgggcaatttcatgctttccgaagcgatctggcgcaggcgcttggtgtcaatgagtcggccctgcctttcgttgccgagctggtgcaggtcaagcccgaggagctggactggcgtggcgccatcgagcgggcaatcggtagccaccggctacgcatcctggtgccgcaggactcatcccaggccgcactgcgttgggtgaatcaacggcacaaccgcttgcatgtgcgcttgttggaggtacaggagccgacgtcgcgccccgtgttcttcgacgatggttttacccgcaagctgaccttcaaggagcatccgtaccgagaagccataaaggcactgctggcggacaatgaccgccactgcgtcgaaagcccggagcaattacgtcatacccctcatgccatgacggctcaggggctgatgtcgggcaaagaacgcttcttcgacaagcaggaccagaagcgtctggacgaagactggctgaccggcttcgataaccgtgaccgtctggccttcctggctgagcagattcgcgaggtcaatgagcggctcgagccagccaagctcgccttggatgctgcccagggcgacgttcgtcagttggagactcaagcttcgctgctgaatcgtgtcaaagaactgcagttcgaggatattgatctgccgggtgcccagagtcagctggagtcgctgcgtacgcaactggccaccctgacgcgccccgattctaaccttgccatgatcaaggtcgagctggatgcggccgaggccctgcaggagtctctggatcaacagctccgccaactgatcgaacagtacgttcagttaaaaactcagtttgaccaggccgcatccgctacccgtaaggcctataacagcgcggagaaagggctgaacgatacgcagcgtgaactggcgcaagcgcatttcccgactctgaccgcggatgacctcggcgatattgtcgagctggagcgcaagcatacgcgtgagcttcaagggcagctcaaagcgcttggcgagaaactgggcgatcagaaatcagagcttgccaaacgtatgtctgatgccctcaaggtagacaccggggcgcttgcagaggtcgggcgagagctggtggatgtccccaggtatctggagcgtctgcgtgtgctgaccgaggaagccttgccagagaaactcaagcgcttcctggaatacctcaatcgctcctcggatgacggcgtcacccaactgctcagctatatcgaccatgaagtctcgatgatcgaggaacgcctggatgacctgaatagtacgatgcagcgtgtcgactttcagcccggacgctatctgcgcctggttgcaggcaaggtcatccatgaaagcctgcgcaccctgcagcgcgcccagcgccaactgaactcggcgcgtttcatcgatgatgaaggcgagagccattacaaggcattgcaggatcttgtggggttgctcaaggacgcctgcgaacacagcaggaatcagggagccaaggcgcttctggatccgcgcttccgcctggagttcgcagtatcggtgatcgatcgagaaagcaggaatgtcatcgaaacccgaacaggttctcagggcggtagcggtggcgagaaggagatcattgcctcctacgtgctgaccgcttccctgagctatgcgctttgtcccgacagcagcagccggccgttgttcggcaccatcgttctcgacgaggcgttctcgcgcagctcccatgcggttgcaggtcggatcatcgctgcgttgagggaattcggcctgcacgctgtcttcatcacgcccaacaaggaaatgcgcctgttacgccaccacacgcgttcggcagtcgtcgttcatcggcgcggcctggagtccagtctggtttccctgagctgggaagctttggatgagcatcatcaacagcgcatcaaggccatgcatgaagtcgcccactga

SEQ ID NO: 48547 - DNA, 1182 bp, Pseudomonas aeruginosa; identical to SEQ ID NO: 44163

SEQ ID NO: 48548 - DNA, 1353 bp, Pseudomonas aeruginosa; identical to SEQ ID NO: 43741

SEQ ID NO: 48549 - DNA, 663 bp, Pseudomonas aeruginosa; identical to SEQ ID NO: 45502

SEQ ID NO: 48550 - DNA, 2940 bp, Pseudomonas aeruginosa; identical to SEQ ID NO: 45503

SEQ ID NO: 48551 - DNA, 1182 bp, Pseudomonas aeruginosa; identical to SEQ ID NO: 44163

SEQ ID NO: 48552 - DNA, 1353 bp, Pseudomonas aeruginosa; identical to SEQ ID NO: 43741

SEQ ID NO: 48553 - DNA, 663 bp, Pseudomonas aeruginosa; identical to SEQ ID NO: 45502

SEQ ID NO: 48554 - DNA, 2940 bp, Pseudomonas aeruginosa; identical to SEQ ID NO: 45503

SEQ ID NO: 48555 - DNA, 1182 bp, Pseudomonas aeruginosa; identical to SEQ ID NO: 44163

SEQ ID NO: 48556 - DNA, 1353 bp, Pseudomonas aeruginosa; identical to SEQ ID NO: 43741

SEQ ID NO: 48557 - DNA, 663 bp, Pseudomonas aeruginosa; identical to SEQ ID NO: 45502

SEQ ID NO: 48558 - DNA, 2940 bp, Pseudomonas aeruginosa; identical to SEQ ID NO: 45503

SEQ ID NO: 48559 - DNA, 1182 bp, Pseudomonas aeruginosa; identical to SEQ ID NO: 44163

SEQ ID NO: 48560 - DNA, 1353 bp, Pseudomonas aeruginosa; identical to SEQ ID NO: 43741

SEQ ID NO: 48561 - DNA, 663 bp, Pseudomonas aeruginosa; identical to SEQ ID NO: 45502

SEQ ID NO: 48562 - DNA, 2940 bp, Pseudomonas aeruginosa; identical to SEQ ID NO: 45503

SEQ ID NO: 48563 - DNA, 1182 bp, Pseudomonas aeruginosa; identical to SEQ ID NO: 44163

SEQ ID NO: 48564 - DNA, 1353 bp, Pseudomonas aeruginosa; identical to SEQ ID NO: 43741

SEQ ID NO: 48565 - DNA, 663 bp, Pseudomonas aeruginosa; identical to SEQ ID NO: 45502

SEQ ID NO: 48566 - DNA, 2940 bp, Pseudomonas aeruginosa; identical to SEQ ID NO: 45503

SEQ ID NO: 48567 - DNA, 1182 bp, Pseudomonas aeruginosa; identical to SEQ ID NO: 44163

SEQ ID NO: 48568 - DNA, 1353 bp, Pseudomonas aeruginosa; identical to SEQ ID NO: 43741

SEQ ID NO: 48569 - DNA, 663 bp, Pseudomonas aeruginosa; identical to SEQ ID NO: 45502

SEQ ID NO: 48570 - DNA, 2940 bp, Pseudomonas aeruginosa; identical to SEQ ID NO: 45503

SEQ ID NO: 48571 - DNA, 1182 bp, Pseudomonas aeruginosa; identical to SEQ ID NO: 44163

SEQ ID NO: 48572 - DNA, 1353 bp, Pseudomonas aeruginosa; identical to SEQ ID NO: 43741

SEQ ID NO: 48573 - DNA, 663 bp, Pseudomonas aeruginosa; identical to SEQ ID NO: 45502

SEQ ID NO: 48574 - DNA, 2940 bp, Pseudomonas aeruginosa; identical to SEQ ID NO: 45503

SEQ ID NO: 48575 - DNA, 1182 bp, Pseudomonas aeruginosa; identical to SEQ ID NO: 44163

SEQ ID NO: 48576 - DNA, 1353 bp, Pseudomonas aeruginosa; identical to SEQ ID NO: 44235

SEQ ID NO: 48577 - DNA, 663 bp, Pseudomonas aeruginosa; identical to SEQ ID NO: 44272

SEQ ID NO: 48578 - DNA, 2940 bp, Pseudomonas aeruginosa; identical to SEQ ID NO: 47756

SEQ ID NO: 48579 - DNA, 1182 bp, Pseudomonas aeruginosa; identical to SEQ ID NO: 44163

SEQ ID NO: 48580 - DNA, 1353 bp, Pseudomonas aeruginosa; identical to SEQ ID NO: 43230

SEQ ID NO: 48581 - DNA, 663 bp, Pseudomonas aeruginosa; identical to SEQ ID NO: 45023

SEQ ID NO: 48582 - DNA, 2940 bp, Pseudomonas aeruginosa; identical to SEQ ID NO: 48154

SEQ ID NO: 48583 - DNA, 1182 bp, Pseudomonas aeruginosa; identical to SEQ ID NO: 44163

SEQ ID NO: 48584 - DNA, 1353 bp, Pseudomonas aeruginosa; identical to SEQ ID NO: 43741

SEQ ID NO: 48585 - DNA, 663 bp, Pseudomonas aeruginosa; identical to SEQ ID NO: 45502

SEQ ID NO: 48586 - DNA, 2940 bp, Pseudomonas aeruginosa; identical to SEQ ID NO: 45503

SEQ ID NO: 48587 - DNA, 1182 bp, Pseudomonas aeruginosa; identical to SEQ ID NO: 44163

SEQ ID NO: 48588 - DNA, 1353 bp, Pseudomonas aeruginosa; identical to SEQ ID NO: 43741

SEQ ID NO: 48589 - DNA, 663 bp, Pseudomonas aeruginosa; identical to SEQ ID NO: 45502

SEQ ID NO: 48590 - DNA, 2940 bp, Pseudomonas aeruginosa; identical to SEQ ID NO: 45503

SEQ ID NO: 48591 - DNA, 1182 bp, Pseudomonas aeruginosa; identical to SEQ ID NO: 44163

SEQ ID NO: 48592 - DNA, 1353 bp, Pseudomonas aeruginosa; identical to SEQ ID NO: 43741

SEQ ID NO: 48593 - DNA, 663 bp, Pseudomonas aeruginosa; identical to SEQ ID NO: 45502

SEQ ID NO: 48594 - DNA, 2940 bp, Pseudomonas aeruginosa; identical to SEQ ID NO: 45503

SEQ ID NO: 48595 - DNA, 1182 bp, Pseudomonas aeruginosa; identical to SEQ ID NO: 44163

SEQ ID NO: 48596 - DNA, 1461 bp, Arthrobacter sp. YC-RL1; identical to SEQ ID NO: 46119

SEQ ID NO: 48597 - DNA, 693 bp, Arthrobacter sp. YC-RL1; identical to SEQ ID NO: 46120

SEQ ID NO: 48598 - DNA, 3324 bp, Arthrobacter sp. YC-RL1; identical to SEQ ID NO: 46121

SEQ ID NO: 48599 - DNA, 1371 bp, Methylobacterium sp. GXS13
atgctgttcgcgcagctgcccgacgagctgttcaagcccctggcttccccaagccggggcttcaacgcggccctgctgctgcacctgcaccggcgcgtcctcggggcggagccggtgcgcaaggcggaattgctggccgagatcggcgatttcgccgccggctggagcgatccggagattttgggcgacgagccgatctccgctgatccggccgagcgccgcaacgccctctaccgccggctcctggagaccggctggctgatcgagcgccgggagcgctacgtgccggtggtcgagttcgaccccgaggcgcgcctgctcctcgaggagctgtcgcggctggagcgcggcgagacccgctcctatggcggcgcggtgctggaggttctgggcggcctggagagcgccgtgtccgatccgggcagccgctccgaggccctgtccaacgccgcccgggcgtcggccgccttcctggcccatgtccgcggcctcgccgccggcatgcgcaaggtcgaggagcggatcctgcgcgagcccgaccgggccaagaccttccggctgttcttcgaggatttcgtcgagcgccacctgatcagcgactaccgaacgctgcacacccgcttcaacccgttccgattccgggccagcgtggtccgcgaggccggacgagccctgcgcgacgcccttaccgtgcgggcgctggccgagggcctgatccgcgagggccgcagccccgatctcgacaccgcccagcgggcggtccgggcggatctcgcccagatcctctcggtgtttgaggggttggacaaccatctcgacgcggtcgacgccgtcgtggcgcgcctggagcgccgtttcggcgccgcgctccacgccatggaccggccggacccgaccgggatcgagcgcaccgccgcgatgttgcgcgccgtcggcgccgccgaggtcgcccccgacgtgcccccggtggtgtcgttgctgcggccgccgatcggccaggcccacctgcagacgccgcgcgcccgccgcagcgccatcgatgtcgagccgctgccggatatcgatgacgaccccgcggtcgacgccttcgcggccgccaaggccgagttccgccgccgcaccaccgtgacgccggagaccatgacggccttcgtcgaggcgcggctcggcaaggccgtgtcgctgcgcggctcgcagatcacgatcgcgggcgtggacgatttcgtcgtgttccagcgcctgcgcgagatcgacgtgctgttcgatgcgcggctgcgcgaccgctacgctgtggtccggctgcccgagcggctcgccaatggttggctggactgcccggatttcgtggtggagcgtcgggccggtgcttga

SEQ ID NO: 48600 - DNA, 627 bp, Methylobacterium sp. GXS13
gtgcttgagggatttcgcgcgatcatcgacggcgacgagccgccgcctccgggcgcccgtgcccccgacgccgaggagctgtgccgcgccctccaggtgatgctcaagggacaggtgatctacgccgacacgccgggcatcggccgttcctacgagctcgcccggcactacgcgccgttcttcaccgactacttcgcctgtctcggctacgccctcacggtcgcgcatcgcgaccagatggtgtcgctgagcccggccgccgacgcgccccggcacgacatcgcctccgagcgcctgcgcaaggacgagaccctggtgctgctggcgctgcggctgctctacgaagagggcctgcgcgacaaccgcgccggcaccgatgggatcgtcgagtgcaccaccgacgagatcgtggagaagatccgcgcggtggcgcgcaacgatccccccgaggagggccgcctcgccgacatcctgcgcctctacgcccgccgcggcggcctcaggatgggcgagcgcgacagggtcgagcgagtgacgccgctgtcgttgctgcccggcctggcggtgctcgcctccgacgcctggctggagcgcctgcgggcgtggtcggaagccggggagctctga

SEQ ID NO: 48601 - DNA, 2389 bp, Methylobacterium sp. GXS13
gtgtacgtcctcaccgatatcgccatctcgaactggtacctgatccggcgggagcagatccgcctgcggggcgccgccgccctggtcgggccgacgggggccggcaagtcgacgatcttcggcgcgttcggcacggtgctcgccggcaacaatgccagccgcctggcgctcaacgcctcggcctcgggccgcagcgcccgcacggtgcgcgactattgcctcggctggatcagcgacccggcggagggcggaaggccgacgcgggaatcctgcgagaccgtgctggcgctggtgttcgagaacccggcctcgggccgcaccgtcacggtcgggctggcgctcgccgcccgggccgtcgagccgcgcgagaccgtgctgtcgcgcttcatcgcggtcggccatcggttcgagatcgccgattacgcccgcaccgccccggggggcagcttcacggcgccgtggagcgagatcgccgcggatctgcgcgcccgggcggcgagcttgaccgaataccgcacctccggcgagcgcttcaccgccgacatcctggcgaccctacgggagggcgcgccctcccccgagccccggcacttcctgcgcagcttcgccaacgcggtggcgttcaagccgatcttcgacaccagcgccttcgtgcgcgccttcgtgctcgacccggagccgctcgatgtcgagcgggtgcggctgtccatcgccaattggcgccgccttctggaaacgatcggcgagctggagagccgccccgcccgcctgcgccgcctgcgcgaccgctacgaggcctggagcgaggcggtgctggccgctaccaaccacgagttccgggcggcctgcgccgagctgcgccgccgcagcctcgatctgaccgcggtccggctgcgcctcaacgagggcgccgacatcctgcggatcgcccgggagcgagtcgccgcgagccgcgggcatgtgcgcgagatcgacggcgagatcgccgaaaagaaggccctgctcgccggcagcgccgcggaagggcgactggcggcctcgacgctgggcctgtcgatgctggagcgggaccggaaggagctggtggcgcggatttccgacctcgtcggcgtcgtcggccagatgggcaagctccagccggtcgccccgatcctgcgccaggcctgcccgccggcggcgcggctcgccgaatcctgcgcccgggcgggcctgcgccgcgaatcctcacccgaggagatcctgcggccggacgggcccctggccgagctgatcgacgggctggcgcgcctgcccgaattcgacgaggccctagagcgggccgccgaggacgcggcgctcaaggcccgcgcccaggagagcgaggccgagcgcaccgcgccccggaccggcgccggaccggcggcgcgcctgtcctccgacacggtggcgttccgcggcgagctggagcggcgcgggatcgaggccctgccgatctgcgaactggccgagatcgtcgatccgcattgggggccggcgctggaaggcctgctcggccgcgcccgcgaggctttggtggtttcccccgaccggctgagcgaggctttgggcgtgctccagtcaggccgcgaccggttccaccgttgcatcctggtcaagaccaccgacaccgccaagcagcgcccgcgccgctacgacgacgggccgctcaccgtgatcgaaaccagcgatccgcacgcggaggcgttcctgggggtgcggctcgggggctacgatctcgcccgggacgatgccgaactggcgcgcctgtcccgcgccgtggcgccgagcgggcggaccaccgccggcatggcctattcggtgacccgcagcgtcgacctgctgatgacccgcggccatcgcggaccgacggtggacagccgccgggcgcacgaggccgcagttgccgaagctcgccggctgcgcggcgaggccgcggtcctgcgcgaggccgcccgcaccgccgcggccatccgcgcccggatcagtcgcggcctcgacgatgtcgacgccctgcggggcgaactcgacggactggaaggaaggcgacgtaccctccagaccgagcgcgagggcatcgagaagcgcgacaacgccggcctcaccgccgagatcgccgcgctgaccaccgagcggatgggttacctgcgggaattgtcggaggagctggagccgaagctcgaccgcctgctcgccgacgaggccgcgctgcgggcgcgtctcgggaccgtccgtgaggcggcccgggctgcgctctcggccaggcgttcggccctgcggcaactcatgggcggcgacgcggcgcgggtgcgcctcgcccgctcggagccgttcagcgtcgcggcgatcgccgcgcgccggagggcgctggcga

SEQ ID NO: 48602 - DNA, 1530 bp, Gordonia sp. SGD-V-85
atggagttctcagccttcccggctccggtcgaggcccccggcacgtcgagcggcgccgagtccgtgcagctcacgctggccgacgcgtgggaatcgaaccgctcgatccagaagtcggcggtgggacgactcttcgcggccaccaactcggctctctacgtcaccttgatggaacggcacctcgactacggcgccaaactgtccgagaccgagctgacggtgcgcctcgaccgcgacctcgccgacctcgacctcaccgatcaggccaccggcctcgagctggtcaaactctgggctcggcagggctggctgcaccgcgtcaccgacacgaccgacccgcacgcccccaacctgtgccacctgaccagcgaggcacgatcggtcctggacttcatgcgacgtcagcgtcgcgaggattcgatcgccaccggcggatccatcaccggtatcgccgccgagctccgacgcgtcgccggtcaggtcagcaacgacccggaccagatccgtttggagatcgaggcgcagatgtcagacctcgacgccgaactcgccgacctcgacgccggccgacgccccccggtcgacctgcgcgtggccgaggacgccgcccggaccatcggctaccagatggagcagatcatctccgacatcggccagtacggcacgatgctcgaccgcatcaccaccgcgctgctcgacgaccccggcgactccgacctcgcctaccgcgaccgtcagcgacagctcttcgacgactacgaggcgctcctcgactcgccgcagtccgcgtcgtaccaggcgttctcgcacctgattcaggatccggagcgtcgcgcgcgcctgaagtccgacatcgagacgatcatcgccagcttcccgagcatggacgcgggcctgcggtcggtgatggacaacttcttcggcctggtgacccagcagatggccgaggtcggccgcacccggcagcggtgtgcacgccgtatccgacgcttcgtcgcgtctggaacgcttgagcagagccgcggtctcgcccgccagctcaacgacgccctggccaccgccaacgagctgctcaagacgtccctggccgaccgtcggatcggctacgagctgcccctggccgcgccgacggtgaactcgatcggccgactcgccttcgagatccgcgaacacgtcccgcccgcacccgcgctcccggccactctcgacgccgacctcacctcgttcgcctcgctgtccggtcaggtcgacaccaccgaactaacggacaccgtgaatgcagcggtcgccgccggaccggtcgccctcgccgacgtcatcgacggactcgaggagccgtacctcgcgcacgtcatcgtcctgtggtcgtgggcccagaaacaacaggcccagaaacagcaagcggcaggggacaaggtaccgatgaccaccgtccgctttcggtcgctcatcggcgacgaccacgccatcgaggtacccgacctgaccttcaccgaaccgattccgactgcggaggtcgacgccgaatga

SEQ ID NO: 48603 - DNA, 930 bp, Gordonia sp. SGD-V-85
atgaccaccaccgacgagaccaaccccggctccggcgagactccacccccgctccctgaggtgcgagcgcagcgagccacgaagggtcccgaatccgaccctgcgaccgacgccgattctctgccccctgaggtgcgagcggagcgagccacgaagggcacccccacgacccccgacgaattcgccggcttcgacgacctgcccaccgtcgcgaaccgcgcggcgacccacacgccgaacgcaccccgcttcgacggcgacgtcagtgagctgcccgaccgcgcgtgctgggcgctgcagaacctgttgacccgccgctacatcagcggcgaccgacagccgcagctgtggtcgtgggtggccgagtatcaggacgtgctgcgcggtcgcctctccgaactcgacctccggctgcgcatcgtcgacgaactgcaggtcgccttcgtcgagcaggccggttacgactcccggtggggccgaaagatcctcaagcgcgagacgattcacacctacgacgccatcttggcgttgcacctggccaagtacgtgcgcgccgctcgcgacgagcccgtgctgatcacccgcgaagagatccacgagctcttcgccggcgtcaccaacaccatcgaccgcgacctcgcactcttcgacacgcgcatcgaacgcgccctggacaagatggaggagctcgagttcctccgcaagcagcgcgacgacgccgacaccttcatcgtcagcccggtgatctctgcggtgatgacggcgtcggtgatcactgacctacaaaggcaattcgagcagttcatcggatccggtgacaccggggaagtgccaccggaggacctcgccgacgagcctgcggaacgcgacgacgacgcggccgacctcgacggagcctacggcgagaacgacgaaggagacgattggtga

SEQ ID NO: 48604 - DNA, 3348 bp, Gordonia sp. SGD-V-85
ttggtgagcgggcaggtcgaccagtaccacctgtcccggttgcagctgatcaactggggcgtgttcgacgggtatcactcgatcccgttcagtcccaacggttctctgatcaccggatcgtcgggtagcggtaagtcgtcgttgctcgacgcgatttcgctggcgttcctgccggatcatcggcgcaacttcaacgcctcgggcgatgcgacggcggccggatcctccagtggcaagcgcacggtcggcaagtacgtgcgcggcgcgtggggtgagcgacgcgacggcaccaacgcccaccgcgagatcatgtacctgcgtggcaccggcccggcatgggcggccatcgcggtcacgtacacctccagttccggcgaggccatcaccggcctggtattgaaatggcttgccgccggcaagatgaccgacgcccacagttcgtacttcatctacgacggcgacgccgacatcgtcgaggcctgcaacgagtgggccgccaacaactacaactcggccaagttccgcgaccgcggctggcgcggcggacccggcgagggcaagtacctctcgacgctttactcgctcatcgggatccgcggctccgacgccgcgcagcagctcctcggaaaggccaagtcgctcaagagcgtcggcggtctcgcgcagttcgtgcgggagttcatgctcgacgccccgaccagcatcgtcgggatcgccgacgccctcgaccagatcgatccgctcgtcgaagcgcgtgaactgctcgacgtcgcgcgccgcaagcgcaccatcctcggcaacatcgaggaggtgcaggagcggtacgcgggggaggcggccaccttctccgtcctcgacaccatcgacaacaccaccatccgcagctacgtcaacaacctgcggatccacaatgcccagcccgaggtcgccgacctggacgaccagatcacccgcctcgacggcgatctcgccgcgttgaccacccagcacgaccagctccgccaggaccacagcttgctgctgtcccggatcgccacctccaccggcgacctcgccccgctgcgcgaacagctcggcggcgcacagaaactcagcaccgaggtcaccgcccgacgcaacgcgtacgaggacaaggtttccgcgctcggcttcaccccgcccacgcgggccgaggggttctggctgctgcgcgaggaactcactgaggaggccgccaagatcgacggccagctcgacgccggtcgcgcccactatgccgaggccctggccagcgaggtcgccgcgcggacccgccgcgacgccgcgatggaagagctcggccgcgtcgagaacgctggctccgcactgccgcgcaccgagcacgagatgcgccgcgccatcgcccatggactccagatcgacgagtccgaactgaagtacgtcgccgagctcgtcgaactcgatcccgacgaagagcgctggcgtctggccgtcgagaaggtgctgcgcaacgtcggcctgcgactactggtgccggacaagcacttccgcgcggccctgcggttcgtgaactcgcacgacatgcgcggtcgtatccagctgcaccaggccgactctcgcccgatgccggttctggagccgggaaccttggcctcgaagctgcgtcccgtcgatgcgtcgcacccgtgtgccgccgaggcgatgacggtgctgtcgaagctgggcaaccacatgtgcgtggacagtcccggcgagttctcccagcacgccaaggccgtcaccgaccagggtctgcgcaaggactcggcgaagctcgcggtcaaggacgaccgccaacagctccgccggtcgcagtacatcttcgttggcgacgtcgcctcgaagatcgccgcgttgcgtgacgaactcgagtacgaggagcgggcgttcgaggatgcccgtcaggattgcgccgagctcgatcgtgagcgcagcgccaaggaacgacgccgcgacgcgtatcgccgtgtgtgcgagcagttcacgcagtggaacgagatcgacgtcgattctgtcgatgaccgggtcgaccagctcaccgaccagtacgacctgctgatcgaggagaatcccgacgtcgaagccctccagcgcaaggctgaagacctctgggagcaggtccgcaacgcgatttcgcaggccgcgctggtcaaggacaagatcgcccgccaggactctcgccgtacccagcttctcgacctcatcgaccggctgaagcctgaagacgttcccgcccaggcggagaagaccctcgacggtttccgcgaggacctctcggcgacgctcgacgtgctcaacccggagccgtaccgccaggagatcgtcaaggccgcgagccgtgagcgcgaccggatgcggtcggatgcccggcgctcccgcgacgagctggcccgcatcctcgacacctacgacgaggagttcccggacgccatcccgaacgacagcgacgacttcgacgaacgtctgcacgactacgtcgccgtctgccggcgcatcgacgagcgcgagttgcccgccgcctacgagcggatgcgccgtctgatcaccgagcaggcgccgggcgcgatcctcggtctgcacatggccgccgacgccgaggaacgacgcatcgtcgagcagatcgaacgcgtcaacaccggcctcggcgcggtcgcgttcaaccgcggcacccgcctgcggctacgcccgggccgtaagaagctcgccgccgtcgaggagctcaccgagaaggctcgccagatctccaaccgcgcgaccgctgtcagcttcggcgacgagcaggcgatcctcgagcagtactccgacatcttgctgctgcgcgaacgcctcgccggcaacaccccggaggaccgccagtggacgcgcgacgccctcgacgtccgcaaccggttcgacttctactgcgaggagcacgacgccgagtcgggggagaccatccgcacctactccaacgccggcgacaactccggcggcgagcaggagaagctgatggcgttctgtctcgccggcgcactgagcttcaacctcgccagcccgcacggcaatgacaaccggcccatcttcgcccagttgatgctcgacgaagccttctccaagtccgacccgcagttcgcccagcaggcgttgtcggcgttccggaagttcgggttccagctgatcatcgtcgccaccgtgcagaacaccagcacgatccagccatacgtagacaacgtggtgatggtgtcgaagaccgaggctgggcctgagttgcgaccgattgctaccgctacgtcgacggggatcaaggcgttctctgagttgaggcggtcggggagtcagtttgtggtctga

SEQ ID NO: 48605 - DNA, 1461 bp, Arthrobacter sp. NIO-1057
atgcagccctcgcaccgcgcgaatagtttgtggctacaggctcaacagttcaaaggatcggcagcatttcgtcttctgacggcccagccctgggcagttgccttcattcgagccgagttcaccgcagatcgctcccgcgtcgcgctggaactattccatgcctcgttagattcattcttaaagcaggcacgtaaaagcgacgaacagattccccagtcctactctgcccaagattttgcggagagctgggtgaaacaaggcattctggcccgcccactgatcgatggccgcttcgtttatgagccaagtgcgcagaccctgcgcaccttgcgtttcctcgctgatttttccaccgacgactcacacctgaactcttcacgcttgaacacgctactgtcatccttggagtctttggtacacgaaactgaccctgatcctgaagcgcgaatcagggctttggaatctcagatcgcccaacgccaggctcagattgaacagcttcgtagtggggatgaccctgcggtgctttcacgcaccacggccctgtcggccactcgttcgctgttggatcttgcttcgagcctgccagcagatttccgtcgcatgcgcgacggcgttcaggatatgttgcattcgctgcgcgaaggcatccttgatgcttccaccgcgaagggtgtggctgtggggcaggtcctcgaagctgaccgccagctgcgttcaacggccgaaggcgaaacctttagggggttcaccgagttccttaattctcccgaggcccagcagcgtttccgctcggcgttggctgaagttcttgaacgcgactttgttgatgatcttgatgccaccgagcgtcagatcctgacaaatctgttgcgtgagcttagacgtcaggctgctgaagtacacgcatcctacggcaaactttccgagtctttgcacgcttttgttcagtcagaggaatacaaacaagccgagcttctgcgacaggcggtccgcgaagccgaactggcgatcagcaagtcatcagcgctcaaaccgcgtagtggactgacccccatggatttgtacaccccgcagctgatgaccctttccggattagggatctacgattcttcagaacatgtggcgcctcccccactagctcaggcacctgaatacagtgaagcggacatcgttcgtaacccaacaacgccacaggccaatatggcgttattgcgggaatcaatcactacacagctgaaaaattcatcaaccgcggcagtaggcatgaatgaagtatttgctgccctagatgatgaacaccgacatttgaataccatccgtgccctcgttgagataggccgcaccaacggtgagtccctcaacgacgccgagttgatcaacattgaattccaacagcttgatggttcgatgagaaccgcgatcttgcccgccctgagctttacgaaggagccgctatga

SEQ ID NO: 48606 - DNA, 687 bp, Arthrobacter sp. NIO-1057
atgaccacgagcgatgcctacgcagcacccatcgcagaaccgttgttcgaaggtgataccggaaaatactccctgcctttgcgccagctgctggtccgtcttttacgcggaccgtacctggatggctcgctcgacgctgccgcgtggcaactcttgcttgatcagcaacagagcatcagtgattacttctcagagattttcttggccttgactttggacatggatcgcaaaattgcgatgctcgctccagtacaaattgagcaagtacataccgcgccgattgctccgcgtcgcccgcttaagcgcgatgaaaccctgttggctctgcgcctgcgcctgttgttagaacaacagtcaggcagtgggaatgatgctgtcatttcccgctccgccatgcatgaaatcttggccgaacaccgtcaggccagcgaccgtgatgacaagcgttttgctgaatcttgtgaggccgctatcgctcggttgcagtcactgcgactactgaccagcaccgagctggagaacgaattccggatctccccagcgctagcgatggccctaccgctgaaaaatattgcggacatcccgcgctacatcgcggcgattgatgccaacgaaccggcctttaacctgtcggccgacgagaacgatgaacttgccgaacaaacacccgagttggtgcaggagtaa

SEQ ID NO: 48607 - DNA, 3327 bp, Arthrobacter sp. NIO-1057
atgagtattgaaatgacgcttccgctgggcggcgcaatcaacccgggccagcatcgcctcagccgagtacaaatcgttaactggggaaccttccatggacttcatgatctgtccgtggaccgagccggcacactggtgactggacaccctggcgtgggcaaatcaaccctctttgatgccatgggtcacgtcttctttgctaccccgcgactgaacgaatcggccaatgacgcggccacccgcgaagaccgccgcaccacgttctcctatatgcgtggccgccaattcaagaccaccgagggtaccgtctaccaacgccctggggctacctggagcgccatcatcctcagctacgacgacggcatgggcaacaccgtgagcgccggagctgtctttgatctgcccgatgccggcttagaaggccaagtttccaaacactatcttttgtgtgaggggaaggtcgagattgctgagctggaaaatcatggtccgcgccgtttcactgtctcttcactgtccaaggctctagcgccgagtgaagccttcgacacccacaaggccttcattgagcgtcttcgtcgccgactcggggtcgaaagcgataaggctttcgctctgttacgcaccctgcaaaatggtaagggcttagccaagggcgttaaccagttcttccgtcacgaagtactcgaagaacctgcaacgcttaaagctgcggcagctgcggttgaagacttcgctcacctgcgtggcatttatcgccagctggatacagcgcgggcccaacgagatgcgctggccgaagttccgcaccaggatcaggcctaccgtcagctagctcagcagattaccgaaacccggcagctactcgaaagtgatgtgcaggatctagaagcccaggttcggcagctggtcctgcgcaatgatctgcaatcgcatcaaggcgaactagccgccttgcagtctgaagaagaagagctacgtacgcgcaaagaacagctcgatgatcagttgcagtccttagaggctgcccacgattctgcaggttctgcctctctgatgctgttggaacgcgaagcagatgttgcccgcaaagcattgagcgaaaaagaaaacaccattcgcgccttgcagcagcaagcctcggatgcggggttgagctttgaattctctgccacgggtctagatgagttgcgtgccaacgctgcccgaactttgcaacaactggcttccatcacccaggacgctcaaaccgtggaatatgaggccatggcgtccttggtcaacctgcgcaagcgggccgagaccctggctgaacagatccgttcctaccagcgtcgtgccagcaatattgacgatcgatctatcgcagcacgccgtgccatcgcttctgcctgctcgttgcaggaagagcagctgcctttcgccggcgagctcatggacgtttcggcagatgcttcgacctggcgattggccgccgagaaggcattgcattctttggcccgcacgctgctggtccccggtgaactcatctctcaggtcacccacgctatcgaccagcttgatggtctgggacgggttcgttggaccgatatttcgcagcgccccaaggatgctgaggctggcccggcggatctggtcaccaaactcgacttcgctccgggtgaggccggtagttggctcaaggccaagatcaccgcagactatccgttgacgtgtgtcgacaccgatgccgcgatgcacgtacatcccaaggccatcaccccggctggcacgatgaagaccggtaacggaacgttcgaacgagacactcgtggacttcccgcctcagagtacttgctcggattcaccaatgaatcaaagatcgctgagcttgagtccaaggctgcccgccttgaagagaaaataacgaaggcccaagcttctgccgatgagcgcagcgctgccaagaacaaggtcgtcgccaaatcacagttgctgaaggccatcattgccgatgaacgaagcttcacccagctagattcttcaccagcgttggaagctctgcgtcgtggcgaacagaaactcggtgacgccctctcgctctcgggcgattcctcgcgcgtacgtcagcagattgaagcagctaaggccgaagctgagaagctcgtcggtgatctggcactggtccgttcccgtattcaggacctacagttgcaggtccagcgagccgagcaggtgttgtccactgcgcaagctccaggtgttgattgggagcaatcgataccactctcgctacgccagcatcagttactgggaccggtgctcgatcaagtcatttccgggaactgcccctcgagtgaaaacatcagtgaggcgttcgctgaggtcaaactgcagctgggtagccagatgaattcgctgaacagccagcgccaagacattggtagtgcgctcagtgagacgttccgccgctttgcccgcgactttggcacctcgcacgcccaaactcacggtacctctgctgaggccgctgaacactacacccagctgcacgatcagattgtggctgacggtttgccacaccacgaggcgcagttccgcgaatacttcgcgaatcgttcttacgaacgcttcagtgacctgttgcagctgcttgatgaagaacgccggatgatctctgaacgcatcaaacccctgaaccagattctggccgaggtgacgtttgagcatggatccattctgcgcttggaagtgcagaatgctattcctgtggaagctggaaacttccgcaaggaactgaaagatgccttgcaggaggcctatacgaccaaggatgaaacgaccttggctacctcgtatcaggcattggaatctctggtgacagctttgagcgatccggcgctcaacgcttggcgttccaccgtattagatgttcgccaacacgtgatcattagctgtaatgagcataagaccaatggtgaaatcgaaacgggcctggagccgggtactctctctggtggtgaaggtcagcgtttcacctcattcattatgggtgctgccttggcctaccagttgggcttcgcgtcggcagggttcacgtcctttggcaccgtgatgatcgatgaggcgttcattcaggcaaactctgaatatgctgctgccggcatccgtgccttgcaggaattcggtttccaccttgtcctggctgcgcccgaagacaagatcgatctgagtcgacatctggggtcgattaccgacatcatcaagcaccccggatctaatatctcgggcttcgtgaccaccggacgttcaccggcgatggccacgacgatcacactacgtaactag

SEQ ID NO: 48608 - DNA, 1476 bp, Microbacterium enclense
gtgacccgcacccgagccgaagccgcctatctgcgctcggtcacggcgttcaagaaccccacgctcgatctgttgcacggccggttcgcgcccttcgtcgtggccgtgctgtcggtggtgttctcacccgaccgtcccgccgtggcggtcgccgacgcgcacgtcgaggtcgccgaggcgatcgacgagctgcgcaccgcggggtacgacaccgacgacgatcgccgcatccccgccggctccgcgcgtgacatctgtcgcggctgggtgcgggtgggctggctcggcctgcagatcgaggacgacgtcgaggtgtaccgtctctcggcgcacgcggtcggcgcgctcgagatcgccggtcgcgccggtggggggcgtgcgagggtgtcacgatcgcgcgtgcgcacgctgctcgacgcggtcgatcgtctcgcccgcgacgccgagagcgatcccacccgccgacgcgaggccctgctcgaagagcgtgcggcactcgatgccgagctcgccgcgctcgatgaggggatcgtcgagccgctcgacgacgaccacctgctcgaagaggccgagaacgtcatccatctcgcccgggagctcccggccgacttctcgcgcgtcgcggaatcgatcgccgcgatgcagcgcgacgtggtcgccgagctgcgccgcgacgtgcgccccaccggcgaggtgctgcgggagtatctggaacgcggtcgacaggtgatgcaggcgacgcccgagggccgggcgttccagggcgccctgcgcctgatcggcgaccccgagaacatcgacgacctcaccgatcagctgcacgccgtgctcacccagcccttctcgcgcctgatgacccaggagcagcgcggagagctggatgccatcgcccgccgcgtcgaagcgggtgtgcaggaggtgctcacggcccaacggcgcgcctcgcacgtcatcaccgcgcaggtgcgtacgcacgacccgatccgcgaccgccacgtcgacgacctgctgcgcggcgtgatggccggcctgcaccgctggagccagacccgctcccccggtcgcgtcgagccggtgcgcaccctgccgctcgccgatgtggggcacctgcgccagtcgatcagcgacatccgacctgccggagcgcccgagcccctggcatccggagcagacgacgtcgagttcgcgggcgtcgacacgcgcgcgtggggcgggccgcactacgccgagctcgaggcgtacgtggcgcgtctgggcgacggcttcgacctcgccgaggccttctcgggagcggatgccgagacccgccgccccgtcgacctcgtgggcctgctcgagatcgtgcatcgcggcggcttgaccgagaccgacgacgtctcgatcgtcgaggccgtgcgtcccgacggtacgacgcgccggttcgctttcggggcggtcagagcaggaaacctcacagaacaggatgccgatgagtga

SEQ ID NO: 48609 - DNA, 630 bp, Microbacterium enclense
atggagaacgaccccgacgccctgttcgcgggcgaccgcggcacgctcgacgccgaggtgcgacgggtgctcgtacgcatcttgcagcggcggttcctgctggccgagaactcccccgccgagtggaagctgctgctggagcaccagcagatgatcgagtctcgcctgaacgacttgttcgtgcggctcgtcgtcgaccacgcacggggcgtcgcctacaaggaacaggtgcgcagcgacgaggtcgacgtgccgatcctgctgaaggacgaggcgtactcgcgcgccgagacgctcgtgctcgtctacctgcggaccgtgttccagcgcgagacgaccgccggcacggcatccgctcgcgtcgatgtcgaagaggtcgagcagaccgtgctcacctacttcgccgagtccgacggcacgcgcgccagccagcagcgcgccgtgcgcacggcgatcgcgcgcctggatcgcgagggcatcatcgaggaggagtccgaggggcgctaccgcatcgggccgctcatcgaggtcgtgctgagcgcggatgtgctgcgagacctgcagcgctggctcgacgagcagaccgagtcctcccccgccgccgacacccccgagggagttctcccatga

SEQ ID NO: 48610 - DNA, 3351 bp, Microbacterium enclense
atgaccatgctcgagaccctcttcgggctcatccccgccgcctcccgcggacagcagtgggtggccgaagacctgcagctgatcaactggggcggatacgacggcacccaccgcgtgcggttcgcgccgaccgcgacgctgctgtgcggcggatcggggtcgggcaaatcgacgctgatggacgcgtacgtcgcgctgatgatgccgcacacgacccccttcaacggcgcgtcgaacggcgcggtcgtggggcgtccgcgtgggcaggagcagcgcaacatcctgtcgtacggccgcggcaagcttgacgaatcgcgcaccgacgagggcacgaaggtgcgggtgttgcgcggcgacggcgtcgacacgtggacggcgatcgcgatgacctgggccgaccacgacggcgcccggttcacggcggtgcgggcctggtacatcccggccgcggcacgcaccctcgacgacgccgtcaaggtgcgcgccaccgtgcacggcgccttcgacctgcgttcgttggagacggcggcgcagagtcacctggcggactcggcggtgcgggcgacggggctcgagaccctcgcgaccgaccgcgagttctcggcccgcctgcacgcggtgctcggcatcggtgcggcgggggcgggcacgaaggcgatgagcctgctcgcgcgcatccaggccgggcagcagatcaccaccgtcgacgacctctacaagcgcatggtgctcgaggagcccgagacgctggcggtggccgaggccgtcgtgtcgcacttcgacgggctcgagtccacgcgcacgcgcatgctcgaggcgcgccagcaggtgcgggcgctgcagccgatccgcacgatgaaggcgcgcatcgacgaggcgtcggagcggctgcgtctgctggacgagctggggcgcttcggcgaccccgaatcgcgcgcgtcgctgtggcgggcgcagcggcgggtcgacctgctcggcgccgtcgaagacgaactgcgcgagcgtacgcacgccaccgacgcgctcgtgcgcgagcgacaggccctcgccgacgccgccgaggctgaacgcgaggggctcggtgacgtgctgcgcgcggccggcggcgaccggctcgacgcggcgcagcgcgagctgcgcgcgctcgagcagcggctcgccggcatgcgacgcgatcgcgagcggttcgagacggccgtgagcgtgttgtcggtcgaggtctcctcggcgaagcagttcgacgctctcgtcgccgaggcccgccgaacgcttgccgacgcggatgccaagaccgcggtgcgcgacgcgttcgtcgccgcgagcagcacgcacaccgacctgcgccggcagctcgccgcgctcgagaccgagcaccggcgcacgcagacacgcgacgacaacatccccccgcgcttgcacgaggcgcgcgaggcgctggccgaggccgcggggctgacggccgccgagctgccgttcgtcgccgaactcgtcgacgtgcgcaccgagttcgagccgtggcgcggggcgttcacgctcgcgctcggcggtttcgcgacgacgctgctcgtggatgccgcgcacctggcatccttccgttccgcgatcgacggcgtgcggctgtcggagcgcctgcggttcgagggcgtgtcgacgggactccccgagcgcaccgggctggatccggcggcgctgccgggccgtctggagtaccgccgctcccccttcaccggctggctgcaggaccggctcgagcagcagttcgcgttcgtgtgtgtggattcgcccgccgagctggccgttcatcgcctggcgctgaccatctcgggccagaccagccagggctcgcgcggcgcgcacggcggctcgacccggcacagcgtgctcggcttctcgtctcgcgtgcgtctgaccgagctcggcgagcagatcgtgaccgtgcgtcgcgacctcgccacggccaaggccgcggtggatgaggcaggggccgccctggatgcgttcgatgagcggcgcagcgccttcgagaagatcgcggacctgtcatgggggcaggtggacacggcatccgttctgcgcgatctcgaacgctggaacgagacgatcgtcgagatcaccgcgggaaatccacgcatcgcggagctgcaggaacagatctcggggacgcgttctcgcgccgcgcggctgcgcgaggagatcggcggggccaagaccgagcagcaggcgctcgcggcgcggtgggcggagatcacggacgacgtcgacgccgccaacgagcgcatcgaacgggcggaagacgccgacctcgtgctctcggcggaggaagccgcgtacctcgacggactgttcgtcgcgccgtctgacgacgcctcgccctcgcagctgctttcgcgcttcgacgccgcactggaatcggcgtcgaagcgtctgctcgaggagcagcgtgcggcgcaggagaccttcgccgaccagcgcgagagcctgcggcgcacgctgaccgcgttcaccgatcggtggccgagccccaacctgctcgcagaccccgacgagtcgctcggggacttcgagaggatcctcgccgacctcgaagccagcggtctgcacgagctcgaggcggagtggcgcgattcgctgctgcgcctgtcgggcaacgacctcacgagcctcgactcggcgctcacgcgggcgcttcgtgagatccgcgagcgcatcgcgccgatcaacgacatcatgcaggacctgccgttctacgacgacgagcaccggctgcagatcgtgccgcgcgagaaccagtcggaggtgcggcgccggttccggcgcgagctgcgggacgtgcgagcggcgatcgacgcggcctcctccgacgaggaacgcgaggcggtctacgggcgcatggcgaggctgatcgggcggatccggccgaccgcgcccgattacgccgacctcgtcgacgtgcgcaatcacgtgcgggtgagcgccgagcgcttccgcgccggcaccggcgagcacgtcgccctctacgaccacatcggcgagaagtccggcggcgagtctcaggagttgatcgccttcatcgtcggtgcggccctgcgctatcagctgggggatgccggggcggagcggccgcggtacgcccccgtgttcctcgacgaggcgctcatcaaggccgacgcgcacttcaccaagcgcgcgatcggcgcgtggcgcggcctcgggttccagctggtcatcggcgcaccgaacgacaagtacagcgcgatcgagccgcatgtcgatgtcgagtacgacatcctcaaagacactcggggacgctcgtgggcgaaggcgaaggtgggactgccggcggaggggtga

SEQ ID NO: 48611 - DNA, 1431 bp, Mycobacterium smegmatis
gtggattacgacgcgatcactgcactgcgtgaccggcatccggcgtggcggctgttgcgagcgggcaatgcctcgttggtcttgtcgttcctgggggagttcttcgtggaggccaaccgcggtgcatgcccggcaggccaggtcgcggaggcgctggacaaccatctctacgcgctcagtgccggatccggggagagtcgctatcccaaggagccgcgcgcgtatctggaggactgggcggccaccgatgccggctatctgcgtcgattctacccgccgggtgacgacgaagtgcactacgaggtgacaccggctttcgagaaggcatacgcctgggtcgtcaaccttcagagcaggtccttcgtgggaaccgaatcccggctgcacaccgtggtcgcgctcctgcgccagatcgtgcacggcaccgaggtccaacctgatgtccggctggccgaacttcgtcgccgccgtgctgaactcgaggcggagatcgcggctgtcgaagccggcgacatcgccgtgctggatccgacagcggtacgcgaccgctaccagcagttgtccaccaccgcgcgtgaactgctgtcagacttccgcgaggtcgaggagaacttccggctgctggaccgagccgcccgcgagcggatcgccgcgtgggagggctccaagggcggcctgcttgaggaactggtgggcagccgttcggagatcaccggctcagatcagggacgcagctttcaggcgttctacgacttcctgctgtccgagcagcgtcaggccgaactcgccgagctgatcgccaaggtgtccgcactcgacgtcctggaagccgacccgcggatacgtcgcatccatcacgactggtctgaggccgcagaccgagcgcagcgcacggtgcggcagatctccgaacagctgcgccgcttcctcgacgaccaggtgtggctggagaaccggcgggtcctggacctggttcgggcggtggagagcatcgcgctggaagttcgcgatgccccgccgaccttcgggctggaggtcgacgaaccgggcatcgagatcgcgctgccgtttgagcgtccgctgtatcaaccgccggcagaggtggcggtagagagccacgtctcggcggcgaccgaggaggtcaacgcggacctactcttcgcgcagacatacatcgaccaggcacgtctggccgacaccatccgcgccgtgctgcccgaggactcgtcagccctgctgtccgatgttgttgcggtgcacccgatcgagcagggggctgccgagattgtcggctatctcgccctcaacgaggacgacctggcaatcgacgtggatgacaccgaggagaccgtcctggaataccccgacccagccgacccggacatcaccaagcgggcgagactgccgaaggtgacggtgcgacgtcgatga

SEQ ID NO: 48612 - DNA, 579 bp, Mycobacterium smegmatis
atgagcaacgaacgtgcagtggcaaccgccatcattcgtctgatgcagggcgtcgtctaccgcgatgcggatgaggacacgtggctgacgctggaacgtgcgggggccggcgttcgggaccacttcgccaccatcggaatcgatgtggtggtcgacgacgccgagggttacgcctacctgcgctcccggccttcggaggacggtgaggaggagttgccgcgcctggtgcgcaggcgcgcgctgacctacaacgtcagtctgctgctggtgctgctgcgtaagcggctcgtcgagttcgagaccagcggcggcgacggccgtctggtcctgagcaccgaacagatcgtggagatgctgcggctgttccaagccgactccaccaacgacgcccgagtcgtggaccaggcggagaccaccatcaggaagaccgcagagttcggcttcctgcggcagctgcgcgggcagcgcgaccactgggaggtgcgacgcatcctcaaggcctatgtcgatgcccagaccctgtcggacttcgcggccaaactgcgccaatacgctggagcaggagcaggcgatgagtga

SEQ ID NO: 48613 - DNA, 3384 bp, Mycobacterium smegmatis
atgagtgaaacgatctctcggacagccgaactgagcgtgcgtcccggggcgggatatcgactccagtacgccgagatctacaactggggaacgttcgacggccaggtttggcggttcactcccggcgccgagaccgcattgctgaccggtgacatcggatcgggcaagtccacgatcgtggatgcgctcaccacgctgctggtgccgtcgcacaaagccgcttacaacaaggctgccggcgcggacgccaaggaacgcaccctgcgctcctacgtcgaaggccattaccgatccgaacgaaacgaggccaccggaaagtctcggccgaaggggctgcgggagaacagacggacctactcggtgatcctcggtgtcttccgcaaccacggccacgacgagacggtcacgctcgcccaggttttccagcagcgtgagagcaccggacagccctatcggttcttcgtcaccgcaaccaaggagctgtcgatcgccgtcgacttcgccgacttcggctccgatctgcgcgaactgcgaaagcggctgcgatccgcaggagcggagatcttcgacgagttccccaagtacgcgacctcgttgcgacggctgttgggaatccgatcggaacaggcactcgagctgttccaccagacggtctcgatgaaatccgtgggaaacctcaacgatttcgtgcgcgaccacatgctcgagccgagcgactcgaccgaacgcattcgcgagatcatcagccacttcgacgacttgaccagggcccacgacgccgtcaagcgggcacgtgagcagctcgaagcgctggaaccgattgccgacactgcggccaaatacgatgccgcactggctgaacgcgacggcctggagcacgaacgatcggcagttcggctcttcatcgccgaactccgttccggacttctcgccgatgagatcggtcggttagaggccgacggcgccgctctatggcagcaacaggatgccgccgaagccgaccagcgcagactcaaccacgaacgcgactccctgatcgaggagcgtgccaaggccggtggggatcgcatcggcgagttggagcggctggcccacgaggcccgtgcccaggccgagtcacggcggcaggccaggacattgttcgactccgcggtcggcgaggccgggctgacgaccgtcgccgatgaagaggcgttcctcaacctgcccactctggtcgctgccgaacgcaccaggctggccgccgagaagcgcgaggtcgatgccgccactgtcgacgcgatcggccgtgagcgtgactgtgaacgcaagtgcaccaccctcagcgcggagatcgagagccttgaacagcgcaccagcaacctgcctcatgagcaggtcgtgatgcgcgaagagttgtgtgccgcaatcggactgacaccggagcagctgccctacgccggtgagctcctcgatgtgtacgacgaacgcgccgagtggcgaggtgccgctgaacgagtgctgcggggcttcgcactctcgctgctggtgccgcagccgcactacgacgccgtgacccgatgggtcaacgaacgcaggctcaccgtcgccggcaggggtgccaaactggtctatgagcgggtcgctgcgcgccgcgtgcggctgcagccagcggagtctgacgggctgctgctggccgactgcatcgaagttcgggagggcccgttcgaggagtacctccgcaacgaactgatgaagcgcgccgacttccggtgcgccaccacactccaggagttccgtgacctgcgacgcgcggtcacccgagaggggcaggtgcggtccggtgaccggcacgagaaggacgatcggcaccgcgtcgacgacccacgccgctgggtgctgggctgggtcaacgaacgaaagctcaccgccctgcgcgacgagttcgccgacctggaacgcgatcggcaggaggccgctgccgtcgcggccgccctgagtgcgcgcagggaagtgctgcagcatcggctggacgcccttgtgcgaatcgagggctttcggtcctggactgagctcgatgccgacgaggccgtatcgcgcgccggggcccacgacgcggagcgggctcggttgcagtcaggatcctctcgactggaggagatcacgagggcactggaacgcaatgccgaagaagccggcgttgtcgccgagcggatcagacaactcaccggtcagctcgccaccacggccgcagccgtgcagcgcgcgcagcaggaccgaaaacgagatcaggagttcgtgactgcacagtcacccgagcaactcgaggtggcgcgggcgtcctaccccgctctcgaccgccggctcgctgcgagccggcccactcgagccgacgactgcgccgccgccgagtcggcgctgtcggaagacctgtaccggcgcatcgagcgattgacccgtgagctcggcgggtatggccagagcctggcacagtacatgctggaggtgcttcgccggtggcccgagctgcgcgcggacatggacgccaccgtcgacgcgcgcggcgacttcctggcgtttcggcaccgcgtggcgaccgacgacctgccgcgattcgagtcagagttcaaagaacagctcaacaagaacgccatccaggagctggctggcttcaacaactggctcaaccggcaggcctcagccatcgacgaacgcatcgaccgcatcaacgaggcgttgggcgcagtgccctacaacccaggccgcttcatccggttggagaaggagcccaccaccaatcaggatgtcgcacagttccgttcagatcttcgcaacttgaccaacgacgcgctggcggtcgatggcgaccagtattccgaacagcgcttcctcgacgtgaagcggatcatcgagcgtttccgaggtcgcgagggctacgccgaatcggaccggaactggacccggcgggtcaccgatgtccgcaactggttcgtgttctcagcctcggaacgagacgtagacacgggcgccgagtgggagcactacagcgactcggacggcaagtccggcgggcagaaggagaagctcgcctacaccatcctggcggcgtcgctggcctaccagttcgggctcgaatggggcgccgaggagtcgcgtgacttccgcttcgccgtcatcgacgaggcgttcgggcgcggatcggacgtgtcgacacggtacgcgctcgatctcttcgcgactctcgggctccaactgttgatcgtcacaccgctgcagaaggtgcacgtcatcgaaccgtacgtgaaggcgatcggcatcgtggacaacccgaccggaacgtattcgcgtctgcagaccatgacgatcgaggagtatcgcgcccggcgcaacggaacgcggccgtga

SEQ ID NO: 48614 - DNA, 1161 bp, Mycobacterium smegmatis
atgtgggccacacccggtgacatcgcggccaaggtcaggcgccgctgggacgacggctccctgctgcgcgcctacggaaagggggagccgttcgcgccaatcgagctgccgcttcgtggtcccaccccggcgcagatcggtgacgacgtcgcacgtgtgcgcgactgggtgacggctctcgacgcggggcggcacgacgatgcgcggtacatgctggaatggaagtcggtgggcggcaagaagttcggccgcaacatgcttcccgctcgtgcggtgatctgctcatacggccaggcgtggacactgctgggggtgacggcggctgttgggcgtttcgacgagctgctcgcgtcggcgcacgatcatccccgaattcgtcaatgggtgatcgccaacccgcaccgggcgctggcactggcggcggacatgccgaagctgatcgcggcttgcgagtggctcgaccgacaccggcactcgcagcgttacctgcgcgagatcagtgcgcccggcgtggacacgaagttcgttgaacgccgccggtcggacttggccgggattctgggcgtgccatcctcggcccagggattcctcaccgaactcgggctacggtccaagcccagccttgttcggctgcgaccagcaccgtcgctggggctaccggcacctctctcggagctcgcggtccggcctgatgaattggcgcagctcgacctgcggccacgcacagcggtgatcgtcgagaacgagatcagctatctcagcgtcgacgtccctgaagctggtgtggtgatctgggggaagggcttcgatgtcgacaacgtcgggcggctgccgtggttggccggtgtccgcgtcgtgtactggggcgatatcgatacccatggatttgcgattctcgaccgacttcgggcgtggctgccgacagtagagtccgttctgatggaccgagccaccctgatcgcccatcgtgaccgctgggtggtggaggaccgtcctgctaggtcgatcctgcctcgactgtcacccgaggaacagcagctctaccgggaactcgtcgaggacagcctcggcgatcgcgtacgcctcgaacaggagcggatcgactggggctgggtcgagggccgattgaaggcgatctatcaaggtcgtatagattcatga

SEQ ID NO: 48615 - DNA, 1467 bp, Mycobacterium smegmatis; identical to SEQ ID NO: 41770

SEQ ID NO: 48616 - DNA, 723 bp, Mycobacterium smegmatis; identical to SEQ ID NO: 41771

SEQ ID NO: 48617 - DNA, 3357 bp, Mycobacterium smegmatis
atggcatctgaaccgaccaaccagttctatctgtcacgtctgcaggtcatcaactggggcgtgttcgacggatatcactcgatcccgttcagccccgcgggcacgctgatcaccggttcgtctgggagcggcaaatcctctctgctggacgcgatctcgctggcgttcctaccgtcacaccgacgcaacttcaacgcctcgggtgacaccaccgcggcgggttcgggcaccggcaagcgcacggtcgacaagtacgtgcgcggcgcgtggggcgaacgcagggacggcaccagccgtcagatcatgtacctgcgcggcaccggaccggcctggtcggccgtggcggtcacctactccgaccgcaccgggcgtgccgtgaccggccttgtcctcaaatggcttgccgccgagaagacctcggatccaggaagtcgctactacctcatcgacgacgaccgcgacatcttcgacctgtgcaaccggtgggctgcaggcgggtacgacgcctcggtgttccgcgaggcgggctggaacggcggccgcagcgagagtcagtacctggcgcagctgtactcgatcatcggcatccgggcctccgaggcggcgcagcagctgctcggaaaggccaagtcgctcaagagcgtcggcggtctcgagcagttcgtccgcgagttcatgctcgatgagccggcgagcctcgcgggcgtcgacgaggcgctcgagcagatcaacccgctcgtcgaggcgcgcggcatgctcgacgtggcgcggcgcaaacgcaacacgctcggcaacatcgaggccgtgcaggcgcgctacgccgacgaggccgcgaagttcggtgtgatcgacacgatcgacaacgccatggtgcgcgactacgtcgaccagttgcggctgcagcaggcgggcccggagatcgagaacctcgacgaccagatcaaccagctcggggcgcagcgcgacgacttcggcgcgcagcaacgccagctcaagaacgagcacaacgcgttgatggcgcagatcaactcggcctcggtcgatctcgtgccgctgcagcagcggctcagcgaggccgagaagctcgccgacgaggtgggccgcaggcgcggggcgtacgaggacaaggtcaccgcgctgcagctcacaccgcccgacacggccgaggagttctggtcgttgcgcgagaccctcatggaggaggccgaccggctgcaccgcgagctgttcaccggcaaccaggcctacgtcgaggcgtcggcgaaagaggtgcgtgcccgcgaggcgcgtgacgccgtccagaccgagctggaacgcgtgcggcgcctcggctcgtcgctgcccaagaccgagtacgagatgcgggcccgcatcgcgcgggcgatcggcatccccgagcgcgacctgatgtacgtcgccgagctcatggagctcaagcccgatgagagccgctggcgcatggcggtcgagaaggtgctgcgcggcgccggtctgcggctgctcgttcccgaggcacacctcgacgcggccctgcggttcgtcaacgagaacgacatgcgcgggcgcatccagttgcagcacgtcaagcacgacgcccagttgcgcacacccctcgaggggacgctggcgtccaagctgcaggtcgtcgaccccacgcatgacagcgcggtcgaggcgctcaacgtcatcgcgtcggtcggcgactacatgtgcgtcgacagtcccgacgagttcacgacacacacccgtgcggtcaccgaccagggcctgcgcaaggacagcgggcggctgtcgatcaaggacgaccggtccaagcttcgtccgtccgactacatcttcgtcggcggcacggaggcgaaagtggccgcgctgcaggcggatctggccgcggcagaggatgtctacgcggcggcccgcaaggcgcgcgaacggctcgaccagcaccgcgcggcgctgcaggcgcgtgaacgggcctgccgggcgctgtgtgaccagtacatgcagtggaccgacatcgacaccgactcggcagacgaggcactgacccgcctgcaggacgaactcgatctgctggtgtccgacaaccccgacgtcgagaaactgcagcagcgcgccgacgaatgctgggggcgcgtcgagaaggtcatccagcagatcggctcgctcaacgaacgcgagacactgctcgacaaccggcgcaccgcacttctcgagctcaccgagcggctcaagcccggcgagatctcgcagcatgcgcgcgacaccctcgacgggtacgcagcagacatcgcgctaccgctggacctgctcgactccgagccgttccgcaacgaactcgtgcgcgtcatcggccgcgaacgtgaccggttgcgtgccgaccgcaaccgcagccacgacgagctcgcgggcatcatggcggcctacgacagctcgttccccgacgcgatccccaacgacagcgacgatttcgacgagcgcgtgcacgactacgtggcgctgtgccggcgaatcgacgagcgtgaactgcccgacgcctacgagcgcatgcagcggctcatcaccgaacaggcacctggcgcgatcctcaacctgcacatgatcgccgacaacgaggcgcggcggatcaccgagcagatcgcgcgcgtcaacaccgggctcggcgcggtcgagttcaaccgcggtacgcggctcacgctgcacgcgggcacgcgtcacctcgcggccgtcgacgagctcaacgagatggcccagcgcatctcggcgcgggtgtcactcgtgagcttcggcgacgagaccgcgatgttcgagcagtacaccgacatcctgcagctgcggaaactgttggcgggcaatacgcccgaggaccggcagtggacgcgcgacgccctcgacgtgcgcaaccggttcgtgctgtactgcgaggagcgagacgccgagaccggcgtggtgatccgcacgtacagcaattccggggacaactcgggcggtgagcaggagaagctcatggcgttctgcctggcgggcgcgctgagcttcaacctcgccagccctggcagcgccgacaccaggccgatgttcgcgcagctgatgctcgacgaggcgttctcgaagtccgatccgcagttcgcgcagcaggcgctgtcggcgttccgcaagttcggattccagctggtgatcgtggcgaccgtgcagaacaccaccaccatccagccgtacatcgacagtgtcgtgatggtgtcgaagtccgacgcctcggcgcccaacgccaggcccgtggcctcggtgaccgcggcgtcgatcgcggagttcggcgaactccgccgcggggccgagcctgaggcggtcccggccccgtga

SEQ ID NO: 48618 - DNA, 1407 bp, Phaeobacter sp. CECT 7735
atggttgcttcgatattcggttctttggagccaagtcagttcaggatcttcagcaccgaaaacgcaaccttctatgcggacttggtcgaataccttgcaaccgaggtgtttcgctttgcggcggaaaccattcgcaagaaacaggttcagcgcgccattgaagacttcatcctggcacgtgaatggcaagccagcctctccagcgaagaaggtctcctagatgggccggtacattacgcggtctaccgccaccttgtgaaatccaagtggctggaggaaggccgggatggcctcagaaccgttgttgacctcaacagtgaagcgcgccttctgcttcaagcattactggacatcaaatccggaaaggttcgctcctttggcggggaagtccttcaggtgaaaaccctgatagacgcagttcgtcgcgacccggaaagcacatcagagaacttgacctgggcaggtgcgcacgctgagcgcttcatgaccaatctacgagcaattgttggcgctatgcgcaaggtcgagcagagtatgaagggtcagtccagtgtatccggcatgatggacgctttcttccacaactacatcaccgataattacatcgcggacttcagaaagctccgcggtgaaaacagcccctaccggtttcgccatgacctcgttgaagatgtacgcgccatgatggaagacgcccttcttatcaacgtgctttcctcggcctttgttcgcgaaggccgagccccctctctggaggaggctgaagacaacatcatcaactctctgagtacgatttcagaggtcttcagcagtatcgacagccacatcgatatgatcgaggcaaccaactctcgtatcgagcggcgcgtactcaacatcaatcgcttccttagccgcatgggggatgaccagacaggtcaatttatcgatgccgccaagcgtctggggcggtcgaagcttaccagtaaatgtaagcttccagtcagatatgacgtaatggatgtgcttcctcattatgaccgcggctcgctgcataaatcacggccaccacgaaagatcccggcgccggtcatcgcaagaaagcgtatgaaggatccagccttagtggcctatgaggccgccaagcgtcactatattgatcggacacgggtcaacccagatcgggttcggcaattccttgatgtcaaaatgggcaaggagatttctattcgggcatctgacatcaagattggctctttggatgagttcttcatttttgaacgcctgttgatcatcaagacgatcttccccgatgaccttaaagaagtagagatcaagcggctcccaactccacttcagaacgagtggattagttgttccgatttcgaaattaaaaaacgcgccgaaacattggagatttcacaatga

SEQ ID NO: 48619 - DNA, 843 bp, Phaeobacter sp. CECT 7735
atgatgatgctggatgacttcgagcgcgctctcgaccgcgaaatcaagtaccgccaacaaggaggcgacaatataacgaaggatgacgatgacctaatcgttgaacagttccagaaagcagcccgccaactcattgagcggcaggttctacatgctgatgaccgccataaaagcgtctaccgtctaatctgtcggcacgaaccctacttcgaccgcctcatgcatgggctgggctacgtcctcctgattgactcgatctacgaatacatcatcgtgatgccgggcaacgtcgatggcgccacacgacgcggaaaacttaaaaaagacgaaagcctccttcttttgacgttgcgcatcatgtgggaagaaagctcccgcgacggtgaaatggatgatcttggtcgcatcctgatcgataccgactccctgcttgatcgcctgaccacactgggtggcggaaacaccccgagtaaatcccgcctcaaggaaatgatggatctttggcgaaccaaggggtttgtccggattggcgaggaagatcgtgaagaggagatcatcccggtcacgattatgccggcaatcaaacatctggttacacctgacctcgtgaaggagatcgagatcttcctggatgccgaggaccctgaaagcgatgtcttcgtaaacatcgagaagaaccgcgtcgcggctgaagatgctgttcgacagaaagctctgaacacctcaaaaaaagaagaggtcctagagactaacttcttcgacgacctgcatgccgacattccccaagaagaagacacccagatgagcaactccaaggttgccgaggagatgcctgatgtttga

SEQ ID NO: 48620 - DNA, 3603 bp, Phaeobacter sp. CECT 7735
atgtttgagctcaagcgtatcagcgtgatgaactggaacctcctcgatctggaggatatcgaaattgacggcatcacagccatcatcggaatgatgggatccggcaaatcgacacttctggatgccattcaaaccgtgaagacgggtaatcaggtatcaaagctgagtctcaaccgggccgccagttcgattaaatcgacccgctcggtcaaggaatactgcctgggtgttacagaagacaccatccgtcttggtgtgactagggatgcctgtcacagcatgcttgtcctgagctatcgagatgacaaactgaatgcggaatgcgcggtcggcatcacgatgtttgccgataaggatgaacctcgtgagcacaccacctgtcgcttcatcgcagagggcacgatgttctcctttgaggagtttgcagaccgggaagcagatggcacgcttgtcgttgatagcccggagattatcctggagcgcgttcgcgaaaaatcaggtcgtggatactcggtgcacaacaactctgccaaaggctttatcgagaactacttgcgcgcgatgcgccctaaaggcgccactcccaatgcggatgactacatccgtcgtttccgcaatgccatcgcgtttcaggaaatcaaggatccgacagattttgtgcggactttcgttctggatgaggatcccatccaaactgatcgactgcgttccaaccttcaaacctgggatgagatctcagattcactggagacactgaaaaagaagatcggtgacgcgcgctctttgcgtgctgcctacgcaagcgaagcagagtcgattttcacaacccaggagaacgcctatcaggcagcctggtccaaagcgcagatctccgaaatcaaaagcgaagaagccagaggtaaagcgcgccaggccgatgttgacctggctgatctctctcaagagcggtctcgtgttgaccaaaaaattgaacgtgaagaggccgctcgagaggcaaaaagagagcagcacatggcctccagctacactcaatcgcaggcggttgcagaagccaggatcgccagtcaggaaaaggatgtcaaaatctccgctggcaagctcaagggaattctggagcagggagcatcgttgcgtaacatcgatgatttgaagcgctttctgcctgcatcggcgggctgtatgaagattgcagctgagcgtctggagcaaattcgacgagaatttaccggctctggaaccctacctgtagatactgctgagatctccaagctcattacgaccgtaagtgacactgagagagttgttgcctcgctgaacgctcaatacgaagacatggttgttgagcagcgaaagactgaagatcaacgttccgaaaaactgcgccaactgcggtctcgtgagcagggtggaaagggcatggatcaacaggttcaagacttcatcgagtatcttgttgaggaaggtatcgttgctgaagccctacctatgatggtggaggtcactccaggcatggaagactgggtacgagcacttgagacacggcttggagccttcaagcaggcagtctatgtcgatccgaaaaactttgaccaggcttatcaaattcttcggaaccgcaaacaggctaccggccgcgggtatgagcgcgaacaccgcaactggaaggttcgcctgatcaacacgcaaaagctcgcacgcggcaaggggttacgcaatgcagcatccaatgccatcgtttcgatccttgagacagacaatgacctgatcagaaagttcttggactcgcagttcggcgggacagtaatggtcgatacgctcgccgagctgaagcagcagtcggacgcaatcatgaaggacggatcccaaagccaagggttctctgttcgcgtgaaccggatgggttctcctattctgggcagggttgcccaagaaagcctcatgtatgaactccagacacaggttcaggatctgacatcgcaaatcgaacgtcgcaagactgacatccaaagactgaagagtggggcctcgattttccattcagttggtcaactcgatccaggggccgccggggcttttattggtgaaatcgaagagggcatcaagaccctcaaaaacctcgaaaatgagcgtgatgcagagctttcagatgatgagcgtgagctgattgctgacatcaaaacacatggcgcgaacatcaatcagctcaagatatacagagatggagatctcgaggatcgcaagaataagctgatcagagagcaggcgagggcgagcgaaaaggtccgtgaggaagacagtgctcgtgcgcggcatcaggctgagtgcgataaccttgcagaggtcgacaagggcccggaaaatatgcggtggcggaatgccctctatcatatggaccaccctgcaaggggtcgctccatcgcggcgctgaccgctcgccttggtcaaatctccaggcaggatgaagcctggcacatcgacaacattgagaggcttcgcaaggaaaaacgtgaagagcttgatgccaatagtgaagctgcggggcgccgagctcgccggatgcgcggcattgccacctatttgtctgaatatggcgaggacatcgaacttgcaaagaagtctgcgcccgacattctgaactggctggtgtcccacgttctccacatggaagacaatgaacttctaaagtatcagactcagatcgaagagtttcggaagattacccgtcgggaggtgcgcgaggttttcatgaccaagctcaatgacaacctcaagatcgccctttctgaaatgcgcaagctgaacaagcgtatccggcgccacaagttcgaaggcatgacctatgtctttgactggaagatcgatccgaccatgaaacccctctaccagatggcaaagcgggtctcggacgaggcagacaaggcgggaacactcctcatggagggtggagacgaagttctgaacgaggcagttgagatcattcgtgagatcttcaaatctgaagaaggcgccgccaaattcgaggactatcgacagtacttcgaatttgaactggtgatgacccgagacgaggtcactgatgccgatatcgacaatcaaggtgttgatggcctgaagacagacatcgccgtgacaggcaacctgacggatcggatcggcaaaggctcaggtgggcagaagcaaacaccctactatgtcgctatcgctgcatctatggccgcggcctattatccaaatgcgcgaccgggcgaaagcatgggcatgggactcgtctgctttgatgaggccttcaataagcttgatatccgcagcacgcaggagctcattcgcctctaccgcgacctggatctgcaaattttgattgccgctccagaagagaagcggaccagtttcatggaagtggccgataccatcgtcactatctccaaagccccaggcgccccggaactcttcattgatgtggagaggatcggcgaaaagacaaaagacgagctgcgcaaagccaacccagaacacgttggaatcgctggcttccgtcagaacgtgctatctggctacatcggccagatggcacccaacaatgcttcaacggagcctgctgaatga

SEQ ID NO: 48621 - DNA, 1176 bp, Phaeobacter sp. CECT 7735
atgagcgcgagaaagcgacatcaggttgcaggagagttgttcgccaaacttcttgaccgttacgaggcggcagagcgggatgggcgactaggaccaaagattagagagttcgtattccaggcgttccgagatcccgccaagcaaaagcggtttcaggaagctgttcagcacgcccaacgcatcggggctgtccatgtcgaaatgggcaatggtgacctctctcacttgatgaaatgtgtagtcctggctgatgccgatgtgctctacaaaatgactggtcgccaaccaaaggcaggcaagctgacaggcgccaagggggctatggagagcttcttaggcactttgcctgataaacatcgaagacatgccacacaggccatggagagacttctggagcattgggaacttaacaagcgcccacaccgtttgagcgaagataaccttccgcccgtcaaagaatacctcaaagcctacggagccgcgctctctaaagatgtgacagatggtcgagacctgcgaacatactccagggtggagtgtggtgactccaagttgatcgagcgtcaactaacacggatcatggctgaactccgggcaatcgagttttatggagccgatgttgaagacgacatgatccgatcagacttagggctggagaagtttccccatcttgttcagttcacggctgacattccattttccctggcgcattttgaaaaaaaattacacatgggaatccatccctccatcatcgaaacgcttgaagtcaccccgctgcgtgctctcgtaaccattgaaaactacgcaagcttcaatcgctatatcgcagaggctatggctccaaatacggccgtcctgtacacaggtggctggccgggctcaggtgagaaacaactgatcgccaaactttcggagcatgttagtcaaggcgtatttcattggggtgacatcgacatggctggcgccgccattgcggatgcagtggcacgcagttccaaggcgcccgttttcctacatcaaatgtcacctgatctggcgcgtgagcatggtcagcctcgcatcgccaaggcaatctctgtttcgaggaattctccagcaagtgaactgattttatggctttcttgcgaaggtgccttcaccttagagcaggaagagctggacccagtgccggtctga

SEQ ID NO: 48622 - DNA, 1479 bp, Rhodococcus pyridinivorans KG-16
gtgtcgactgccgacctgtaccgcctgacgcggctgcgcgatcagcacgccgcgtggacgctgctgcgcgccgaccacgcccccgcaatcctcgggatgctgggacgacacttcgatcggggaacccggcgacttcccgcccccgaactgttcgcccgcctcgacgcagacctgcaggacctccgcgaccagggattcgaccttccacgcaccgcccaggcctactgcgcagattgggtgcgcgccggatttctgctccgacgtgccgatacgggctcgcgcgaagagacgctggagccgaccgagtccgcattcgtcgcactgaatttcgttgcgcaactgacgaccgacaccagttcgatcacggaatcacgactgacaaccctgtcgagccagttgcaggcgctggctcgcgattcggacccacggagcgaaacccgtctggcaacgctgcgggccgagcgcgacgcactcgaccggcagatcgcagcggtggaatccggcgacttccctgtcctcgatggcccacgggccgcggaacgcgtgtcggagatcctcgcgcttgccggcgagatccccggggatttcgcgcgagtacgggccgaactcgaagggctcaatcgcgagttgcgcgcacggatcctcgacgacgaaggcgaccgcggcgacactctgggcgaggtcttccgaggtgtcgacctcatcggcagttccgatgcaggacgcagcttcaccgggttctacgacatgatcatcgatcctgaacggtctgcacagctcgacgactggatcgaggcggtactgactcgtccgttcgcccggagcctgtctcccgagcaacgtcatcggttccgatccttgctcaccgagatggaggacgcaggtggcgaagtgcatgcgacgatgacgtcgctgtcacgctcactgcggcatttcgtgcagtcccgccattacgaggaacatcgccgattgcaacgtctgttgcgctcggcgcaacagcacgctctgcaggtggcaccccaccgcaagccttatgaaccgctcgacctcgacctggtgcggatcggcatgagtatcgaatcggtcgcggcattacagttgcacaatcccgcagacgatctggtggccgaaccggtggtgtcgcagacgccaggtgaggtcgacctcgacgatctgcggcgcatcgtccgcgaatcggaaatcgacatggacgagctggtcggtagcatagcggccacactgcgcgtgcgcggtagcgcgacgatcggcgaggtcctgcgcgaacatcccgcaacccaagggttggcaagcgccatcgggcttctggttctcgccgtcgagcacggacaccgcgtggagggcgatgaggagatttgctggagctccccatccggcgtcgaacgggtggccacggtacgccggcatctgttcgatcccaccgatcctgccttcaccaccttggaacaggacagcctatga

SEQ ID NO: 48623 - DNA, 600 bp, Rhodococcus pyridinivorans KG-16
atgaccgacaccacgaccgggctgtatcccggcgacaccggcgaactcgaactcgacacccggcgcgcattggtccagctcctcaagggtccgctcattaccgccggcaagcatcccgaggtgtggcggacggtgatccgcgacgagcgcgtgctgcgttctcggttggccgatgtgtttctcgatctcgtcgtcgacgaggacgaacagctcgcattcacccgtcccgccgaaaccggcgatcacaaggcccccgcagtgttgcgcaccgagcgattgacattcatggacaccgtgatgctgttgtcgctgcggcagctgctcctccgcgcacaacccggtgatcgggtcatcgtcgatttcgacgaaatggccgggcagctcgagatgtaccgtgcggccacgagtaccgacccggccggtttccggcgcagggtcaacgcttcgtgggagaagttgaagaagtacagccttctcgcgtcgacgtcgacggagggtcggatggaagtctctccggtgttgcggcagttgttcgatgccgatcaggttgctgctgtggaagcggagttccggcacatcgtcgcggagagtcagccgtga

SEQ ID NO: 48624 - DNA, 3309 bp, Rhodococcus pyridinivorans KG-16
gtgacggccacccctccccacccgtcccagttccggcttgcccgcgtgcaggtggtgaattggggaaccttacacggtcaccacgacattccgattgcgcgcaagggtttcctgatcaccggcgcgtcgggatccggaaaatccactctcatcgatgcgatctccacggtgctcatgccgggcggaagtgtccgattcaacgcggccgcgcaggaatccgcggccggttccgggcgcaacttcgtcagttacatccgcggtgcgtggcggcgcgaagccgacgtcgataccgactccctgaccgcttcctatctacgtacgggcgccacctggagtgccgtcgcgctcacctaccgcaccggcgacggtgccgcgcccgtgacgctcgtcaagctcatgcacctgcggcgtggagccaacgcgaacaacgatgtctctcacctgcatctgatcttcgattttgatttcgacctgatcgatctcgagccgttcgccggccgcggtatcgacacccggggcatccgaaagcgttggcccgaggctactgtcaatcccagttacacgccgttcgctcgcgccttccgcgcgaagctgggcatttcgtcggaggcggcccaacggttgttgcaccgaacactgtcggccaagagtctgaacagtctcgatcagttgctgcgcgactacatgctcgacgaacccgacaccttcgcgatggccgatcgcgcgacgtcccagttccgcgacctgcgcgaggcgcaccgtgtcgtcgtcgacgcgcgtcggcaagtcgaggcactcgatccccttgtcggtctcgcggaggttcgccgccgaggcctccagcaacaacgcgaactacaggaagagaacgaccacctcgacgccgtgcatgcccggatgacggtggatctgctgcgagagaagctcgacgaggcctacgcacagatcggactgttgcagactgccgtcgacaagacctcggtcgaagccgagcgcgcggccgagcgcaccctcgatctgcgggtgcggctcgaaaccaccgacggtggacggttgtccactctcaggctgcaacgcgacgcggcggaagccgacctgactcggaccgtacagtcacggagcaggttcgacaccgccgtcggatcgtgggaagcagaggcaccgaccaccgctgaggagttcgcgcatctgcgagcccagctcgaaacggagttgcgtgagctcgacgcgacagtcggtacacgcagaaacgatgtgtacgaggtggtgcgagcactcggcacactgcgttccgaacaccgacaactcatcgccgaccgagagctgctcgcccggcgacgctctaatctcgatcccgctctactgcggatacgcgaactggtctgcaccgcagctggtctcagcgaagacatgttgcacttcgcgggcgaactcctcgaagtgcgctccgagcatgccgagtggaccggccccatcgagcgcgtactcggcgggcttgctcgcacgatgctcgtacccgacgaatattattcacgcgttgcagcagtggtcgacgcgcagcatctcggcacccggttggtgtaccgccgggtgcgtactcgttccggccgacctgccacccccgcgagcggtgacgaatcgctggttcgaaaactggacgtgcggccgggaccgctcgcagcgtggctgcagcaccacctcgccgagcgtttcgactatgcgtgcgtggcgaccgtcgacgacctgagaggtgtgccgcgcggcgtgacccggaccggtcaggtcaagcacggcggcgagcggcacgagaaggacgacaggtaccgcgtcgacgaccgcagccgatgggtgctcgggttcgacaacgaaaccaagctctccgatctgcgtcgccgcatcggcgaggtcgaatccgagatcgcccgcctgcaacgtcggcaggagttgctcgagcacgcagagtgcacggtacagcagcgtcgacacgcggcggagatcatcctcgacacgacctgggccgacatcgacgtcgaagcggccgaggcagcggttggcgcgatcgagcatcgactcgagggatggttgcagggcaatgccgagtacgcctcgctcacgctcgatcttgcccgtgcggaaaccgaggagaaggaggcccgcgcagcgtataccgcagccggatccggtctcgaacgccaccgtggcgatgtggagcacactcggcagcggcttgcagaagtggaagcacacgccgattcggcggttcccgacgggatcgacaagcgcatccgcgcacgcttcgatgctgccgcacgtcgaccgacgagcgagaacatcgaccgattgctgcataccgtcggacgaaccatcacggacgagcaccgtgcggcgctcacgagaaccacggacgccgagcggcgcatcaccgcgatcctcaccgcctatctcgccgaatgggagtcacgacgcgccgagatgcgctccgacgcagagtacgtagacgatgctctcgcggtgctcactcgactgcgcaacgacggattacccgcatacgaggacgagttcttccggctactcaacgaccaatcgagccgcaacatcggagagctggcccgcgcgatccgcagggcaccgggcgagatccgttcccgtatcgagccggtgaacgaatcgctccggcgttctccgttcgacaccgaccggactctgcggatcgatgtgaaggatcggcgttcgcctgccgcggccgatttcctcgcggaactgcagcgcattgtcagcggctcgttcaaggaagaggaccgggtcgccgccgagcaacggttcgaacagatggagcggatcctcgaacgcctcgactcgggcgaacccgccgaccggcgctggcggcagttggtactggacacccgcctgcacgtcggcttcatcggagtcgaggtcgacggggagggcgtggacgtcaatttccacgactccagctccggcctgtcgggtgggcaggcccagaaactggtgttcttctgtctcgccgccgccctgcgctatcagctggcggcatcgggggaagagttgccgcgctacggcacggtgatcctcgacgaggcattcgaccgtgcagatcctgcgtacacgcggcgagcactcgacgtgttcacccgattcggtttccacatggtgctcgcgacgccgctgaagttgctgcaaaccctcgacgattacattgatggggtggccgcggtgagcatcagggacaagaagtactcgcagctggccttgttgccgatccgcagcgcggaggagccccgcgagtga

SEQ ID NO: 48625 - DNA, 1473 bp, Pseudomonas sp. ADP; identical to SEQ ID NO: 43373

SEQ ID NO: 48626 - DNA, 675 bp, Pseudomonas sp. ADP
atgaacgacatgcaccaggatgatccagaaggcagtaccgagtcccgcccgcccgttgtcgcggaactctcgcaactgatggtgcatttgctcaaaggcgtgttgtaccgtcaggacgacgagcgcctgtgggccagcctgctgagcctgcaagcgcgggtgcgggagcaggcggcggtgctgttgctggatctggtactggacgaagccgagggttacgccttcctcaaaagtcagccggagccggagcatgcggacgccacaccccgtccgccacgcctgatcgcgcgacggccgctgtcctacccggtcagcctgatgctggccttgctgcgcaagcgcatggccgaatccgacgccagcggcagcgatacccggctggtgctgtcgcgcgaggagatcgccgaattgatgcgcgtgttcctgccggacggcaccaacgaggcgcgcctcatcgaccaagtggattcgaccatcaccaaggtggtggaactgggttatctgcgcaagctcaagcccgctgctggcgcagctcagcaggcaactcgctacgaggtacggcgcatcctcaaggcgttcgtcgatgcacagtggctggccgacttcgatgcacgcctggagggctatcgcaccgcattgtcaggtgccgatcgcgacaaggaagccggccgatga

SEQ ID NO: 48627 - DNA, 3378 bp, Pseudomonas sp. ADP; identical to SEQ ID NO: 45333

SEQ ID NO: 48628 - DNA, 1206 bp, Pseudomonas sp. ADP; identical to SEQ ID NO: 43376

SEQ ID NO: 48629 - DNA, 1473 bp, Rathayibacter toxicus; identical to SEQ ID NO: 45534

SEQ ID NO: 48630 - DNA, 732 bp, Rathayibacter toxicus; identical to SEQ ID NO: 45811

SEQ ID NO: 48631 - DNA, 3348 bp, Rathayibacter toxicus; identical to SEQ ID NO: 45536

SEQ ID NO: 48632 - DNA, 1473 bp, Xanthomonas oryzae pv. oryzae; identical to SEQ ID NO: 47509

SEQ ID NO: 48633 - DNA, 699 bp, Xanthomonas oryzae pv. oryzae; identical to SEQ ID NO: 47510

SEQ ID NO: 48634 - DNA, 3432 bp, Xanthomonas oryzae pv. oryzae; identical to SEQ ID NO: 47511

SEQ ID NO: 48635 - DNA, 1182 bp, Xanthomonas oryzae pv. oryzae; identical to SEQ ID NO: 47512

SEQ ID NO: 48636 - DNA, 1446 bp, Legionella birminghamensis
atggctctcgattattattatttgaatcagcttaaaaaaaataatcccgcatggcgtttactgcaggccgatcatgcaccattgatagccagcttcttagacaaggcgtttattcaaactaatgagcgcattttagctcaatctcagctggtttctattttagacgatgtattgtttcaattaaaaaatgaagacgggactgcagttttttcaaaatcagcaacttcttatctggatgactggtcgcaaaataacaagggctggttacgaaagttttatcctcaaggatctgatgagcctcattatgatttgacccccgcgacagagaaagcattggtttggcttgaaaacctggcagaaaaaaactttgtgggtacggagtcgaggcttttaatcgtttttgaactgctcagacaaatcattcatgggattgaaacagatgtagaagtgcgtattgctgaactggagaaaaaaaaacgcgatatagacaaggaaattcagtctcttcggatgggtgatcttgctgtcatggatgatgctgccttgaaagatcgattctttcaggtgcaatcgactgctcgagacttgctgagtgattttagaacggtagaacataatttcagagtgctggatcgagatgtccgcgagcaaattgcgtcctgggatggaagtaaagggcaattattacaacagatttttggtgagcgggatgccatttcagattcagctcaaggccggagtttcagagccttttgggactttttaatgtctccagcaagccaggatgagttaagtgcattactgcaacaggtaacgcaattggactctctggctgaatttgcaaaggatacgcgtctacagcggatacattttgattggcttgaagcaggagaatatacgcaaagaacagttgcgaaattgtcgcagcaattgagacgctttttagatgatcaggcctatcttgagaataaaagaatcatacagattctggatcgtattaaccttcatgccttgcaagttaagtcatgccctcctaaagaggattttatgagcctggatggggcagctccaagtttgcatgttcctatgggcaggcctttatttactccgccactcaagatcagattgcagactcatatgtatacagatgagctggacaatattgtacctgagactttatacaaccagatggttgttgataaggaagcgttattggcacaaattaagcgtgcacgaggacttgctccacagataagcctggctcatgtaatacaaacttatccattagaacatggtttagccgagctaatcacttatttatctattgcagccaatgacaaacatgcagtttttgatgaagagaataaagaagtaatttcatggtttgacgagcacgggattgtgcgccaggcctctcttccaagaattatttttacccggacctga

SEQ ID NO: 48637 - DNA, 588 bp, Legionella birminghamensis
atgaaccaagaatccaataccctgtctcttgttttaattaaactgtttaaaggtgtcttatatttagaggaagaaccgtccttatggcagcatttacttaaactgcaagcgaaagtgcgagattatgtacggatcattggtttggatttgatcttgcaggaagatgagggagttgcatggcttaaacctaaaatcgctgaagacggcgaagagcctttgccatcattggtgccaaaacgtcagttgtcctatccagtcagcttattgttagctctttttagacgaaaactggtggagcatgatgccagcagtggagattcacgcctgattttgaataaagaagacattgttgagcagcttcgtctgttcttgccgcctggaagtaatgaagccagaattatggatcagattgatacttatattaataaaattgttgagctcggctttgtgcgccgtttacacaatgacagttcaaaaatcgaggtaaaacgtattattaaagccttcgtcgatgcccaatggctgcatgatttcgaacaaaaattgcaagcctatgcactgcatgctggcgcagcgcagggagaataa

SEQ ID NO: 48638 - DNA, 3339 bp, Legionella birminghamensis
atgaatggatttcgtctacagcaaatagaagtatttaattgggggacgttccaccagcgggtatggcgtttaaccctggaaggcaagaatggtttgctgacaggagatattggcgcaggaaaatccacattagttgatgccattaccactttattagtccccgcgcatcgtatcgcatataacaaggctgcaggagctgaagcaaaagagcgcagcctgctttcctatgtgcaggggtattataagtcagagcgtagtgaggctggtcagtctgcaaaacctgtggcattaagaaataatagccattactcagtcattttaggggtttttcataatcaggctacacagcaatccgtgactctcgctcaagtcttctggattaaagatagcgggggacagccagcgcgcttttttgtggttgccgatgaggtactgagtattgcatctcattttacccattttggccagaatattaatcaactcaaaaagcgcttacgtcttctttcatcctcagaactactttttgatagctttcccccttatgctgccgcattcaaacggcgctttggaattcaacatgatcaggcgctggagctttttcatcaaacggtatctatgaagtctgtagggaacttaacagagtttgttcgcgatcacatgctggaagcgttcgatgtcgcctcacgtattgaatctttaattcagcattttgatgatttaaaccgggcgcatgatgcggtggttaaagcgaaagcgcaaatacaaaagcttagtcctctggttaaggatttggatttgcattcccaggttatccatcaaaaggaacattggcgtatatgccgcgaggggttacgatattattttgcccatctcaaatcgggattgttgaggcaacgtctagagaatttgcaggaagagatacaaaaagggacaaaccggattgctgttttaaatgaaacccgggctagtgctttggcggaaagagatcatctcacacgagaacttctggtgaatggaggtgaccgtgctgagcgtttgcgccttgaaattgaagggaatgtacgtgagcagaataagcgcaaacaaacagcaaaagactatgagttcctggcgagagacttggagttgccgtttccagacagttttgagcaattcatccaaaaccaggcggcattaaaagagcgtttgcaaaatggagaaattcgcgaaagcgccattcagaatgaaatcaccgaattgacggtacgcttcaaaacagagcaacagcgacatagggtacttgaagaggaaattcaatctttacagcaacggcaaagtaatatcagtgcgcaacaaatcgcactcagaacccacctatgccaggctttaaaacttccagaggaggatatgccgtttataggcgagttattgcaagtccaggaaagtgaagcgcgctgggaaggagttgccgaacgtttgctgcatcaatttggcttatcgttgttagttccagacaggcattatcaaactgtcagcgcctgggtagagggcactcacttgaaaggccggctggtatattaccgtgtacccgctgcgattgatgccagacagctaaagacaattcagccaggctccctggtagaaaaaatacagattaaacctgatacagagttttatacctggctggagatggaattaagcaagcgttttgattttctatgctgtgaggaccttgatgattttcgcaaagcgcaacaggcagtgacaccagcgggacaaataaaattttctggtcagcggcatgaaaaagacgacaggtttccaattaacgacaaaagccgttacattttgggctggagtaaccaaaagaaaatcaaaaccctgctacttcaaagacaagagcaagaacaatacttgcatcaattgtctattcagattagccgacaacaaaatgccagaaaagcaatagaccaggaaaaaatcaaaattctgcgtcttgaagcttttaaagaattcgaggctctgtgctggcaagaattaactcgcattattgcgtctctggaaaaggaaaaagaaagtctggagcaggcttctgatgtactaaaagaactcaatgcagctttggaaaaaactacaacgcatatcaaatcgttggaacagcaattagaccagcaaaaagataaaacctccagaagcgaagctaaaatggagtgggcacaacagcagttatccatctgtgagcaagagtgcttaccaaaggagtgtggggaggcagcggccctcattacagcattggagcgctataggacagaggctttaggaagtcagcagctcactatagaatcctgcgataataaacagcaggacttacgctcctggattcaaaagaaaattgatagccaggatagtaaaataaaaacattggaagaacgcattattaaatcgatggagggatatcggcgcgactaccctgctgaaacacaagaggttgatgcacgtctagaagcagggaatgaatttaaactcatgttatctagtttgcaggccgatgatttacctcgttttgaagaacgttttaaggccttattgaacgaaaataccataagagaaattgccaatttccagtcacaactgaatcgggaagtacaggatattaaagaacgcattgcacaaatcaaccgttctcttgaagaaatagagtataatcctggacgctacatcgctttagaaattcaagatactcgtgatatggagttgcgtcagttccgttcggatttgcgccagtgcactgaagggagtttaagcagtcaggaagcggctcagtatgcagaacataaatttttacaggtgaaggccattatcgagcggtttcggggacgagaaggaacaacagagcttgataaacgttggacccgcaaagttaccgatgtgcgccaatggtttgtgtttgcggcttctgagcgatggctggaagatcatagtgaacatgagcattacaccgactcgggaggtaaatcgggcggtcaaaaggaaaaactggcatacaccgttttggcagccagccttgcctatcaatttggattacaggcagagagggcttcccagcagagtttccgttttgtcgttatcgatgaggcttttgggcgaggatccgatgaatcagcacgttttggtttggacttgtttaaaacaatggggttacagttattggtggtaacgcctttacaaaagattcatatcatagagccttatgtcgcttcggtaggatttgtacatagtaaggaaggaggcgagtctctgttaagacatttaacgatagaagaatataaaaaagaaaaagaggcttatcttgcaacctga

SEQ ID NO: 48639 - DNA, 1188 bp, Legionella birminghamensis
ttgcaacctgataaacgatgggcgagtaaacttttaatccaaaaaaaacttgaagcgctttgggattccggtcgtttgttaacagagctcttagagccttccgatttctttccgcttcgctttcctttgaaagccccttctccggctgatttagggcagcgctttgcagacgctcagaattgggtttccgaaattcggagtttgtcatccattcccggatttcacctggagtggcaagttgtaaatcacagacttttaggtcgtaatgagctgccaaaatctctctttatcgcttctgtgcaggatgttttggcttggttgggaaagcgccgcaaaggagaactatttctgcgtgtggcgagccagatattagccgagatccctgcgttgagaacatggatcataaaaaaaccccatcaggtactcatttatcatgaggtaatgcccagattattgcgggtcatgcaatggatgttacaaaatccaaagcccggtatttacatgagacagcttagtttgcctgaaatagattccaaatttatagagcagcatcaatctattttaagcgagtggttcgatctgctcttgccagtagatgccattcagcagcaatggagcgcgagagcgaattttgcagcacgatatggctttaatgaaaaacctaatctggttcgttttcgaattctggatgaaacctgccatatccagggcttgtcggatctaagtattaccacaaaggctttttccaagcttgctctacccgtacaaactgtatttatagtcgaaaatgatatcaatgccctggtttttcccagaattcccagatctctggtaattttcggacgaggatatggttttgattttctcgaacaagcctcctggctatcggataaagcggtttggtattggggggacattgatacgcatggctttgcgattttaaatcagtgcaggaaaattctccctcagaccaaatcattccttatggatgaaaataccctgctgagtcataaaatgcattggacaatagagccgaaacagaatcaaagttctctcaattacttaactgcagacgaacaattattgtatgaagccttgcaaacccagcgttttggcacccgtctgcgtttggagcaggaatacatttcctatgccggtattatgcagttcttgtcttctttaggttag

SEQ ID NO: 48640 - DNA, 1446 bp, Legionella quinlivanii
atgagtctcgattattattatctgaatcagcttaagaaaaataatcctgcatggcgattattgcaggccgatcatgcgccattgatagccagttttttacacaaagcttttattcaaactaatgaacgcattttagctcaatctcaattggtttctattttagatgatgttttgtttcaactgaaaaatgaagatggatctgcgcttttttcaaaatcagcaatctcttatttggatgactggtcgcaaaataataagggctggttatggaagttttatcctcaaggatctgatgagcctcattatgatttgacgccagcgactgagaaagcattggtttggcttgaaaatttagcagaaaaaaactttgtaggcaccgagtccaggcttctaatcgtttttgaactgctgaggcaaattgctcatggcgtagaaaccgatgtagaagtgcgtattgctgagctggagaaaaaaaaacgcgatatcgacaaggaaattcaatcgcttcgtttgggtgatcttgcagtaatggatgatgctgccttaaaagatcgattctttcaagtgcagtcgaccgctcgggagttgttgagtgattttagaacggtagaacataattttagagtgcttgatcgagatgtccgcgagcagattgcatcctgggatgggagtaagggccaattattgcaacagatttttggtgagcgggatgcgatttctgattccgctcaaggccgcagtttcagggccttttgggactttttaatgtctccagcaagccaggacgaattaagcgccttgttacaacaggtgacgcaattggaatctctggctgagtttaccagggatacgcgtttacagcggatacattttgattggcttgaagctggggaatatacgcaaagaaccgttgctaaattatcgcagcaattgagacgctttttagatgatcaggcctatcttgagaataaaagaattatccagattctggatcggattaaccttcatgctttgcaagttaagtcacaccctcccaaagaggattttatgaacctggatgaggcttctccagccttgcatgtacctatgggcaggcctttgtttaccccgccgaccaagatcaagttgcaaacccatatgtatacagatgaactcgacaatattgtacctgagactttatacaaccagatggttgtcgataaagaggagttaatggcacaaatcaagcgtgcccgggggctttctccacagataagtttggctcatgtaatacaaatgtatcctttagagcatggtttggccgaacttatcacctatttatctattgcagccaatgataaacatgcagtatttgatgaagaggttaaagaagtgatttcatggtttgacgagcaaggtatcgtgcgccaggcctctcttccaagaattatttttacccggacctga

SEQ ID NO: 48641 - DNA, 588 bp, Legionella quinlivanii
atgaacgaagaatccaataccctgtctcttgttttaattaaactgtttaaaggtgttttatatttagaggaagaaccctccttatggcagcatttgcttaaactgcagacgaaagtgcgagattatgttcgaatcataggtttggatttggtctttttggaggatgagggtgttgcctggcttaaacctaaacttgttgaagacggcgaggagcctttgccatcactggtgcctaaacgtcagctgtcctatcccgtcagcttgttgttggctctttttagacgcaaattagtggagcatgatgccagcagtggtgattcacgccttattttgaataaagaagatgttgttgagcagcttcgtctattcttaccgtctggaagtaatgaagccagaattatggatcagatagatacttatattaataaaattgttgagcttggctttgtgcgccgtttacacaatgacagttcaaaaatcgaagttaagcgtattattaaagccttcgtcgatgcccaatggctgcatgattttgagcaaaaattgcaagcctatgcactgcatgctggcgcagcgcaggggaattaa

SEQ ID NO: 48642 - DNA, 2568 bp, Legionella quinlivanii
atgagtggatttcgtttacagcaaattgaggtatttaattggggtacttttcatcagcggatatggcgtttagctctggaaggcaagaatggtttgctgacaggagatattggtgcaggaaaatctacattagtcgatgctattactaccttgttagttcccgcgcatcgtattgcatataacaaggctgcaggagctgaagcaaaagagcgcagcctgctttcttatgtactaggctattataaatcggaacgtagtgaggctggtcagtccgccagacctgtggcattaagaaataatagtcattactcagttattctaggggttttttataatcaagcgacacagcaatccgtaacgcttgctcaagttttctggattaaagataacggaggacaaccagcacgtttttttgtggtagcggatgaggtattgagtatttcatctcattttacccattttggtcagaatattaatcaacttaaaaagcgcttacgccttctttcgtcgtctgaactgctttttgatagcttccctccttatgccgcggcgttcaaacgtcgctttgggattcagcatgatcaggcgctggaactctttcaccaaacggtatcgatgaaatcggtaggaaacttaacggaatttgttcgcgatcacatgctggaggctttcgatgttgcctcacgtattgaatctttaattcagcattttgatgatttaaaccgagcgcatgatgcggtggttaaagccaaagcccaaattcaaaagcttagtcctctggctaaggatctggatttacatacccagcttatcaatcaaaaggaacattggcgtgtatgccgtgaggggttacgatattattttgcctatcttaaatcggggttgttgaggcagcgtatcgaaaatttgcaagacgatatccaaaaaggaacaaaccggattgctgttttaaatgacaaccgggccaatgccttggcagaaagagatcatctcacacgagaacttctggtgaatgggggtgaccgtgctgagcgtttgcgtcttgaaatagaagggcatatacgtgagcagaataaacgcaaacaaacagcgaaagactatgaactcctggcgagagatcttgagttaccgtttccagacagttttgagcaattcatccaaaaccaggcagcattaaaacagcgcttgcaaaatggccaaattcgcgaaagcgttatgcaaaatgaaatcaccgagtgcacggtacgcttcaaaacagagcagcagcaacataagatacttgaagaagaaattcaatcgttacagcaacgacaaagcaatatcagtgctaaacaagttgtgctcagaactcaactatgtcaggctttaaatctcccagaggaggatatgccgtttgttggcgagttattgcaaattcaggatagtgaatcacgctgggaaggcgtggccgaacgtttactgcatcagtttggcctatcgctgctagtcccagacaggcattatcaaacggtaagtgcctgggttgagggcactcatttgaaaggtcgtctagtttattatcgtgtaccagctgcgattgatgcaaggcagagaaagacgattcaaccaggctccttagttgaaaaaatacaaattaaacccgatacagagttttatacctggctggaactggaattaagcaagcgctttgatttcctatgctgtgaagatcttgatgattttcgcaaatcacaacaggcagtgacaccagcagggcaaataaaattttatggtcagcggcatgaaaaggatgaccggtatcccattaatgataaaagccgctacattttgggctggaataatcagaaaaaactcaataccttgctacttcaaaagcaagagaaagaacaatccttacatgaattgtccattcaaattagccaaacgcaaagtgcaaggaaagaattagaccaggaaaaaataaacattctgcgtctggaagcatttaaagaatttgaagcgctttgctggcaaaaattaactcgaattattgcaactctggaaaaggaaaaagaatgtctggagcaggcttctgatgtgctaaaagagctcaatgcggctttggaaaaaactacagagcatatcaaatcgttggagcagcaattagaccagcaaaaagataaaacctcgaaaagcgaagctaaaatggagtgggcacaacagcagttatccacctgcgagcaagagtgtttacctgaggactgtggtgagatatcggctttaattactgcattggagcgctatagagcggaggctttgggaagtcaccagctcactatagaggcctgtgataacaaacaacaggacttacgtttctggattcaaaagaaaattgatagccaggatagtaaaataaaaacgctggaagagcgaattattaaagcgatggaaggatatcgtcgtgactaccctgctgaaacacaagaggttgatgcacggctggaggcaggaaatgaattaaactcatgttatctaacttgcaagccgatgatttacctcgctttgaagaacgttttaaggctttattga

SEQ ID NO: 48643 - DNA, 1443 bp, Desulfitobacterium hafniense; identical to SEQ ID NO: 41667

SEQ ID NO: 48644 - DNA, 609 bp, Desulfitobacterium hafniense; identical to SEQ ID NO: 41915

SEQ ID NO: 48645 - DNA, 3480 bp, Desulfitobacterium hafniense; identical to SEQ ID NO: 41669

SEQ ID NO: 48646 - DNA, 1254 bp, Desulfitobacterium hafniense; identical to SEQ ID NO: 41670

SEQ ID NO: 48647 - DNA, 1470 bp, Xanthomonas vesicatoria
atgaagcaccaggcacggattgcgggctaccgccagttgcgcgaccagccggcgtggaaattgctcgccgccgatcacgccccggagctgatcggcctgctgcagaccctgttgctggacggcgagcgccggctgccatcggcggtactgcatgcgcgcctgcagcgtcagctggatgcgttgcgcggcgatgaactctcgcgcgagctgccgcgcaccgcgcaggcatatctggcgcattggctggcgcagggttggctggagcgccgcctgcccgaaggcgcagcagaggaagactacgaactgtcgcgtgcagccatccaggccatccgttttatcgccggcttgcgcgagagcggtagcagcgccaccgaaagccggttgtcgctggtgatccagcaactggtccagctggccgggcagaccgaagccgacccggcgacgcgcctggccgcgctgcgcgaagaacgcgaccgcatcgatgccgagatcgagcgcgtatcgaccggccggattgccgcactggacggcaagcgcgcactggagcgcacccgcgacgtgatccatctggccgacgaactggccgaggacttccaccgcgtgcgtgatgacttcgagcagctcaaccgccagttccgcgagcgcatcatcgacgacgaaggcgcccgcggcgatgtgctggagcaattattcagcggcgtagacgtgatcgccgacagcgaagccgggcgcaccttcgaggcgttctggagcctgctcaacgacacccagcagagcagccagctggaccaggcgctggacgcgctgctcgcgcgcggcttcgcgcgcaagctcgatcgtcgcgaacgcgctttcctgcgcgggctcaccggcaccctgctggagcgcggcggcgaggtgcatacggtgatgcaacacttcgcgcgcagcctgcgcgggttcgtgcagagccgcggctatctggaacagcgcaggctcaatcagctgctcaagcaggcgcagggtgaagccctgcagctgcgcgacagcttgcacgccaccgccgccaccggctacacccaggcgttgagcgccagccgcctgcgctcgctgtcgcagtggcggctgcacgatccacggctcacccaggtcgatggccgcgtctacgcagccgacgcggcagagatatcgctggacagcgtgggcgacctggtcgcgcaatcggagatcgatgtgcgcaccctgcgtaacgatctgtacgtgctgcttgggcaacagccgcggctcaccattggcgatgccctgcagcaacgcccggccccgcaggggctgggtagcgtgatcggctatctgtcgctgggcacgcgccatggcgtggtgatcgacggccacatggaaacggtgcaatgggaaggcggcgacggcatcgtgcggcgcgcgcgcattcccttggtgtggtttacccgggagaaacgcaatgaactggtctga

SEQ ID NO: 48648 - DNA, 705 bp, Xanthomonas vesicatoria
atgaactggtctgagcaggccccgctggatgcggacgacgacaacgacgctgcccgcgatgccgcattggcgctgccggcgagcgatgccgccaacgccgcgcaaggtggcagcttgttcctgggcgacaccggcacgttgccattcgatgcacgccgcgcgctgtgccagctgttggccggccccagcatcgacgcgcaccggcacggcggcttgtggccggcgctgctgcgcaacgaggtggcgatccgccaggtgttgtgcgagctctttctggagctggtgctggaccgcgaaggcggcgtggcgttcacccgccaggccgacaccgccgagctggaatcgccaaccttgctgcgcagcgcgccgctgaccttcgtcgagtcggtgctgctgctgtacctgcgtcagcaactggccgaggccgatacgcgtggcgagcgtgcggtggtggacgaggcgcagctggtagaggcgttgtcggtatacgagaagaacgtctccaccgacaaggccgggttcacgcggcgggtgatgacggccatcggcaagatgcgcgacaaccagctgctgtcgcgactgcgcggcagcgaggagcggtatgaggtgtcgccggtgttgaagctgttgttctcggcagaggatgtgcaggcgttggtggtggcgtatcgggagttgcgggagggggaggttgcgttggattga

SEQ ID NO: 48649 - DNA, 4014 bp, Xanthomonas vesicatoria
atgaattcccagtccaacctgtcgccggcgtcgccgggtgcttccttgtttgccgagacgctggccgaacagcgcgcgcagcagttccgcatgcggcgcttgcaggtgcacaactggggcacgttcaacggcttgaccgaggtgccgatcgccgagaaggggtttctgttcgtcgggcgctcggggtcgggcaagtccaccttgctggatgcgatgtcggcactgctgacaccgccgagcatcgtggatttcaacgcggctgcacgcgaggccgagcgcagtgggcgcgaccgcagcctggtgtcgtatgtgcgtggcgcctgggccgatcagcaggacagcgcctccggcgagatcgccacgcaatacctgcgcaagggcgccacctggacggcgctggtgctggaataccgtaacgtgcaaggtgaggcggtgagcctgattcgcctgttctggatcgccggcagtggcaacgccgcggccgatgtgcgtcgccactacatggtggcgccgcgcagtttcgatgtggccagcgagctggatggcttcgatctggacctgcgcaagctcaaggcgcggctgggcgatgaggtggcgcatttcgacgggttcgccggctatgccgaacgtttccggcatgcgttgggcatcggcaacgaaatggcgctgcggctgctgcacaagacccagtcggccaagaacctgggcgatctcaatgcgttcctgcgcggcttcatgctcgacgagccgcgcaccttcgaagcggccgatcggctggtggaggattttgccgagctcgatggcgcgcaccatgcggtggtcaccgcgcggcgccaggtggaaaccctgacccctgcgcgcgagcaccatgcggcgctgatggcgttgcgccacagcgtcggcgagttgcgtgagctgcagttgggcgtggacagctaccgtgagcagcagcgactggccttgctggatgagcgcttgcaggagctggacaaccaggaccgcggactggccggcgaagaaggccagcgccgcgaatcgctggacaaccacgaacagaagctggccgggctggagcgcgagcagcgcgctgccggcggcgagcagatcgaagaactggaacgcgagcgtgcgcgcgtcgagcgcgagcgcgacgaacgcctgcgccgccgcgcgcagatcgaacaggcctgccgccagctcggtaccgccctggcggccggggccagcggctttgccgcgcagatcgcacatgcgcaaaccgtgctggataacggcaagcacgatgccagcgcgctggacgacgccatcgccgaacgcatgggcgcgcgccgcgacgacgagcgccgctttgccgagatccgcgtcgagctggatgcgctgaagcgcgcgccatcgagcatgcccgcaccgatgcaggccctgcgcgcacggctgtgcgaagacaccggcattgccgaggccgcgctgccgttcgtcggcgagctggtgcaggtacgcgaggaccagatggcctggcgcggtgcgatcgagcgggtgctgcacggcttcgcacagtcgttgctggtggacgagcggcattacgcgcaggtcagcgaatgggtcaaccgcacccacatcggcacgcgcctggtgtacttccgtgtgcgtcgcaacgacgagctgcactcgcggcgggtcgatcccgacgcgctgccaggcaagctgcagctgcgcgagcatgccttcaccgagtggctgcgcaacgagctcacccgccgcttcgactatgcctgcgtcgagaacgcaaccgcgctgcgcaacgccgaccgcgcgatcacccgcgaaggccaggtcaagcatcccggcgatcgctatgagaaggacgaccgccacgcggtcaatgaccgcaagcggtggttgcttggtcacgacaaccgcgacaagctcaaggtgttcgagcgcgaggcgcaggcgctggcccagcgcatcgccagctgcgatgccgatgtcgcagcgctgcgcaaacagcgcgaacaggaccaggaacgccaactcgctgcgcacacgctggtcgagcgcgactgggacgagatcgacgtcggccccaaactgcagcgcctgagcgatatcgacgagcagttggtgcagctgcgcgaaggcaacagcggtttgcgcgcgctcggccaggccatcgataccgcacgcaccttgcgcgaccaggccaagcgcacctacgacgatgtgcggctggagcgcgcgcaactggcgcgcgagcgcgtgcggctcgagcagcagcacgcggcgtgcgcgggccgcgccggcaccgccacgctcacgcccacccagttgcaggggttgcgggaacgtcttgccgcgttgaccccgctgtcgctggacaatctggaagcgcacttccgcgtggtcgagcgtggcctagccgagcaactggccgaaagccagggccgcgacagccggctcagcgcgcaattgctggagtgcttccgcaggtattgccagcaatggcccgaagacagcggcgatttcaccgtgagcctgtccagtgccgacgatttcctcgcgcgcctggaccggctggaaagcgatggcctgccgcggcacgaacaccgcttcttcgatctgctgcagacccagagcaagaacaacctgctcgccctgcaacgccacaccgccgaggcccacaagggcatcaagcagcgcatggacgaggtcaacgccagcctggagcaggtgccgttcaatcgcgacaccgtcctgaccatcgaagtcagcgaccgccgcctggccgaagtgcaggaattccaacagcagttgcgcgcggtgttgtcgcatcagcagaccgaagaccgcgccctggccgaagcgcagttttccaccctgcgcgcgctggtggcgcgcctgggcgcgcaggaaccggaggcacgccgctggcgcgaacaggtgctggatgtgcgcctgcatgtggaattcatcggtgtggaactggatgcgcaaagccgtgcgcaggtggagatctaccgtagcggcgccggcaagtccggcgggcagcggcagaaactggccaccacctgtctggcggccgcgttgcgctatcagctcggtggcgaagatggcgagttgccgcgctattgcgcggtggtgctggacgaagccttcgacaaggccgacaacgaattcaccgcgctggcgatgaacatcttcgagaacttcggcttccagatggtggtggccacgccgttgaaatcggtgatgaccctggagcctttcatcggcggcgcgtgcttcgtcgagatcagcggccgccacaactccggcgtgttgctgatcgagtacgacgagcaggcacagcggttgaagttgcccgagcgctcgcgtggcgatgagccagcagttgccgaggccgctgacgctgcgccatcgatcgaggctgcgggcaagcccgaagaagtgcagggcgccgcaaccgcaggtggtatgacagctgacgctgtctcaacagatccgacatcgcctgcggtggacgagacctcgcccgcagcccagaaaacgcaacctagcaagcgcaggccggcagtggcgacggcgaacgagcagaacacgaacgccaaacctgcattttccacgcgcgctgcggcacaggctcaagcaaaacagtcgaagaaatcgccttcgcgcgctccggcagtgactggcaagccggcatcggacaaacgcgcagcgggcgcgcagcaagcgtcggtggcgtcgtcaggaatcgcgaccaagtccaatgcaggcaagaccacacggtccgtaaaaacgccgggcaagccggttgcggcgacgggcgcatccaacgccacatcaaagaaggccgccgcaacatctacagccaagccgcgtgcaacagccgcatcgattgggcagccaggacgtggcgccggcaagacaacctcggcacacgcggcggtcaaaccgtcgctggctaaaaagcgcggtgcgaaagcaggcgctgcgcagtcgcgcggcaagcgctga

SEQ ID NO: 48650 - DNA, 1470 bp, Xanthomonas translucens pv. translucens
atgaagcaccgcgcccgcatcgcccgctaccgcaccctgcgcgagcagccgctgtggaagctgctcgccgccgaccaggcgccggaagtcatcggcctgctgcagtcgctgctgctggacagcgaacgccggttgccggcggcggtgctgcacgagcggttgcagcgcatgctcgacgaactcaacgccgagcagctgtcgcgcgaactgccgcgcaccgcgcaagcctatgtcgcgcactggctggcgcagggctggctggagcggcggctgccggacggcgcgcagcaggaagaatacgaactgtccacccaggccacgcaggcgatccgcttcgccgatggcctggagcacgcgcgcggcgcggccaccgagagccgtctggccttggtgatgcagcagctggcgcagctggcggcgctgaccgagaccaatccggatgcgcggctgtcggcattgcgcgacgagcgcgagcgcatcgatgcggagatcgcgcgggtctccaagggcaaggttgcagcgctggacggcaagcgcgcgctggaacgcgcgcgccaggtgatcgcgctggccgacgaactgaccgaggatttccgccgcgtgcgcgacgatttcgagcagctcaaccgcgacttccgcgagcgcatcatcgacgacgagggcgagcgcggcgagatcctgggcaagctgttcgaaggcgtggacgtgatcggcgacagcgatgccgggcgcagtttccaggcgttctgggccttgctcaacgatgccgagcagagcgcacagctggacgcggcgctggagacggtgctggcgcgctcgttcgcgcgcaagctcgaccgccgcgagcgcggcttcctgcgcgggctgaccggcaccatgctcgagcgcggcggccaggtgcacgacgtgatgcaacatttcgcgcgcagcctgcgcggtttcgtgcagagccgcggctatctggagcagcgccggctcaaccagctgctcaagcaggcgcaggccgaggcgctggccttgcgcgaccacatccccgcgcagcgcggcatcggccgcgacctgaacctgaccaccagccgcctgcgctcgctggcgcaatggcggctgcacgacccgcgccagcagcaggtcgagggcggcatccagcgcaacgaggcggcggcgatttcgctggacagcgtcggcgacctggtggcgcaatcggaaatcgacttccgcagcctgcgccgcgatctgttcgagctgcttgccgagcagccgcaactgtccatcgctcaggtactgacccagcgcgaggccagccagggcctgggcagcgtgatcggttacctgtcgctgggcacccgccatggcgtggtcgccgccgggcagcacgagatcgcgcaatggcgcggcggcgacggccagtggcgccgcgcgcgcattccgttggtgtggttcacccaggagaaacgccatgaactggcatga

SEQ ID NO: 48651 - DNA, 705 bp, Xanthomonas translucens pv. translucens
atgaactggcatgaccacgagctggatcccgagcaggaacgctcgaacgatgcagtcgacagcgccgcgcccgacgccggtaccgacctgttccccggcgacagcggccgcctgccggtggaagcgcgccgcgcgctatgccagctgctcagcggccccagcgtggacgcgcagcgccacagcaagctgtggccggcgctgttgcgcagcgaggcggcgatccgcagcgccctggccgacctgttcctggaactggtgctggaccgcgaagccggcatcgccttcacccgccaggccgacaccggcgaactggaagcgccggtgctgctgcgctcctcgccgctgaccttcatcgattcggtgctgctgctgtacctgcgccagcaactggccgaagccgatgcgcgcggcctgcgtgcggtggtggaggaagcgcagctgggcgaggcgctggcggtgtacgagaagaacctgtccaccgaccgcgccggtttcctacgccgggtcggcaatgccgtgcaaaagatgaaggacaaccacatcctgacccgcctgcgcggcgaagacgaacgctacgaagtctcgccggcgctgaagctgctgttctcggccgaggacgtggccgcgctggcgcaggtgtaccgccagctgcgcgaaggcccgggtagcggcgaggacgaggccgaagctgcgcaggacgcctag

SEQ ID NO: 48652 - DNA, 3585 bp, Xanthomonas translucens pv. translucens
atgaaatcctccgcttccacgcctggcctgttcgccggcgatctgcccgatccgcgcctccagcagttccgcatgcgccgcctgcaggtgcacaactggggcacgttttccggcctgaccgagatcccgatcgccgcgcgcggcttcctgttcgtcggccgctccggctcgggcaagtccaccctgctcgatgcgatgtcggccttgctgacgccgccgagcatcgtcgatttcaacgccgccgcgcgcgaggccgagcgcagcggccgcgaccgcaacctggtctcctacgtgcgcggcgcctgggccgaccagcaggacagcgaatcgggcgagatcgccacccagtacctgcgcaagggcgccacctggaccgcgctggtgctggaataccgcaacggcgaagaccgcgtggtcagcctggtgcggctgttctggatcgccggcaacggcaccgccgcggccgacgtgcgcaagcactacatggtggccgagcgcgcgttcgacatcgccgccgacctggacggtttcgacctggacctgcgcaagctcaagcagcgcctgcacgacgtgcaccatttcgacagcttcgccggctatgccgaacgcttccgccaccagctcggcatcggcaacgagatggcgctgcggctgctgcacaagacccagtcggcgaagaacctgggcgacctcaacgccttcctgcgcggcttcatgctcgaggaaccgaagaccttcgacgccgccgagcgcctggtcggcgatttcgccgaactcgacggcgcgcaccaggcggtggtgaccgcgcgccgccaggtcgaaaccctgttgccggcgcgcgggtaccacgccgagctgatggcggtgcgccgccagcgcagcgaactggacgaactcaagctcggcatcgacagctaccgcgagcagcgtcggctggcgctgctggatgcgcggctgcaggaactggacacgcaggaccgcggcctggccggcgaggaagggcaacgtcgtgccgcgctggagaaccaccagcggcgcctggacgacctggaagcgcagcgccgcgcgcagggcggcgagcgcatcgatgcgctggaacgcgagcgcggccagctcgaagccgagtgcgaccgccgcgccggcaagcgcacccaggccgagcaggcctgccgccagctggagcaggtgctggccggcagcgcgcagggcttcgccgggcaggccgcacaggcgcgcgcggcgctggaggacggcacgcgcgcggccgccgaactcgacgaggcgatcagccagcgcatcgccggcaaggccgaggacgccaagcgcttcgccgaagtgcgcgccgagatcgacgcgctcaagcgcaatccctccaatatcccggcgccgatgcaggcgctgcgcgcgcgcctgagcgccgacaccggcgtacccgaggccgctttgccgttcgtcggcgagctgctgcaggtgcgcagcgaggatgccgactggcgcggcgccatcgagcgcgtgctgcacggcttcgcgcaatcgctgctggtggacgaacgccactacgccgacgtggccgactgggtcaaccgcacccatctgggcatccgcctggtctattaccgggtacgcgacaacgagcacgccctgcctgggcgcgcgccggctgccggctcgctgctgcacaagctggaactgcgcgagcacgccttcgccggctggctgcgccgcgaactgggcaagcgtttcgactacgactgcgtggacaacgccaaggcgctgcgccatgccgaacgcgcgatcacccgcgaaggccaggtcaagcatcccggcgagcgctacgagaaggacgaccgccacgcggtgaacgatcgccggcgctggctgctgggcttcgacaaccgcgacaagctggccttgttcgaagaagagggcctggcgctggcgcagcgcatcgccgcctgcgacgccgacgtggccgcgctgcgtgcgcgccgcgaacgcgacggcgcgcggcgcttggcccagcacaccctggccaacctggcctgggacgagatcgacgtggccgcgccgctgcagcgcctggacgacatcgccacggcgctgcgccagttgcgcgagggcgacggcaacctgcgcgcgctgggcgaggcgatcgaccatgcgcgcgcggacatcaagcaggccgagcggacctacgagagcgtgcgcgaggagaggatcggactcggtgtcgagcgtgtgcggctggagaagcaacggctgaattgcgccgatgcgaatgcgcgcgtggtcacgccgttgcagcgccagggactggacgaacgtctcgctggcctgggcgtgctgagcctggacaatctcgaggcgcattttcgccaaatcggcaatgccatcgtcgagcagaccagcgccagcgacaaggaacacaaccgcctggagcaactgctgctcggctgcttccgccgctactgccagcaatggcccgaagacagcggcgatttcaccgtcagcctgagcagcgccgaggatttcctcgcgcgcctgcagcgcctggaacgcgacggcctgccgcggcacgaggcgcgcttcttcgagttgctgcagagccagagcaagaacaacctgctggccctgcagcggcataccgccgaggcgcgcaagtccatcgcccagcgcctggacgaggtcaatgccagcctggagcaggtgccgttcaaccgcggcaccttgctgaccatcgaactgggcgaccgccgtctgccggaggtgatcgaattccaccagcgcctgcgcgacgtgctcggccatcaccagaccgagcagcgcgaactggccgaacaacagttcgcggtgctgcgcgaactggtgcgccggctcggttcgcaggacggcgaggacaagcgctggcgcgagctggtgctggatgtgcgcctgcacgtggaattcgtcggcgtcgagctcgatgccgccacccgccagcaggtggagatctaccgcagcggcgccggcaagtccggcggccagcggcagaagctggccaccacctgcctggccgcggcgctgcgctaccagctcggcggcgaggacggcgaactgccgcgttactgcgcggtggtgctggacgaagccttcgacaaggccgacaacgagttcaccgcgctggcgatgaacatcttcgagaacttcggcttccagatggtggtggccacgccgctgaaatcggtgatgacgctggagccgttcatcggcggggcttgtttcgtcgagatcagcggccggcacgattcgggcgtgctgctgatcgaatacgacgagcaggcgcgccggctcaagcttcccgagcgcacgcgcggcacggccacgccagccgatgcggcgccagcgccggaagcggaacaacccggcaccgcgccgagccgcctgcgcgccgacactgcggccgtggtgcgtggcgatgccggcgagccagcggtttccgatggcgccgccgccatggcgcccgtgccgcatcgcgcgctgccaaagtcaaaggcaaaatccaagcccgagtccaagccagggtccaaacccaaatccaaggcctga

SEQ ID NO: 48653 - DNA, 1179 bp, Xanthomonas translucens pv. translucens
atggcgcgcgccaacgccatgctgctgcccgatgccgcgctggccgccttgcgcgggcagtggcggcgacaccgcggcgcgtggttgctaggcgatgcggcgccgcaaccgatctcgctgcgcatgccgacccaggctcaggccagcgccggattcgatgcgttcggcgcctggctgcgcgcctggcgcaccacgccgttgccggggcatgtggaatggcgcgatgtgaaatggtcgcagctcggcctgcaatgtctgccgcacgcctggcaaccgaacgccgatgaggccgcgctggcgctgggcgaacacgcgcgttggcagcgcgcgcgccagcgcagcgcagcgctcgtcgcgcgctggccgcaggcactggggtttgccgcgcgcctgcgccggcagttcgacctgctcgccgatgcgccggaagcgggtttcgtgcgcctgctcgccgtcgtcgagtggctgcatgcgcatccgcacagcggcctgttcctgcgccagttgccgatcgccggcatcgacagcaagtggatcgagccgcgccgtggggtcatcgccgactggctggccgggctgcgcggtatcgtcgaaccgcgcggcttcgacagcgtgtccggactgcgccgcgcgccggaccgggtgcgcctgcgcctgctcgatccggacctgcgcgcgcggctcggcgggctggaggacgtgcaggtgccgatcgcgcagatcgccgcgctgcagctgccggtgcggcaagtgctgatcgtggagaatcgcgagaccggcctggcctgcgaggatctgcccggcacgctgctgctgatggcgcgcggctacgccgtggactacgtgcgcgccatcgactggctgcaggccttgccgctgtactactggggcgacatcgatacccacggcctggcgatcctgcatcgcttgcgccggcatgcgccgcggacggtcgcgctgctgatggacgaagccaccttgcgcgatacgccatccgagctgtggggacacgaacgccgccagcatcgcgcgcagcggctggatacgctcaccgctgccgagcaggccttgtacaccgacctgcgcactggccgtttcggccccgcgccgcgcctggaacaggagcgcatcgcctgggactacgcatggccgcgcatccgcgccgcgctggccggataa

SEQ ID NO: 48654 - DNA, 1353 bp, Pseudomonas aeruginosa; identical to SEQ ID NO: 43741

SEQ ID NO: 48655 - DNA, 663 bp, Pseudomonas aeruginosa; identical to SEQ ID NO: 45502

SEQ ID NO: 48656 - DNA, 2940 bp, Pseudomonas aeruginosa; identical to SEQ ID NO: 45503

SEQ ID NO: 48657 - DNA, 1182 bp, Pseudomonas aeruginosa; identical to SEQ ID NO: 44163

SEQ ID NO: 48658 - DNA, 1359 bp, Pseudomonas aeruginosa
atcgttgtagaggatgcgctgcaaggcttgtcagagctgttgtccagctatgcaagccaagagctattcgagatcgatgctgacaacgtccagctccaggcggggcgcgagttgcgggaatggatcaagcggcgattgatcgtcgagcgtgaaggcagagtttatgcaaccgatgctctagaggtcgcaattcagtttgtagagtcgctagacagccgaatgatgacgtctacggcgtcgcgtttgtctgtcgtacagcgcgaaatcgagaatctcgagaccaacctgaaccccagccctgctggccgcatcgccagcctacgtcgtcgaattcacgatctcgagcttgagctgaagcaagttgaagcaggccacattgtcgttcttgatgaggcccaggctatcgagggaattcgagaggtatacagcctggcgaccagcctgcgcgctgatttcaggagggtcgaggactcttggcgcgacgcagatagagcgcttcgccaatccatcattagcgagcagtaccaccgtggcgacatagtcgatctgctgctcgatggacaagactcgctattgagcacacctgaagggcgggtgttcgatagcttccagcagcagctccgacagtccattgaactggacgatatgcgtgcgcgggtccgaacgattcttcggcatcctgctgcttccaaagcgctccagcgtagccagcagaaagaaatgcggtggctagtcctgcgactggtccaagagtctcagtcagtgctccaggcaagagcgcgcagcgagagggacgtcaaaggtttcatgaagaccgggcttgcccttgagcaccatcgcgttggccaactgctccacgacattttcaatgctgcgctggggttggattggcagcgccaaagccagcgtcgaaaagctgtgccactgcctcctatcgggattccgatctcgggcatcccgtctgttgagcgcctgcggtttaaagacgtcagtacgggcgcggatgcagagctgaatctagatgttgtttcagctgggttagacgaaatcgatgcggacttttgggatgcatttgatgggttggatcgaaatgcgctcatccgcgaaaccctgtcggtcttggctcaacagggaaggccgttaagccttggagaactagcagctttgctgccgcctacacatgacctggagacattttctctttggttagggatggcccgtgaggcgggtctccatgtgtacgaggatgaggctgagagcgtggagttggttgactcagaccagcagcgttggcggttccatcttcctctcgtcggtatggatagcgttgcactcaaggatattgattgggagttgtga

SEQ ID NO: 48659 - DNA, 738 bp, Pseudomonas aeruginosa; identical to SEQ ID NO: 44575

SEQ ID NO: 48660 - DNA, 2949 bp, Pseudomonas aeruginosa
atggttcggcttggtgcgttgctctggttcgagggcactagttcatctgccgcagacatgaagaagctctggatattcagcacctctcctgaccatacgcttgaacactggttgagcgttcagcacgagggcgggatggctgctctgaataagatggggagctcggaagcggggatctggacgtaccaaagcaagaagcagtacctcgcccggctacgtgatttctttgaggttggagagaacgcattcaacctcctgaatcgagcctcaggactgaagcagctcaatagcattgacgagatttttcgtgagctggtgctggatgatcgtgcggcctttgatcgtgctgcagaggtggctgacagctttgatgatctcactgaaatccatcgtgaattggatgttgcgcgccgacagcagcgtacgttggagcccatagctgaactgtggtcgcgctaccaatcgttggaaagccaggcaagcgagaaggcagccttagagcgacttgtacctgtttggtatgcggagcaggggcaccgtttgtggctggcggaaacggaacggttgcggattgagagtcggcaggccgaggcggaggtggcatctgcccacgagctgctcgaggcgcaaaggcagcgcactgatgagttgcgacagctctatctgctgaaaggcggcaccaacattgatcagctgagagcccgcgtgaatgattggagcaaaattgcttcgaagcgtgcgatcgactcaaagcagtatcagtcgctggctcggaatcttggtctttcagatgatctcgattcgttggtattgcaagagaaccaggctacggcagagtcgcgccttgtcgctctgaggtcagacctagagcaagccaaactgacgtccttccaactgggcgtcgcagagagtgagcagtcgagtttactcgcgaggcttaaaactgagcggcaagaggttgagcgccgaccgggctcaaatttgcgtccggatttccaaagccttcgctctgatttagccgcggagctcggccttgacgacagcgcactgccgtttgtagcagagctcgtccaggtcaaaagcgaagagcatcgttggagaggggccgtcgagcgggcaattggtggccaccgcctacggattttggtaccgccgcagtccatcgagcatgcccttcgttggatcaataaccggcataaccgactgcatgtccgcttgctggaggtgaagcaccctgagtcaccagcagtcttcatgccggatggctttactcgaaaactcacatacaaggatcatccctaccgcgaggcacttaaggcacttcttgctgagaatgaccggcactgcgtcgacagcccagaggtgctgagatctactcctcatgcgatgactgctgaaggcctcatgtcgggtaaggcccgcttctacgacaagcaggatcaattgcgattagaggatgactggctcacgggcttcgacaaccgcgaccgtttggcccagttggctagtcaaattcaggaagtcactgagcgacaagcgcaagctgctcaagagctcaaaaatgctttagctgcggttagcttgcttgaaggccagattcgggctttcgagcaaatcagccatgtcgattttgcggacattgacctaccgggagcgcagaagcagctcgacgagctgaatcaggggatccaggaattgctccaacccgatactgatcttgcggcagcaaagcaggccgcagaccaggcggcggagctggtcggcacactagacaagcagcatcaacaggcgatcgcaaagaaagctctggtagatacccgcttcgagcacgcggcaacgagtacgcgcaaagcgtttagccggtcggaagtgggtatgagcgaccaggagcgtgagctagcgattaggtactttccagaggtcgctccgaagtatttggcagagattggcgaacttgagctgcagttcactcggagtctgcagggtgagatcagcggcctcaaggacaggctcagtaagcttcaaaccgagctcgcaaagaaaatgtcggatgcgctgaaagaggacactggggctctggtagacgcagggcgagagctcgatgacgtgcacaaatacctggatcggttgagggtgctcactgaagaggccttgccagagaagctgaagcgattccgggactacctgaaccgctcctccgacgatggtgtcactcaattgttgagctacatcgagcagcaggtagcgctaattgaggagcgactggacgatctgaacagtacgatgtgccgggtcgacttccaggcggggcggtatctgaggctgatcgcaaacaaggtgtcgcacgacagcattcgtgcgttgcagcgtgcgcaacgtgccctcaactcggcgaggttcattgatgacgaaggggagagtcactacaaggcccttcgggagctcgtggatattctgcgcgaggcttgtgagcgaaatcggactcaggccgctcgcacactactggatcctcgcttccggttggagttcgcggtctcggtgatcgatcggaatacaggcaacacaattgaaacccggacgggctcacaaggtgggagtggtggcgagaaagaaatcatcgcctctcatgtcctaacggcatcgctgagctatgccctgtgcccagatggcagtagcaggccactctttggctccatcatcctggatgaagctttctcccgaagctctcatgccgtcgcggctcgaatcatcggggctctccgggagttcggtttgcatgccatcttcatcactccaaacaaggaaatgcggctgctgcgccaccacactcgatcggcgatcgtggtgcaccgaagaggtatggattccagtttggtttcgctcagctgggaagccttggatgagcactatcagcagcgaatgaaggtgcagagtgaagccaccacttga

SEQ ID NO: 48661 - DNA, 1161 bp, Pseudomonas aeruginosa
gtgaagccaccacttgagatcagccgaaagctagctcgtcagtggtatcaggcagagacacgtagcaagcggcttcttggcctaagtgagtggccgctctgcatgcgaataggggttccaagcgccagagagttttcgcagaaccctggcgctgtgcaacgccatgctgagtcgtggaagaaagtggcaatcgggttggtggattgggagccagtcagctatcgcgctggcgctgaaccaatccttcttccttctcagtggtgtctacgcactccatcggaatggatcgctgcaacaatggatgccgcggtttgtagggaatatgcagaccttgagcatatcgttgagagcgtagatgtggctttcagagcgctgcttgttactcagcgcagcctctggctaaagaaaaagccagaggaggtcattgctgctgcagatttggccctgcgtctccagccaggatgcgccatggggcggcccctgcgcttgttggccgagcatggggtggacacgaagttcttcgagcggaacgctggactgcttacgcgactgctggatgagcgttttcaaggtgagccttcggagatggggctaaacacgttccttggggctcttgaagaaaatgagcattgggtccttgtggcgcctttgtgcgatgggctacttccattcaagaagctccggctcacaacagctcagctaaaagagtctcggcttcctggttctcggctcattgtcgttgagaacgaaaagtgccttcatcaactacctgctcttgatgacgccgtcgcggttcttggatgtggcctcgatctgcagtggatggcggcgtcctggttacgggagaagcagctagcttattggggggacatagatagctggggctttctaatgctcagtagtgtccgagtgctttgtcccgatatttctgctcttctcatgtcaagagatgtgtatgagttatacgccccagggtccgcagtcgaagagcccgtaacggctcaggtataccctccgtccggactttgcagtgaggaaaaggaactttactcgcacctattagggcaaaaaaaggggcgattggaacaggagtacttgccttcagccgctgtcgaggcagcaatagacctgtggatagataggacttctaatgacgtttag

SEQ ID NO: 48662 - DNA, 1461 bp, Photorhabdus luminescens subsp. laumondii
ttgaatttccaagggttacaggcaaagtaccgccgtctatttcaggaaagcgctgcctggaaactgttgagagctgataatgctcctgtaattttggcatttttgggggagttattttccgaggatagtgaagtcccttttagtcgtgcccgggtgtcacttgatgcagagctggtacgctgtcgtgaacttggcctttgggaaactgaaacaggagcgggtacttatctcaataaatggattcgggaaggctggttgcgtgagatggatgacacattaactaaaacggatgccagtgaaattgcactccgctttagccaagggcttgatgaacgcaattcaggaaccactgcgtctcatcttcgaattgtgcaggaagcggtcagggactttgcaatagcgattagcccaaatgccgatgagcgtgtcgcgtttttggaagatagaaaatccgagattcagagagagattgatgctctgagggctggcgttgtgaccgaattaaccaaggctgagcagcgggaaagaattcgtgaaatttaccaactggcttctgttttaacgggtgattttcgccgtgttgaagatgaaattcgtcagttggatcaggaaattcgtattcaaattattgagggggactctaccagaggagatatccttcttgctgttttagaaaaagaagcattactggctaaaacggatgccggtagtgcgtttgaaagcttttttgatttgttatgtgatcaaaatagaacgatggagctacgagatcagcttcgaagtattttaagtcgtccggtcgcagaacacttaagtacccaacaacgccaattcttaagtcagctcatgagagaactgagccgcgagagtgacagagtttttcaaatcaggcgaagaacggaagagagtttgcgtgcttacatagagagtggcacggctcaagaaaatcgtgctgttgatagattgcttggtcaattggaacgactcgccattgaattgaagaacttaggttatgacttgcaaacggcaacaacgctgtcactgcccgttggcgcggcaagtattagctctcctgaaagcatgctgcttaaatcacctgatgaaaagctggatacctcagacgctgaagaacagctcaattctcgcgaaccgagtatgcaaatgctggattgccttgatgttgttcaaattcgattaatcgctgagagggcgctagaaacgttaaaagagtttggtccaatgacgattgcgtctattgyaaattatcagccgattaattcagggttggaggagttagttgcctatttaagagtggccaaatctgtcggggcggcattattggaagaaaaggaatcagttgaaatcagtgacaaacggggagctcgcttgcgggcgtctatacccactttcttgctgagtgcggacctgtttccagacagtttggatgaattggttctttag

SEQ ID NO: 48663 - DNA, 894 bp, Photorhabdus luminescens subsp. laumondii; identical to SEQ ID NO: 42466

SEQ ID NO: 48664 - DNA, 3396 bp, Photorhabdus luminescens subsp. laumondii
atgactgatcaaactctttcggctaattcattatttcacgttggtcaaatcagattagctgaactctcagtgtataactgggggtcatttaatggcttgcataccgcgttgatcgatcctatgggaacgctggtcactggagataatggtgccggaaaatcgacatttattgatggccttatggctttgctgcttcctgccggaaaggcaacttttaatgtggctgcggcgcagggtgatcgttctgaccggactttactttcctatatgcggggaagttttggatctgcccatgacggagcggggacgagagtcagaagtaagcgtgaatttggcgtggtgactgggcttagggctttgtatcagggtgatgatgggtcaaaaattacgcttgcggcgcttttctggattactaaatcgacgaatgtgcttgcggatgtgacacgcgtttatgttgttgccaaaagagatctgactcttaaggaaatgcttaatgcttttgggaacggtaatgcccgggcattcaagcaatggcttcgtgatgatccgacgattacgtgctgtgatgataatttttctgattatcaggagttgtaccgaaagctcctgtatatggacaataagaatgcgcctgcactgttatcgcgggcgttaggtctgaaaaaaattgatgatttaaccgggttgattcgtgaattagtactggaaccgagtacggtcaaggatgatgctaaaaaggtcgtggaagagtttgctgatctggtggcaattcatagtcaattagtggatgcaagagcacaaaaggtgcacttatccaggttacctgaactcaactcaattatcgaaaaaacaaccaaagaatttgcggagctaatggctgagaaaaatagtctcccggtctactttggtgagatttttgcacaattgtggagtgaaaaaattactgatattgaggctgaactggaagcgctacttctaaaaattagccaagttgaagggcagaaagtggatgcgaataagctggttgagcgaaggcacgaggagtaccttcaatttggtggggataaaatagagtcgctaagaaaggaagttgatcatacccaaactcagttgaatcgggtggttagaaattcatctcaatatcaaactcatgccaacgaactggctctcccttctgtattagaggaggcggtatttctcaaaaatcaatccaccgcatcaactcggcttgccagtattcagcaagaagaaggagagtatcaggacaggtttgccaccatcagtgctaaattcagtgagctacaagccaatatccatgatatctctcaagaaattcgggaaatcgaggcaagacccgattccaatattgatgtgaaatatcagcaattgcgagatgaactggttaattctttagaattaagtaaagagcaatgtgtatttatcggtgagcttatcgatgtcgaagatcgtgaaaagagctggcagggcgcgatagagagggcgttaggcgggttacgaacaacacttgctgtgccacatcattgttattcaatggtgactcgttggttaaacgctcggcatacgggtttacatgtccgtgttcaagttgtgaataattctacaactcaaggccaatcggtggtgtttaagtctgatggttatctaaggaaactggtttggcgcactcacccttatcgagagtggctcaagcaccatttgcaacgatttgacctgcaatgtgtttcaagcacggaagaattggatcaaaccccgttttcgatgacacaacaggggttaatgcacatggataaagggcgctttgagaaaaaagatcagtaccgaatagatgacagaagacgctggtgtctgggtttttcaaacaaatcacgtttagccattctgaataacgataaaaaagagttaactctgcaattggcggaaaccgagaaaaaggtgagtcaggcccgtcaagatttgaattctgtttctgatcgtaaaattctttgggagaagatccaaggttaccgctgggatgatattaatgctccttactggcacgaaaagctttctgatttgcaggttgaccttaagatgttggaacagtcaggtggtgatcttgataaggccagagagcgttgggagtcggctaaagagcagctagttcaaattcaatcggtattaaatcagctcaactctgattctggtggcgttaaaaatacgctgaaaaatgcaaaagaagaatggagcaaagcgcaggcaaaagcgtcgaaaggattacctgattcagccagacaattacttgcgattcgggttggcgtgcttaatacaaacgatttaggccggatgtctgaattggtgttgaaagttgaagaagatttagaacgtctgttagatattagccgaaacagtaaagacaaagcagaaagattagccattagcattatggtctcattcagatctaacgataaatggcaagtcttcacggttgactggcaaagtaatattggtggcttacctgattatcttaatcatttacgacaactggaagaggaagggcttcccaaccttgtggagcagtttattgaacgtttgaataagcatgcaacgcagtcactagcgcggattaaaactaagcttgaatctgaacgggaagatatccttgagcggattgatattattaaccgggtcctcaagcgtacagagtttcgatcagggacacatttaaagctaggttcaaagagagagaaatttccgcatgttaatgagtttgaacagcatttgcgtaaggtgctgagtcaggtaaccagtgatgaccatgaagcacggttccgtcaattggctaaagtagttgaaatacttggcaaagcgagtgcccctggctcctcaaatacattggaaagtttaaggctgcttgatcctcgttatcagatgtcattttatgccgaagagttggatagtaataccggtgagattcgggatgtcttggagtcatctagtggaaagtccggtggcgagaaagagtcgtttgcggcgactattgtcgcggcaagtttggcctatgttttgacgccggatggctatgatcgaccggtttactgtactgttttcttggatgaagcattctcaaatacggctgaaacagtaagtcggcgggtgctccgagtatttagggagctccatattcacgttaatttgattacgccttataagaacttgaatctggcaagagaatctgctcgttcactgctcattgcggaaagagaccaggaaaaccatgacagccatttatgtgaagtgacttgggaagagattgaccggagaatgggcgaagagaaggagaaaaagttgcctgatgaggcggctgatttgggtattgagtttgagaaactgacatga

SEQ ID NO: 48665 - DNA, 1197 bp, Photorhabdus luminescens subsp. laumondii; identical to SEQ ID NO: 42468

SEQ ID NO: 48666 - DNA, 1371 bp, Methylobacterium radiotolerans
atgctgttcgcgcagctgtccgacgagctgttcaagccgctggcctcgccgagccgcggcttcaacgccgccctgctcctgcacctgcaccggcgcgtcctcggggccgagccggtgcgcaaggccgaactcctggcggagatcggcgacttcgccgccggctggagcgaccccgaggtcagcggcgacgagccgatctcggccgacccggccgagcgccgcacggcgctctaccggcgcctcctcgacaccggctggctgatcgagcgccgcgagcgctacgtcccggtcgcggagttcgaccccgaggcccgcctcctgctggaggagctgtcccggctcgaaaggggcgagacgcgctcctacggcggcgccgtgctggaggtgctgggcgggctcgagagcgccctgtcggacccggcgaaccgctccgaggcgctgtccaacgccgcccgggccgctgccgccttcctgtcgcacgtgcgcggcctcgcggccggcatgcgcaaggtcgaggagcgcatcctgcgcgagcccgaccgcgccaagaccttccggctgttcttcgaggatttcgtcgagcgccacctgatcagcgactaccggacgctgcacacccgcttcaacccgttccgcttccgcgccagcgtggtgcgcgaggccggtcgggcgctgcgcgacgccctcacggtccgggcgctggccgagggcctgatccgcgaggggcggagcgccgacctcgacgcggcgcagaaggccgtccgggcggatctcgcccagatcctcgcggtgttcgagggcctcgacaaccacctcgacgccgtcgacgccgtggtggcgcggctggagcgccggatcgcttccgccctgcacgtgatggaccgcccggacccgagcggcgtcgagcgcgtggcggcgatgctgcgcgccgtcggcgggtccgagatcgcccccgaggtgccgggggacgtctcgctgctgcggccgccgatcggccacgcgcatctccaggcgccgcgggcccgcaagtcggccatcgacatggagcccctgcccgacatcgaggacgaccccgtggtcgacgccttcgcggccgccaaggcggagttccggcgccgcaccaccgtgaccccggagagcatgagcgccttcgtggaggcccgcctcggcaaggccgtgcgcctgcgcgggtcgcagatcgtgatcgcgggcgtcgacgacttcatcgtgttccagcgcctgcgcgagatcgacgtgctgttcgacgccaagctcggcgcgcgctacgccctgacccggctgcccgagcgggttgtcaacggctggctggactgcccggacttcctgctggagcgccgtccccgtgcttga

SEQ ID NO: 48667 - DNA, 627 bp, Methylobacterium radiotolerans
gtgcttgagggcttccgcgcgatcatcgacggcgacgagccgccgccccccggcgcccgggcgccggacgccgaggagctgtgccgcgctctccaggttctgctgaaggggcaggtgatctacgccgagacgcaggggatcggacggtcctacgagctcgcccggcactacgcgccgttcttcaccgactacttcgcctgcctcggctacgcgctgaccgtctcgcaccgcgaccagatggtctcgctgagcccggccgccgacgcgccgcggcacgacatcgtctcggagcgcctgcgcaaggacgagaccctggtgctgctggcgctccggctcctctacgaggagggcctgcgcgaccaccgggccggcacggacgggatcgtcgactgcaccaccgacgagatcgtcgagaagatccgcgccgtggcccgcaacgagccccccgaggagggccggctcgccgacatcctgcgcctctacgccaagcgcggcggcctgcgcctcggcgagcgcgaccgggtcgagcgggtcacgccgctttcgctcctgccgggcgtgacggtgctggcctccgacgcctggatggagcgcctgcgggcgtggtccgaggccggcgaggcctga

SEQ ID NO: 48668 - DNA, 3438 bp, Methylobacterium radiotolerans
gtgtacgtcctcaccgacatcgccatctcgaactggtacctgatccgccgcgagcagatccgcctgcgcggcgccgcggcgctggtcgggccgaccggggccgggaagtcgacgatcttcgacgcggtcggcacggtgctggccggcaacaacgccagccgcctcgccctcaacgcctcggcctccggccgcagcgcccgcacggtgcgcgactactgcctcggctggatcagcgacccggcggagggcggccgcccgacgcgggaatcctgcgagaccgtgctggtcctggtcttcgagaaccccgattccggccgcgtggtctcggtcggcctcgccctggcggcccgggccgtggagccgaaggagaccgtgctgtcgcgcttcatcgcggtcgggcaccggttcgaggtcgccgactacgcgcgcaccgctcccggcggcacctacacggcgccctggagcgagatcgccgccgacctgcgcgcccgcgcgtcgagcttcaccgagtaccgcacctccggcgagcgcttcacggccgacgtgctcgcgaccctgcgcgagggggcgccggcgccggagccgcgccacttcctgcgcagcttcgccaacgcggtggcgttcaagccgatcttcgacaccagcgcgttcgtgcgcgccttcgtgctcgacccggagcccctcgacgtcgagcgcgtgcgccactcgatcgccaactggcggcgcctcctggagaccatcgccgaactggagagccggctcgggcgcctgcggcgcctgcgcgaccgctacgaggcctggggcgaggcggtcctggccgccgcgacccacgagctgcgggcggcgagcgccgagctgcgccgccgcagcctcgacctcatcgccgtccggagccgcctccgcgagggcgccgacaccctgcgcatcgcgcgcgaacgcgtcaccgcgagccgaggctacgtccgcgagatcgacggcgagatcgccgagaagaaggcgctggccgccgcgagcgccgccgagggccggctcgcggcctcgacgcttggcctgtccatgctggagcgggaccggaaggagctgatcggccggatcggcgacctcgtggggctcgtcgggcagatggccaagctccagcccgtcgccccgctcctgcgtcagagctgcccgcaggcggcccgcctcgccgaggcctgcgcccgggcgggcctgcgccgggaatcctcgcccgaggagatcctgcgccccgagggcccgctggccgagctggcagacggactggcgcgcctgcccgatttcgacgaggccctggagcgggccgccgaggacgcggcgctcaaggcccgggcccaggagagcgaggccgagcgcacggccccgcgcaccggcggcggcccggcggcgcgcctgtcctccgacacggtggcgtttcgcggcgagctggagcggcgcggcatcgacgcgctgccgatctgcgagctggcggagatcgtcgatccgacctgggggccggccctcgaaggcctgctcgggcgcgcccgcgaggcgctggtggtcgcccccgaccggctgagcgaggcgctcggcgtgctgcaatcgggccgcgaccgcttcagccgttgcatcctggtgaagaccaccgacaccgccaagcagcggtcccgccgctacgacgacgggccgctcaccgtgatcgagaccagcgacccccatgcggaggccttcctcggcgtgcggctcggcggctacgacctcgcccgggacgatgccgaactggcgcgcctgtcccgcgccgtggcgccgagcggtcggaccacggccggcatggcctacacggtgacccgcaacgtcgacctgctgatgactcgcggtcatcgcgggccgaccgccgacagccgccgcgcccacgagatcgccgtcgcggaggcgcggcgcctgcgcggcgaggccgcggtcctgcgcgaggccgcccggacggccgccgcgatccgggcccgcgtcgcccggggtctcgacgacgtggaggccttgcgggccgagctcgacgggctcgagggacggcggcgcacgctccagaccgagcgggagggcatcgagaagcgcgacacggcggggctcaccgccgagatcgccgcgctgaccgccgagcgggtcggctacctgcgggaactgtcggaggagctggagccgaagctcgatcgtctgctcgccgacgaggcggccctgcgcgcccggatgggacctgtgcgcgaggccgtccgcgccgccctgtcggcccgccgcgcggccctgcgccagctgagcgggggcgacgcggcgcgggtgcgcctcgcccgcgccgagccgttcgacctcggtgcggtcgccgaggcgcggcggtcgcttgccggactcgacgccaaggcggccggggcccgggtgagtgccgagcgcggcctcgcccgcgattccgccgaggccgctcgctcgcacggccggattgccgagcgcgagctggcggaggcctgcgccgcctggcgggtggagaacccgctcgcctccggggacgccccggcgatcgacggcttcgcctgggtgcggcgggaatacgaggcggtcgaggggcacgagctgcgccgctaccgggcgcaggccgagcgggccgaggccgagatgcgccgcctgatgaccgaggacctgctgacacgcctcgccgaccggttcgagcgggtccacgcccgcctcgcggccctgaacgagcggctctcggcgcgcagcttcaccggccagacctacgcgttcgaggcggcggtcgaccgccgctacgccgccgtccacgcgctggccaccgagaccgcccgctcgcccgaggccgcgcaggcgctgctcgccggcgaggccgaggggccgatggcggccgcgctcgaggagatcaccgcgctgatcgccggcgaggaggacgcggcgcggctcgccgattaccgcaactacttcgtctacgagatcggcatgcgcgaccgggcgggcaaccgcaccaccatgtcggcccgggcgctgcgcggctccggcggcgaggcgcaggcgccgttctacgtggcgatcgccgcgtcgctggccagcgcctactatccgggcgaccggccgggcgacgagaatccggggctcggcctgtgcctgctcgacgaggcgttctcgaagctcgacgtgcgcaacagccaggcgctggtcgatctctaccgcgcctgggggctgcagctcctcatcgccgcccccgaggacaagcgcaccacgctgaccgaggtgatggacacgatcgtgacggtctacaagagcccggatctcacctcggtgcggatcgaggccgagcaccccctcgaggcggcccggcgggcgctgcacgcgatcaatcccgaccagatcgggatcgagggcttccgccggtcggacgccgccgagtga

SEQ ID NO: 48669 - DNA, 1476 bp, Microbacterium testaceum
gtgaccaccacccgcaccgaagccgcgtacctgcgctcggtgacggcgttcaagaacccgacgctcgacctcctgcacgggcgtttcgcgccgttcgtcgtcgccgtcctgtcggtcgtcttcacccccgatcgtccggccgtcgccgtcgccgacgcgcacgtcgaggtcgccgaggccatcgacgagctgcgcgccgcgggatacgacaccgacgacgaccgccgcatccccgccgggtcggcgcgcgacatctgtcgcgggtgggtgcgcgtggggtggctggggctgcagatcgaggacgacgtcgaggtctaccgcctctcggcgcacgcggtcggcgcgctcgagatcgccggccgggccggtgggggccgtgcccgcgtctcgcgatcgcgtgtgcgaacccttctcgacgcggtcgagcggctcgcccgcgacgccgagagcgatcccgctcgccgccgcgaggccctgctcgaggagcgggcggccctggatgccgagatcgcggccctcgacgagggcatcatcgaaccgctcgacgacgaccatctgctcgaagaggccgagaacgtcatccatctcgcgcgcgagcttcccgcggacttctcgcgcgtcgcggagtcgatcgccgcgatgcagcgcgacgtcgtcgcggagctccgccgcgacgtgcgcccgaccggtgaggtgctgcgcgagtacctcgaacgcggccggcaggtgatgcaggcgacccccgagggccgcgcgttccagggcgcgctccgcctgatcggcgaccccgagaacatcgacgacctcaccgaccagctccacgccgttctcgcgcagcccttctcgcggctcatgaccccggaacagcgcggagaactggatgccatcgcccgccgcgtcgaggcgggtgtgcaggaggtgctcacggcgcagcgacgggcctcgcacgtcatcaccgcgcaggtgcggacccacgacccgatccgtgaccgccaggtcgacgacctgctgcgcggcgtgatggcggggctgcaccgttggagtcagacccgctcccccggccgcgtcgagccggtccggacgctcccgctcgccgacgtcgggcatctgcgccagtcgatcagcgacgtccggcctcccggagcgcccgagcccctggcatccgagagtcccgacgtcgagttcgtcgacgccgacacgcgcgcgtggggtgggccgcactacgccgagctcgaggagtacgtcgcgcgcctgggcgacggcttcgacctcgccgatgcgttcgcgggggcggatgccgagacccgccgccccgtcgacctcgtgggcctgctcgagatcgtgcaccggcgcggtctcgtcgagaccgacgaggtgtcggtcgtcgaggcgattcggcccgacggaacgacgaggcggttcgctttcggcgcggtcagagcaggaaatctttcagaacagggagccgatgactga

SEQ ID NO: 48670 - DNA, 708 bp, Microbacterium testaceum
atgactgacgtgcagaccccgagcatcgatgccgagagcccggcgttcatcgccccggtggcgatggagaacgaccccgacgcgctcttcgccggcgaccggggcacgctcgacgccgacgtgcggcgcgtgctcgtgcggatcctgcagcgccggttcctgctcgccgagagctcgcccgccgagtggaagctgctgctcgagcaccagcagatgatcgagtcgcgcctgaacgacctgttcgtgcggctcgtcgtcgaccacgcacgcggggtcgcctacaaggagcaggtgcgcagcgacgaggtcgacgtgccgatcctgctgaaggacgaggcctattcgcgcgccgagacgctcgtgctcgtctacctgcggacggtcttccagcgcgagacgaccgcgggcacggcatccgcccgcgtcgatgtcgaagaggtcgaacagaccgtgctcacgtacttcagcgagaccgacggcacccgcgcgagccagcagcgcgcggtgcgcacggcgatcgcgcgcctggatcgcgaggggatcatcgaggaggagtccgaggggcggtatcgcatcggtcccctcatcgagatcgtgctcagcgcggagacgctgagagagctgcagacctggctggacgagcagacccgggacgcacccgccgaggtcctggcatccgaaactcccgagaaagagctcctcccgtga

SEQ ID NO: 48671 - DNA, 3351 bp, Microbacterium testaceum
gtgaccatgctcgagaccctcttcggactcatcccggctgcgtcccgcggtcagcagtgggtcgccgaagacctgcagctgatcaactggggcggctacgacggcacgcaccgcgtgcgcttcgcgccgaccgcgacgctgctgtgcggcgggtccggctcgggcaaatcgacgctcatggacgcgtacgtcgcgctcatgatgccgcacacgactcccttcaacggcgcctccaacggcgcggtcgtggggcgtccgcgcgggcaggaacagcgcaacatcctgtcgtacggccgcggcaagctcgacgagtcgcgcaccgacgagggcacgaaggtgcgggtgctgcgcggtgacggcgtcgacacgtggaccgcgatcgcgatgacgtgggccgaccatgacggcgcccggttcacggcggtgcgcgcgtggtacatcccggcggcggcgcggacgctcgacgacgccgtgaaggtgcgcgcgaccgtgcacggcgctttcgacctgcgtcagctcgagcgggcggcgcagagccacctatcggacgccgcggtgcgcgcgacgggtctcgacaccctcgcgaccgaccgggagttctcggcccgcctgcacgcggtgctcgggatcggcgcggcgggtgcgggtacgaaggcgatgagtctgctcgcgcggatccaggcggggcagcagatcaccaccgtcgacgacctctacaagcgcatggtgctcgaggagcccgaaacgctcgcggtcgccgaggcggtggtgtcgcacttcgacgggctcgagtcgacgcgcacccgcatgctcgaggcacgccagcaggtgcgcgcgctgcagccgatccgcgggatgaagacgcgcatcgacgaggcggcggagcggttgcggctcatcgaggcgctcgggcggttcagcgaccccgagtcgcgcgcgtcgctgtggcgggcgcagcggcgagtcgacctcctcggcgcggtcgaggacgagctgcgcgagcgcacgcacgcgaccgacgccctcgtccgcgagcggcaggcgctggccgacgcggccgaggccgagcgcgagggtctcggcgacgtcctccgcgccgccggcggcgaccggctggacgtcgcacagcgcgagctccggggactcgagcgacgcctcgccgggatgcagcgcgatcgcgaacgtttcgaggcggcgctcgccgtgctgtcggtcgaggtcacgaccgagaagcagttcacggccctcgtcgacgaagcgcgccgcaccctcggagacgcggatgccaagagcgcggtgcgcgaggcattcgtcgccgccagcagcgcgcacacggacgctcgccagaagctcgcggcgctcgaggccgagcaccggcgcacgcagacccgcgacgacaacatccccccgcgactgcacgaggcgcgcgaagcgctggcggaggcggcgggtctcaccgcggccgaactgcccttcgtcgccgagctcgtcgacgtccgcaccgagttcgagccgtggcgcggggcgttcacgctcgccctcggcgggttcgcgacgactcttctcgtggatgccgcgcacctggcgtccttccgctccgcgatcgacggcgtgcgcctctcggagcgtctgcggttcgagggcgtgtcgaccgggatgccggagcgcacgggtctcgaccccgcgacgctccccgggcgcctggagtaccgccgctcccccttcaccggctggctgcaggatcggctcgaacagcagttcgcgttcgtgtgcgtggacagcgcctccgagctgtccgggcatcgcatggcgttgaccatcgcggggcagacgagccagggcgcgcgcggggctcacggtgggtcttctcggcacagcatcctcgggttctcgagtcgcgtacgcctcaccgagctgggcgagcagatcgtcgccgtacgtcgcgacctcgcgacggcgaaggccacggtcgacgaggccgccgccgcgctcgacgcgttcgacgagcggcggagcgctctcgagaggatcgccgatctgtcgtgggaccaggtggacgtggcatccgtcgagcgcgatctggagcgctggaacgagacgatcgtcgagatcaccgccggaaacccgcgcatcgccgagctgcaggagcagatctcgggcgcgaaggcgcgcgtcgcgcgactgcgggaggagatcggcggagcaaagaccgagcagcaggcgctcgcggcgcggtgggcggaggtcacggacgacgtggacagcgctcatgagcggctcgaacgcgccgaggacgccgagatggagctgtcggcggacgaagccgcgtacctcgacgggttgttcgtcgccccgtcgaatgatgcctcgccgtcgcaactgctcgcgcgcttcgacgccgcgctggagtccgcctcgaaacgcttgctcgaggagcagcgtgcggcccaagagacctggggcgatcagcgcgagagcctccggcgcactctcaccgcgttcaccgaccggtggccgagtccgaacctgctcgccgaccccgacgagtcgctcggtgatttcgagcggatcctcgccgacctcgaggcgagcggcctgcacgagctcgaggcggagtggcgtgactcgctgctgcgcctgtcgggcaacgacctcacgaacctcgactcggcgctgacccgggcgctgcgcgagatccgcgagcgcatcgcgccgatcaacgacatcatgcaggacctgccgttctacgacgacgagcaccggctgcagatcgtgccgcgcgagaaccagtcagaggttcgtcgccggttccgtcgcgagctgcgcgacgtgcgggccgcgatcgacgccgcgtcgtcggacgaggagcgcgaggccgtgtacggacggatggcccggctgatcaatcgcattcggcccacggctcccgatttcgccgacctcgtcgacgtgcgcaatcacgtgcgcgtgagcgccgagcgcttccgcgccgacacgggcgagcacgtcgccctgtacgaccacatcggagagaaatccggtggggagtcgcaggagctcatcgcgttcatcgtcggcgcggctctgcgctatcagctcggggatgccggtgccgagcggccgcggtacgcgccggtgttcctcgacgaggcgctcatcaaggccgacgcgcacttcaccaagcgcgcgatcggcgcgtggcgcggactcgggttccagctcgtcatcggcgcacccaacgacaagtacagcgcgatcgagccgcacgtcgacgtcgagtacgacatcctcaaggacacgcgggggcgttcgtgggcgaaggcgaaggtgggggtcgcggactcggtgtga

SEQ ID NO: 48672 - DNA, 1476 bp, Microbacterium testaceum
gtgaccaccacccgcaccgaagccgcgtacctgcgctcggtgacggcgttcaagaacccgacgctcgacctcttgcacgggcgtttcgcgccgttcgtcgtcgccgtcctgtcggtcgtcttcacccccgatcgtccggccgtcgccgtcgccgacgcgcacgtcgaggtcgccgaggccatcgacgagctgcgcgccgcgggatacgacaccgacgacgaccgccgcatccccgccgggtcggcgcgcgacatctgtcgcgggtgggtgcgcgtggggtggctggggctgcagatcgaggacgacgtcgaggtctaccgcctctcggcgcacgcggtcggcgcgctcgagatcgccggccgggccggtgggggccgtgcccgcgtctcgcgatcgcgcgtgcgaaccctcctcgacgcggtcgagcggctcgcccgcgacgccgagagcgatcccgctcgccgccgcgaggccctgctcgaggagcgggcggccctggatgccgagatcgcggccctcgacgagggcatcatcgaaccgctcgacgacgaccatctgctcgaagaggccgagaacgtcatccatctcgcgcgcgagctccccgcggacttctcgcgcgtcgcggagtcgatcgccgcgatgcagcgcgacgtcgtcgcggaactccgccgcgacgtgcgcccgaccggtgaggtgctgcgcgagtacctcgaacgcggtcggcaggtgatgcaggcgacccccgagggccgcgcgttccagggggcgctccgcctgatcggcgaccccgagaacatcgacgacctcaccgaccagctccacgccgttctcgcgcagcccttctcgcggctcatgaccccggaacagcgcggagaactggatgccatcgcccgccgcgtcgaggcgggtgtgcaggaggtgctcaccgcgcagcgacgggcctcgcacgtcatcaccgcgcaggtgcgcacccacgacccgatccgcgaccgccaggtcgacgacctgctgcgcggggtgatggcggggctgcaccgctggagtcagacccgctcccccggccgcgtcgagccggtccggacgctcccgctcgccgacgtcgggcatctgcgccagtcgatcagcgacgtccggcctctcggagcgcccgagcccctggcatccgagagtcccgacgtcgagttcgtcgacgccgacacgcgcgcgtggggtgggccgcactacgccgagctcgaggagtacgtcgggcgcctgggcgacggcttcgacctcgccgaggcgttctcgggagcggatgccgagacccgccgccccgtcgacctcgtgggcctgctcgagatcgtgcaccggcgcggtctcgtcgagaccgacgaggtgtcggtcgtcgaggcgattcggcccgacggaacgacgaggcggttcgctttcggcgcggtcagagcaggaaatctttcagaacagggagccgatgactga

SEQ ID NO: 48673 - DNA, 708 bp, Microbacterium testaceum
atgactgacgtgcagaccccgagcatcgatgccgagagcccggcgttcatcgccccggtggcgatggagaacgaccccgacgcgctgttcgccggcgaccggggcacgctcgacgctgacgtgcggcgcgtgctcgtgcggatcctgcagcgccggttcctgctcgccgagagctcgcccgccgagtggaagctgctgctcgagcaccagcagatgatcgagtcgcgcctgaacgacctgttcgtgcggctggtcgtcgaccacgcgcgcggcgtggcgtacaaggagcaggtgcgcagcgacgaggtcgacgtgccgatcctgctcaaggacgaggcctactcgcgcgccgagacgctcgtgctcgtgtacctgcggacggtgttccagcgcgagacgaccgcgggcacggcatccgcccgcgtcgatgtcgaagaggtcgaacagaccgtgctcacgtacttcagcgagaccgacggcacccgcgcgagccagcagcgcgcggtgcgcacggcgatcgcgcgcctggatcgcgaggggatcatcgaggaggagtccgaggggcggtatcgcatcggtcccctcatcgagatcgtgctcagcgcggagacgctgagagagctgcagacctggctggacgagcagacccgggacgcacccgccgaggtcctggcatccgaaacccccgagaaagagctcctcccgtga

SEQ ID NO: 48674 - DNA, 3351 bp, Microbacterium testaceum
gtgaccatgctcgagaccctcttcggactcatcccggctgcgtcccgcggtcagcagtgggtcgccgaagacctgcagctgatcaactggggcggctacgacggcacgcaccgcgtgcgcttcgcgccgaccgcgacgctgctgtgcggcgggtccggctcgggcaaatcgacgctcatggacgcgtacgtcgcgctcatgatgccgcacacgaccccgttcaacggcgcctccaacggcgcggtcgtggggcgtccgcgcgggcaggaacagcgcaacatcctgtcgtacggccgcggcaagctcgacgagtcgcgcaccgacgagggcacgaaggtgcgggtgctgcgcggcgacggcgtcgacacgtggaccgcgatcgcgatgacgtgggccgaccacgacggcgcccggttcacggcggtgcgcgcgtggtacatcccggcggcggcgcggacgctcgacgacgccgtgaaggtgcgcgcgaccgtgcacggcgctttcgacctgcgtcagctcgagcgggcggcgcagagccacctgtcggacgccgcggtgcgcgcgacgggtctcgacaccctcgcgaccgaccgcgagttctcggcccgcctgcacgcggtgctcgggatcggcgcggcgggtgcggggacgaaggcgatgagtctgctcgcgcgcattcaggcggggcagcagatcaccaccgtcgacgacctgtacaagcgcatggtgctcgaggagcccgagacgctcgcggtcgccgaggcggtcgtgtcgcacttcgacggactcgagtcgacgcgcacccgcatgctcgaggcacgccagcaggtgcgcgcgctgcagccgatccgcgggatgaagacgcgcatcgacgaggcggcggagaggttgcggctcatcgaggcgctcggacggttcagcgaccccgagtcgcgcgcgtcgctgtggcgggcgcagcggcgggtcgaccttctcggcgcggtcgaggacgaactgcgcgagcgcacgcacgcgaccgacgccctcgtccgcgagcggcaggcgctggccgacgcggccgaggccgagcgcgagggactcggcgacgtcctccgcgccgccggcggcgaccggctggacgtcgcacagcgcgagctgcggggcctcgagcgacgcctcgccgggatgcagcgcgatcgcgaacggttcgaggcggcgctcgccgtgctgtcggtcgaggtcacgaccgagaagcagttcacggccctcgtcgacgaagcgcgccgcaccctcggagacgcggatgccaaaagcgctgtgcgcgaggcattcgtcgccgccagcagcgcgcacacggacgctcgccagaagctcgcggcgctcgaggccgagcaccggcgcacgcagacccgcgacgacaacatccccccgcgactgcacgaggcgcgcgaagccctggcggaggcggcgggtctcaccgcggccgaactgcccttcgtcgccgagctcgtcgacgtccgcaccgagttcgagccgtggcgcggggcgttcacgctcgccctcggcgggttcgcgacgactcttctcgtggatgccgcgcacctggcatccttccgctccgcgatcgacggcgtgcgcctctcggagcgtctgcggttcgagggcgtgtcgaccgggatgccggagcgcacgggtctcgaccccgcgactctccccgggcgcctggagtaccgccgctcccccttcaccggctggctgcaggatcggctcgaacagcagttcgcgttcgtgtgcgtggacagcgcctccgagctgtccgggcatcgcatggcgttgaccatcgcggggcagacgagccagggcgcgcgcggggctcacggtgggtcttctcggcacagcatcctcgggttctcgagtcgcgtacgcctcaccgagctgggcgagcagatcgtcgccgtacgtcgcgacctcgcgacggcgaaggccacggtcgacgaggccgccgccgcgctcgacgcgttcgacgagcggcggagcgctctcgagaggatcgccgatctgtcgtgggaccaggtggacgtggcatccgtcgagcgcgatctggagcgctggaacgagacgatcgtcgagatcaccgccggaaacccgcgcatcgccgagctgcaggagcagatctcgggcgcgaaggcgcgcgtcgcgcgactgcgggaggagatcggcggagcaaagaccgagcagcaggcgctcgctgcgcggtgggcggaggtcacggacgacgtggacagcgctcatgagcggctcgaacgcgccgaggacgccgagatggagctgtcggcggacgaagccgcgtacctcgacgggttgttcgtcgccccgtcgaacgatgcctcgccgtcgcaactgctcgcgcgcttcgacgccgcgctggagtccgcctcgaaacgcttgctcgaggagcagcgtgcggcccaagagacctggggcgatcagcgcgagagcctccggcgcactctcaccgcgttcaccgaccggtggccgagtccgaacctgctcgccgaccccgacgagtcgctcggtgatttcgagcggatcctcgccgacctcgaggcgagcggtctgcacgagctggaggcggagtggcgcgactcgctgctgcgcctgtcgggcaacgacctcacgaacctcgattcggcgctgacccgggcgctgcgcgagattcgcgagcgcatcgcgccgatcaacgacatcatgcaggacctgccgttctacgacgacgagcaccggctgcagatcgtgccgcgcgagaaccagtcggaggttcgtcgccggttccgtcgcgagctgcgcgacgtgcgggccgcgatcgacgccgcgtcgtcggacgaggagcgcgaggccgtgtacggacggatggcgcgactgatcaatcgcatccggcccacggctccggatttcgccgacctcgtcgacgtgcgcaatcacgtgcgcgtgagcgccgagcgcttccgcgccgacacgggcgagcacgtcgcgctgtacgaccacatcggcgagaaatccggtggggagtcgcaagagctcatcgcgttcatcgtcggcgcggctctgcgctatcagctcggggatgccggtgccgagcggccgcggtacgcgccggtgttcctcgacgaggcgctcatcaaggccgacgcgcacttcaccaagcgcgcaatcggcgcgtggcgcggactcgggttccagctcgtcatcggcgcacccaacgacaagtacagcgcgatcgagccgcacgtcgacgtcgagtacgacatcctcaaggacacgcgggggcgttcgtgggcgaaggcgaaggtgggggtcgcggactcggtgtga

SEQ ID NO: 48675 - DNA, 1464 bp, Microbacterium oxydans
gtgacaggcactcgagtggaagcggcattctcccgcgccgtcaccgccttcagcactccgactctcgacctgctgcacggccgtttcgcccccttcgtcgtggcgtcgctgtctcttctgttcacggcggaccgggtctccatcccgatcgccgacgcccaggccgagctcgcggagatcctcgatgaactcagggatgcgggcgacgatgacgacgatcgccgggtcccttcggggaccggccgcgatgtcgcgaggaactgggtccgcctgggctggttggtgcagcagatcgacgaggacgtcgaggtgtatcgactctccgcgcacgctgtcgaggctctggagatcgcggggcgcacgggcggcgggcgcacgcgcgtatccaactcccgagtgcgcacgctcctcgaggccgtggagcatctggccgacagcgccgaggcagaccccgttcgtcgactcgcccgcctccgggaggagcgcgccgcactcgatgccgagatcgatcggatcgaggagtcgggcagagccgatccactcgatgatgaagagctcttcgaggaagcggaaaacgtgctgcatctggcgcgcgagcttcccgccgacttcacccgggtcgccgaatccctcaaactcatgcagcgtgacgtcgtcgcccatctgcgtcgtgatgagcggccgacgggtgaggtgctgcgcgagtacctgcagcgtgcgcaggatgtcatgaactcgacgccggaaggacgcgccttcgccggcgctctcaagctgatcggcgatccggagcgcatcgatgccctcaccgaccaactgcacggtctgctccgacagccgttcgcccggatgctcgacagcacgcagcgggccgagctcgacgcgatcggacgccgcgtggagcacggggtcgaggaggtgctggctgcgcaacgtcgagcctcgcacgtcatcaccggccaggtgaagacacacgatccgctgcgggaccgtcagatcgacgacctgctgcgtgacgtcatcgccgccctgcacgtgtgggacgggacgggggcgagcgacgcaccggtgcgcagtcttccgctcgccgacctggggcacctcaggcagaccgtgagcagcatccgtccacccgcggtccccgcccctctggccgacgccggggacgtcgagttcgccgacgtcgactcccgcgcgtggggtggtccgaggtatgcggagctcgagcagtacgtcgcggggctcggacccgagttcgatctcgccgccgcattcgccgagagcgacgacgacacccggcgccctgtcgacctcgtcggactgctcgagatcgcccaccgcaacggcatgaccgagagcgagacggtgtcggtggtcgaagctctgcgccccgacggctcgacgcgacgcttcgcgttcggtgccgtcacggcgcgcaacacgaaggaagacgcacatgcctga

SEQ ID NO: 48676 - DNA, 663 bp, Microbacterium oxydans
atgcctgaagagagccccgcgccggaagcagcggtcgatgacccgttcatcgctcccgtccccatggaagaagacatcgaggagcatttcgccggcgaccgcggcaccctcgatccggagatccgccgtctgctcgcccacatccttcagcggcgcttcatcgccgcggagcgcaaccgcaaggagtggacgctgctgctcgatcatcagcacgtgatcgagtcgcgtctgaacgacctgtacctccgacttgtcgtcgaccacggtcgcggtttcgcctacaagcagcagctgcgctccgatgagatcgatatgcctgtgttgctgaaggactccccgtacacacgtgcggagacgctcgtgctcgtgcatctgcgcaccgtctaccagcgggagtccgcggccggcgagtcgtcggtgcgcatcgacatcgaggatctcgagcagaccgtgctgagctacttcaccgatgtcgatggcggaacggcacggcagcagaaggcgatcaggaacgcgatggacagactggatcgcgaggggatcgtgcaggaggagaccagcgggcgctatcggatcacggcgctcgtcgaggtcgtcctcagcgccgagaccctgaaggaactccgcgactggctgcggtcgcaggaagcggtgcaacgatga

SEQ ID NO: 48677 - DNA, 3360 bp, Microbacterium oxydans
atgacgatggtcgacacgctcttcgggctcatccccgccggctcgcggggacagcagtggatcgcggacgagctgcagctgatcaactggggtggatacgacgggggcccgcaccgggtgcgcttctcgccgaacgccacgctgctgtgcggcggctccggctccggcaagtcgacgctgatggacgcgtacatcgcgctgatgatgcctcacacgacgccgttcaacggtgcgtcgaacggcggagtgaccggccgaccgcgcggcgaggagcagcggaacatcctctcgtacgggcgagggaagatcgacgaatcgcgcacggaggacggcaccaagctgcgagtcctccgcggcgacggcgaagacacatggagtgccatcgcgacgacctggctcgaccacgacgggtcgcggttcaccgccgtgcgggcctggtacatcccggcggatgcccgtgtgctggaggacacgacccgggttcgagcgaccgtgaacggggcgttcgacctggcacagttggagaaggccgcgacgcagcggctgtctgatgcgtcggtgcgggcagcgggactggagacgctggcgacggaccgggagttctctgcccggctgcaggcggtgctcgggatcggggcggccgggtccggggcgaaggcgatcagcctgctggccaggatccaagcggggcagcagatcaccacggtcgacgatctgtacaagaagctcgtgctggaagagccggagacgatggcgacagcggatgccgtcgtggcgcacttcgatgagttggagagcacgcgcacccggatgctgacggcgaagcagcaggtcagcgcactcgaacccatccgcggaatcaaggagcgcatcgcggcttcagccgaacgggtgcggatcatcgacgaagtcggagtcttcaccgatccgtcgtccctcgccgcgctctggaacgctcagcgccgcctggatctgctgcgcgaggtcgaggtcgagctgggtgaccgctcccgcgccctcagcctcgccgtgcgggagaagcgcgccctcgtcgacgccgccgatgccgagcgggagggtctgctcgatgtcctgcggcagtccggcggtgaccgcctcgagacagcgcaacgggagctccgcgtcgccgaacgtcgcctggacgacgtgcggcgggaacgcgcgaagttcgacgccatcgtgcgggatctcggtgcggaagtggagaacgccgaccagttcgaggccctcgtggccgacagtcggggttcatcgccgagatcggggatccgggacgcgcgcgtggccttcgccgatgccgagaccgcccgcaggacgaccgagctcgagatctcacgactgcgtcaggagcgcgagcgcaccggtctggtgcgcggcagcattccctcccacctcgacgagtcccgcgccatgctcgcggaggcggctggtctcgacccttcggagcttcccttcgtgggagagctcatcgaggtgcggacggagttcgagccgtggcgcgaggccttcaacctcgccctcggcggcttcgccaggacgctcctcgtcgacgcggagaagctgtcgtccttccgggcggcgatcaactccacgcgcaccccggagcgcctgaactacgagggcgtccccaccggactcctcgaggtgcgcaacgccgatccgcagaccctccccgggaggctcgactacctgccgacccccttcaccgggtggctccagcagcggctgcaggaccggttcggatacgtgtgcgtcgactcatcgtcccagttggacgcccatcagaaggcgctcaccatcaacggccaggtgtcgcagggcagcaggggagcccacggcggtcagggacgcgccaacgtgctcggcttcaccaacgaccgtcggcttcgcgagatcgatgaccagctgcggctgctgaccgtgcgtcacgacggctacgcatcgacggcgcaggacgccgaagccgccctcgaccgcatcgaggcacgatcgaccgcattcgcgaagatcgaggacctcacgtgggagcagatcgatgtcgatgcggtcgaggccgaacgggaacgttggctcgccgtcgaagcggaggtcacgacagccagccccgagatcgcgcagctcaagcgtcaggcggaggatatgcggtcccgcgcgagcacgctccgggacgaggaggcgcgcctcagcaacgaactcgcccagacccaggagcactggggacaggtcaccgacgacgtcgacgcctgtcagagagtgatcgattccgcggcagccacggacctctcgctcggcgagacacatgcgtcgttcctggacggccggttcctgcacgccgagagcggggcgagcgtaaccgcgtcggagcggctcacacacctggacaccgcgctcaggaccgccgctcagcgcctgcacgaggaccgtcgtgaggccgcggaggcccacgagcagcagcgcgagagcatgcggcgactgatgacggggttcctcgagcgctgggacaacctcacgatcctgccggaccccgacgagtccgtcggcgagttcgagagcattctggaggcgttgcagaccaacgggctccacgagctggagaccgagtggcgtgacagtctgctcaagctctcggggaacgacctgacgagcctcgactcgactctcagccggtcgctccgcgagatcaaggatcgcatcgacccgatcaaccgcatcatggaggagctgccgttctacgacgacgaccatcgtctgcagatcaccccgcgcgagaatcagagcgaggcacgcaagcggttccgccgcgagctccgcgaggtgcggggactgatcgacgctgccgagaccgacgccgagcgcgaggccgtgtaccgcaagatgagccgtctgatcggacggatgcgccgtacggcccccgacttcgccgagctcatcgacgtgcgcaaccacgtgcgcgtgagtgccgagcgggtcacagcgacgacgcgggagcatgtcgcgctctacgaccacatcggcgagaagtccggaggggagtcgcaggagctcgtcgcgttcatcgtgggagcagcgctgcgttaccagctcggagatgcgggcgctgcccggccgcgctacgcccccgtcttcatggacgaagcgctcatcaaggcggatgcccacttcacgaagcgcgcgatcggcgcatggcgtggactcggcttccagctcgtgatcggcgcgccgaacgacaagtacagtgcgatcgagccgcacgtcgacgtcgagtacgacatcctcaaggacacccgcgggcgctcctgggcgaaggcgaaggtgggtctgccggacgcggcgatctga

SEQ ID NO: 48678 - DNA, 1025 bp, Microbacterium testaceum
ccctggatgccgagatcgcggctctggaggagggtgtggtcgaaccgctcgacgacgaccacctcctcgaggaggccgagaacgtcatccatctcgcccgcgagctccccgccgacttctcgcgcgtggcggagtcgatcgcggcgatgcagcgcgacgtcgtcgcggagctccgacgcgacgtgcggcccaccggcgaggtgctgcgcgagtacctcgaacgaggccgccaggtgatgcaggcgacccccgaggggcgcgcgttccagggggcgctccgcctgatcggcgaccccgagaacatcgacgacctcaccgaccaactgcacgccgttctcgcccagccgttctcccgtctgatgactcccgatcagcgcggggaactggatgccatcgcccgccgcgtcgaagcgggtgtgcaggaggtgctcaccgcccaacgtcgcgcctcgcacgtcatcacggcccaggtgcgcacgcacgaccccatccgcgaccggcaggtcgacgacctgctgcgcggggtcatggccggccttcaccgctggagccagacccgctcccccggtcgcgtcgagccggtgcgcaccctgccgctggccgatgtgggacacctgcgtcagtccctcagcgacgtccggcccgccggggcgcctgagcccctggcatcggacacgtccgacgtcgagttcgtcgatgccgacacgcgtgcctggggtggtccgcactacgccgagctcgaggcgtacgtggcgggcctcggctccggcttcgacctcgccgaagcgttcgcgggggcggatgccgagacccgccgccccgtcgacctcgtgggtctgctcgagatcgtccatcgcgggggtctcgtcgagaccgacgaggtctcgatcgtcgaggccgtgcgtcccgatggcacgaccaggcggttcgcgttcggggcggtcagagcaggaagctctgcccccgccgacgccgacctcagcggcaccgacgaccatgtgagagagagcactcccgatgactga

SEQ ID NO: 48679 - DNA, 723 bp, Microbacterium testaceum
atgactgacgtggacctgccggaacccgagaccggcgacccggtgttcatcgcgcccgtcgcgatggagaacgaccccgacgcgctgttcgccggcgaccgtggcaccctcgacgccgaggtcagacgcgtgctggtgcggatcctgcagcgccgcttcctgctcgccgagtcctcccccgccgagtggaagctgctgctcgagcaccagcagatgatcgagtcgcggctgaacgacctgttcgtccggctcgtcgtcgatcacgcccgcggggtggcgtacaaggagcaggtgcgcagcgacgaggtcgacgtgccgatcctgttgaaggacgaggcgtactcccgcgccgagacgctcgtgctcgtctacctgcgcaccgtgttccagcgcgagacgaccgcgggcacggcatccgcccgcgtcgacgtcgaagaggtcgagcagacggtgctgacgtacttcgccgagaccgacggtacgcgcgcgagccagcagcgagccgtgcgcacggcgatcgcccgcctggatcgcgaggggatcatcgaggaggagtccgagggccggtaccgcatcgggcctctcatcgaagtcgtgttgagcgcggaggtcttgcgggagcttcagcgctggctcgacgagcagacacgggatgccgagacgtcgacaccgcgtgagcccgaggtcgtggcatccggggcttccgaaggagactcactgtga

SEQ ID NO: 48680 - DNA, 3354 bp, Microbacterium testaceum
gtgaccatgctcgagaccctcttcggactcatccccgccgcctcgcgcggccagcagtgggtcgccgaagatctgcagctgatcaactggggcggctacgacggcccgcaccgcgtgcgcttcgccccgaccgcgacgctgctgtgcggcgggtcgggctcgggcaagtcgacgctcatggacgcgtacgtcgcgctgatgatgccgcatacgacccccttcaacggggcgtcgaacggcgcggtcgtgggacgcccgcgcgggcaggagcagcgcaacatcctgtcgtacggccgcggcaagctcgacgaatcgcgcaccgacgagggcacgaaggtgcgcgtgctgcgtggagacggcgtcgacacctggacggcgatcgcgatgacgtgggccgaccacgacggggcgcggttcacggcggtgcgggcctggtacatccccgccacggcgcgcaccctcgacgacgcggtcaaggtgcgcgcgaccgtgcacggcgcgttcgacctgcgtcagctggagcgggcggcgcagagccacctctcggattccgcggtgcgagcgactggcctggacaccctcgcgaccgaccgggagttctcggcgcggttgcacgcggtgctcgggatcggcgcggcgggagcggggacgaaggcgatgagccttctcgcccgcatccaggccgggcagcagatcaccaccgtcgacgacctgtacaagcgcatggtgctcgaggagcccgagaccctcgcggtggccgatgcggtcgtctcgcacttcgacggtctcgagtccacgcgcacgcgcatgctcgaggcgcgtcagcaggtgcgggctctgcagcccatccgcgcgatgaagacgcgcatcgacgaggcgtcggagcgcctccggttgctcgacacgctcggacgcttcggcgacccggagtcgcgagcgtcgctgtggcgcgcgcagcggcgggtcgacctgctcggcgcggtggaggacgagcttcgcgagcgcacgcacgccaccgacgcgctcgtgcgcgagcgacaggctctcgcggatgccgcggaagccgagcgcgagggactcggcgacgtgctgcgcgcggccggcggcgaccggctcgacgcggcccagcgcgaactgcggggcctggagcgacggctcgccgggatgcagcgcgaccgggagaggttcgaggcggcgctggccgtgctgtcggtcgaggtcacgtcgtcgaagcagttcgccgccgtcgtggacgaggcccgccgcacgctcggcgatgtcgacgccaagaccgccgtgcgcgacgcgttcgtcgcggccagcagccggcacaccgccgcgcgtcagcagctcgcctccctcgaggccgagcaccgccgcacgcagacgcgcgacgacaacatcccgcagcggttgcacgaggcgcgggaggcgctggccgaggctgccggtctcaccgcggccgagctgccgttcgtggccgagctcgtggacgtccgcaccgagttcgagccgtggcgcggggcgttcacgctcgccctcggaggtttcgcgacgacggttctcgtggatgccgcgcacctggcatccttccgctccgcgatcgacggcgtcaggctgagcgagcgcctccggttcgagggggtgtcgacgggactgcccgaacgcaccggtctcgaccccgcgacgcttccgggccgcctggagtaccgccgctcccccttcaccggctggttgcaggaccggctcgaacagcagttcgcgttcgtgtgcgtggacagtgcccgagatctcacggggcaccggctcgctctcaccctcaccggccagacgagtcagggttcgcgcggcgcgcacggcgggtcgacgcgccagagcatcctcgggttctcgtcccgcgtgcgcctgagcgaactcggcgaacagatcgtcaccgtgcgccgtgacctggcggccgcccaggccgcggtcgacgaggccgccgccgccctcgacgcgttcgacgcgcggcgcagcgcctatgagaagatcgcggatctgtcatgggaccaggtggacacggcatccgttcagcgcgagatcgaccgctggaacgagacgatcgtcgagatcaccgcgggaaacccgcgcatcgcggagctccaggagcagatcgccgggacccgggcgcgcgccgcccggctgcgcgaggagatcggtgcggcgaagaccgagcagcgggccctcgccgcgcgctgggccgaggtcaccgacgacgtggatgccgctcagctcctgatcgaacgggccgaggacaccgagctggtgctctcggccgacgacgccgcgtatctcgacgggctcttcgtggcgccttccacggaggattcttcgccgtctcagcgtcttgcccggttcgacgcggctctcgagagcgcgtctcgtctgctgctcgaagagcagcgcgccgcgcaggagaccttcgccgatcagcgcgagagcctgcggcgcacgctcacggcgttcaccgaccggtggccgagccccaacctgctcgccgaccccgacgagtcgctcggcgacttcgagcggatcctcgccgacctggaggccagcggtctgcacgagctcgaggcggagtggagggattcgctgctgcgcctgtcgggcaacgacctgacgagcctcgattcggcgctgacgcgggcgctccgtgagattcgcgaacggatcgcgccgatcaacgacatcatgcaggacctgccgttctacgacgacgagcatcggctgcagatcgtgccccgcgagaatcagtcggaggtgcggcgccgtttccgccgcgagctgcgcgatgtgcgtgccgcgatcgacgcggcctcctccgacgaggagcgcgaggccgtctacggccgcatggcgcggctgatcgggcggatccgttcggcggctcccgacttcgccgacctcgtggatgtgcgaaatcacgtgcgggtcagcgccgaacgcttccgcgccgacacgggcgagcacgtggctctgtacgaccacatcggcgagaaatccggcggcgaatcgcaggagctgatcgcgttcatcgtcggcgccgccctgcggtaccagctcggggatgccgggtcggagcgtccgcgttacgccccggtcttcctcgacgaggcgctcatcaaggccgacgcgcacttcaccaagcgcgcgatcggcgcgtggcggggcctgggcttccagttggtcatcggcgccccgaacgacaagtacagcgcgatcgagccgcacgtcgacgtcgagtacgacatcctcaaggacacgcgcgggcgctcgtgggcgaaggcgaaggtggggttgccggcgggggcgtga

SEQ ID NO: 48681 - DNA, 501 bp, Methylobacterium radiotolerans
cacgtgatggaccgcccggacccgagcggcgtcgagcgcgtggcggcgatgctgcgcgccgtcggcgggtccgagatcgcccccgaggtgccgggggacgtctcgctgctgcggccgccgatcggccacgcgcatctccaggcgccgcgggcccgcaagtcggccatcgacatggagcccctgcccgacatcgaggacgaccccgtggtcgacgccttcgcggccgccaaggcggagttccggcgccgcaccaccgtgaccccggagagcatgagcgccttcgtggaggcccgcctcggcaaggccgtgcgcctgcgcgggtcgcagatcgtgatcgcgggcgtcgacgacttcatcgtgttccagcgcctgcgcgagatcgacgtgctgttcgacgccaagctcggcgcgcgctacgccctgacccggctgcccgagcgggttgtcaacggctggctggactgcccggacttcctgctggagcgccgtccccgtgcttga

SEQ ID NO: 48682 - DNA, 627 bp, Methylobacterium radiotolerans; identical to SEQ ID NO: 48667

SEQ ID NO: 48683 - DNA, 2655 bp, Methylobacterium radiotolerans
gtgtacgtcctcaccgacatcgccatctcgaactggtacctgatccgccgcgagcagatccgcctgcgcggcgccgcggcgctggtcgggccgaccggggccgggaagtcgacgatcttcgacgcggtcggcacggtgctggccggcaacaacgccagccgcctcgccctcaacgcctcggcctccggccgcagcgcccgcacggtgcgcgactactgcctcggctggatcagcgacccggcggagggcggccgcccgacgcgggaatcctgcgagaccgtgctggtcctggtcttcgagaaccccgattccggccgcgtggtctcggtcggcctcgccctggcggcccgggccgtggagccgaaggagaccgtgctgtcgcgcttcatcgcggtcgggcaccggttcgaggtcgccgactacgcgcgcaccgctcccggcggcacctacacggcgccctggagcgagatcgccgccgacctgcgcgcccgcgcgtcgagcttcaccgagtaccgcacctccggcgagcgcttcacggccgacgtgctcgcgaccctgcgcgagggggcgccggcgccggagccgcgccacttcctgcgcagcttcgccaacgcggtggcgttcaagccgatcttcgacaccagcgcgttcgtgcgcgccttcgtgctcgacccggagcccctcgacgtcgagcgcgtgcgccactcgatcgccaactggcggcgcctcctggagaccatcgccgaactggagagccggctcgggcgcctgcggcgcctgcgcgaccgctacgaggcctggggcgaggcggtcctggccgccgcgacccacgagctgcgggcggcgagcgccgagctgcgccgccgcagcctcgacctcatcgccgtccggagccgcctccgcgagggcgccgacaccctgcgcatcgcgcgcgaacgcgtcaccgcgagccgaggctacgtccgcgagatcgacggcgagatcgccgagaagaaggcgctggccgccgcgagcgccgccgagggccggctcgcggcctcgacgcttggcctgtccatgctggagcgggaccggaaggagctgatcggccggatcggcgacctcgtggggctcgtcgggcagatggccaagctccagcccgtcgccccgctcctgcgtcagagctgcccgcaggcggcccgcctcgccgaggcctgcgcccgggcgggcctgcgccgggaatcctcgcccgaggagatcctgcgccccgagggcccgctggccgagctggcagacggactggcgcgcctgcccgatttcgacgaggccctggagcgggccgccgaggacgcggcgctcaaggcccgggcccaggagagcgaggccgagcgcacggccccgcgcaccggcggcggcccggcggcgcgcctgtcctccgacacggtggcgtttcgcggcgagctggagcggcgcggcatcgacgcgctgccgatctgcgagctggcggagatcgtcgatccgacctgggggccggccctcgaaggcctgctcgggcgcgcccgcgaggcgctggtggtcgcccccgaccggctgagcgaggcgctcggcgtgctgcaatcgggccgcgaccgcttcagccgttgcatcctggtgaagaccaccgacaccgccaagcagcggtcccgccgctacgacgacgggccgctcaccgtgatcgagaccagcgacccccatgcggaggccttcctcggcgtgcggctcggcggctacgacctcgcccgggacgatgccgaactggcgcgcctgtcccgcgccgtggcgccgagcggtcggaccacggccggcatggcctacacggtgacccgcaacgtcgacctgctgatgactcgcggtcatcgcgggccgaccgccgacagccgccgcgcccacgagatcgccgtcgcggaggcgcggcgcctgcgcggcgaggccgcggtcctgcgcgaggccgcccggacggccgccgcgatccgggcccgcgtcgcccggggtctcgacgacgtggaggccttgcgggccgagctcgacgggctcgagggacggcggcgcacgctccagaccgagcgggagggcatcgagaagcgcgacacggcggggctcaccgccgagatcgccgcgctgaccgccgagcgggtcggctacctgcgggaactgtcggaggagctggagccgaagctcgatcgtctgctcgccgacgaggcggccctgcgcgcccggatgggacctgtgcgcgaggccgtccgcgccgccctgtcggcccgccgcgcggccctgcgccagctgagcgggggcgacgcggcgcgggtgcgcctcgcccgcgccgagccgttcgacctcggtgcggtcgccgaggcgcggcggtcgcttgccggactcgacgccaaggcggccggggcccgggtgagtgccgagcgcggcctcgcccgcgattccgccgaggccgctcgctcgcacggccggattgccgagcgcgagctggcggaggcctgcgccgcctggcgggtggagaacccgctcgcctccggggacgccccggcgatcgacggcttcgcctgggtgcggcgggaatacgaggcggtcgaggggcacgagctgcgccgctaccgggcgcaggccgagcgggccgaggccgagatg

SEQ ID NO: 48684 - DNA, 1476 bp, Microbacterium testaceum
gtgaccaccacccgcaccgaagccgcgtacctgcgctcggtgacggcgttcaagaacccgacgctcgacctcctgcacgggcgtttcgcaccgttcgtcgtcgccgtcctgtcggtcgtcttcacccccgatcgtccggccgtcgccgtcgccgacgcgcacgtcgaggtcgccgaggccatcgacgagctgcgggccgcgggatacgacaccgacgacgaccgccgcatccccgccgggtcggcgcgcgacatctgtcgcgggtgggtgcgcgttgggtggctggggctgcagatcgaggacgacgtcgaggtctaccgcctctcggcgcacgcggtcggcgcgctcgagatcgccggcagggccggtgggggccgtgcccgcgtctcgcgatcgcgcgtgcgaacccttctcgacgcggtcgagcggctcgcccgcgacgccgagagcgatcccgctcgccgccgcgaggccctgctcgaggagcgggcggccctggatgccgagatcgcggccctcgacgagggcatcatcgaaccgctcgacgacgaccatctgctcgaagaggccgagaacgtcatccatctcgcgcgcgagcttcccgcggacttctcgcgcgtcgcggagtcgatcgccgcgatgcagcgcgacgtcgtcgcggagctccgccgcgacgtgcgcccgaccggtgaggtgctgcgcgagtacctcgaacgcggccggcaggtgatgcaggcgacccccgagggccgcgcgttccagggcgcgctccgcctgatcggcgaccccgagaacatcgacgacctcaccgaccagctccacgccgttctcgcgcagcccttctcgcggctcatgaccccggaacagcgcggagaactggatgccatcgcccgccgcgtcgaggcgggtgtgcaggaggtgctcacggcgcagcgacgggcctcgcacgtcatcaccgcgcaggtgcggacccacgacccgatccgtgaccgccaggtcgacgacctgctgcgcggcgtgatggcggggctgcaccgttggagtcagacccgctcccccggccgcgtcgagccggtccggacgctcccgctcgccgacgtcgggcatctgcgccagtcgatcagcgacgtccggcctcccggagcgcccgagcccctggcatccgagagtcccgacgtcgagttcgtcgacgccgacacgcgcgcgtggggtgggccgcactacgccgagctcgaggagtacgtcgcgcgcctgggcgacggcttcgacctcgccgatgcgttcgcgggggcggatgccgagacccgccgtcccgtcgacctcgtgggactgctcgagatcgtgcaccggcgcggtctcgtcgagaccgacgaggtgtcggtcgtcgaggcgattcggcccgacggaacgacgaggcggttcgctttcggcgcggtcagagcaggaaatctttcagaacagggagccgatgactga

SEQ ID NO: 48685 - DNA, 708 bp, Microbacterium testaceum
atgactgacgtgcagaccccgagcatcgatgccgagagcccggcgttcatcgccccggtggcgatggagaacgaccccgacgcgctcttcgccggcgaccggggcacgctcgacgccgacgtgcggcgcgtgctcgtgcggatcctgcagcgccggttcctgctcgccgagagctcgcccgccgagtggaagctgctgctcgagcaccagcagatgatcgagtcgcgcttgaacgacctgttcgtgcggctcgtcgtcgaccacgcgcgcggcgtggcgtacaaggagcaggtgcgaagcgacgaggtcgacgtgccgatcctgctgaaggacgaggcctactcgcgcgccgagaccctcgtgctcgtgtacctgcggacggtgttccaacgtgagacgaccgcgggcacggcatccgcccgcgtcgatgtcgaagaggtcgaacagaccgtgctcacgtacttcagcgagaccgacggcacccgcgcgagccagcagcgcgcggtgcgcacggcgatcgcgcgcctggatcgcgaggggatcatcgaggaggagtccgaggggcgctaccgcatcggtcccctcatcgagatcgtgctcagcgcggagacgctgagagagctgcagacctggctggacgagcagacccgggacgcacccgccgaggtcctggcatccgaaacccccgagaaagagctcctcccgtga

SEQ ID NO: 48686 - DNA, 3351 bp, Microbacterium testaceum
gtgaccatgctcgagaccctcttcggactcatcccggccgcgtcccgcggtcagcagtgggtcgccgaagacctgcagctgatcaactggggcggctacgacggcacgcaccgcgtgcgcttcgcgccgaccgcgacgctgctgtgcggcgggtccggctcgggcaagtcgacgctcatggacgcgtacgtcgcgctgatgatgccgcacacgacccccttcaacggcgcctccaacggcgcggtcgtggggcgtccgcgcgggcaggaacagcgcaacatcctgtcgtacggccgcggcaagctcgacgagtcgcgcacagacgagggcacgaaggtgcgggtgttgcgcggcgacggcgtcgacacgtggaccgcgatcgcgatgacgtgggccgaccacgacggcgcccggttcacggcggtgcgcgcgtggtacatcccggcggcggcgcggacgctcgacgacgccgtgaaggtgcgcgcgaccgtgcacggcgctttcgacctgcgtcagctcgagcgggcggcgcagagccacctgtcggacgccgcggtgcgggcgacgggcctcgacaccctcgcgaccgaccgcgagttctcggcgcggttgcacgcggtgctcggcatcggcgcggccggggccgggaccaaggcgatgagcctgctcgcgcgcatccaggcgggacagcagatcaccaccgtcgacgacctgtacaagcgcatggtgctcgaggagcccgagacgctcgcggtcgccgaggcggtggtgtcgcacttcgacgggctcgagtcgacgcgcacccgcatgctcgaggcacgccagcaggtgcgcgcgctgcagccgatccgcgggatgaagacgcgcattgacgaggcggcggagcggttgcggctcatcgaggcgctcgggcggttcagcgaccccgagtcacgcgcgtcgctgtggcgggcgcagcggcgggtcgacctcctcggcgcggtcgaggacgagctgcgcgagcgcacgcacgcgaccgacgccctggtccgcgagcggcaagctctggccgacgcggccgaggccgagcgcgagggactcggcgacgtcctccgcgccgccggcggcgaccggctggacgtcgcacagcgcgagctccggggactcgagcgacgcctcgccgggatgcagcgcgatcgcgaacgtttcgaggcggcgctcgccgtgctgtcggtcgaggtcacgaccgagaagcagttcacggccctcgtcgacgaagcgcgccgcgccctcggagacgcggatgccaagagcgctgtgcgcgaggcattcgtcgccgccagcagcgcgcacacggacgctcgccagaagctcgcggcgctcgaggccgagcaccggcgcacgcagacccgcgacgacaacatccccccgcgactgcacgaggcgcgcgaagcgctggcggaggcggcgggtctcaccgcggccgaactgcccttcgtcgccgagctcgtcgacgtccgcaccgagttcgagccgtggcgcggggcgttcacgctcgccctcggcgggttcgcgacgactcttctcgtggatgccgcgcacctggcatccttccgctccgcgatcgacggcgtgcgcctctcggagcgtctgcggttcgagggcgtgtcgaccgggatgccggagcgcacgggtctcgaccccgcgacgctccccgggcgcctggagtaccgccgctcccccttcaccggctggctgcaggatcggctcgaacagcagttcgcgttcgtgtgcgtggacagcgcctccgagctgtccgggcatcgcatggcgttgaccatcgcggggcagacgagccagggcgcgcgcggggctcacggtgggtcttctcggcacagcatcctcgggttctcgagtcgcgtacgcctcaccgagctgggcgagcagatcgtcgccgtacgtcgcgacctcgcgacggcgaaggccacggtcgacgaggccgccgccgcgctcgacgcgttcgacgagcggcggagcgctctcgagaggatcgccgatctgtcgtgggaccaggtggacgtggcatccgtcgagcgcgatctggagctctggaacgagacgatcgtcgagatcaccgccggaaacccgcgcatcgccgagctgcaggagcagatctcgggcgcgaaggcccgcgtcgcgcgactacgggaggagatcggcggggccaagaccgaacagcaggcgctcgcggcgcggtgggcggaggtcacggacgacgtggacagcgctcatgagcggctcgaacgcgccgaggacgccgagatggagctgtcggcggacgaagccgcgtacctggacggtttgttcgtcgccccgtcgaacgatgcctcgccgtcgcaactgctcgcgcgcttcgatgccgctctggagtccgcctcgaaacgcttgctcgaggagcagcgtgcggcccaagagacctggggcgatcagcgcgagagcctccggcgcactctcaccgcgttcaccgaccggtggccgagtcccaacctgctcgccgatcccgacgagtcgctcggcgatttcgagcggatcctcgccgacctcgaggcgagcggcctgcacgagctcgaggcggagtggcgtgactcgttgctgcgcctgtcgggcaatgacctcacgaacctcgactcggcgctgacgcgcgccctgcgcgagattcgcgagcgcatcgcgccgatcaacgacatcatgcaggacctgccgttctacgacgacgagcaccggctgcagatcgtgccgcgcgagaaccagtcagaggtgcggcgccggttccgtcgcgagctgcgcgacgtgcgggccgcgatcgacgccgcgtcgtcggacgaggagcgcgaggccgtgtacggacggatggcgcgactgatcaatcgcatccggcccacggctccggatttcgccgacctcgtcgacgtgcgcaatcacgtgcgcgtgagcgccgagcgcttccgcgccgacacgggcgagcacgtcgcgctgtacgaccacatcggcgagaaatccggcggggagtcgcaagagctcatcgcgttcatcgtcggcgcggctctgcgctatcagctcggggatgccggtgccgagcggccgcggtacgcgccggtgttcctcgacgaggcgctcatcaaggccgacgcgcacttcaccaagcgcgcaatcggcgcgtggcgcggactcgggttccagctcgtcatcggcgcacccaacgacaagtacagcgcgatcgagccgcacgtcgacgtcgagtacgacatcctcaaggacacgcgggggcgttcgtgggcgaaggcgaaggtgggggtcgcggactcggtgtga

SEQ ID NO: 48687 - DNA, 1470 bp, Xanthomonas axonopodis pv. manihotis
atgaagcaccaggcacgtatctccggctaccggcaactgcgcgagcagccggtatggaaactgctcgccgccgaccacgcccccgaactgatcggcctgctgcagacggtgctgatggatggcgaacgccgcctgccgtcggcggtgttgcacgagcgtttgcagcgccagctcgacgccttgcgcgccgacgagctgtcgcgcgaactgccgcgtaccgcacaggcgtacctggcgcattggctggcacagggctggctggaacgccgcctgcccgaaggcgcaaccgaagaagaatacgaactctcgcgtgccgcgacccaggccatccgcttcatcgccggcctgcgcgaaagcagcagcagcgccactgaaagccgcctgtcgttggtgatccagcaactggtgcagctggccgggcagaccgaagccgatccggagctccggctggccgcgctgcgcgacgaacgcgcgcgcatcgatgccgagatcgaacgcgtggcttccggccgcgtggccgcgctggacggcaaacgcgcgctggaacgcgcgcgcgacctgatccatctctccgacgagctggccgaagatttccatcgcgtgcgcgacgacttcgagcagctcaaccgccaattccgcgagcgcatcatcgacgacgaaggcgcgcgcggcgacgtgctcgaacaattgttcaatggcgtggatgtgattgcagacagcgaggccgggcgcaccttcgaggcgttctggagtctgctcaacgacacccagcaaagcagccagctcgaccaggcgctggatgcgctgcttgcccgtgggttcgcccgcaagctcgatcgccgcgaacgcgccttcctgcgcgggctgaccggcacgctgctggagcgcggcggcgaggtgcacacggtgatgcagcatttcgcgcgcagcctgcgcgggttcgtgcaaagccgtgggtatctggaacagcgccgactcaatcaattgctcaagcaggcgcagggcgaagccttgcaattgcgcgacagcctgcacgccaccaccgctaccggctatacgcaggcgctcagcagcagccgtctgcgttcgttgtcgcaatggcggctgcacgatccacggctgacccaggtggacgggcgcgtacaggccgccgatgcggccgagatctcgctggacagcgtgggcgatctggtcgcgcagtcggagatcgatgtgcgcagcctgcgccgcgacctgcacgagctgcttggccaacgcccgcggctgacgatcggcgacgccttgcaacaacgcccggccgtgcagggcctgggcagcgtgatcggctacctgtcgctgggcacgcgccacggcatggtgatcgaaggacagatggaaacggtgcaatgggaaggcagcgacggcgccgtgcggcgcgcgcgcattcccttggtgtggtttacccgggagaaacgcaatgaactggtctga

SEQ ID NO: 48688 - DNA, 702 bp, Xanthomonas axonopodis pv. manihotis
atgaactggtctgaggacaccggcctggacgccgacgagagcaccggggcggcgtccatcgacgagcgcatgccgatgacccacacctccagtgccgagccgcgcggcgagctgttcttgggcgataccggcacgctgccgttcgacgcgcggcgcgcactgtgccagttgctggcagggcccagcatcgatgcgcaacgtcacggcacgctgtggccggcgttgttgcgcaacgaggtggcgatccgccaggtgctgtgcgagctgtttctggagttggtgctcgaccgcgagggtggggtggccttcacccgccaggccgacaccgccgagctggaatcgcccaccttgctgcgcagcgcgccgctgacctttatcgagtcggtgttgctgctgttcctgcgccagcaactggccgaggccgatacgcgcggcgagcgcgcggtggtggacgaggcgcagttggtggaggcgttgtcggtctacgagaagaacgtgtccaccgatcgggcgggcttcgcgcggcgggtgatgacggccatcggcaagatgcgcgacaaccagttgctgtcgcgcttgcgcggcagcgaggagcgctatgaagtgtcgccggtgttgaagctgttgttctcggcagaggatgtgcaggcgttggtggtggcgtatcgggagctgcgtgagggggaggttgcgttggattga

SEQ ID NO: 48689 - DNA, 4023 bp, Xanthomonas axonopodis pv. manihotis
atgaattcccagtccaacctgtcgccggcgtcgccgggtgcttccttgtttgccgagacgcttgccgagcaacgtgcgcagcagttccgcatgcgccgcttgcaggtgcacaactggggcaccttcaacgggctgaccgaagtgccgattgcggaaaagggcttcctgttcgttgggcgttcgggttcgggcaagtccaccttgctggatgcgatgtcggcactgctgacgccgccgagcatcgtcgacttcaacgccgccgcgcgcgaagccgagcgcagcgggcgcgatcggagtctggtgtcgtatgtacgcggtgcgtgggccgatcagcaggacagcgcgtccggcgaaatcgccacccaatacctgcgcaagggcgcgacctggaccgcgctggtgctggaatacgcaaatgcgcacggcgaggcggtgagcctgatccgcttgttctggatcgccggcagcggtaacgcggcagccgatgtgcggcggcactacattgtcgcgccacgccgtttcgacgtggcgaccgagctggatggcttcgatctggacctgcgcaagctcaaggcgcgattgggtgaggaagtggcgcatttcgacggcttcgccggctatgcagaacgcttccggcatgcgctgggcatcggcaacgagatggcgctgcggctgctgcacaagacccagtcggccaagaacctgggcgatctcaatgcgttcctgcgcggcttcatgctggatgagccgcgtaccttcgaagcggccgatcagctggtggaggattttgccgaactcgatggcgcccaccatgcggtggtcaccgcgcggcgccaggtggaaacgctgacccccgcgcgcgagcatcatgcggcgctgatggcgttgcgccacagcgttggcgagttgcgcgagctgcagttgggcgtggacagctaccgcgagcagcagcggctggccctgctggatgagcgcttgcaggagctcgataaccaggaccgtggactggccggcgaagaaggccagcgccgcgaatcgctggataaccacgaacaaaaactggttggcttggagcgcgagcagcgtgctgccggtggcgagcagatcgaggaactggaacgcgagcgtgcgcgtgtggagcgcgagcgcgacgaacgcctgcgtcgccgtgcgcagatcgaacaggcctgccgccagctcggtaccgccctggcagccggcgccagcggctttgccgcgcaggtcgcgcatgcgcaaaccgtgctggataacggcaagcacgacgccagcgcgctggacgaggcgatcgccgaacggatgggtgcgcggcgcgacgacgaacgccgctttgccgaaatccgtgccgagctggaggccctgaagaaggcaccgtcgagcatgcccgcaccgatgcaggcgctgcgcgcgcgcttgtgcgaagacaccggcattgccgaggctgcgctgccgttcgtgggcgagctggtgcaggtgcgcgaagaccaatcggcctggcgcggtgccatcgagcgtgtgctgcacggcttcgcgcagtcgctgctggtggacgagcggcattacgcgcaggtcagtgaatgggtcaaccgcacccatatcggcacgcgcctggtgtacttccgtgtgcgccgtaatgacgagctgcactcgcggcgggtcgatcccggcgcgctgcccggcaagctgcaactgcgcgagcacgcctttaccgaatggctgcgcaacgagctgacccgtcgcttcgactacgcctgcgtggacaacgccgccgcactgcgcaacgccgaccgcgccatcacccgcgagggccaggtcaagcacccgggcgatcgttacgaaaaggacgaccgccacgccgtcaacgaccgcaagcgttggctgctcggccacgacaaccgcgacaagctcaaggtgttcgagcgcgaagcgcaggcgctggcccagcgcatcgccagctgcgatgccgatgtcgcagcgctgcgcaagcagcgtgagcaggaccaggagcgccaactggctgcccacacactggtggagcgcgactgggacgagatcgacgtcggtcccaagctgcagcgcctgagcgatatcgacgaacagctggtgcagctgcgcgaaggcaacagtggcctgcgcgcgctcggccaggccatcgacaccgcacgcaccttgcgcgaccaggctaagcgcacttatgaaaatgtgcggctggagcgcgcgcaactggcgcgcgagcgtgtgcggctcgaacagcagcatgccgcatgtgcgggccgcgccggcagcgctacgctcacgcccacccagttgcagggcttgcgggaacggctcgccgccttgacgccgctgtcgctggacaatctggaagcgcatttccgcgtggtcgaacgtggcctggccgagcagctggccgacagccagggccgcgacagccggctcagcgcgcagttgctggaatgcttccgcaagtattgccagcagtggcccgaagacagcggcgatttcaccgtaagccttgccagcgccgacgatttcctcgcgcgcctggaccggctggaaagcgatggcctgccgcggcacgagcatcgtttcttcgatttgttgcagacccagagcaagaacaacctgctggccttgcagcgacacaccgccgaggcccacaagggcatcaagcagcgcatggacgaggtcaacgccagcctggagcaggtgccgttcaaccgcgacaccatcctgaccatcgaggtcggcgaccgccgcctggccgaagtgcaggaattccagcagcagttgcgcgcagtgctgtcgcatcaacagaccgaagaccgagccctggccgaagcgcagttttccaccttgcgcgcgctggtggcgcgcctgggcgcgcaggaaccggaggcacgccgctggcgcgagcaggtgctggacgtgcgcctgcatgtggagttcatcggtgtggagctggacgcccagacgcgtgcgcaggtggagatctaccgcagcggcgccggcaaatccggcggtcagcgccagaagctggcaaccacctgcctggcggccgcgttgcgttaccagctcggcggcgaagacggcgaactgccgcgctactgcgcggtggtgctggacgaagccttcgacaaggccgacaacgaattcactgcgctggcgatgaatatcttcgagaacttcggcttccagatggtggtggccacgccgttgaagtcggtgatgaccttggagcccttcatcggcggcgcgtgctttgtcgaaatcagcggccgccacaactccggcgtgttgctgatcgaatacgacgagcaggcacagcggttgaagctgcccgagcacgcgcgtggcgatgagccggcagttgccgatgccgttgatgctgcgcctccgatcgaggctgcgggcgagccggcaggagtgcagggcgctaccagcgcagatggcatggcaattgacggcgccgcagtgcccacggcatcgcctgcagccgatgagacctcgtccgcggcgccggaaacgcagactggtcagcgcacgccggcagtcgcgacggcgaacaagcagaacaagaccgccaagaccgcatcttccacgcgcgctgcggcacagtcgcaagcaatgcagaccaagaagtcgacttcgcgcactccagctttggctagcaaggcggcgtccgacaaacgcgcctcgggtgcgtcggcggtgccttcggcagctgcatccaggtccagcgtcggcaagaccactcggtcttcgaaaacaccgggcaagccgattgcggccacaaacgcatccagcgccacatccaggaaggtcgccaccgcctctgcggcggtgaaaactgccgcagccaagccacgtgcaacagccgcatcgaccggacagccagtacgcggtgccggcaagacaagctccaagcgcgcggcgacgactgcttcaccggccaaaacgcgcggcgccaagccaggcacggcgcagtcgcgcggcaagcgctga

SEQ ID NO: 48690 - DNA, 1455 bp, Pseudomonas aeruginosa; identical to SEQ ID NO: 44175

SEQ ID NO: 48691 - DNA, 756 bp, Pseudomonas aeruginosa; identical to SEQ ID NO: 44176

SEQ ID NO: 48692 - DNA, 3387 bp, Pseudomonas aeruginosa; identical to SEQ ID NO: 44177

SEQ ID NO: 48693 - DNA, 1194 bp, Pseudomonas aeruginosa; identical to SEQ ID NO: 44178

SEQ ID NO: 48694 - DNA, 1461 bp, Pseudarthrobacter sulfonivorans
gtgccccgctccgccaggtcatccgctgacgcgatcagtgcccggctccgggacctcgaactcctcacgaagggacccgcctgggccctgacgcgctcggcgccctgggtgatcgcggtgctgcaggcatcctttacccgcacccgtccgcagcttccgctcgaggagttccacgccgacgtcgactccttccttgagcagctccggcgccaggaacccgggccgggtggtgccgccatcggcacgtcgtccggaaggaactatgcggacgagtggacgcgcaagcatttcctgacccgccgcaaccagtcggggcagatcgtttacgaggtgaccgagccggccgcccgcgtgcttgcattcctggacagcctctccagcgagcggtccacgctgaacggctcccggctgggtaccctgctgggagacgtggagaagctggccaatgagaccaatccggaccagagtgcccggctggaatcccttgaggacgagatcggggaacggcagcagctgatccaggacatcagctccggcgactttgacggcctgctggacgacgacgaagcggtggaagccgccgggaacatcctggacctcgccgccagcctgcccgccgactacaaaaagatgcgcgaccgcatcgaggaactggtgggcgagctgcgcaaccagatcatcgaggagtcgctgagcaaaggcgccaccatggcgcaggtgctcgacgcggacaagcggctgcggcagagccccgagggcaggaccttccgctccttcaccgcattcctcgaagacccgcagcagcagctccggttccggtcggccatcggtgaggtcctcagccggcagttcgccgacgacctttcgccggaggaccgcgagacgctcaagaacctggtggccgagctccgccaccagcacagccagatccagcggatctacggcaagctcagcgaaagcctgaacacctacgtccagagcgacgacttccgccagtccgtccgtctccggaaggtgctgcgcgaggccgagcaggccatcaggtccctgccgtatgaacgcgaacggccgggcctggtccgcggtccggtgctgttcaacgccgggttcgaatcgctggccatggtcaagctctacgacccggacgagttcgccgttccgcccaagctggctgaccccatcgccttcagcgactcagaccgggtgcgctcgccgaggacgggcaaagcacgtcccgacgccatccgggccgccgtggccggcgcgtccaccctggccgaggcctgggggcagctgccgccggaggaacagcacatcaactccatccgcgcactcctctcgcacgccctccaggatggcgcggcctttgaccgcgaggcctgggatggcctggactacgaacagatcgacggcaccacccgcacggcgtacctgccggtggtcaccctcaagaaggattga

SEQ ID NO: 48695 - DNA, 966 bp, Pseudarthrobacter sulfonivorans
atgactgaagaaattacgacggcggcacctcccgttgaggaggccgcaccggcggttgagcccgagatccaagggatttcgacaggctcaatcaccaggggcgccggagtcactccccgcgacacttttgtggacggcgcggcactgtttcccggcgacaccggcgttctctcgatgaaggtgcgccaggcgctggtcaagctgctcaagggtccgtacgttgacggcggccgcgacgagaagctgtggaccacgctgctggacaatcagatcatcctgcgcagccgcctgtccgagctgttcctgaccctgcagctggaccacgagcgcaagatcgccgtcctgcgcccggtggatcctgaggccatcggcggcagtagccggtcgagcatcctgcgccaacagcgtgcgctgagccgggtggagaccatcgtgctgctccgcctgcggatgctgctggaccgccacgtcacggcccagaccgatgccaccatcacccgcgaggaaatcgccgacctcgtggcccactaccagcccgccggacagcaggacgcgctgcgggattcggacgtggtcacccgggccatcaccaagctcctggcccgccagctgcttctcaccaccggcctggatgacgtctacaccatctccaacgccctcccgctggccctccccttcgaaaacatcggcgacatccccgcccaaatcgaagccctggtagcagcaaccgcagacccaacaggcacagaagcactgatagaactcgacacagactctggtgcggacgacgacgccgatgccgcccccgcccctccgccgggcgactccgctgcaagcagcgagtcgcccggctccgacaggcccgatgccactccctgggcggcatcggcgtcgtcgtccgtgggtgcgcaggttccgggcacgagtggcgccgcgaacggacccatcgagggggcagaagcatga

SEQ ID NO: 48696 - DNA, 3480 bp, Pseudarthrobacter sulfonivorans
atgagcatcgcaaccatgctgccgatgggcgatctcacgaaccccggtcagatgcgcctggcgttggtgcaggtggtcaactggggcacgttccatggggcgcacacgatgcacgtggaccggaacggaaccctgctgacgggcaactcgggcgtgggcaagtccacgctgtttgacgccatgctgcgcgtattcgatgcccggccgcgctccaacgaggccgcggcccagcgtgccggcggtgctgtggaggacaagaggaccactttcacgtacatgcgcggcaaggtgggcgacaaggccgttggcgaaggctcggccagtgcgttccagcgcccgggtgccacctggtccgccgtcgccctgacgtttgataacgccgcgggcacccgcatcacggtgtccgcactgttcgacctgcccaaaaacggcacggagtccagtgttgggcgtttctacgtgatcgacagcaagccgctggacctgccggccatcgagggcatcgcggacaagcgcttcaccaaggctgcgctggagacgatcttcccggacgcccagatcttcgatgtccacaaggccttcgcggagcgtttccgacggctcctcggcatcagttcggaccaggctctgcccctgctgcgcgtgatccaggccggcaagggcctgggcggcagcgtcaataccttcttccgcgaccaggtcttggacgcccccgccaccctcgccgcggccgatgacgtggtggaggaattcagcaacctcatgtccatccggcagcggctggaggacgtgcggcagcagcgggaccagctggcccccgtgcccggcctgaacaaggaatacgcgcagtcgctcctcgacgcaaaccggctccgtgagctgtccggcgaggagttcgaagcctacaagcagcagctcgccgtcacggtccaccagaaaacgctggcgcggttcaaggagctggcccaggcgaaagccaaagagctgggcgcggagcgctcggtccgcgacgggctggccaaggatctgcgccagctggagaccgattacaacaaccagggcggcaacgcgatctccgcgatcgagcagtcgctggacaacgccaaggtgggtctgcggctgcgcgagcaggtggaggaagcggcccgcaaggccctgtccgacgccggcctgcagctggagtggaccgctgacggttgggaacaggcccacgagcaggctgccgccaggtcggccgagctcaaagacgactcccaggccctgcaggagctccgcttcgaagccttcgacggccacgccaccaaaaagcgtgagctggcggcagcccagcaggagctgctgtcactgaagacgcgcaagtccctgctgccgccgtcgagcattgaaaaccgtgcggccatagccgcggccactggcgttcctgaggaccggatgccgttcggcggcgagctgatggacctcgccgaaggggaggaacactggcggccggccgcggagcgtgccctccggaacctcgccaccacgttgctggtccccggcgaacatttcgccgcggtgacccgctacctgaacgacaacaaagtacgtggcgccctgcgcgcggtggacgtatccaagccgctcgcgggcggcgccctcgccgtggaggacgcgcgcgacggcgatctgctcaccaagctggacatcctcgccagcggcgcggtggcggacgccggggaatggatccgggagcggatcgccctcgatttcgcctacccgtgcgtcgaggaccccaacgagctggccgcactggacaagggcctgagcctgggcggtgtggtcaaacgcaaccggcacacggtggagaaggacgaccgtttcaccagccgccaggactacgtgctcggtttcgacaacgccgccaaactggaactcgtggccgcccaggtagaggacctgcaacaggagctggccaaggcggccgaactggcccagagccgcgaagagtcgcaccagggcatgagccggcagctcgacgccctgcggctgattgcggaggaccaccgcccctgggaacaggtatcggctgcagtcgccgcggaggaactcacccggattgaacagcgcctcaaggacgccctcgcagcacaggcggacctggaaccgctgcgggccaacattgaggcggcgcggcagaaacaccaggccagcaccgaagccgcagcagtcctgcagagcgaatacaaggccctggaccggcagatgagcgctgccgattcgctgctggaagccgcgcgggcccgcctggagcaggcgccgccgtcggacgccaccgtcacggcgctggaaccgtacttcacggactttggcgacgtcagcgagatgcacgagctggacaaccttgccaaccgtgtacggacggcgctgctgggggagctgcacgccgccgagacgcgcgggcaggcaacctccgagcggctgacccggatcttcgagggctttgtgcgcgagtggggctccgcgatctccgcggaccacggcacctccatcggtgcggcaggggagtttgaaggccgctaccacgccatcgtcagcgacggcctgcccgcccaggagtccgagtttcggcagttcttcaaccagcgcacgcatgaatcgttcagcacgctgctgcacctgctggacgaggagcggcggtccattaccagccgcatcctgccgctcaacggcatcctgtcggaggtcaacttccatgagggcagtttcctggagctggacatcaagcagaccctgccggccacggccaagcagttcaaggacgccatccagaacgcgctgaaagcccggcacacgcgccccgcccgcgccggatccggcgcgggttccggcccggaagccgggggaggcgacgacgccgagctcaccgcccgctacaagaccctcgaaacgctcgtcaagcggctcggctcgcccacccccgaggaccggcgctggcgcgccgaagtcctggacgtccgcgggcacctgtttatccagtgcaaggagcaccgtgaggtgaccgggccggcgtcgggcaggaagggcggcggcaagcggaccgacgtgtacatgcacgccgacaccggttccatgtccggcggcgagcggcagcgcttcaccgcgtttatcatggccgcggcgctgagctaccagctgggcatcgccgagcaggggttcaccacttacggcacggtgatgatggacgaggcgtttgtgctggcgtcggaggagttcgcgggtgcgggcatcaaggcgctgcacgagttcggcttccagctcctgctggcggcgccggagaacgtgatcgacctgtcgcgccatctgggctcggtcaccgaaatcctgcgggacaagcgcaccaaccgttcaggcgtgctgacggcaccggtgatccggcccaggcccggcgcagaaggtcagtggcggtccgaggcgaaccccgtggacatcgtgctccgctaa

SEQ ID NO: 48697 - DNA, 1488 bp, Streptomyces turgidiscabies; identical to SEQ ID NO: 43408

SEQ ID NO: 48698 - DNA, 591 bp, Streptomyces turgidiscabies; identical to SEQ ID NO: 43409

SEQ ID NO: 48699 - DNA, 1695 bp, Streptomyces turgidiscabies; identical to SEQ ID NO: 43407

SEQ ID NO: 48700 - DNA, 1437 bp, Janthinobacterium sp. CG23_2
atggactaccagcaactcatcacgcagcggcgcacgcaccccgcatggcgcctgctcgccgccgacaatgccgcgatgattgcgagcttcctgcacgcgagttttatcgcgcccaaccagcgcaccatcggccgccagcacctagcctcgcagctggacgaccacctgtaccatctccacgaaagtgccggcgaaatcctgttccccaaggccgccaccgcctacctcgatgactgggcctccgatgaacgcggctggctgcgcaaatactatccgcctggcgacgacgaagcccactacgatctcgcatcggccaccgaacaggcgctcgaatggctcaagaacctcggccagcgcaccttcatcggcaccgaatcgcgcctgatgaccgtattcgacctgctgcaccagatcgtcgacggcagcgaactcgatccgcgtgcccgcatcgccgaactcaaacgccgcaaggcggacatcgacgccgaaatcgccgacatcggcgccggcaggttcgccttgatggatccgacccaggtgcgcgaacgcttcctgcaaatggccgccaccgcgcgcgacctgttgtcggacttccgcgcggtcgacaccaacttccgcacgctcgaccgccaggtgcgcgaacacatcgccacctgggatggcagcaagggcgagctgctgcaagccattttcggccagcgcgacctgatcgccgacaccgacgaaggccgcagcttccgcgccttctgggacttgttgatgtcgccctcgcgccaggatgaactgacaagcctgctcgacgccgtgctcaaactcggccccgtgcgcgaactgcagcccgacggccgcctgcaacgcatccactacgactggctggaagcgggcgaagtcacccagcgcaccgtcgcgcgcctgtccgaacagttgcggcgctacctggacgaccaggcctggctggaaaaccgccgcatcatgcaactgatccgcgacatcgaacagaaagcgctggccctgcgcggccagatcgacgaacgcgccttcatggagatcgacgacgccgcgcccacggtcgccctgacgatggaccgcaccctgtacaatccgccgttcaagccgaagatcacgcagcagatcgtcagcgacgacggcgtcgacatcgtatcggacgcgctgttcgaacagatctacgtggaccagctgcgcctcatgtcgaacatccggcgcgccctccagacccgccagcaggtctcgctcggcaccctggcgcgcgagtatccgatcgagcagggcctggccgaactggccacctacctcaaactggccacccaggacatgcacgccgccatcgatgacaatcagtccgaaacggtcgactggaccgacgacaatggccgccggcgccaagccacgctcccccttatcatttacgccgcatga

SEQ ID NO: 48701 - DNA, 609 bp, Janthinobacterium sp. CG23_2
atgaaccctgaaccgaccacgctcaacgatcaaaaccgcctcggccagctgctggtagcactgttccagggcgtgctgtaccgcgacgccgacagcgccctgtggcagccgctgatggacctgcaggcgcgcgtgcgcgactacagcgccacgatcggcctcgaactcattctcgacgaggccgaaggctacgcctacctgcgccagcgccccgccgtggtgggcgagccggaactgccacgcctgatccagcggcgccagctcagttacccggtcagcctgatcctggccctgctgcgcaagaagctggccgaattcgacgccaccggcggcgacacgcgcctcgtcatcgaccgcgaccagatcgccgaacaggtgcgcctgttcctgccgcagaccggaaacgaagcgcgcctgctcgaccgcatggacgcgcacctgaacaaggtcgtggaactcggctttttgcaccggctgcgcgggcaggacaaccagttcgaagtgcgccgcatcctcaaggcgtttgtggatgcccaatggctggccgacttcgaacaacgcctctcgggctacgccgcccacgccgccagcggcgaggaggaagcatga

SEQ ID NO: 48702 - DNA, 3390 bp, Janthinobacterium sp. CG23_2
atgacccaggctcccgtggccgatattcccgcggccgatgatggcgacccggcactcgagcgcgcgggcttccgcctccagcacttcgaggtattcaactggggcaccttccacgaaagagtctggcggctgcacccgggcggcgacaatatgctgcttaccggcgacatcggctccggaaaatcgaccctggtcgacgccatcacgacactgctggtaccggcccagaagatcgcctacaacaaggcggccggcgccgatgcgcgcgaacgcagcctgcgcacctacgtcatgggtaactacaagtccgagcgcggcgacagcggcctggccgcgcgcgccgtcgccctgcgcgatcacaacagctactcggtcattctcggcgtcttccacaacgaaggcttcgagcagaccgtcactctggcgcaggtgttctggttcaagaacccgcacggccagcccgaacgcttctacgtcgtcgccgatggcgcgctgtcggtggccgagcacttcgcaggcttcggcaccgatatcgcgcagctgcgcaaacgcctgcgcgcgctggccggcgtcaccctgcacgacagctttccgccgtacggcgccgacttccggcgccgcttcggcatcgccagcgaacaggcgatggacctgtttcaccagaccgtatcgatgaaatcggtcggcaatctcaccgacttcgtgcgcgaccacatgctcgaagcgtttccggtggaggcgcgcatcgcggccctgatcgcccacttcgacgacctcaatcgcgcgcacgaagcggtgctcaaggccaagcttcagatcgaccagctcacgcccctggtggacgactgcgaccgccacgagacgctgcaggaacaggtggtccagctgcgcggctgccgcgaagcgctgcgcccgtggttcgcgcatctgaaaggcgagctgctggaaaaacgcatcggcattctgcaatcggagctcgacaaactggccggtcgcctggcgcgcctgcaggaagagaaacacagccagatgctgcggcgcgacgacatgacccaagccatcgcggccaacggcggcaaccgcatcgagcaaatccgcgccgagatcgcgcgcctgcaaaccacgcgcgaggaacgctcgcgccgctcgaaccagtacgacgcgctggcggcggcggttggcttgcccggcgcggccgaggcgagcatgttcgacgccaaccggcgcgccatcgacgatggcaaagccggctgcaccgcgcgccgcgacgacgcgcaaaaccagttgatggtggcgggcgtgagcctgcacgaactgcgcgaccagcatggcgccatcaccaccgaactcgattcgctgcgccagcgccgctccaacatcaccagccagatgctggcggtgcgggccgccttgtgcgacgcgctgcgcatcgcgccggaagagttgccgttcatcggcgagttgatccaggtgcgcgaagaggagcgcgcatgggaaggcgccgccgaacgcatgctgcacagcttcggcctgtcgctgctggtgccggaaacgcactacggacaggtggcggcctgggtcgatgcgaccaatctgggcaatcgcctggtctacttccgcgtgcgcgccaatgtcagcgccgaccaccacggcttgcaccccgacgcattggcgcgcaagctcgccatcaagcccgattcgccgttctacggctggatcgacgccgaactggcgcgccgctacgaccacgcctgctgcgacacgctcgaccagttccgccgcgaaaagcgcgccatcacccgcaacggtcagatcaaggccggcggcgagcgccacgaaaaggacgaccgccaccggatcgacgaccgttcgcgctacgttctgggatggtcgaaccagggcaagatcgccgcgctggcgaagcaggagcgcgacctctccacgcgcatacaggcgcatgccgccaaaatccagtcggtcagggccgatatcgcccgccaggaagcgctgctggataactggggcaagctgaccatgttctcggacttcagcgatctcgattggaagccgctgctctccgccatcgacgcgctcgaacgcgaacaggaagcgttggccgcatcgtccgacattctgcgcaccttgcagcagcagctcgccgagctgaccgtggcccaggccgacacggaagcacaggcgcacagcgccaccatcgagcacgccaagaccgccgaaaagctggaggtagccggcgccgccctggacgactgcgccaccctgctcgatgcgacgccagagcaatcgcgcgccatgtactttccgcagctcgatgcgctgcgcgccgaggtgctgggcgagcatacgctcacggtcgaatcgtgcgagaaccgcgaaaaagagctgcgccaggagctgcaaaaccggatcgatgcggaagagaagaaaatcagtcgcttgcgcgacgccatcatccgtgcaatggaaagctacaccaaggcctggccgctggacgcgcgcgaggtcgacgtgagcattgacgccgccgctgagttccgcaagatgctggcggtgctgcgggcggacgacctgccgcgcttcgccgggcgcttcaaggaactcctcaacgaaaacaccattcgcgagatcgccggcttccagtcgcagctcaagcgcgagcgggaaaccatccgcgagcgcatcgacacgatcaacagttcgctgcaccagatcgactacaacccgaaccgctacatcgcgctcgaagcggaaaccaatgtcgacgccgatctgcgcgacttccagcaagacctgcgcagctgcaccgaaggcgcactgaccggatcggccgacgaagaatattcggaggcgaaattcctgcaggtcaaacgcatcatcgaacgctttcgcggccgcgaaggcagtgccgagatggacaagcgctggacgcgcaaggtcaccgatgtgcgcaactggttcgtattctcggcctccgagcgctggcgcgaggatggacgcgagcacgaacactacaccgatgccggcggcaaatcgggcggccagaaagagaaactggcctacaccgtgctggcggccagcctggcataccagttcggcctggagtggggcgtggtgcgctcgcgctccttccgcttcgttgtcatcgacgaggcattcgggcgcggttccgacgaatcggcgcgctacggactggaactgttcaagcgcatgaacctgcaactgctgatcgtcacgccgctgcaaaaaatccacatcatcgaaccttacgtgtccggcctgggcttcgtgcacagcgaagaaggacgccagtcgctgctgcgctacctgacgatcgaacagtatcaggccgagcgcagtgcgcgtgccgcatga

SEQ ID NO: 48703 - DNA, 1215 bp, Janthinobacterium sp. CG23_2
atgaacgccgcggccacctggtcgagcgcggccacgatccgcgcccaggtgcagcggctatgggacgatggccgcctgctcgccgcgcgcgtgcgaggagaatccctgttcccgctcgaacttcgcctgcgccagccgaccgtggcgcaaaccggcgaacgcttcgacgaggtgcgcgcatggatcaaggagctcgacgccggcagcaagacggcgcgcggctacggctaccagatcgtctggcgcgagatcaatcaccgccagctcggacgcaaccgcatccccgacagcgtggtattcgagagcgacaccgacgcgctgcgcctgatcgggcgccaggccgaggcgcgccgtttcgaccagataaccgcagccactgtcggcgcatttccgcaactggcagactggctggcgcggcgcgcgctcgtcgtgctggagcaaagcgaggcgtgggcgcgcatcctcgccatcctggaatggttcgccgctcatccgcgcccgggcctgtacctgcgccagctcgacatcgagggtgtcgacagcaaattcatcgaaacgcgcaaagccttgctgaccgaattgctcgacctggtgctgccggccggcgccatcgatccgaaagccaccggcgcgcgccagtttgaagcccgctatggcttgctgagcaaaccggcgctgctgcgctttcgcgtgctcgacccggcgcacgccatcggcggcttgtccgacctcgccgtaccgctggcgcagttcgcggcgctgcaaaccaatgctcgccgcgtcttcatcacggaaaacgaaatcaatggactggcctttcccgcgctgcccgatgcgatggtcattttcggcggcggttacggcgtcgagcgcctggccgacgtgccttggctggtcacgcgcgaggtggtctactggggcgatatcgacacccacggctttgccatcctggaccgcttgcgcgccgctatcccgcacgcgcgttccatcctgatggacagtgcgaccctgatggcgcaccgcgcgctgtggggcaccgaagaccgggacaagcgcttcggcgggcagccgtcacgcctggagcgcgacgagctggcgctgttcgaggccctgcgcgacgatgtcttcggagagcgcatccgcatggagcaggagcgcctgtcgtacgcgtgggtcgaacacgcactcgcgacgcttacggcttcacccggctga

SEQ ID NO: 48704 - DNA, 1470 bp, Xanthomonas citri pv. citri; identical to SEQ ID NO: 41638

SEQ ID NO: 48705 - DNA, 702 bp, Xanthomonas citri pv. citri; identical to SEQ ID NO: 43556

SEQ ID NO: 48706 - DNA, 4023 bp, Xanthomonas citri pv. citri; identical to SEQ ID NO: 41640

SEQ ID NO: 48707 - DNA, 1470 bp, Xanthomonas citri pv. citri; identical to SEQ ID NO: 41638

SEQ ID NO: 48708 - DNA, 702 bp, Xanthomonas citri pv. citri; identical to SEQ ID NO: 43556

SEQ ID NO: 48709 - DNA, 4023 bp, Xanthomonas citri pv. citri; identical to SEQ ID NO: 41640

SEQ ID NO: 48710 - DNA, 1470 bp, Xanthomonas citri pv. citri; identical to SEQ ID NO: 41638

SEQ ID NO: 48711 - DNA, 702 bp, Xanthomonas citri pv. citri; identical to SEQ ID NO: 43556

SEQ ID NO: 48712 - DNA, 4023 bp, Xanthomonas citri pv. citri; identical to SEQ ID NO: 41640

SEQ ID NO: 48713 - DNA, 1470 bp, Xanthomonas citri pv. citri; identical to SEQ ID NO: 41638

SEQ ID NO: 48714 - DNA, 702 bp, Xanthomonas citri pv. citri; identical to SEQ ID NO: 43556

SEQ ID NO: 48715 - DNA, 4023 bp, Xanthomonas citri pv. citri; identical to SEQ ID NO: 41640

SEQ ID NO: 48716 - DNA, 1470 bp, Xanthomonas citri pv. citri; identical to SEQ ID NO: 41638

SEQ ID NO: 48717 - DNA, 702 bp, Xanthomonas citri pv. citri; identical to SEQ ID NO: 43556

SEQ ID NO: 48718 - DNA, 4023 bp, Xanthomonas citri pv. citri; identical to SEQ ID NO: 41640

SEQ ID NO: 48719 - DNA, 1470 bp, Xanthomonas citri pv. citri; identical to SEQ ID NO: 41638

SEQ ID NO: 48720 - DNA, 702 bp, Xanthomonas citri pv. citri; identical to SEQ ID NO: 43556

SEQ ID NO: 48721 - DNA, 4023 bp, Xanthomonas citri pv. citri; identical to SEQ ID NO: 41640

SEQ ID NO: 48722 - DNA, 1470 bp, Xanthomonas citri pv. citri; identical to SEQ ID NO: 41638

SEQ ID NO: 48723 - DNA, 702 bp, Xanthomonas citri pv. citri; identical to SEQ ID NO: 43556

SEQ ID NO: 48724 - DNA, 4023 bp, Xanthomonas citri pv. citri; identical to SEQ ID NO: 41640

SEQ ID NO: 48725 - DNA, 1470 bp, Xanthomonas citri pv. citri; identical to SEQ ID NO: 41638

SEQ ID NO: 48726 - DNA, 702 bp, Xanthomonas citri pv. citri; identical to SEQ ID NO: 43556

SEQ ID NO: 48727 - DNA, 4023 bp, Xanthomonas citri pv. citri; identical to SEQ ID NO: 41640

SEQ ID NO: 48728 - DNA, 1470 bp, Xanthomonas citri pv. citri; identical to SEQ ID NO: 45449

SEQ ID NO: 48729 - DNA, 702 bp, Xanthomonas citri pv. citri; identical to SEQ ID NO: 43556

SEQ ID NO: 48730 - DNA, 4023 bp, Xanthomonas citri pv. citri; identical to SEQ ID NO: 41640

SEQ ID NO: 48731 - DNA, 1470 bp, Xanthomonas citri pv. citri; identical to SEQ ID NO: 41638

SEQ ID NO: 48732 - DNA, 702 bp, Xanthomonas citri pv. citri; identical to SEQ ID NO: 43556

SEQ ID NO: 48733 - DNA, 4023 bp, Xanthomonas citri pv. citri; identical to SEQ ID NO: 41640

SEQ ID NO: 48734 - DNA, 1470 bp, Xanthomonas citri pv. citri; identical to SEQ ID NO: 41638

SEQ ID NO: 48735 - DNA, 702 bp, Xanthomonas citri pv. citri; identical to SEQ ID NO: 43556

SEQ ID NO: 48736 - DNA, 4023 bp, Xanthomonas citri pv. citri; identical to SEQ ID NO: 41640

SEQ ID NO: 48737 - DNA, 1470 bp, Xanthomonas citri pv. citri; identical to SEQ ID NO: 41638

SEQ ID NO: 48738 - DNA, 702 bp, Xanthomonas citri pv. citri; identical to SEQ ID NO: 43556

SEQ ID NO: 48739 - DNA, 4023 bp, Xanthomonas citri pv. citri; identical to SEQ ID NO: 41640

SEQ ID NO: 48740 - DNA, 1470 bp, Xanthomonas citri pv. citri; identical to SEQ ID NO: 41638

SEQ ID NO: 48741 - DNA, 702 bp, Xanthomonas citri pv. citri; identical to SEQ ID NO: 43556

SEQ ID NO: 48742 - DNA, 4023 bp, Xanthomonas citri pv. citri; identical to SEQ ID NO: 41640

SEQ ID NO: 48743 - DNA, 1470 bp, Xanthomonas citri pv. citri; identical to SEQ ID NO: 41638

SEQ ID NO: 48744 - DNA, 702 bp, Xanthomonas citri pv. citri; identical to SEQ ID NO: 43556

SEQ ID NO: 48745 - DNA, 4023 bp, Xanthomonas citri pv. citri
atgaattcccagtccaatctgtcgccggcgcagccgggtgcctccttgtttgccgagacgctcgccgagcaacgtgcgcagcagttccgcatgcggcgcttgcaggtgcacaactggggcaccttcaatgggctgaccgaagtgccaatcgcgcagaagggcttcctgttcgttgggcgttcgggctcgggcaagtccaccttgctggatgcgatgtcggcattgttgacgccgccgagcatcgtcgacttcaacgctgccgcgcgcgaagccgaacgcagtgggcgcgatcggagtctggtgtcgtatgtacgcggtgcgtgggccgatcagcaggacagcgcgtccggcgaaatcgccacgcaatacctgcgcaagggcgccacctggaccgcattggtgttggagtacgcgaacgcgcatggccagacggtgagcctgattcggttgttctggatcgccggcagcggtaacgcggcggccgatgtgcggcgtcactacatggtcgcgccacgccgtttcgacgtggcgaccgagctggatggcttcgatctcgacctgcgcaagctcaaggcgcgattgggcgatgaagttgcgcatttcgacggcttcgccggctatgccgaacgcttccggcatgcgctgggcatcggcaacgagatggcgctgcggctgttgcacaagacccagtcggccaagaacctgggcgatctcaatgcattcctgcgcggtttcatgctggacgagccgcggaccttcgaagcggccgaccggctggtggaagattttgccgagctcgatggcgcgcaccatgcggtggtcaccgcccggcgccaggtggaaaccctgacccctgcgcgcgagcaccacgcggcgctgatggcgctgcgccacagcgtcggcgagttgcgcgagttgcagctgggcgtggacagctaccgcgagcagcagcggctggccttgctggaggagcggctgcaggagctggacaaccaggaccgtggactggccggcgaagaaggccagcgccgcgaatcgctggataaccacgaacaaaaactggtcggcctggagcgcgagcagcgcgccgccgggggcgagcaggtcgaagaactggaacgcgaacgcgcacgcgtcgagcgcgagcgcgacgaacgcctgcgccgccgtgcacagatcgaacaggcctgccgccagctcggtaccgccctggcggccggcgccagcggctttgccgcgcagattgcgcatgcgcagaccgtgctggataacggcaagcacgacgccagcgcgctggatgacgccatcgccgagcgcatgggtgcgcggcgcgacgacgagcgccgctttgccgaaatccgcaccgaactggaggccctgaaacgcgcgccatcgagcatgccggcaccgatgcaggccttgcgcgcgcggctgtgcgaagacaccggcattgccgaggccgcgctgccgttcgttggcgagctggtgcaggtacgcgaggaccagacggcctggcgcggcgcgatcgagcgtgtgttgcacggctttgcgcaatcgctgctggtggacgagcggcattacgcgcaggtcagcgaatgggtcaaccgcacccatatcggtacgcgcctggtgtacttccgtgtgcgccgcaacgacgagctgcattcgcggcgggtcgatcccggcgcgctgcccggcaagctgcaattgcgcgagcacgcctttaccgaatggctgcgcaacgagctgacccgccgtttcgactacgcctgcgtggacaacgccgcagcgctgcgcaacgccgaccgcgcaatcacccgcgagggccaggtcaagcatcctggcgatcgctatgagaaggacgaccgccacgcggtcaacgaccgcaagcgttggctgctcggtcacgacaaccgcgacaagctcaaggtgttcgaacgcgaagcgcagacgctggctcagcgcatcgccagctgcgatgccgatgtggcagcgctgcgcaagcagcgtgagcaggaccaggaacgccaactggccgcgcacaccctggtggagcgcgactgggacgagatcgacgtcggccccaagctgcagcgcctgagcgatatcgacgaacagttggtgcagctgcgcgaaggcaacagcggcctgcgtgcgctcggccaggccatcgacaccgcacgcaccctgcgcgaacaggccaagcgcacctacgaagatgtgcggctggagcgcgcgcaactggcgcgcgagcgcgtgcggctcgaacagcagcaggcggcctgcgcgggccgcgcaggttccgccacgctcacgcccacccagttgcagggcttgcgggaacggcttgccgcattgacgccgctgtcgctggacaatctggaagcgcatttccgcgtggtcgaacgtggcctggccgagcagctggccgacagccagggccgcgacagccggctcagcgcgcagttgctggagtgcttccgcaagtattgccagcaatggcccgaagacagcggcgatttcaccgtgagccttgccagcgccgacgatttcctagcgcgtctggaccggctggaaagcgatggcctgccgcgtcacgagcatcgtttcttcgacctgttgcagacccagagcaagaacaacctgctggccttgcagcgccacaccgccgaagcccacaagggcatcaagcagcgcatggacgaggtcaacgccagtctggagcaggtgccgttcaatcgcgacaccgtgctgaccatcgaggtcggcgaccgccgcctggccgaggtgcaggaattccagcagcagttgcgcgcggtgctgtcgcatcaacagaccgaagaccgtgccctggccgaagcgcagttttccaccttgcgtgcgctggtggcacgcctgggcgcgcaggaaccggaggcacgccgctggcgcgaacaggtgctggatgtgcgcctgcatgtggagttcatcggtgtggaactggacgcacagacgcgcgcgcaggtggagatctaccgcagcggcgccggcaagtccggcggtcagcgccagaaactggcaaccacgtgcctggcggccgcgctgcgttaccagctcggcggcgaagacggcgaactgccgcgctactgcgcggtagtgctggacgaagccttcgacaaggccgacaacgaattcaccgcactggcgatgaatatcttcgagaacttcggcttccagatggtggtggccacgccgttgaagtcggtgatgaccttggagcccttcatcggtggtgcgtgctttgtcgaaatcagcggccgtcataactccggcgtgttgctgatcgaatacgacgagcaggcacagcgattgaagctgccggagcgctcgcgcggcgatgagccggcagttgccgatgccactgacgctgcgccgtcgatcgaggctgcggccgagtcagcaggagtgcagggcgctgcaagcgcagatggcatggcaaccaacggcgtcccaatgcacacggcatcgcctgcgacggaggagaccccgcccgcagcgcaggaaacgcagactggtcagcgcaagccggcagtcgcgacgacgagcaagcagaacaagaccgccaagaccgcatcttccacgcgcgctgcggcacagcctcaagcaaaacgcccgaagaaatcgccttcgcgcactcctgctctggctggcaagccggcatcggacaaacgcccagcgggcgtgccggcggtgtcgtcaggagtcgcatccaggtccaacgtgggcaagaccactcggtcttcaaaaacgccgggcaagccgattgcggccacaagcgcatccaacgccacatccaggaaggtcgccgccgcatctgcggcattgaaaactgccgcagccaagccacgtgcaacagccgcatcgactggtcagccagcgcgcggcgccggcaagacaacctcgacgcgcgcggtggctaaaccgtcaccggccacaacgcgcggcgccaaggcaggcgccccgcggtcgcgcggcaagcgctga

SEQ ID NO: 48746 - DNA, 1470 bp, Xanthomonas citri pv. citri; identical to SEQ ID NO: 41638

SEQ ID NO: 48747 - DNA, 702 bp, Xanthomonas citri pv. citri; identical to SEQ ID NO: 43556

SEQ ID NO: 48748 - DNA, 4023 bp, Xanthomonas citri pv. citri; identical to SEQ ID NO: 45454

SEQ ID NO: 48749 - DNA, 1470 bp, Xanthomonas citri pv. citri; identical to SEQ ID NO: 41638

SEQ ID NO: 48750 - DNA, 702 bp, Xanthomonas citri pv. citri; identical to SEQ ID NO: 43556

SEQ ID NO: 48751 - DNA, 4023 bp, Xanthomonas citri pv. citri; identical to SEQ ID NO: 41640

SEQ ID NO: 48752 - DNA, 1470 bp, Xanthomonas citri pv. citri; identical to SEQ ID NO: 41638

SEQ ID NO: 48753 - DNA, 702 bp, Xanthomonas citri pv. citri; identical to SEQ ID NO: 43556

SEQ ID NO: 48754 - DNA, 4023 bp, Xanthomonas citri pv. citri
atgaattcccagtccaatctgtcgccggcgcagccgggtgcctccttgtttgccgagacgctcgccgagcaacgtgcgcagcagttccgcatgcggcgcttgcaggtgcacaactggggcaccttcaatgggctgaccgaagtgccaatcgcgcagaagggcttcctgttcgttgggcgttcgggctcgggcaagtccaccttgctggatgcgatgtcggcattgttgacgccgccgagcatcgtcgacttcaacgctgccgcgcgcgaagccgaacgcagtgggcgcgatcggagtctggtgtcgtatgtacgcggtgcgtgggccgatcagcaggacagcgcgtccggcgaaatcgccactcaatacctgcgcaagggcgccacctggaccgcattggtgttggagtacgcgaacgcgcatggccagacggtgagcctgatccggttgttctggatcgccggcagcggtaacgcggcggccgatgtgcggcgtcactacatggtcgcgccacgccgtttcgacgtggcgaccgagctggatggcttcgatctcgacctgcgcaagctcaaggcgcgattgggcgatgaagttgcgcatttcgacggcttcgccggctatgccgaacgcttccggcatgcgctgggcatcggcaacgagatggcgctgcggctgttgcacaagacccagtcggccaagaacctgggcgatctcaatgcattcctgcgcggtttcatgctggacgagccgcggaccttcgaagcggccgaccggctggtggaagattttgccgagctcgatggcgcgcaccatgcggtggtcaccgcccggcgccaggtggaaaccctgacccctgcgcgcgagcaccacgcggcgctgatggcgctgcgccacagcgtcggcgagttgcgcgagttgcagctgggcgtggacagctaccgcgagcagcagcggctggccttgctggaggagcggctgcaggagctggacaaccaggaccgtggactggccggcgaagaaggccagcgccgcgaatcgctggataaccacgaacaaaaactggtcggcctggagcgcgagcagcgcgccgccgggggcgagcaggtcgaagaactggaacgcgaacgcgcacgcgtcgagcgcgagcgcgacgaacgcctgcgccgccgtgcacagatcgaacaggcctgccgccagctcggtaccgccctggcggccggcgccagcggctttgccgcgcagattgcgcatgcgcagaccgtgctggataacggcaagcacgacgccagcgcgctggatgacgccatcgccgagcgcatgggtgcgcggcgcgacgacgagcgccgctttgccgaaatccgcaccgaactggaggccctgaaacgcgcgccatcgagcatgccggcaccgatgcaggccttgcgcgcgcggctgtgcgaagacaccggcattgccgaggccgcgctgccgttcgttggcgagctggtgcaggtacgcgaggaccagacggcctggcgcggcgcgatcgagcgtgtgttgcacggctttgcgcaatcgctgctggtggacgagcggcattacgcgcaggtcagcgaatgggtcaaccgcacccatatcggtacgcgcctggtgtacttccgtgtgcgccgcaacgacgagctgcattcgcggcgggtcgatcccggcgcgctgcccggcaagctgcaattgcgcgagcacgcctttaccgaatggctgcgcaacgagctgacccgccgtttcgactacgcctgcgtggacaacgccgcagcgctgcgcaacgccgaccgcgcaatcacccgcgagggccaggtcaagcatcctggcgatcgctatgagaaggacgaccgccacgcggtcaacgaccgcaagcgttggctgctcggtcacgacaaccgcgacaagctcaaggtgttcgaacgcgaagcgcagacgctggctcagcgcatcgccagctgcgatgccgatgtggcagcgctgcgcaagcagcgtgagcaggaccaggaacgccaactggccgcgcacaccctggtggagcgcgactgggacgagatcgacgtcggccccaagctgcagcgcctgagcgatatcgacgaacagttggtgcagctgcgcgaaggcaacagcggcctgcgtgcgctcggccaggccatcgacaccgcacgcaccctgcgcgaacaggccaagcgcacctacgaagatgtgcggctggagcgcgcgcaactggcgcgcgagcgcgtgcggctcgaacagcagcaggcggcctgcgcgggccgcgcaggttccgccacgctcacgcccacccagttgcagggcttgcgggaacggcttgccgcattgacgccgctgtcgctggacaatctggaagcgcatttccgcgtggtcgaacgtggcctggccgagcagctggccgacagccagggccgcgacagccggctcagcgcgcagttgctggagtgcttccgcaagtattgccagcaatggcccgaagacagcggcgatttcaccgtgagccttgccagcgccgacgatttcctagcgcgtctggaccggctggaaagcgatggcctgccgcgtcacgagcatcgtttcttcgacctgttgcagacccagagcaagaacaacctgctggccttgcagcgccacaccgccgaagcccacaagggcatcaagcagcgcatggacgaggtcaacgccagtctggagcaggtgccgttcaatcgcgacaccgtgctgaccatcgaggtcggcgaccgccgcctggccgaggtgcaggaattccagcagcagttgcgcgcggtgctgtcgcatcaacagaccgaagaccgtgccctggccgaagcgcagttttccaccttgcgtgcgctggtggcacgcctgggcgcgcaggaaccggaggcacgccgctggcgcgaacaggtgctggatgtgcgcctgcatgtggagttcatcggtgtggaactggacgcacagacgcgcgcgcaggtggagatctaccgcagcggcgccggcaagtccggcggtcagcgccagaaactggcaaccacgtgcctggcggccgcgctgcgttaccagctcggcggcgaagacggcgaactgccgcgctactgcgcggtagtgctggacgaagccttcgacaaggccgacaacgaattcaccgcactggcgatgaatatcttcgagaacttcggcttccagatggtggtggccacgccgttgaagtcggtgatgaccttggagcccttcatcggtggtgcgtgctttgtcgaaatcagcggccgtcataactccggcgtgttgctgatcgaatacgacgagcaggcacagcgattgaagctgccggagcgctcgcgcggcgatgagccggcagttgccgatgccactgacgctgcgccgtcgatcgaggctgcggccgagtcagcaggagtgcagggcgctgcaagcgcagatggcatggcaaccaacggcgtcccaatgcacacggcatcgcctgcgacggaggagaccccgcccgcagcgcaggaaacgcagactggtcagcgcaagccggcagtcgcgacgacgagcaagcagaacaagaccgccaagaccgcatcttccacgcgcgctgcggcacagcctcaagcaaaacgcccgaagaaatcgccttcgcgcactcctgctctggctggcaagccggcatcggacaaacgcccagcgggcgtgccggcggtgtcgtcaggagtcgcatccaggtccaacgtgggcaagaccactcggtcttcaaaaacgccgggcaagccgattgcggccacaagcgcatccaacgccacatccaggaaggtcgccgccgcatctgcggcattgaaaactgccgcagccaagccacgtgcaacagccgcatcgactggtcagccagcgcgcggcgccggcaagacaacctcgacgcgcgcggtggctaaaccgtcaccggccacaacgcgcggcgccaaggcaggcgccccgcggtcgcgcggcaagcgctga

SEQ ID NO: 48755 - DNA, 1470 bp, Xanthomonas citri pv. citri; identical to SEQ ID NO: 41638

SEQ ID NO: 48756 - DNA, 702 bp, Xanthomonas citri pv. citri; identical to SEQ ID NO: 43556

SEQ ID NO: 48757 - DNA, 4023 bp, Xanthomonas citri pv. citri; identical to SEQ ID NO: 41640

SEQ ID NO: 48758 - DNA, 1470 bp, Xanthomonas citri pv. bilvae
atgaagcaccaggcccgtatcgccggctatcggcaactgcgcgagcagccggtatggaaactgcttgccgccgaccacgcacccgaactgatcggcctgctgcagacggtgctgatggatggcgaacgccgcctgccttcggcggtgttgcacgagcgtttgcagcgccagctcgacgccttgcgcgctgacgagctctcgcgtgaactgccgcgcaccgcacaggcgtatctggcgcattggttggcgcagggctggctggaacggcgcctgcccgaaggcgcagtcgaagaagaatacgaactctcgcgtgccgcgacccaggccatccgcttcatcgtcggcctgcgcgaaagcagcagcagcgccaccgaaagccgcctgtcgctggtgatccagcaactggtgcagttggccggacagaccgaagccgatccagagctccggctggccgcactgcgcgacgaacgtgtgcgcatcgatgccgagatcgaacgcgtggcgtccggccgcgtggcggcgctggatggcaagcgcgcgctggaacgcgcgcgcgacctgatccatctctccgacgagctggccgaagatttccatcgcgtgcgcgacgacttcgagcagctcaaccgccaattccgcgagcgcatcatcgacgacgaaggcgcgcgcggcgacgtgctcgaacaactgttcgacggcgtggacgtgattgcagacagcgaagccgggcgcaccttcgaggcgttctggagcctgctcaacgacacccagcaaagcagccagctcgaccaggcgctggatgcgctgcttgcccgtgggtttgcccgcaagctcgatcgccgcgaacgcgcctttttgcgcgggctgaccggcacgctgctggagcgcggtggcgaggtgcacacggtgatgcagcatttcgcgcgcagcctgcgcgggttcgtgcaaagccgtggatatctggaacagcgccggctcaatcaattgctcaagcaggcgcagggcgaagccttgcaattgcgcgacagcctgcacaccaccaccgccaccggctatgtgcagccgctcagcagcagccgcctgcgctcgttgtcgcagtggcggctgcacgatccacggctcacccaggtcgatggacgcgtgcaggccgccgacgcggccgagatctcgctggacagcgtgggcgatctggtggcgcaatcggagatcgatgtgcgcagcctgcgcaacgacctgcatgagctgctcggccaacgcccgcggctgacgatcggcgacgccttgcaacaacgcccggccgtgcagggcctgggcagcgtgatcggatacctgtcgctgggcacgcgccacggtatggtgatcgaaggacagatggaaacggtgcaatgggaaggcagcgacggcgccgtgcggcgcgcacgcattcccttggtgtggtttacccgggagaaacgcaatgaactggtctga

SEQ ID NO: 48759 - DNA, 702 bp, Xanthomonas citri pv. bilvae
atgaactggtctgaggacactggcctatacgccgacgaggacaccggggcgccggcaatcgacgaccgcatgccgatggcgcaaacatccagtgccgagccgcgcggcgagctgtttttgggcgacaccggcacgctgccgttcgatgcgcggcgtgcgctgtgccagttgctggcagggcccagcatcgatgcgcaacgtcacggcgcgctgtggccggcgttgttgcgcaacgaggtggcgatccgccaggtgctgtgcgagctgtttctggagttggtgctcgaccgcgagggcggggtggcctttacccgtcaggccgacaccgcagagctggaatcgcccacgttgctgcgcagtgcgccgctgacgtttatcgagtcggtgttgctgctgttcctgcgccagcaactggccgaggccgacacgcgcggcgagcgtgcagtggtggacgaggcgcagttggtggaagccttgtcggtgtacgaaaagaacgtgtccaccgatcgggcgggcttcgcgcggcgggtgatgacggcgatcggcaagatgcgcgacaaccagttgctgtcgcgcttgcgcggcagcgaggagcgctatgaagtgtcgccggtattgaagctgttgttttcggcagaagatgtgcaggccttggtggtggcgtatcgggagctccgtgagggcgaggttgcgctggattga

SEQ ID NO: 48760 - DNA, 4023 bp, Xanthomonas citri pv. bilvae
atgaattcccagtccaatctgtcgccggcgcagccgggtgcctccttgtttgccgagacgctcgccgagcaacgtgcgcagcagttccgcatgcggcgcttgcaggtgcacaactggggcaccttcaatgggctgaccgaagtgccaatcgcgcagaagggcttcctgttcgttgggcgttcgggctcgggcaagtccaccttgctggatgcgatgtcggcattgttgacgccgccgagcatcgtcgacttcaacgctgccgcgcgcgaagccgaacgcagtgggcgcgatcggagtctggtgtcgtatgtacgcggtgcgtgggccgatcagcaggacagcgcgtccggcgaaatcgccacgcaatacctgcgcaagggcgccacctggaccgcattggtgttggagtacgcgaacgcgcatggccagacggtgagcctgatccggttgttctggatcgccggcagcggtaacgcggcggccgatgtgcggcgtcactacatggtcgcgccacgccgtttcgacgtggcgaccgagctggatggcttcgatctcgacctgcgcaagctcaaggcgcgattgggcgatgaagttgcgcatttcgacggcttcgccggctatgccgaacgcttccggcatgcgctgggcatcggcaacgagatggcgctgcggctgttgcacaagacccagtcggccaagaacctgggcgatctcaatgcattcctgcgcggtttcatgctggacgagccgcggaccttcgaagcggccgaccggctggtggaagattttgccgagctcgatggcgcgcaccatgcggtggtcaccgcccggcgccaggtggaaaccctgacccctgcgcgcgagcaccacgcggcgctgatggcgctgcgccacagcgtcggcgagttgcgcgagttgcagctgggcgtggacagctacggcgagcagcagcggctggccttgctggaggagcggctgcaggagctggacaaccaggaccgtgggctggccggcgaagaaggccagcgccgcgaatcgctggataaccacgaacaaaaactggtcggcctggagcgcgagcagcgcgccgccggtggcgagcaggtcgaagaactggaacgcgaacgcgcacgcgtcgagcgcgagcgcgacgaacgcctgcgccgccgtgcacagatcgaacaggcctgccgccagctcggtaccgccctggcggccggcgccagcggctttgccgcgcagattgcgcatgcgcagaccgtgctggataacggcaagcacgacgccagcgcgctggacgaggccatcgccgaacgcatgggcgcgcggcgcgacgacgagcgccgctttgccgagatccgtgccgaactggaggccctgaaacgcgcgccatcgagcatgccggcaccgatgcaggccctgcgcgcgcggctatgcgaagacaccggcattgccgaggccgcactgccgttcgttggcgagctggtgcaggtacgcgaggaccagacggcctggcgcggcgcgatcgagcgtgtgttgcacggctttgcgcaatcgctgctggtggacgagcgccactacccgcaggtcagcgaatgggtcaaccgcacccatatcggtacgcgcctggtgtacttccgtgtgcgccgcaacgacgagctgcattcgcggcgggtcgatcccggcgcgctgcccggcaagctgcaattgcgcgagcacgcctttaccgaatggctgcgcaacgagctgacccgccgtttcgactacgcctgcgtggacaacgccgcagcactgcgtaacgccgaccgcgcaatcacccgcgagggccaggtcaagcatcctggcgatcgctatgagaaggacgaccgccacgcggtcaacgaccgcaagcgttggctgctcggtcacgacaaccgcgacaagctcaaggtgttcgaacgcgaagcgcagacgctggctcagcgcatcgccagctgcgatgccgatgtggcagcgctgcgcaagcagcgtgagcaggaccaggaacgccaactggccgcgcacaccctggtggagcgcgactgggacgagatcgacgtcggccccaagctgcagcgcctgagcgatatcgacgaacagttggtgcagctgcgcgaaggcaacagcggcctgcgtgcgctcggccaggccatcgacaccgcacgcaccctgcgcgaacaggccaagcgcacctacgaagatgtgcggctggagcgcgcgcaactggcgcgcgagcgcgtgcggctcgaacagcagcaggcggcctgcgcgggccgcgcaggttccgccacgctcacgcccacccagttgcagggcttgcgggaacggcttgccgcattgacgccgctgtcgctggacaatctggaagcgcatttccgcgtggtcgaacgtggcctggccgagcagctggccgacagccagggccgcgacagccggctcagcgcgcagttgctggagtgcttccgcaagtattgccagcaatggcccgaagacagcggcgatttcaccgtgagccttgccagcgccgacgatttcctagcgcgtctggaccggctggaaagcgatggcctgccgcgtcacgagcatcgtttcttcgacctgttgcagacccagagcaagaacaacctgctggccttgcagcgccacaccgccgaagcccacaagggcatcaagcagcgcatggacgaggtcaacgccagtctggagcaggtgccgttcaatcgcgacaccgtgctgaccatcgaggtcggcgaccgccgcctggccgaggtgcaggaattccagcagcagttgcgcgcggtgctgtcgcatcaacagaccgaagaccgtgccctggccgaagcgcagttttccaccttgcgtgcgctggtggcacgcctgggcgcgcaggaaccggaggcacgccgctggcgcgaacaggtgctggatgtgcgcctgcatgtggagttcatcggtgtggaactggacgcacagacgcgcgcgcaggtggagatctaccgcagcggcgccggcaagtccggcggtcagcgccagaaactggcaaccacgtgcctggcggccgcgctgcgttaccagctcggcggcgaagacggcgaactgccgcgctactgcgcggtagtgctggacgaagccttcgacaaggccgacaacgaattcaccgcactggcgatgaatatcttcgagaacttcggcttccagatggtggtggccacgccgttgaagtcggtgatgaccttggagcccttcatcggtggtgcgtgctttgtcgaaatcagcggccgtcataactccggcgtgttgctgatcgaatacgacgagcaggcacagcgattgaagctgccggagcgctcgcgtggcgatgagccggcagttgccgatgccactgacgctgcgccgtcgatcgaggctacggccgagtcagcaggagtgcagggcgctgcaagcgcagatggcatggcaaccaacggcgtcccaatgcacacggcatcgcctgcgacggaggagaccccgcccgcagcgcaggaaacgcagactggtcagcgcaagccggcagtcgcgacgacgagcaagcagaacaagaccgccaagaccgcatcttcctcgcgcgctgcggcacagcctcaagcaaaacgcccgaagaaatcgccttcgcgcactcctgctctggctggcaagccggcatcggacaaacgctcagcgggcgtgccggcggtgtcgtcaggagtcgcatccaggtctaccgtgggcaagaccactcggtcttcaaaaacgccgggcaagccgattgcggccacaagcgcatccaacgccacatccaggaaggtcgccgccgcatctgcggcattgaaaactgccgcagccaagccacgtgcaacagccgcatcgactggtcagccagcgcgcggcgccggcaagacaacctcgacgcgcgcggtggctaaaccgtcaccggccacaacgcgcggcaccagggcaggcaccccgcaggcgcgccgcaaacgctga

SEQ ID NO: 48761 - DNA, 1470 bp, Xanthomonas citri pv. citri
atgaagcaccaggcccgtatcgccggctatcggcaactgcgcgagcagccggtatggaaactgcttgccgccgaccacgcacccgaactgatcggcctgctgcagacggtgctgatggatggcgaacgccgcctgccttcggcggtgttgcacgcgcgtttgcagcgccagctcgacgccttgcgcgccgacgagctctcgcgtgaactgccgcgcaccgcacaggcgtatcttgcgcattggttggcacagggctggttggaacgccgcctgccggaaggcgcagccgaagaagaatacgaactctcgcgtgccgcgacccaggccatccgcttcatcgtcggcctgcgcgaaagcagcagcagcgccaccgaaagccgcctgtcgctggtgatccagcaactggtgcagttggccggacagaccgaagccgatccagagctccggctggccgcgctgcgcgacgaacgtgcgcgcatcgatgccgagatcgaacgcgtggcctccggccgcgtggcggcgctggacggcaagcgcgcgctggaacgtgcacgcgacctgatccatctctccgacgagctggccgaagatttccatcgcgtgcgcgacgacttcgagcagctcaaccgccaattccgcgagcgcatcatcgacgacgaaggcgcgcgcggcgacgtgctcgaacaactgttcgacggcgtggacgtgattgcagacagcgaagccgggcgcaccttcgaggcgttctggagcctgctcaacgacacccagcaaagcagccaactcgaccaggcgctggatgcgctgcttgcccgtgggtttgcccgcaagctcgatcgccgcgaacgcgccttcttgcgcgggctgaccggcacgctgctggagcgcggtggcgaggtgcacacggtgatgcagcatttcgcgcgcagcctgcgcggtttcgtgcaaagccgtgggtatctggaacagcgccggctcaatcaattgctcaagcaggcgcagggcgaagccttgcaattgcgcgacagcctgcacgccaccaccgccaccggctatacgcagccgctcagcagccgccgcctgcgctcgttgtcgcaatggcggctgcacgatccacggctcacccaggtcgatggacgcgtgcaggccgccgacgcggccgagatctcgctggacagcgtgggcgatctggtcgcgcaatcggagatcgatgtgcgcagcctgcgcaacgacctgcatgagctgctcggccaacgcccgcggctgaccatcggcgacgccttgcaacaacgcccggccgtgcagggcctgggcagcgtgatcggatacctgtcgctgggcacgcgccacggcatggtgatcgaaggacagatggaaacggtgcaatgggaaggcagcgacggcgccgtgcggcgcgcacgcattcccttggtgtggtttacccgggagaaacgcaatgaactggtctga

SEQ ID NO: 48762 - DNA, 702 bp, Xanthomonas citri pv. citri; identical to SEQ ID NO: 43556

SEQ ID NO: 48763 - DNA, 4023 bp, Xanthomonas citri pv. citri; identical to SEQ ID NO: 41640

SEQ ID NO: 48764 - DNA, 1470 bp, Stenotrophomonas maltophilia
atgaagcatcgcgaacgcattgcccgttaccgccacctgcgcgaacagccccagtggaagctgcttgccgccgaccacgctccggaaatcatcggcctgctgcagggcctgctgatggacggtgagcgcacgttgccgtcctcggtactgaacgagcgactgcagcgcgcgctggaccagctggccggcgatgaactctcgcgcgagctgccgcgcaccgcccaggcctacatcgcgcactggctggcccagggctggctggaacgccgtctgcccgaaggcgccgaccaggagcagtacgagctggcgaccgcggcactgcaggcgatccgcttcgccgacggcctcgagcaggcccgcgtggccgccaccgaaagccgcctggcgctggtcattgagcagctctcggcactggctgcgcagaccgaagccgatcccgatgcgcgcctgtccgcgctgcacgacgagcgcgaccgcatcgatgccgaaatcgcccgggtcggcaccggccgcgtggttgcgctggacggcaagcgcgcgctggaacgcacccgccagatcatcggcctggccgacgagctgaccgaggacttccgccgcgtgcgcgatgacttcgagcagctcaaccgcgatttccgcgaacgcatcatcgacgacgagggcgagcgcggcgatgtgctgtcgcagctgttcgaaggtgtggatgtcattggcgaaagtgacgccgggcgcagtttccaggccttctggcgcctgctcaacgacgccgaacagagtgcccagctcgatgccgcgctggaagcggtgctggcgcgcggcttcgcccgccgcctggaccgcaacgaacgcaacttcctgcgcagcttcaccagcaccatgctcgagcgcggtggccaggtgcacgacgtgctgcagaacttcgcgcgcagcctgcgcggcttcgtgcagagccgtggctacctggaacagcgccgcctcaaccagttgttgaagcaggcgcagtccgaagcgctggccctgcgcgacgaattccccgcacagcgcggcatcggccgcgacctgcagctgaccaccagccgcctgcgctcgtggtcgcagtggaagctgcatgatccgcgcagcgcccaggtcgacggcaatgtcgagtacaacgacgcggccgcgatcagcctggagagcgtcggcgacctggtcgcttcgtccgaaatcgacttccgcaccctgcgccgcgacctgcacgacctgctcgatgcacagccgcggctcagcatcgcccaggccctgtcgcagcgcgaggcgccgcagggtcttggcagcgtcatcggctatctgtcgctgggcacgcgcttcggcaacgtggtcgccggcgagcaggagcttgcgcaatggcgtggtggcgacggccaggtccgtcgcgcccgcatcccgctggtttggttcacccaggagagacgccatgagctggcatga

SEQ ID NO: 48765 - DNA, 702 bp, Stenotrophomonas maltophilia; identical to SEQ ID NO: 42012

SEQ ID NO: 48766 - DNA, 3381 bp, Stenotrophomonas maltophilia
atggctatctccaagcacactcccgccctgttcaacgaaggcctgccggacccgcgcctgcagcagttccgcatgcgccgcctgcaggtgcacaactggggcaccttcaacggcctgaccgaagtaccgatcgccgagcgcggcttcctgttcgtcggacgttccggctcgggcaagtcgacactgctcgatgccatgtccgcgctgctgacgccgccggccatcgtcgacttcaacgctgctgcgcgtgaagccgagcgcagtggccgcgaccgcaacctggtgtcctacgtgcgtggcgcgtgggctgaccagcaggacagcggcaccggcgaaatcgccacccagtacctgcgcaagggcgccacctggaccgcactggtgctggaataccgcgccggcgatggccgcgtggtcagcctggtgcgcctgctgtggatctccggcaacggcacctcggccggtgacgtgcgcaagcactacatgattgccgagcgcccgttcgacatcgccaaggatcttggtgggttcgacctggacctgcgcaagctcaagcagaagctgtccgacctgcaccacttcgacaccttctccggctacgccgagcgcttccgcgacctgctcggcatcgacaacgagatggcgctgcgcctgctgcacaagacgcagtcggcgaagaacctgggcgatctcaacgtcttcctgcgcgacttcatgctcgacacgccgaagaccttcgacgccgccgagcgcctggtcagcgacttcgccgagctcgatggcgcgcaccaggcggtggtcaccgcccgtcgccaggtggagaccctgctgccggcacgcgcctactacaacgacctgaaggaaatgcaccgccggcgcggcgacgacgaagccctcaagctcggcgtcgacagcttccgtgaaagccgccgccaggcgctgatcgaagcgcgcctgcgcgagatggacgtgcgtgaccgtggcctgctcggtgaagaagcccagcgccgtgccgcactggacaatcacaccgagcgcctggccgaactggaactgcagcgccgccagcagggcggtgagcgcatcgaagaactggaacgcgagcagggccgcgccgaagccgagcgcgaccgccgccaggccaagcgcgagcaggcaagcctggccgcgcagcagctgggggccgaactgccggacgacgcacacggcttcgccgaactggtcgagcgcgcacagaacgagctgcaggaccgccagcgcgcctcttcggcgctggacgatgcgatcagcgatcgcctgggtggcaagcgcgatgacgagcgccgcttcggcgaagtccgtgcggaactcgaagcgatgcagcgcacgccctccaacatcccggcgccgatgcagaagctgcgcgcgcgcctggccgaggaaaccggcatcgctgaagcggcgctgccgttcgtcggcgaactgatccaggtccgctcggaagagcagggctggcagggtgccatcgagcgcgtgctgggtggcttcgcgctgtcgctgctggtcgacgacaagcattacaacgacgtcgccgagtgggtgaaccgtacccacctgggcatgcgcttcacctactaccgcgtgcgccgcaacgatgatgcgttcgcccgtgagccgtcggcgaagtcgctgctgcacaagctggagctgcgcgaacacgtgttcgaaagctggctgcgccgcgagctcggcaagcgattcgactacgagtgcgtggatgccaagcagctgcgcaacgtcgaccgcggcatcacccgcgaaggccaggtcaagcatccgggcgaccgtttcgagaaggatgaccgcagtgcggtgggcgaccgccgtcgctggatcctcggcttcaacaaccacgacaaggtgggcgccttcgagcgcgaagctcaggaactggccaagcgcatcgccagctgcgagaccgacatcgcgcgcctgcgtgggcagcgtgaccgcgacaacgaacgccgcctggcctgccacgagctggtcagcatcagctggaacgagatcgacatcgccgctccgcagcagcgcctgagcgacatcgaggccacgctgcgcgacctgcgcgaaggcaatgccgacctcgccaagctggccaagcagatcgacgccgtgcgcgccgacatcgagcaggcccgccgcacctatgaggacgtccgcgtcgagcgcgggcagctggtcaaggaacgtgatcgcctggaccgcgcgcgccagcagagccgtgcgctggtgctgccgagcctggcccaggagcaggaagccggccttgccgagcgcctgcaggagcagggtccgctcagcctggaaacgctggaagcgcacatgcgccaggtcagcaacgcgctgaacgagcagctgtcgtcctcgcagcaggacctcaaccgcatcgagaaccagctgatcggctgcttccgtcgcttcatccagcagtggccggaggaatcgggcgacttcaccgtgtcggtggcctcggccgaggacttcctcgcacgcctcgaacgactggagcgcgatggcctgccgcagcacgaagagcgcttcttcgatctgctgcagaaccagagcaagaacaacctgctggccctgcagcgccacagcgccgaggcccgcaagtcgatcggccagcgcctggacgaagtgaacgccagcctggaacaggtgccgttcaaccgcggtacgttgctgaccatcgaactgagcgaccgtcgtctgccggaagtgggcgagttccagctgcagctgcgcgaagtgctgtcgcagcagcagaccgagcagcgcgagctggccgaatcgcagttcaccgtgctgcgccagctggtcaaccgcctgggctcgcaggaaggcgaggacaagcgttggcgggagctggtgctggacgtgcgcatgcacgtggagttcatcggcgtcgagctggatgcggaaacgcgccagcaggtcgagatctaccgcagcggcgccggcaagtccggtggccagcgccagaaactggctaccacctgcctggccgcggcactgcgctaccagctcggcggtgccgacagccagctgcccagctacgccgcagtggtgctcgacgaagccttcgacaaggccgacaacgagttcaccgcactggcaatgaacatcttcgacaacttcggcttccagatggtggttgccaccccgctgaagtcggtgatgacgctggaaccgttcatcggcggcgcctgcttcgtcgaaatcagcggtcgccacgattccggcgtgctgctgatcgagtatgacgaggaaggcaagcgcctgaagctgcccgagcgcagccgccagcaggccaatgaaccggaagaagccgacgcctga

SEQ ID NO: 48767 - DNA, 1470 bp, Stenotrophomonas maltophilia
atgaagcatcgcgaacgcattgcccgttaccgtcacctgcgcgaacagccccagtggaagctgcttgccgccgaccatgccccggaaatcatcggcctgttgcagggcctgctgatggacggcgagcgcacgttgccttcgtcggtgctcaacgagcgcctgcagcgtgcgctggaccagctcaacggcgacgaactctcgcgcgagctgccgcggaccgcgcaggcctacatcgcgcactggctggcccaaggctggttggagcgccgcctgcccgaaggcgccgaccaggaacagtacgagctgtcgaccgcagcgctacaggcgatccgcttcgccgacggcctcgagcaggctcgcgtggccgccaccgagagccgcctggcactggtcatcgaacagctctcgcagctggccgcccagaccgagtccgaccccgatgcccgcctctcggcgctgcgcgacgagcgcgaccgcatcgacgccgagatcgcccgcgtcggcgccggccgcgtcaccgcgctggatggcaagcgcgccctggaacgtgcgcgccagatcatcggcctggccgacgagctgaccgaggatttccggcgcgtgcgcgatgacttcgagcagctcaaccgcgagttccgcgaacgcatcatcgacgatgaaggcgagcgcggcgacgtgctgtcgcagctgttcgaaggcgtggacgtgatcggcgagagtgatgcagggcgcagcttccaggccttctggcgtctgctcaatgacgccgagcagagcgcccagctcgatgccgcgctggaagcggtgctggcgcgtggctttgcccggcgcctggaccgcaacgagcgcaacttcctgcgcggcttcaccagcaccatgctcgagcgcggtggccaggtgcacgacgtgctgcagcacttcgcgcgcagcctgcgcggcttcgtacagagccgtggctatctggagcagcgccgcctcaaccagctgctcaagcaggcgcagtccgaagcgctggcgctgcgtgacgagttccccgcacaacgcggcatcggccgcgacctgcagctgaccaccagccgcctgcgttcgtggtcgcaatggaagctgcacgatccgcgcagtgcccaggtcgatggcaacgtcgagtacaacgacgcggccgcgatcagtctggaaagcgtcggcgatctggtcgcttcgtccgaaatcgacttccgcaccctgcgccgcgacctgcacgacctgctcgatgcacagccgcggctcagcatcgcccaggccctgtcgcagcgcgaagcgccgcagggcctcggcagcgtcatcggctacctgtcgctgggcacgcgtttcggcaacgtggtcgccggcgagcaggagcttgcgcaatggcgcggtggcgacggccagatccgccgcgcccgcatcccgctggtttggttcacccaggagagacgccatgagctggcatga

SEQ ID NO: 48768 - DNA, 702 bp, Stenotrophomonas maltophilia
atgagctggcatgaagatcccatcgaagcaccgcaggccgacgtggcggaagacgcctacgaggccgagccggcggcgaccatggcgcagccccgccgtggcaacgacgtgtactacctcggcgacaccgggcgcctgccgctggatgcgcgccgcgcgctgtgccagctgctgatcggccccagcatcgaccagctgcgccacgccaagctgtggcccgcgctgatccgcagcgaagcggccatccgctcatcgctggcggacctgttcctggaactggtgctcgaccgcgacagcggcgtggcgttcacccgccaagccgataccgaagacgttgatgcgccggtgctgctgcgcacctcgccgctgaccttcatcgactcggtgctgctgctgtacctgcgccagcagctggccgaggccgatgcacgcggcaaccgcgcggtggtcgccgacgccgagatggccgaagcgctggccatctatgaaaagaacctgtccaccgaccgcgccggcttcaaccgccgcgttgcctcggcggtgcagaagatgaaggacaaccacatcctgacccgcctcagcggccaggatgaccgccacgaagtctcgccggcgctgaagctgctgttctccgcagaagacgtgtcccagctttcggcggtgtaccgccagctgcgcgaaaccccggccgccgaggcctga

SEQ ID NO: 48769 - DNA, 3381 bp, Stenotrophomonas maltophilia
atggctatctccaagcacactcccgcactgttcaacgaaggcctgccggacccgcgcctgcagcagttccgcatgcgccgcctgcaggtgcacaactggggcaccttcaacggcctgaccgaagtaccgatcgccgagcgcggcttcctgttcgtcggccgctccggctcgggaaagtcgaccctgctcgatgccatgtccgcgctgctgacgccaccggccatcgtcgacttcaacgccgctgcgcgtgaagccgagcgcagtggccgcgaccgcaacctggtgtcctacgtgcgcggcgcgtgggccgaccagcaggacagcggcaccggcgaaatcgccacccagtacctgcgcaagggcgcgacctggaccgcactggtgctggagtaccgtgctggtgatggccgcgtggtcagcctggtgcgcctgctgtggatctccggcaacggcacctcggccggtgatgtgcgcaagcactacatgatcgccgagcgcccgttcgacatcgccaaggacctcggcggtttcgacctggacctgcgcaagctcaagcagaagctgtccgacctgcaccacttcgacaccttctccggctacgccgagcgcttccgcgacctgctcggcatcgacaacgagatggcgctgcgcctgctgcacaagacgcagtcggcgaagaacctgggagacctcaacgtcttcctgcgcgacttcatgctcgacacgccgaagaccttcgacgccgccgagcgcctggtcagcgatttcgccgagcttgatggcgcacaccaggcggtggtcaccgcccgccgccaggtggaaaccctgctgccggcgcgcgcctactacaacgacctgaaggaaatgcaccgccggcgcggtgacgacgaagccttgaaacttggcgtcgacagcttccgcgagagccgccgccaggcgctgatcgaagcgcgcctgcgcgagatggacgtgcgtgaccgcggcctgcttggcgaagaagcccagcgccgtgccgcactggacaatcacaccgagcgcctggccgaactggagctgcagcgccgccagcagggcggtgagcgcatcgaggaactggaacgcgagcagggtcgtgccgaagctgagcgcgaccggcgccaggccaagcgcgagcaggcacgccaggcggcacagcagctgggggccgaactgccggacgacgcgcacggtttcgccgaactggtcgagcgcgcgcagaacgagctgcaggatcgccagcgtgcctcctcggcactggacgatgcgatcagtgatcgcctcggtggcaagcgcgatgacgagcgccgtttcggcgaagtccgtgccgaactcgaagcgatgcagcgcacaccgtccaacatcccggcgccgatgcagaagctgcgtgcgcgcctggccgaagagaccggcatcgccgaggcagcgttgccgttcgtaggtgaactgatccaggtccgcgcggaagagcagggctggcagggtgccatcgagcgcgtgctgggcggtttcgcgctgtcgctgctggtcgacgacaagcactacaacgatgttgccgagtgggtgaaccgcactcacctgggcatgcgcttcacctactaccgcgtgcgccgcaacgatgatgcgttcgcgcgcgaaccctcggcgaaatcgctgctgcacaagcttgaactgcgcgagcatgtgttcgaaagctggctgcgccgggagctgggcaagcgcttcgactacgaatgcgtggatgccaagcaactgcgcaacgtcgaccgcggcatcacccgcgaaggccaggtcaagcatccaggtgaccgtttcgagaaggacgaccgcagtgcagtgggcgaccgccgccgctggatcctcggcttcaacaaccacgacaaggtcggtgccttcgagcgcgaagcccaggaactggccaagcgcatcgccagctgcgagaccgacatcgcgcgcctgcgcgggcaacgtgaccgcgacaacgaacgccgcctggcctgccacgagctggtcagcatcagctggaacgagatcgacatcgccgctccgcagcagcgcctgagcgatatcgaagccaccctgcgcgacctgcgcgaaggcaacgccgacctcgccaggctggccaagcagatcgacgccgtgcgtgcggatatcgaacaggcacgccgcacctatgaggacgttcgcgtcgaacgcggccagctggtcaaggagcgcgaccgtctcgatcgcgcccgccagcagagccgtgcactggtgttgccgaccctggcccaggagcaggaggccgggcttgccgagcgcctgcaggagcagggtccgctcagcctggaaacgctcgaagcgcacatgcgccaggtcagcaacgcgctgaacgagcagctgtcgtcctcgcagcaggacctcaaccgcatcgagaaccagctgatcggctgcttccgccgcttcatccagcagtggccggaggagtcgggtgacttcaccgtctcggtggcctcggccgaggacttcctcgcccgcctcgaacgcctggaacgcgatggcctgccgcagcacgaagagcgcttcttcgatctgctgcagaaccagagcaagaacaacctgctggccctgcagcgccacagcgccgaagcccggaagtcgatcggacagcgcctggatgaagtgaatgccagcctggagcaggtgccgttcaaccgtggcacgctgctgaccatcgaactgagcgaccgccgcctgccggaagttgccgagttccacctgcagctgcgcgaggtgctgtcgcagcagcagaccgagcagcgggagctggccgaatcgcagttcaccgtgctgcgccagctggtcaaccgactgggctcgcaggaaggcgaggacaagcgctggcgcgagctggtgctggacgtgcgcatgcacgtggagttcatcggcgtcgagctggatgcggaaacgcgccagcaggtggagatctaccgcagtggtgccggcaagtccggtggccagcgccagaagctcgccaccacctgcctggcggcagcgctgcgctaccagctcggcggcgccgacagccagctgcccagctacgcggcggtcgtgctcgacgaggccttcgacaaggccgacaacgagttcaccgcgctggcgatgaacatcttcgacaacttcggcttccagatggtggtcgccaccccgctgaagtcggtgatgacgcttgaaccgttcatcggcggcgcctgcttcgtcgaaatcagcggccgccacgactccggggtgttgctgatcgagtacgacgaagaaggcaagcgcctgaagctgcccgagcgcagtcgccagcaggccaacgaaccggaagaagccgaggcctga

SEQ ID NO: 48770 - DNA, 1455 bp, Thiocapsa sp. KS1
atggacttcgccaccctcgaaaccctgcgcacccaccaccccgcgtggcggctactgcgctcggatcatgccccgctggtggcgagctttcttaaccgcgtcttcgtgcagcccaatgtccgggtgatggcggcggcggatctggccgaggcgctcgaagacgagctgtatgccctgcgcgagcgtctcggcgagggcagcttccccaaatcggcgttggactatctcaacgattgggccggcccggaaaagggctggctgcgcaagttctacgcccgtgactcggacgagccgcagttcgatctgaccccggcgaccgagaaggcgatcgcctggctcggcaccctctcggagcgcagcttcgtggggacggagtcgcggctcttgacgttgttcgagctgctcaagcagatgagcgcgggcagcgaggccgatcccgagaagcgcatcgtggagcttaccaggcggcgcgacgagatcgatgccgagatcgcgcgggtgctgggcggcgacgtgccgctgctggacgacacggcgctgaaggatcgcttccagcagttcatgcagttggcgcgtgagctattgaccgatttccgcgaggtggagcacaacttccgtctgctcgatcggcgggtgcgcgagcggatcgcgctctgggagggtgcgaagggtgcgctcttggaggagatcatgggcgagcgcgacgccatcgccgactccgaccaaggccgcagcttccgtgccttttgggatttcctcatgtccagtcgccggcaggaggagctgaccgagctgttggaccgggtgctcgccctgcccccggtcgcggagctgaagccggatgcgcgcacccgccgggtgcattacgactggctcgaggccggcgagcacacccaacgcacggtcgcgcagctctcgcagcaactgcggcgctttctggacgatcaggcgtggctggagaaccgtcgcatcatggacatcctgcacgggatcgaggccaaggcgctggccctgcgggagcatcagccgaccggcgaggtgatgcgcattgccgagtccgccgccgcggtcgagctgccgatggagcgcccgctctacaccccgcccctgaagccggtcatcgctgatctggagctgcaagcaggcgacgccgatctggacgccgatgcgctctatgcgcaggtcgtggtcgaccgcgcgcagcttgcccgccacatccgccatgccttgcaggatcgctcccaggtcacgctgcgcgagctgaccgagctgcagcccttgacgcagggcctcgcggagctggtggcttatcttcagttgggcagcgacgccttcaggacgaccctggacgagaatgccccggaggtgattgcctgggagacgcgcgcgagcgacggcatggcggttcgaaaggccgcccgactgccccgcgtcatctttgtcagagagggttga

SEQ ID NO: 48771 - DNA, 657 bp, Thiocapsa sp. KS1
ttgaggatggacgacgaccaaggacaggcccgggacaccccggcgctcgcggccggggcggagctgtccgcgctggtgatcggcctgctcaaaggggtcacctatcgcgagggcgacgagcgactctggggcgcgctgctcgacctgcaggcgcgggtgcgggactatgtatcggtgctcggactggagctcgtgctcgacgaggcggaaggctatgccttcctcaagagccgcgccgagaccgccgaagacgaggccgcgcccaagatgccgcgtctggtcgcgcgtcggccgctgtcgtttccggtcagcctcttgctggccttgctgcgcaagaagctcgccgaattcgatgccggtggtgccgagacgcggctcgtgctctcgcgcgacgagatcgtcgagctggtgcgggtcttccttccccaaagcagcaacgaggcgagactcatcgatcagattgaaacccacatcaacaaggtcgtcgagctgggttttctgcgccgtctgaagtccgcgagcggctttgcccgcggcccggacagctacgaggtgcggcggatcctgaaggccttcgtcgatgcgcaatggttggcggacttcgacgcacggctggcagtctatcgggcgcaggtcggccccgacgacggcagttga

SEQ ID NO: 48772 - DNA, 3450 bp, Thiocapsa sp. KS1
atgatcactggcccgatgcagccgcttgaatcgctcgatctggacttcgtcgccgacgaccgcctgtcgggctttcgtctgtcgcgcctggaggtcttcaactggggcaccttcgacggccgcgtctggaccctgtcgctcgacggcaagaacgggctgctgaccggcgatatcggctcgggcaagtccaccctggtggatgccgtgacgacccttttggtcccggcccagcgcatcgcctacaacaaggccgctggtgcggacagcaaggagcgcacgttgcgctcctatgtgctcgggcattacaagtccgagcgcaacgaggtgaccggggcggccaagcccgtgagtctgcgcgatcacaacacctactccgtcatcctcggggtcttccacaacgccggctacgaccagaccgtgacgctcgcgcaggtcttctggatgaaggaggcgcagggtcagccggcgcgcttcttcgtctgcgccgagcgagatctctcgatcgcgaccgatttctcccggttcgggacggacatcgcccaactgcgcaagaagctacgcgggctcggtgccgagatcgaggacgctttccccaaatacggcgcttggtttcgacgccggctgagtatcgacagcgagcaggcgcttgagctctttcatcagacggtctcgatgaagtccgtcggcaacctcaccgatttcgtgcgcggacacatgctggagcccttcgcggtggagccccgcatcaaggcgctgatcgcacacttcgacgatctcaaccgcgcgcacgaggcggtcctcaaggccaagcgccaggtcgagatgctcacgcccttggtggcggactgcgaacgtcacgccgggctgacgcgcgaggtcgaggatctcagaggctgccgtgacggattgcgtgtccacttcgcgggtttgaaattggcgctgctcgggaaacgtctcgctcacctgcaggaggaccgggagcgcgtcgacgccctggtcaagcgcctggacgggcgtcgcgaggagcaaggcaaccaggtctacgagctcaagcgcgcggtggccgaaaacggcggggacaggctcgaacgcctggctgccgagatcaagaagctggaggcgctgcgcgacgctcggcagaccaaggcacggcgctatgccgagctgacggccggtctcgacgagagtccggccgcggacgaaacggccttcctcgcgcaacggcgccggctcgcggagatgcgggagggtttgcaggcgcgcgacatcgatctgcagaacgaggtgaccgagcacagcgtgaccctgcgccagggccagctcgaacacgacgcccttcaggccgagatcgagagcctgaagcgtcgccgcagcaatatcgacgaccagcagatccggatccgtgccgcgctctgcgaggcgctgggtcttgcggaggagtcgatgcccttcgcgggcgagctgctgcaggtgcgcgacgaggagcgcgactgggaaggtgcagccgagcgactgatgcgcggcttcggcctgtccctgttggtgcccgacatggcctacaagaccgtcgccgagtgggtcgacagcagccatctgcgcggtcggctggtctattttcatgtgcgcgcccgggtgcgcacccagttgcatacagggggccggggcgacctgcccgagctgcaccgcgattcgctggtgcgcaagatcgccgtcaaacccgactcgcccttctacgactggctggagcgcgagctggcgcatcgttttgacgtggcctgctgcatcacgcaggagcagttcagacgcgagacccgtgccatcacacccgccggccagatcaaggacccgagcggacgtcacgagaaggacgaccgtcaccgcatcgacgaccgcagtcgctatgtcctgggctggaccaacgcggccaagatcgagacgctggaggccaagcgtcgccggctcgaagcccatctcgccgagatcggcgcactcacgggcaagctcttatccgagcgaagggcgctcggtgcccgtctggacgccctgacgggactgaaagagtttatcgacttcaacgagctggactgggcctcggtcgcgaccgaggtcgccgcactgatcgacgagcggcaacgcttggaatcggcatccgatctgctcaaacagctcaatcagcgcctgggcgaggccgtccaagagcttgcggtgatcgagggcgagctggaagaggccagatcgaaacgcgccaagatcgagcagaagcaggaggatgccgagacactccgagtgcagacccaagtgctcttcgagccgagcggggacgcggcccgacccgcgccctcggccgagctgaccgagcggctcgaggccatgcgcaccgaggcgctcggcgagcatcaattgaccgtcgagtcctgcgacaaccgcgagcaggacatacgcgcctggctccagacccggatcgacaacgaagatcgcaagatcaaaggcctgcgcgaccggatcatcaccgcgatggtggcctacaaggacgccttcgagctcgaaacccgggagctcgacgccaacgtcgaggcggccttcgagtaccgacaacagctcgatcagctgggacgcgacgacctgccccgcttcgaggcgcgcttcaaggagctgttgaacgtcaacaccatcaacgagatcgccaacttcaacgcccagctcgcccgcgagcgcgagaccatcagggagcgcatcgggcgcatcaacgagtcgctcacccagatcgactacaacccgggacgctatatcgcgctcgaatcccagatcagcccggacgccgagatccgcgacttccagtccgagctgcgcgcctgcaccgagggcgccttgaccggctcggaggatgcgcagtattccgaggccaagttcctgcaggtgaagaccatcatcgagcgctttcgagggcgcgagggccagaccgacctggacagacgttggacggccaaggtcacggacgtgcgcaactggttcctgttcgccgcgagcgagcgctggcgcgaggacgggaccgagcatgagcactactcggactcgggcggcaaatccggcggtcagaaggagaagctcgcctacaccatcctggccgccagccttgcctaccaattcgggctggaatggggcgcggtccgctcgcgatccttccgcttcgtcgtgatcgacgaggccttcgggcgcggctcggacgagtcggcgcagtacggtctgcggctctttcagcagctcaacctgcaactgctgatcgtcacgccgctgcagaagatccacatcatcgaacccttcgtctcggccgtgggtttcgtgcacaacgaaggcggtcgcgagtccaagctgcgcaatctgacgatcgaggagtatcgcgaggagtccagagcgcgcaaggccgagccgagtgcaagcgtggcggcatga

SEQ ID NO: 48773 - DNA, 1236 bp, Thiocapsa sp. KS1
atgagctggacgacggcggcggatctcaaggcgcagctgaaccgactctgggagcgcggagagctgctgcgcccgctggtcgcggacgacgtagccggggcgaacggattcccgttgcgtctgcggctgaagggacccggctcctctgacctggccgatcggttcgatgccgtgcgggcctggctcgccgagctgacggccgtcccgcgtctgcggatcgcttggcgcgccgtcaatcatcgtgtgctcggtcctcagcgtctgcccgaggccatctgggtcgaccgactcgacgacgcgcttgccctcatcgggaaacgaggcgacgcggcgcgattcagcgattgcacgacgctgacacgatccagacaaccggccctacttgactggctcgccaaacgtcccttacaggcgatctcgctggccgaggactgggagcgcctgctggccgtggtggactggctgagccgccacccgcgcccggggatctacatccggcaggtcgacatccccggcatccacagcaagttcatcgaggcgcatcgcggtgtcctctcggagctgttggatcttgtcttgccggcggaggcggtcgctgcggatcgcgtcggcgtcggtcggttcgccgcgcgctacggttttctcgacaagccaaaccgggtccggtttcgcctgctcgatgacgccgtccccctgctgcccggtcccgcgcgagccgacgtcaccctggatgcggaaagcttcgcccggcttgcgatcccgattcgacgcatcttcatcacggagaacgagaccaactttctcgccttcccggacgcgaccgcctcgctggtcgtcttcggctcgggctatggctgggatgcactggcccgggccgagtggctcgggacctgcaccctgcactactggggcgacatcgacacccacggcttcgccatcctcgaccagctccgcggccgattcggccgggccgtctccttcctgatggatcgcgccaccctgatggcgcacgagagcctctggggcgaggagcccgatcaggtcatgcacgatcttccgcggctctcggagccggaacgagccctgttcgatgatctgcgcgacaaccgcatccgcaaaggcgtgcgtctggagcaggagcgggtcgggtttcgctgggtcaagaccgcgcttgcggatgtcgtggtcgacaacacttgccggacaacggcattcggaaacacgtgggacacatga

SEQ ID NO: 48774 - DNA, 1470 bp, Stenotrophomonas maltophilia
atgaagcaccgcgaacgcatcacccgttatcgccacctgcgcgaacagccgcaatggaagctgctcgccgccgaccacgcaccggaaatcatcggcctgctgcagggcctgctgatggacggcgatcgcacgttgccggcatcggtcctcaatgagcgcctgcagcgtgcgctggaccagctcaacggcgacgagttgtcgcgcgagctgccgcggaccgcgcaggcctacgtcgcccattggctcgcgcagggctggctggaacgccggctgcctgaaggcgccgaccaggagcagtacgagctctcgacccaggcgctgcaggcgatccgcttcgccgacagcatggagcaggcccgcgtggccgccaccgaaagccgtctggcactggtgatcgagcagctgtcgcagctggccgcgcagaccgaggccgacccggacgcacgcctgtccgcactacgcgacgagcgcgatcgcatcgatgccgagatcgcccgtgtcagcgctggccgtgtgacggccctggacggcaagcgcgcgctggaacgtacgcggcagatcatcggcctggccgacgagttgaccgaagacttccgccgcgtgcgcgacgactttgaacagctcaaccgtgagttccgtgaacgcatcatcgatgacgaaggcgagcgcggcgacgtgctgtccaagctgttcgaaggcgtggacgtgattggcgagagcgacgcgggccgtagtttccaggcgttctggcgcctgctcaacgacgccgaacagagcgcccagctcgatgccgcgctggagacgctgctggcccgtggcttcgcccggcggctggatcgcaacgagcgcaacttcctgcgcggcttcaccagcaccatgctcgaacgtggtggccaggtgcatgacgtgctgcagaacttcgcgcgcagcctgcgtggtttcgtgcagagccgcggctacctggaacagcgccgcctcaaccagctgttgaagcaggcgcagtccgaagcactggcactgcgcgatgacttcccggcgcagcgcgccatcggccgcgacctgcagctgaccaccagccgcctgcgctcgtggtcgcagtggaagctgcacgacccgcgcagcgcgcaggtcgatggcaacgtcgaatacaacgatgcggccagcatcagcctggaaagcgtgggcgatctggtggcgtcgtcggaaatcgatttccgcaccctgcgccgcgacctgcacgacctgctcgacaggcagccgaaactcagcattgcccaggccctgtcgcagcgcgaagcgccgcaggggctgggcagtgtcatcggttacctctcgctgggcacgcgctttggcagcgtgatcgccggcgaacaggagcttgccgaatggcgaggtggcgacggacagatccgtcgtgcccgcatcccgctggtttggtttacccaggagagacgccatgagctggcatga

SEQ ID NO: 48775 - DNA, 702 bp, Stenotrophomonas maltophilia
atgagctggcatgaagaccccatcgacgcaccgcatgccgacctggccgaagacgcttaccaggccgaaccggtggcgaccatggcccagccccggcgcggcaacgacgtctactacatgggcgataccggccgcctgccgctggatgcgcgccgcgcgctgtgccagctgctgatcggccccagcatcgaccagctgcgtcacgccaagctgtggccggcactgatccgcagcgaagccggtatccgttcggcgctgtcggacctgttcctggaactggtgctcgaccgtgacagtggcgtggcgttcacccgccaggccgacaccgaagatgtcgatgcaccggtactgctgcgcacctcgccgctgaccttcatcgattcggtgctgctgctgtacctgcgccagcagctgggcgaagccgatgcgcgtggcaaccgcgccgtggtcgccgatgctgaaatggccgaagcactggccatctacgaaaagaacctgtccaccgaccgcgccggcttcaatcgccgtgtcgcctcggcggtgcagaagatgaaggacaatcacatcctgacccgcctcggcggccaggaagaccgccacgaagtctcgccggcgttgaagctgctgttctccgccgaagacgtatcccagctgtcggcggtttaccgccagctgcgcgaaaccccggccgctgaagcctga

SEQ ID NO: 48776 - DNA, 3381 bp, Stenotrophomonas maltophilia
atggccatttccaagcacactcccgccctgttcaacgaaggcctgccggacccgcgcctgcagcagttccgcatgcgccgcctgcaggtgcacaactggggcaccttcaacggcctgaccgaagtaccgatcgccgagcgcggcttcctgttcgtcggccgctccggttcgggcaagtcgaccctgctcgatgccatgtccgccctgctgacgccaccggccatcgtcgacttcaacgccgcagcgcgtgaagccgaacgcagcggccgcgaccgcaacctggtgtcctacgtgcgcggcgcgtgggccgaccagcaggacagtggcaccggtgaaatcgccacccagtacctgcgcaagggcgcgacctggaccgcgctggtgctggagtaccgtgccggcgatggccgcgtggtcagcctggtacgcctgctctggatcgccggcagcagcacctccgccggtgacgtgcgcaagcactacatgattgccgagcgtccgttcgacatcgccaaggatctgggcggcttcgatctggacctgcgcaagctcaagcagaagttggccgacgtccatcacttcgacacgttctccggctatgccgaacgcttccgccacctgctcggcatcgacaacgagatggcgctgcggctgctgcacaagacgcagtcggcgaagaacctgggtgacctgaacgtcttcctgcgcgacttcatgctcgacacgccgaagaccttcgacgctgccgaacgactggtcagcgatttcgccgaactcgatggcgcgcaccaggccgtggtcaccgcgcggcgtcaggtcgaaaccctgcagccggcgcgcgagcactatggcgatctgcaggcgatgagtcgccgtcgcggcgacgacgaagcgctcaagctcggcatcgacagcttccgcgaaagccgccgccagttgctgatcgaagcacgcctgcgcgagatggacacgcgcgatcgtggcctgctgggcgaagaagcgcagcgtcgtgcggcgctggacaaccacaccgaacgactggccgagctggaactgcagcgccgccagcagggtggtgagcgcatcgaggaactggaacgcgagcagggccgcgccgaagccgaacgtgatcgccgcctggccaagcaggcgcaggcgcgtgacgccgcacagaagctgcaggccgcgctgcccgaggatgcacatggcttcgccgagctggtcgagcaggcgcagtccgaactggaagaccgtcagcgtgcgtcgagcgccctggacgacgccatcagcgaacggttgggcggcaagcgcgacgacgagcggcgcttctccgaagtgcgtggcgaactggaggcgatgcagcgcacaccctccagcattcctgcgccgatgcagaagctgcgcgcacgcctggccgaagaaaccggcatctccgaagcggccctgccgttcgtcggcgagctgatccaggtccgctcggaagagcagagctggcagggcgcgatcgagcgcgtgctcggtggtttcgcgcaatcgctgctggtcgatgacaagcactacaacgacgtcgccgagtgggtgaaccgcacccacctggggatgcgcttcacctactaccgcgtgcgtcgcaatgatgatgcgttcgcccgcgaaccgtccgccaagtcgctgctgcacaagctggaactgcgcgatcacgtgttcgaaagctggctgcgtcgcgagctgggcaagcgcttcgactacgaatgcgtggacgccaagcagctgcgcaacgtcgaccgcggcatcacccgcgaaggccaggtcaagcatccgggcgatcgcttcgagaaggacgaccgcagtgcggtcaatgatcgccgccgctggctgctgggcttcagcaaccgcgacaagctggccgtcttcgagaaggaagcccaggagctggccgcccgtatcgccagctgcgataccgacatcgcgcgcctgcgcagccagcgtgaccgcgacaacgaacgtcgcctggcctgccaccagctggtgggcatcagctggaacgaaatcgacgtcgccgcgccgcagcagcgcctggccgacatcgaggccagcctgcacgccctgcgcgaaggcaatgccgacctagccaggatcgcccagcagatcgacgccacccgcgccgatatcgagcaggcccgccgcacttacgaagacacccgcgtcgagcgcggccagctggtgcgcgaacgcgaccgcctggaccgtgcccgccagcagagccgtgcactggtcctgccagcgctggccgaagaccaggaagccggcttggccgagcgcctgcaggagcagggcccgctcagcctggaaacgctggaagcgcacatgcgccaggtcagcaacgcgctgaacgaacagctctcgtcttcgcagcaggacgtcaaccgcatcgagaacctgctgctgggctgcttccgtcgcttcatccagcagtggccggaagaatcgggcgacttcaccgtgtcggtggcctcggccgaggatttcctcgctcgcctcgaacgccttgaacgcgatggcctgccgcagcacgaagaacgcttcttcgacctgctgcagaaccagagcaagaacaacctgctcgcgctgcagcgtcacagcgccgaggcccgcaagtcgatcggccagcgcctggacgaagtcaacgccagcctggagcaggtgcccttcaaccgtggcaccctgctgaccatcgaactgaacgaccggcgcctgccggaagtgcaggagttccaccagcagctgcgcgaggtgttgtcgcagcagcagaccgagcagcgcgacctggcggaaacgcagttcaccgtcctgcgccagctggtcaaccgcctcggctcgcaggaaggcgaagacaagcgctggcgcgaagtggtgctggacgtacgcctgcacgtggagttcatcggcgtggagctggatgtggaaacgcgccagcaggtcgagatctaccgcagcggcgccggcaaatccggtggccagcggcagaagctggccaccacctgcctggcggcggcgctgcgctaccagctcggcggcgccgacagccagctgcccagctacgccgcagtcgtgctcgacgaagccttcgacaaggccgacaacgagttcaccgcgctggcgatgaacatcttcgacaacttcggtttccagatggtggtggccaccccgctgaaatcggtgatgacgctggaaccgttcatcggtggcgcctgcttcgtcgagatcagtggccgccacgattcgggcgtgctgctcatcgagtacgacgaagaaggcaagcgcctgaagctgccggagcgcagccgccaacaggccgacgaaccggaagaagccgaagcctga

SEQ ID NO: 48777 - DNA, 1437 bp, Mycobacterium sp. GA-2829
atgcgggtggacgacaacagggggctgtcggcggctgagctgctcgaactcaaccgcgacctgcacggatcccgcgcgatccggctgctggccacccacaacctggccctgtacgccacgctcatggagcgccacctcgccgacggggtggtcgccgagaccgagctggtggtgcgcctcgagcgtgacctgcacgacctcgaccccgacgggcagtccgggctggcgctgatcaagtcgtgggccagccagggctggctgcaccgcatcgtcgacgagcgcagcgaccagaacatctgctacctcacccaggacgcccgccgcgcgctggacttcctgcgcgggatgcgccgccaggacaccattgccaccggcgggtcgatcaacggcatcgcgtcacgcctcaaacaggtcgccatccgcgtcggcaacgaccccgcccgcatccgcaagagcatcgaggcggagatcgccgccctgcaggccgagctcgacgacctcgaggccggcacccgccccgagcccgacgtcaccgacgcctacgacgaggcccgcgccatcgccatgcagatggagcgtctgatcaccgacatcggtcagtacggctcgatgatcgaacaggccaccgcggcgctggacgagccgatcgacagcaacgccgaataccgcgaccggcagcgccagatgtacgccgactaccaggccgcctgggattcccagggccgcgacagccaccgcgccttcctgcggatgatcaacgaccccgaccagcgcgcggagttcgaggccgacgtcgccgcggtcgccgaggcgctcccactgctcgacccggcgctgcgcaaggtgatggccgggttcttcgaactggtcggccaccagatcgacgaggtcgaacgcatccagcagcgttgtgcgcagcgggtgaaacggttcaccgcgttcggcacgctcgagcagagccgtggggtggcccgtcagctgggcgaggcgatcggcgcggcgcgcaatctgctgaagtcgagcctcaccgactcgcggctggagatcgagctgcccctggcccgccacgcgttcagctcggtcggcgccctgagcttcaagatcggcgacctgtcggcgcccaagccggcgagacacgctgcaggagaacttgatctgagcagcttcgccgcgctcacgacacaggtcgacgcgcccgcgatgtcggagatgctcaacagcgcgctgccggtgtccctgtcggacgcggtcgcgatgctcgataacgcatacctcggccacgtcatcgtgctgtggtcgtgggcactcaaacaaccgttcgaggggcaaccggcctcgaccagtgtgcggttccgttcactcgacggccgtgaccgcgaaatcgccgtccccgacctcgttttcaccgaaccgatcagtgtgggagccgccacgtga

SEQ ID NO: 48778 - DNA, 690 bp, Mycobacterium sp. GA-2829
gtgaccaccgaacccgacgccgacttcgccgcgttctccgaactcccccaggtcgaccagaacgcccgtcccccgcaccagcgcagaccgcggttcgacggggacgtctccgaactgcccgaccgggcgtgctgggcgctgcagaacctgctgactcgccgttacatcagcgccgaggccgatagcgatctgtacagctgggtgctcgaataccgcaagcagctcagcgtgcgactctccgagctcgacctgatcctgcgcatcgtcgacgggaccgacgtcgcgttcgtcgaacaggcccgctacgaatcggcaaggggtgtcaagcttctgcggcgcgaaccgctcggcacctacgattcgatcctggccctgcacctggcgcagatgatgcgggcggccggtgggcagaaggtgctgatcacccgcgaggagatgcacggattgttctccggggtgctcaacgacaccgaccgcgatgcggtcacgttcaccgcgcggatcgacggcgcgatcgcccgtctcgccgggttggagatcctccggaagagccgcgacgacgaggacagctacacgatcagcccggtgatcaacgccgtcatgacggcctcggtgatcaccgaactgcagcagcagttcgaacagctgctgggcggcggcgcgccggccgaggaggtctacgttgactga

SEQ ID NO: 48779 - DNA, 3357 bp, Mycobacterium sp. GA-2829
ttgactgaacagttccatctgtcccggctgcagatcatcaactggggtgtgttcgacggctaccactccatcccgttcagttccggcggcgccctgatcgccggcgcctcgggcagcggcaaatcctcgctcctggacgcgatctcgttgggattcctgccgttcaaccgccgcaacttcaacgcctcgggcgacaacaccgcggccgggtcgagcgcggggcggcgcaccgtcgacaagtacgtgcgcggtgcgtggggccagcgcagcgacggcggcaccagccgcgtgatgtacctgcgcggtgagggcaccgcgtggtcggcggtcgcggtcacctacaccggcgactccggtcgcaccgtcaccgggctggtgctcaagtggctgaccggggagtcgcggtcggactcgtcgagccgcttcgtgatcggtgacggcgacctcgacatcgaggacgtctgcaaccggtgggcggccggtaggttcgacacgggcgtgttcaaggatcacggctggcggttcacgaccaaggtggagtcgcagtacctcgcacagctgtacgcgaccatcggcatccgcgcctccgacgccgcccagcagttgctcggtaaggcgaaatcactgaaaagcgttggcgggctggagcagttcgtccgcgagttcatgctcgacgaacccgagagcctggcccggctgcccgaggcgctcaagcagatcgacccgctggtggaggcccgcgaactgctggccgtcgcgcagcgcaaacgcaagatcctcggcgacatcgagaaaatccagcagcgctacgcctcggagtcctcggacctcgggatcatcgacctggtcgacctgccgatggtgcgcgcctacaccgaccacgtgcggctggcgcagtgcccggcgcagatcgcgcagctcgacaccacgatcgaccagctcgacaacgagtacgaggacgtcacccgcagcctgaatctcgcgaaggccgaggcggattcgctcaacgcgcagatcagcgggaacagcgccagcatcgggccgctgcagtcgcaggtgaccgccgccgagaccgaggccgagcaggtgtcgcgtcggcgcagcgcctacgaggacgcggtgagcgcgcagggtctcgacgtgcccgacaccgccgaggagttctggaacctgcgcgaggaactgctcaccgaggccaccgatctgctggccaaggtggagcgcaaccgcgaggcgtccaccgacgcagagtacgcgcagaaagccgcgcgcatcgcccgcgacgacgccgccaaggagctcaaacgcgtcgagcatgtgggctccgcgctgccggagttcgcgctgctgatgcgcgagcagatctgcgccgcgctcgggctggacgccgcggagttgccgtacgtcgccgagctgatggatctgcggccggaccagacgcggtggcgcgtcgcggtggagaaggtgctgcgcgggccgggcctgcggctgctcgtgcccgatcagcactggaaccaggtgctgcggttcgtcaacgagacgaacatgcgcgggcggctggcgttgcaccacgtgcggaccaagctgtacggcgccgacccggttgacgcggagtcgaacacgctggcgggcaagctgttccccgtcgacccgacgcatccgtgtgcggccgaggccgtcgacatcgtcaccaccgccggcgaccacgtctgcgtcgacacccccgaggtgttcgcacggttccgccgcgcggtcaccgacaccggcctgtacaaggactccgaccggttggcgatcaaggacgaccgccggccgctgaagcagtcggagtatctgtaccagggtgatgtgtcggcgaagatcaacgcgctcaccatggacctcgccgccgccgaggaggcgtaccagaaggcgcgccgggccgccgacgagatcgccgcgcagcggcagcggtggcgagaccgggccgcggcgtgcaaggcgatctgcgagcagttcccgcagtggagccacatcgacgtcgagaccgccgacggccacgccgaccgcctgcgcgaacagtacgaactgctgctcgccgacaacccggacatcgaggcgctcaacgcgcgcgcagacgaatgctggtcgcagatccaggttctcatgacgcggcgcggcgcgatccagacccgccgcgacgatctggactcccggcgcacgcaactgctcgaactccaggagcggctgcagccggcgttcgtctccgaaccgttgaccgagctgctgcaccgttacgccggacaggtgccggtttcactcgagttgctgagcccggaaccgcaccgcgacgcgctgttcgcggcgatcaagaaggaacgcgaacagctgcgggagagccgccgccgctcctacgacgagctggcccgcatcctcaacaccttcgacaccgcgttccccgacgcgatccccaacgacagcaacaacttcgacgaacgcgtgcacgactacgtcgcgctgtgccgccacatcgacgagcgtgagttgcccgaggcctacgagcggatgatgcggctggtcaccgagcaggcaccggatgcgatcctcacgctgcaccgggtggccgagcaggaggcgcggcggatcgccgagcagatcgaacgggtcaacaccgggctgggcgcggtggagttcaaccgcggcacccggttgacgctgcgggcgacgccgcggtcgttgacggcggtggcggagttgaccgagatcgtgcgggcgatctcgcggcgtatcgcggaggtcgggctcggcgacaagcaggccatcctcgaccagtacgccgacatcctgcgactgcggaaccggttggcgtcgacggcaccggaggacaaggcgtggacgcgcgacgctttggacgtacggaaccggttcacgttcgactgcgcggaatggtcgggcgacgagttgatccgcacgcacagcaatgccggtgacaactccggtggcgagcaggagaagctgatggcgttctgcctggccggtgcgctgagcttcaacctcgcgagccttgaaagcagcgacaacagaccggtcttcgcgcagctgatgctcgatgaggcgttctccaagtcggatccgcagttcgcgcagcaggcgctgtcggcgttccagaagttcggcttccagctggtgatcgtggcgacggtgcagaacgccaccacgatccagccctacatcgacagcgtggtgatggtgtccaagaccgaggcgacgggccgcaacgcccgcccggtcgcgaccgtcgtcacgcggacgatctcggagttcggggagctgcgccgagagatgcgggcgaacgcgaaggtgccggccggggtgtag

SEQ ID NO: 48780 - DNA, 1443 bp, Mycobacterium sp. IS-1496
atgcaggtggacgacaacagggggctgtcggcggctgagctgctcgaactcaatcgggacctgcacggatcccgggcgatccggctgctggccacccacaacctcgggctctacgccacgctcatggaacgccacctcagcgacggcgtcgtcgccgagacccaactggtggtgcgcctggagcgcgacctgcacgacctcgaccccgacgggcagtccgggctggcgctgatcaagtcgtgggccagccagggctggctgcaccgcatcgtcgacgaacgcagcgaccagaacatctgttacctcacccaggacgcgcgccgcgcgctggacttcctgcgcgggatgcgccgacaggacaccatcgccaccggtgggtccatcaacggcatcgcctcacgtctcaagcaggtcgcgatccgcgtggacaacgaccccgcgcgcatccgcaagagcatcgaggccgaaatggcggctctgcaggcccagctcgacgacctcgaggccggccagcgcccggatcccgatgtcaccgacgcctacgacgaggcccgcgcaatcgcgctgcagatggaacggctcatcaccgacatcggccagtacgggtcgatgatcgaacaggccaccgcggcgctggacgagccgatcgacagcaatgccgagtaccgcgaccggcagcgccagatgtacgccgactaccaggccgcatgggattcgcagggccgcgacagccaccgcgcgttcctacggatgatcaacgaccccgaccagcgcgcggagttcgaggccgacgtggcggcggtcgccgaggcgctgccggccctggacccggcgctgcaaaaggtgatggccgggtttttcgaactggtcggccatcagatcgacgaggtcgaacgcatccagcagcgctgcgcgcagcgggtcaagcggttcaccgcattcgggacactcgagcagagccgcggggtggcccgtcagctcaacgaggcgatcggcgccgcgcgcgccctgctcaagacgtcgttggccgactcccggctcggcatcgacgtgccgttggcccgccacgcgatcagctccgtcggcgcgctgaccttcaagatcggcgacctgtcggcgcccaaacccgccaaacccgctgcgggcgaagtggatctggccagcttcgccgcgctcaccacgcaggtcgacgcgcccgcgatgtcggacatgctcaacgccgcgctgcccgtctccctctcccgcgccgtcgggatgttggacaacgcgtacctgggccacgtcatcgtgctgtggtcctgggcgctcaaacaaccgaacgacgggcgggcggcgtcgaccacggtccggttccgctccctcgacggccttgaccgcgaaatcgccgtaccggatctgatgttcaccgaaccgatcaccacactcgctggagtttcgcagtga

SEQ ID NO: 48781 - DNA, 690 bp, Mycobacterium sp. IS-1496
gtgacctctccgtccacggaccccgacatcgacttctcgtccctcccccaggtcgaccagaacgcccgtcccccgcaccagctcaggccgcgcttcgacggcgatgtctccgaactccccgaccgggcctgctgggcgctgcagaacctgctcacccgccgctacatcagcgccgagtccgacagcgacctgttcagctgggtgctcgaataccgcaaacaactcagcgtgcggctctccgaactcgacctgatcctgcgcgtcgtcgacggtaccgacgtcgcgttcgtcgaacaggcccgctacgaatcagcaaggggcgtcaagcttctgcgccgtgaaccgctgggcacctacgactcgatcctggcgttgcacctcgcgcagatgatgcgcgccgcgggcgggcagagcgtcctgatcagccgcgaggagatgcacggtctgttctcgggggtgctcaacgacaccgaccgcgacgcggtgacgttcaccgcacgcatcgacggcgccatcgcccgcctggccgggctggagatcctgcgccgcagccgcgacgacgaggacagctacaccatcagcccggtcatcaccgccgtgatgacagcgagcgtgatcaccgaactacagcagcagttcgagcagctgctgggcggcgggacgccggccgaggaggtcgagattgactga

SEQ ID NO: 48782 - DNA, 3363 bp, Mycobacterium sp. IS-1496
ttgactgagcagttccacctgtcccggcttcaggtcatcaactggggtgtcttcgacgggtaccattcgatcccgttcagccccggcggcgcgttgatcgccggcgcctccggcagcggtaaatcctctctgctggatgcgatctcgctcggcttcctgccgttcaaccggcgcaatttcaacgcctcaggcgacaacacggcggccgggtcgaacgcgggacgccgcaccgtcgacaagtacgtgcgcggtgcgtggggccagcgcagcgacggcggcaccagccgggtgatgtacctgcgcggcgacggcaccgcgtggtcggcggtcgcggtcacctacgccggcgactcggggcgcaccgtcaccggcctggtgctcaaatggctgaccggtgagtcgcggtcggactcgtcgagccggttcgtgatcggagacggtgacctcgacatcgaggacgtctgcaaccgctgggcggcggggcgtttcgacacgggcgtgttcaaggaccacggctggcggttcaccaccaaggtcgaatcgcagtacctggcgcagttgtacgcgaccatcggcatccgcgcctccgacgccgcccaacagctgctcggcaaggcgaaatcgctgaagagcgtgggcgggctcgaacagttcgtccgcgagttcatgctcgacgaacccgacagccttgcgcggctgccggaggcgctcaagcagatcgacccgctggtcgaggcccgcgaactgctcgcggtcgcgcagcgcaaacgcaagatcctcggcgacatcgagaagatccagcaccgctacgcctccgaatcgtcggatctgggcatcatcgacctggtcgacctgccgatggtgcgcgcgtacaccgaccacgtccggcttgcgcagtgcccggcgcagatcgcgcagctcgataccacgatcgaccagctcgacaacgagtacgaggacgtcacccgcagcctgaatctcgcgaaggccgaggcggattcgctcaacgcgcagatcagcggcaacagcgcgagcatcggtccgctgcagtcgcaggtggccgccgccgagaccgaggccgagcaggtgtcgcgtcggcgcagcgcctacgaggacatggtgaccgcccagggccaagaggtgccagacacggccgaggagttctggaacctgcgcgaggaactgctgaccgaggcgaccgagctgctggccaaggtcgaacgcaaccgggaggcgtccaccgacgccgaatacgcgcagaaggcggcacgcatcgcccgcgacgacgcggcgaaggagctcaaacgcgtcgaacacgtcgggtcggcgctgccggagttcgcgctgctgatgcgcgaccagatctgcgcggcgatcggcgtcgaggcgtcggagctgccgtacgtcgccgaactgatggacctgcgcccggaccagacgcgctggcggatcgcggtggagaaggtgctgcgcggggcggggctgcggctgctggtgcccgaccagcactggaccagggtcctgcgattcgtcaacgagacgaacatgcgcggccggctggcgctgcaccatgtccgggcgaagctctacggggccgaaccggtcgacccggagccgaacacgttggcgggcaagctgttcgccgtcgacgcgtcgcatccgtgtgcggccgaggccgtcgacgtcgtcaccggggccggcgaccacatctgcgtcgacacccccgacgtgttcgcgcggttccgccgtgcggtcaccgacaccggcctgtataaggactccgaccggttggcgatcaaggacgaccgccgcccgctcaagcagtcggagtacctgtaccagggtgacgtgtcggcgaagatcaacgcgctcaccgtcgatctggccgccgccgagcaggcctaccagaaggcgcggcgggtcgccgacgagatcgccgcgcaacgccagcagtggcgcgaccgggcggccgcgtgcaaggcggtctgcgagcagttcccgcagtggagccacatcgacgtcgagaccgccgacgggcacgccgaccggctgcgcgaacagtacgagctgctgctcgccgaccaccccgacatcgaggcgctcaacgcgcgcgccgacgaatgctggtcgcagatccaggtgttgatgacccggcgaggcgcgatccagacgcgccgcgacgatctcgactcccggcgcacgcagctgctggaactgtcggagcggctgcagccggcgttcgtgtcggagccgttgaccgagctgctgcaccgctacgccggtcaggtcccggtgaccctcgagttgttgagccccgaaccgcaccgcgatgcgctgttcgcggcgatcaagaaggagcgtgagcagctgcgggagagccggcgccgttcgtacgacgaactcgctcgcatcctcaacaccttcgacaccgcgttcccggacgcaatacccaacgacagcaccaacttcgacgagcgcgtgcacgactacgtggcgctgtgccggcacatcgacgagcgcgagctgcccgaggcctacgagcgaatgatgcggctggtgaccgagcaggcacccgacgccatcctcacgctgcaccgggtggccgagcaggaggcgcggcgcatcgccgagcagatcgagagggtcaacaccgggctcggcgcggtggagttcaaccggggcacccggttgacgctgcgggccaccccgcggcagttgaccgcagtgtcggagctgacggagatcgtgcgggcgatctcacggcgcatcgccgaggtgggcctcggagacaagcaggcgatcctcgaccagtacgccgacatcctgcggctgcgcaaccggctggcgtccacggcgccggaggacaaggcctggacgcgcgacgcgctcgacgtgcgcaaccggttcaccttcgactgcgcggaatgggatgtgaccaccgaggagctgatccgcacacattccaacgccggcgacaactccggaggcgagcaggagaagctgatggcgttctgcctggcgggcgcgctgagtttcaacctggccagcccggaaagtagtgacaaccggccggttttcgcgcagctcatgctcgacgaggcgttctccaagtcggatccgcagttcgcgcagcaggcgctgtcggcgttccgcaagttcggcttccagttggtgatcgtggcgacggtgcagaacgcgacgacgatccagccgtatatcgacagcgtggtgatggtgagcaagaccgaggcgacgggccgcaacgcccgcccggtggcgaccgtcgcgacgcggacgatctcggagttcggagagctgcgccgcgagatgcgggccgccgcgaaggtgcccgccggggtgtag

SEQ ID NO: 48783 - DNA, 1509 bp, Mycobacterium sp. IS-3022
atggcagagatcaacgccaggtatgcggaaacgcgggccgctttccagcggcacacgttgcggttgctgaatcagcagcgcgcgccgttggtgactgcgatcttgcaggagctatttccggccgaacggcagcggatccgtgcggatgagttctacgccgaggtgaacgcactgctggatcagctggtgcatgagaatgtcgacttgccggcggagcggggtcgcgctttgtgtcaacgctggatgaatgatcggtggctgcttcatagagacacacctgacggggagcaggtttacgagctcaccgccgaaggtggggaggcgctggcctatgtgcagcgcgtcgggggccgcaggatcgtgtctgagtcgcgcattcggtcgatcatggataaggcgcagcatgcggcgttgcgcgcgtcgggggaccgcgaccaacgggtggcgattctgaatgccgagattgaccggctcgttgcggagcgggaccgccttgccgctggcgcgccaatagatgtcgcatctgacgagcagatgttcgagctgttcatgtcgctcatggacgacctcgagaatcttccgtccgacttcaagcgcgtcgagcagaccgtgactgagatgcgtcggcagctgctgcaggagttccgcgcagatgaacgcccgaagggtgaggtgctaaagagctatctcgatcgatccgacaacctcctccaagagggtcttggcgggcgggcattccttggggcgctcgaggtgttgatgaacgacgagctgttggcgacgttcaggcgtgacgtcgacacgatcctgtcgcacagctttgccgacggccttattggaccaaaggaccgcgaaccggtcgaggggacggcagcgctgctggaagacggagttcaatcggtgctgtccgcccagcgacaggtctcggcaacactgcgagcacacctggtgcggcacgacagtcttcgggctcgtgaactgacccaggtgctcaaagaccttgatcgactactcgccgataagaaagctggggcgaaaccgcggacacgggtgccaatcgcgttcctgccgccgaccattgatgttgagcggctccgcacaaggctctacgacccggccgacaacgccgcaccccctccgcttgaagacgtgtctcacctagccgcggcgggactgactaccgccgatgtgcagggacagggcggacccgactacgaccggattcgatctgtgctgatcgccagcctcaagcaggaccgccacaccaccggtgcgcaagtgtttaacggcttcccagatagcgcgcgtcgtccggttgacttactggggctattccacatgtcagcgctaaccaccgcgattgaacgatccagcagcctcgtgggtaccgacgactaccacaccgttcgcccagacggcaatgctcgaacattcaaggcaccgcggctcacctacaccgacgacgaccgtgcggcgctaatcgcagatatggatggggcccgaccgtga

SEQ ID NO: 48784 - DNA, 720 bp, Mycobacterium sp. IS-3022
gtgagcgacagccaggaatggggcgacgagcgggctgacgagcacgccgctgacgatatcggccaagagcgcggtttcgacaccatgcttttcgacggggaccagggaaccctgccactgccggcgcgcaaggcgctggtggcggtcgtgaagaatagctacgtctcggctgagcaggagccgaacacgtgggcggtgttgttggcgcatcgtgtcgatatcgaatcccgtctgaacgacatgtttctcgtcttgatcgtggacaagaacgcaggcatcgcatacaagcagcaagcgcccggtgatcggttcaccactctgctgcctcgggacacctcgtacagcttggatgaaacgatcctgctccggaacttgcgggagatctacagcaatgaacgcggtttgagcggcgaatcggtgttcgtctatcgagacgacatgatcgctcgtattcttgccgacgcgccccaaacgcaaaccgatctggtcagggcaaggcgtagcgcggagaacgcgttcgagaacgtccgcacttcgcgaatcctgctgaagaccaatgaccctgagcgttggcaaatctctcccgttattgaaccgttgctaccggttgagaagctgcgcgacctgcaggagtggctcagaacctcagccgccgacgagcccgccgagcccaacattgagacggtcaatgacaacaccaccgcgctagagacatcatga

SEQ ID NO: 48785 - DNA, 3435 bp, Mycobacterium sp. IS-3022
atgacggtcgctgaactccagactgccggtgcggccacatcacgtgacgattcgccacagtggaaagctgaactgctgcaactatttaactggggcggctttcacggatacaacctcatcactctggacggcgacgcgacattgatcagcggcgggtcgggcaccggcaagtccaccctgatggatgcctacatcgcgttgatgatgccgcataccgtgccgttcaacggcgcatcgaatgccgccaaaggccgcgctcgcggcgaagatcagcgaagtgtccttagctacatgcgcggcaaaaccgacacggtagaggaccgcgagacaggtgaggctatcgatcatctcttgcgcggcaagaaaaccagcgttgcttccggtatagcgatgaccttccgccacgatgatgggcagcggttcacggcggcccgtcttatgtatgccaaggcctccgctgtccgcgatgcggacgtgattaagcgatgggtaacgattccggatctactcgacctgcagtcggtgtatgagttttccgccgaacagtttccccccgggccgatgaaggcccgctaccgcggcatgcggacctatgactcctatgacgccttctctcatgccctattcatcagcctaagcatcggctcgcgcggcgagggggagaacgccctgaagctcttgtcgcgcatccaaagtggacatcatgaatcgacagtcgacgacctgtacaagcggctcgtacttgagcgcccaacaacgtacgacgaagccgagaaggtggtcgcgcacttcgacgacttatcgcagctgtacgacgaactgcgccgcgaccaggatcaaatcgacacgctgtccgatatccccgagcagtacgaccgctaccaaacagcgcaacaagcccgcggcgtgatcgcgtcccttcgccacaaccagcccggtgacaccccgttcaaactatgggccaccggcatcaaatgtgacgcatttgccgcagagctgcagagattgaacgcagagcagtcggcgactgtcgaactcctggctgccgctgaaagcgaagtgcggcaacaggaaacgagacaagaacagctggccgagcagatccgcgccaacggcggagacgcgctgacacaactcgaacacgagctcgcccagctcaaggggcagctcgacaaggccaaacaccaccggatgaatttccttgagcgcactgctgcgctcgagcgtgctccgaattctgccgacgactttgtggccatggcccagactgcctccgaggcgctgagcacgatggaaaccgccaaggaggagctggataggaagaaacgacaggccatagttgacggagaacgtctactcgaaaaaatgcgggagctcgagggggacctcaactccctgttagaacgcaagggatcacgaatccgcgagagcctatcgtcgcgtcgcgaccaactcgctggcgcggccggcctggaccgcagccaactgccattcatcgccgaactcatcgacatccaccccgacgacgaacggtggcgcacagcagccgaagcggtgatgggcggattcgccagaatggtagtgctggacaaacgcatcatcgacgacttcacacgacgcatcgacagcttccctccccgcgaacggatccaataccgcggtgtccctctgaacctgcccaccacatcgccagcggacccaagaacgttggcgggcaagctcatcttcaaagacgggccgttcaaagggtggctgcaaaagcgcaccgcggaactgttcgaccacgaatgcgtcgaaaccccagaagaactcatcagcgatggccgccgacgcgtgagcctatccggccaagagcgccgcggcgcccagggtgcccacggagtcccatcgaggaccaactacgtcatcggcttctccaacgaagaactgatcgccacacttcgagacgagattgcagacctcaccaaccagatcggtgaccatgcgcggtccgaacgcgacgctggcaggcaactggccgaactcgcagaactcgagctcgcctaccaggaggttctgcgtacagactggaccgacatcgacgtcgccgcagtggaacggaagatccagtcaaacgaagaacaacaacaacaaatccttgcggccaccaacatcctcgccgcgctgcgccgacagaaggacgcgatagacaaagaccttaatactgctcgcagccgcaagttcggtcatgagagccggcgcgacgagctcgcaaagaagatcgaaaccttctccgcggagcacaccgttgtcgccgaggacttagcgcgacaactggcgcttggtgccatttcactgactgacgaccagaaggaacttctcaccgttctcctggccgacgaatacaccggtgatgccgtggagttcctcggcaaggccatcgacagggtacataaccgcctcaccgagcgaggtgatcatgaggcagatcgcgaacgccaggcacgtcaagccatcgagaaagcgttccacacgttccagagccgctggcggcaatacgactggggcactgacatcgagtcctaccccaactatcgtgatcattacgacgcgctcgtcacgacgggcctggccgagcatcgcgatcagttcgccaagaaggtgacccggtggagtggcgccgatctcgtcgagctgcgccgcgcgtttcgtaacgccaaggacgggatcgagactcggctggacgcggtcaaccgcattctcaacgagattccattcggcgcgaagagggaccgcctccatattcgattgcgccaccgcacgatccagctcgtcaagcgcttcaccgcagagatggaggagttcgcctccgcagcaaccagtatggaaaccgaggacctaaccagcgaagagatcgagcagcgataccgcgccatccaaaacttcatcaagtacctgcttccccccgagcggctgccgaagggtgagttctccacgcgtgacgaactgctcgacgtacgccgtcacgtcgcgatcatcgccgaacgcgttgacaaggacagcaaagaaccattgagcagctataacagtctgggcggcaagtcaggcggtgaaacccaggaactcatggccttcatcgtcggcgctgcgctgcgctaccaacttggagatgaatcacgcactcgaccacgtttcgccccggtattgctcgacgaggggttcatcaaagccgatgcccagttcgccggccgcgccgtcgaagcgtggcgcaagctgggcttccagctcatcgtcgggtctgtcatcgacaaagtcagcgccatcgaaccctacgtcagccacatactgcagatcaccaagtcacccgaaggctattcgcacgtcactatgttcgacgccaccacgcccgcgatcgtcacacaagactcaaccgaggtcgaaggcttcatggcatga

SEQ ID NO: 48786 - DNA, 1215 bp, Mycobacterium sp. IS-3022
atgaagtcgccggacctgatcaaagccgacatcgcccgccaccttcaccgcacctttccgaccgcagtggctgaagccgcggaaaccggctggccgcaccgcttcccactagggtcgatcagcaagacgaacctcgagtcgagcttcggaccagtggctgaacaagtgcaacagtggtatcgatgggtgcgtgaatgccgcgatgccggtctggcgctccagctgcagacaagccgccgtcgcgtgtggggaactgctcaaaccatccccacgcatttgacagtggaatcgatcgatgccggagcgcacatcgcgggggatggctggccggctcggctggctcgtcagcgaggtcgccgtgacacgatcgcacggcgcttcccggcgctcgcggtggaagaactcgcacgaactctgcgcaacacggacgattacaacgatgtcgactttcgactcctgtgtgacacagcagcctggttccagaccaatagcgcggtagggctcacaccgcgacaagtcccgatcccgggcgtacacgccaagtggctcaacaccagccaacacctcgtcgagcggctcgcaggcatcgacagtctcgggctggcgcccgcacatccgccccgagtccatctcacgtatctcgatccgggctaccgcgcgtccggaggccgcagacatgacgttgccgccgtgggtgatgcgatgcgtccggcctatccgccaaacgtgatcgtaatctccgaaaacaaggacaccgcagtcggattccccctcacggacgatggcatcgccatcgaaggcgagggcaaggctggtcctcgagccatcagtcagctcgattgggtgcgcgactgccgacggctgtactactggggcgacatcgacgcggacggcttcgaaatcctcaacaactaccgcgtcgcgggtctacacatcgccagcatcttgatggattgcgagacatattgtcggtataagcatttcggcacttatcacgaccgcaagggcagaaccatcccagtgccggaacgtcgccacctcccgatgctcacagacggtgaacggcgcatgtacaacataatcaccagccgcgacctcaccgatccgccgcggcttgaacaagagcggatcccgctagcggatgcagccgcggcagtcctcgcctccctatcgccgattcaaccggttagcgctccgcagtgttcaccgtcctag

SEQ ID NO: 48787 - DNA, 1443 bp, Mycobacterium sp. IS-1742
atgcaggtggacgacaacagggggctgtcggcggctgagctgctcgaattcaaccgcgacctgcacggatcccgggcgattcggttgctggccacccacaacctcgggctctacgcgacgctcatggagcgccatctcagcgacggtgtcgtccccgagaccgaactggtggtgcgcctggagcgtgacctgcacgacctcgaccccgatggccagtccggcctggcgctgatcaagtcgtgggccagccagggctggctgcaccgcatcgtcgacgaacgcagcgaccagaacatctgctacctcacccaggacgcccgccgcgcgctggacttcctgcgcggaatgcgccgccaggacaccatcgccaccggcgggtcgatcaacggcatcgcctcgcgcctcaagcaggtcgcgatccgcgtcggcaacgaccccgcgcgcatccgcaagagcatcgaagccgagatcgccgcgctgcaggccgagctcgacgagctcgacaccggccggcgccccgagcccgatgtcaccgacgcctacgacgaggcccgcgcgatcgcgctgcagatggaacggctcatcaccgacatcggccagtacgggtcgatgatcgaacaggcgaccgcggcgctggacgagccgatcgacagcaatgccgagtaccgcgaccggcagcgccagatgtacgccgactaccaggccgcgtgggattcgcagggccgcgacagccaccgcgcgttcctgcggatgatcaacgaccccgaccagcgcgcggagttcgaggccgacgtcgcggcggtcgccgaggcgttgcccgccctggatccggcgctgcgcaaggtgatggccgggttcttcgaactggtgggccaccagatcgacgaggtcgaacgcatccagcagcgctgcgcacagcgggtcaagcggttcaccgcgttcgggacgctcgagcagagccgcggggtggcccgtcagctcaacgaggcgatcggcgccgcgcgggccctgctcaagacgtcgttggccgactcgcggctcggcatcgacgtgccgctggcccgccacgcaatcagctccgtcggcgcgctgaccttcaagatcggcgacctgtccgcacccaaacccgccaaacccgctgggggcgaggtggatctggccagcttcgccgcgctcaccacgcaggtcgacgcgcccgcgatgtcggacatgctgaacgaggcgctgcccgtgtccctgcccgacgcggtggcgatgctggacaacgcgtacctcggccacgtgatcgtcctgtggtcgtgggcgttgaagcagcccttcgacggcccgccggcgtcgaccaccgtgcggttccggtccctcgacggccgtgaccgcgaaatagccgtccccgcattgatgttcaccgaaccgatcaccaccctcgccggagtttcgcagtga

SEQ ID NO: 48788 - DNA, 690 bp, Mycobacterium sp. IS-1742
gtgaccaccgagccggacatcgacttctcacaactcccccaggtcgaccagaacgcccggcccccgcaccagcacaggccgcggttcgacggcgacgtctccgaactgcccgaccgggcgtgctgggcgctgcagaacctgctcacccgccgctacatcagcgccgagtccgacagcgatctctacagctgggtgctcgagtaccgcaagcagctcagcgtgcggctctccgaacttgacctgatcctgcgcatcgtcgacggcaccgacgtcgcgttcgtcgaacaggcccgatacgaatctgcaaggggcgccaagcttctgcgccgcgaaccgctgggcacctacgattcgatcctggcgttgcacctcgcgcagatgatgcgcgccgccggcgggcagagcgtgctgatcagccgcgaggagatccacggcctgttctccggcgtgctcaacgacaccgaccgcgacgcggtgacgttcaccgcgcgcatcgacggcgcgatcgcccgcctcgccgggctggagatcctgcgccgcagccgcgacgacgaggacagctacaccatcagcgcggtgatcaccgccgtgatgacggcgagcgtgatcaccgaactgcagcagcagttcgaacagctgctgggcggcggccccgcgccggaggaccaggaggaagtggccgttgactga

SEQ ID NO: 48789 - DNA, 3363 bp, Mycobacterium sp. IS-1742
ttgactgaacagttccacctgtcccggctgcaggtcatcaactggggtgtcttcgacggttaccactcgatcccgttcagccccggcggagcgctgatcgccggcgcctccggcagcggcaaatcctcgctgctggacgcgatctcgctcggcttcctgccgttcaaccgacgcaacttcaatgcctcgggcgacaacacagcagccgggtcgagcgcgggccgccgcaccgtcgacaagtacgtacgcggcgcgtggggccagcgcagcgacggcggcaccagccgggtgatgtacctgcgcggggacggcaccgcctggtcggcggtcgcggtcacctacgccggcgactcggggcgcaccgtgaccggcctggtgctcaagtggctgaccggggagtcgcggtcggactcctcgagccggttcgtgatcggcgacggggacctcgacatcgaggacgtctgcaaccgctgggcggcggggcgtttcgacaccggcgtgttcaagagtcacggctggcggttcagcaccaaggtcgaatcgcagtacctggcgcagctgtacgcgaccatcggcatccgcgcctcagacgccgcccagcagttgctcggcaaggcgaagtcgctgaagagcgtgggcggcctcgaacagttcgtccgcgagttcatgctcgacgaacccgacagcctggcgcgcctgcccgaggcgctcaagcagatcgacccgctcgtcgaggcgcgtgaactgctcgcggtcgcgcagcgcaagcgcaagatcctcggcgacatcgagaagatccagcaccgctacgcctcggagtcgtcggatctgggcatcatcgacctggtcgacctgccgatggtgcgcgcgtacaccgaccacgtccggctagcgcagtgtccggcgcagatcgcgcagctcgacaccacgatcgaccagctcgacaacgagtacgaggacgtcacccgaagcctgaatctcgccaaggccgaggcggattcactcaacgcgcagatcagcggcaacagcgcgagcatcgggccgctgcagtcgcaggtgaccgccgccgagaccgaggccgagcaggtgtcgcgccggcgcagcgcctacgaggacatggtgaccgctcaggggctcgacgtgccggacaccgccgaggagttctggaacctgcgcgaggaactgctcaccgaggcgaccgagctgctggccaaggtcgagcgcaaccgggaggcgtccaccgacgccgaatacgcccagaaggcggcgcgcatcgcccgcgacgacgcggccaaagaactcaaacgcgtcgaacacgtcgggtcggcgctgccggaattcgcgctgctgatgcgcgaccagatctgcgcggcgatcggcgtcgaggcggcggagttgccctacgtcgccgaactgatggatctgcgtccggaccagacgcgctggcggatcgcggtggagaaggtactgcgcggggcgggtctgcggctgctggtccccgaccagcactggacgaaggtcctgcagttcgtcaacgcgacgaacatgcgcgggcggctggcgctgcaccacgtgcgggcgaagctctacggggccgaaccggtcgaccccgagccgaacacgttggcgggcaagctgttcgccgtcgacccgagccatccgtgcgcggccgaggccgtcgacgtcgtcaccggggccggtgaccacatctgcgtcgacacccccgacgtgttcgcgcggttccgccgcgcggtcaccgacacggggctctacaaggactccgaccggttggcgatcaaggacgaccgccgcccgctcaagcagtcggagtatctgtaccagggcgacgtgtcggcgaagatcaacgcgctcaccgtcgatctcgccgccgccgaggagtcctaccagaaggcccggcgcgccgccgatgagatcgccgcgcagcggcagcagtggcgcgaccgggcggccgcgtgcaaggcgatctgcgagcagttcccgcagtggagccacatcgatgtcgagaccgccgacgggcacgccgaccgcttgcgcgaacagtacgagctgctgctcgccgaccaccccgacatcgaggcgctcaacgcgcgcgccgacgaatgctggtcgcagatccaggtgttgatgacgcgccgcggagcgatccagacccgccgcgacgatctcgactcccggcgcacgcagcttctggaactgtccgaacggttgcagcccgccttcgtgtcggagccgttgaccgagctgctgcaccgttacgccgggcaggtcccggtgacgctggagctgctgaacccggaaccacaccgcgatgcgctgttcgcggcgatcaagaaggagcgcgagcagctgcgggagagccggcgccgctcctacgacgaactcgcccggatcctcaacacgttcgacaccgcgttccccgacgcgatccccaacgacagcaccaacttcgacgagcgcgtgcacgactacgtggcgctgtgccggcacatcgacgagcgtgagctgcccgaggcctacgagcggatgatgcggctggtgaccgagcaggcgcccgacgcgatcctgaccctgcaccgggtagccgagcaggaggcgcggcgcatcgccgagcagatcgagcgggtcaataccgggctcggggcggtggagttcaaccgcggcacccggttgacgctgcgggccacgccgcggcagctgaccgcggtgtcggagctgaccgagatcgtgcgggcgatctcccggcgcatcgccgaggtcggcctgggcgacaagcaggcgatcctcgaccagtacgccgacatcctgcggctgcgcaaccggctggcgtctccggcgccggaggacaaggcgtggacgcgcgatgctctggacgtccgtaaccggttcacgttcgactgcgcggagtgggacatcagtaccgaggagctgatccgtacgcattcgaacgcgggcgacaactccggcggtgagcaggagaagctcatggcgttctgcctggcgggggcgttgagcttcaacctcgcgaaccccgagagcaccgacaaccggccggttttcgcgcagttgatgctcgacgaagcgttctccaaatcggatccgcagttcgcgcagcaggcgctgcaggcgttccgcaagttcggattccaattggtgatcgtggcgacggtgcagaacgcgacgacgatccagccgtacatcgacagcgtcgtgatggtgagcaagacggaggcgacgggccgcaacgcccgcccggtggcgacggtcgcgacgcggaccatctcggagttcggagagctgcgccgcgagatgcgggccggcgcgaaggtgcccgccggggtgtga

SEQ ID NO: 48790 - DNA, 1503 bp, Halomonas sp. 54_146
atggacaccagcccccagcaacgcacgcgccactacatcgctgcccgtaagcagcacccagcctggctattgctggcgtcaccccgtgcgccactggtgctggggtggctgacgtcgctgtttgaattcagcgaagacggcattgccgaggcggatgccctagaagcattgtcgaagatgctgagtgccttcgccgcgcaagatgaatacgctatcgaccccgacaatacgcgcctgcaggccgggcgagagctgcgccagtggatccagcgtggcttggtcattgagcgtggtcagcgcttgtatgccaccgatgccttgtcatcggcgattcagttcatcgactcgttggataaccgcatcatgacctccactgcatcgcggctgtcggtggtgcagcgcgaaatcgaaaacctggaagtgggcctcaaccccaacccggagagccgtaaggcgtcgatccggcgtaagatcaatcagttggaaagcgaactggccgacgcggaagccgggcacgtgccggtgctttccgaggcggatgccattgagcgaatccgcgaagtcttcaatctagccactgggctgcgggcagactttcgccgggtggaagattcctggcgcgaggctgatcgcctgctgcgtcagtcgatcatgtccgagcattacaaccgtggtgatattgtcgatcgcttgctggatggccaggaagcgctgctggatacccctgaggggcgcgtgttcgatagttttctacagcagctacgccagaccgccgcgctggatatgatgcgccagcagctgcgcactattctcgttcacccagctgcggaaaaagcgcttagccgtttacagcggcaggatcttaaactgctgcgcatgcggctgatactggaaagtcaggccgtcttgcaggcgcgcgcccgcagtgaaaaggacgtcaaagggtttatcaagaccggcttggccgccgagcatcaccgtgttggtcagttgctcaacgacattctcaacaccgcccaggatcttgactggcagcgccaaaaggtgcgccggtcagacgtttcatcgctgccgccgttggggtttaccctgggtaacttgtcggtggtcgagcggctacggttcaaagcattggaaaacgagctggacgaggagctagaccttgcccagcaggagagtgacttgagcggtattgaggctgaattctgggactccctggatggtctggatcgcgaggctctggtgcaggagacgctggcgctgctggcccaagaagggcgtgcgctgacgcttgcggagctggccgagcgcctgccgcccagccacgatctggaaaccctggcgctatggctgggtatggcgcgggaagcggggattgaggtcgccgggcaggagatacaagaactggtgttgaccgatgaagagcactgcgactgggtattccgagtgcccatggtcaccttgagtgaacaggccttgagcgggattgaatgggagttttga

SEQ ID NO: 48791 - DNA, 771 bp, Halomonas sp. 54_146
atggcaggcgtttttgacagaattgtcgggcagcaggatgtggatgagaccagtgaagaggaatgccctgatcagttggatggacaggctgatccagcgcatacaggttcagcaatagatgccgctggcgaagcgggtgggccagagaccgaaagtgaatcccccgcccgcactgatctcaagctgcgtgaagtggctcaggaactgctccgcatggggctattggaagagagccaaagaccccatctttaccgcgctgccctcgtcgccatggagcggctcaatgtcacgcttgaaccattggatttatgtgcccgcgccgatgagatccgtgggctggtatttctggcggtacgccatggggataccgatgaaccccaggatgactggtcgcacccgctggttcgcaaacagcggctgaacctggaacagacgttactggtggccatcttgcgccagtatttcattgcccacgagcaggaagcgggcacaggagccggagacgccatggtggcggttgacgagctgattccgcagatgctggtgtacctgggtgaaagtggcagcgaggcccgggagcgcacccggttgctacagcttctagatcaactcaaaggccacggcctggtatcggcaccggatagccacgaacgggtggctatccggccaatgattgcccacttggccaacccagagaacctgaccgccttgctgtatgaattaaaggccagggtggccgcggagagtagtgatcaaggggagacaaactaa

SEQ ID NO: 48792 - DNA, 3348 bp, Halomonas sp. 54_146
atggtcaccacagcgcttacccagccttcgttatttgagcaaggccaagaagagagcggatggcagctggtgcccacctatattttgcaaacgctagagctgttcaactggggtggctttggcggtatgcacaaagctgatatcgatgctcacggcagtgccattataggccccaccggcagtggcaaaaccaccctggtggatgcgctaatgacgctgctcacggccaaccccaaatacaaccttgcctctaccggtggccacgaaagtgaccgggatttagtctcttacgtgcgcggggtgagtggcccaggagatggcggtggagaccagtcgcatatcgctcggcccggcaaaaccgtgaccggcctagtggcgaccctcagtaacggcgaaagcctggtgcgcatcggcgcgctgctgtggttcgacggtaccagcatgtcgccttcggatatgaaaaagctatggctgttcagtaccgcccccgaacataccttgcagcgctggctgacgctgcagcaggaaggcggtatgcgcgccttgcgtcaacaggataagaccgacaccggcatctggacatatcccagcaaaaagggctttttagcgaggttgcgcgacttttttgaagtgcgtgacaacgcttttaacctgcttaatcgggcggcagggctgaagcaactcaacagtatcgatgaaattttccgcgaactggtgctggacgataacgcccagttccagcgcgcccgggaagtcgccgacagcttcgatgatctcaccgccattcatgaagagctcgaaatcgcccgccgccagcagcgctccctggaacccatcaaatccggttgggaaaagtacctgcacaaccaaacgcagttagatgaccaggaaaccctcagccgggtgctgccggtgtggtttggcgaacaggctcaccagctgtggagagccgaagctgagcgtctgcagcaacaaacccagcaggccgatgccgagttggcagcggttgaggagcagtacgctcatcagtatcaaagctgtgagcgattaaatgaagcttatctgcgcctgggcggttcggatattcagaccctggaggcgctggtcaaggaaaagcaagccaacctggaacgctgccagcgtcatgcggcagagtaccagcggttggcacgctcgctcgcctttgacgatgcccttaaccgtgaagcggtcgccaccaatcagatgctggccgccgagaagttacagcaggttcagcaggcgcttgaagccgccaagcaagccgcctttgagcagggcagccaacgctttcagatcgagcgcgaaggcagagagctgcaggatgagctagccgaggtcaaagcacgccccggatcgaatattcccggtcgttttcaacagtttcgcgccgtgctggccgacgctttgtcgctcagcgaagacgacctgccctttgtggctgagctggtgcaggtaaaagagggcgagcaggcctggcgaggggccattgaacgggcgatcggcagccaccggctgcgtattctggtaccgccggaggccagccgccaagcgctagactggatcaacagtcgccataacgccctgcatgtgcgcatctttgaagtgaaacctgcgcaaggccaagcgcgtttttttgaggatggctttacccgcaagcttgactacaaagagcacccgtaccgagaagcggttaaagagcttttagcaggtctggacagacactgcgttggctcgccggagaggttgcgagagaccccccatgctatgacggcggaagggctgatgtcgggcaaggcgcgcttttttgataagcaggatcaaaaacggctaagcgacgattggcaaaccggctttgataatcgcgatcggttggcggcgttaagcgcccaaattagcgaagcggaagcacgcttgcagagcgccaaggcggcagaacagcaagcgaaggccacacagtccgtgcttgaacagcaagtagtgttgttagcaaagctggcagagttggactatggagagatcaacacgccccacgccgaacgcgagtggcaactgcagcgggataaactggccgccttaacctcgccaggttccgatgcggcgacagccaaacgccaactggagcaggcgcgcgatgagttagccacgctggagcagcaaaaaacgcaatgtatcaagcagtgcgcccagttaaacaaccgtctggaaacggcccaaaaagagcagagtcgggcgtttcgcaaaagcgaagctgggctgaaagagcaggagcgtgcccttgccgaggctcatttttctcccgtttatcaaaagcagctgaccgacgttgatgagctggagcggcaggctgccgcgcagttgcaacagcaactgactaccttgcgagctacccaaagccggttggaaaaagagctggtaaaggccatgtcggatgcccagcgtgaagaccgcggggcgttatccgaagttgggcgcgagcttgatgatgtgcccgactacctggcacggcttaatgtgctgactgaagaagcgctgcccgacaagcagcagcgttttcaggagtatctgaccgactcttccgatcaaggtgtttcgcaactgttggccaccattgatggggaagtggagcgtatcgaagagcggctggaagacctcaataacaccttacggcgggtggacttccagcgtgggcgttacctgcagttggtggctaataaggtggtgcatgaaagcctacggacgtttacccgagccaatacagcgctcgcttcgtcgcgattcgtagaggatggcggcgaaagtcagtacaaagcactgcaacatatcatcgccctgctgcgtcatgcctgcgaacgccagcgcatgttaggggcacgggcgttattggatccgcgttttcggcttgaattcaaagtcgccatgatcgaccgcgccgatgggcgtgtgattgaaacccgctcgggttctcagggtggtagtggtggcgagaaagagattatcgcctcctatgtactgaccgcatcgctaagttacgccctgtgcccagatggcagccctcggccgttgtttggcactatcgtgctggatgaagccttttcgcgcagttcgaatgccgtggccggtcgcattattgccgcgcttgacgaatttcaccttcacgcactgtttattacccccaataaagagatgcgtttgctgcgcaagcacacccgctcggcggtggtggtgcatcgccgtggcaatgcctccagcctaacgccgatcagttggcaggcgctggatgcgttgcgtgaaaagcgacgagaggcgcgcaatgaagtccccgagtga

SEQ ID NO: 48793 - DNA, 1146 bp, Halomonas sp. 54_146
atgaagtccccgagtgagatcgctggtcgcttggctaagcagtggcagcaaactgatcggcgggtagagagattgttatctccagagagctggccactggtggtcgctattggcaaacccactggccgccagttcgccgatcagaccgggttggtgcaggcccatgtgcagcgttggcggcaggtaaccgtcggtgaggtggcgtttcaagatatcaacttccgagcggcggctgaaccggtgtcactccccgtgcagtgggtgctgcacacaccgtctgaatgggctgccgccacggcggatgccgaggtgcaacaggagtttgcgctgctcgaaaccctggtaggaagtgtcaaccagcgttactgggaggtgctggttcgcgaacgtgctctgtggcgcaatagggcggtcagcgagatcattggcgcagcaacactggcggattcgctacagcctggcatagccgaaggccgaccgataagattgctcaaagggttaggggtggataccaagtttatcgagcgcaatgcggtgttactgacacgcctgctggatgaacgctacgacggcatggccagccaacaagggttaagcggctttctggatgctcccgacgataaagatcactggctgctggtggtgcccttggcgcagggactgctgccttttcagcgcctgcgcatcaccgccagagaactggcaaatacttgcctgccgggatcgcgggttgtagtggttgagaacgagcagtgtgagcacttgctgccgcccatgccctccaccgtagcgattcttggcgcaggactggatgtacactggctggcaggtggggcgctgcaagcaaaagcgattgcctattggggcgatatggacacctgggggctactgatgctggccaaggctagacaatctttgcccagtattaccccgttaatgatgagcgaggcgcacttcaaggcgttttgctgcgattgtgccgtatcggagccggttcatgctgagctgccgaccagcggcctgaacgagcgcgaagtggcttttttcaattttctaaaagcacaatcaaaaggacgtttggagcaggagtatctacccaaggtagaggtgcaacgtgagctgctggggtggctgaatcgctgctag

SEQ ID NO: 48794 - DNA, 1491 bp, Halomonas sp. 54_146
atgtatgaggaagcgaataacctctttgatcgtttgccggagcatatttttcgaccactgggggcgaatgagcatgcgagacgtaattggtcgctcataggccacttatataacgatttctttgcgcctgaggctgaccctcctgaaggcgaaggctggacgcagaagcgggttatggcatcgatcgagcgcttcttacttcgctgggatgatgagcatgaaatcgatcccgaagagcgattaacacaactcaactcccgagcacatgacgtcctctcaaactttctgaatagtggatggctcagcattgaccgaattggatttactccattcgtgatcatgcgcccaacggttcaaagcctttttgagctgctcaaaacttttgccgaacaggggcctgagtttatcggcggtcgtgttcagtcggtttggaataatttattgcaggtgcaggcggatcctaaaacaaatgccgcagtatttcaggttgctgccaaagagtgttccgcgctactacaaatgttaaacacgacgcgtatgcgtgttcgcgaagcaagcgatctcttgcgcagtcaggaatcaacgtctctctttctccagaagttttttggagactacatatcgagcctgtatatcggcgactactcagacctattctctcgtaaccacccactcgcttctcgttgggacatcgtcgacatcgcctcccggattacagaagacccagaaagtcggcaacaactacgacgatggtatcgaaaaaaccttcgttgcggttctgatgaggaagctgattcatacattgaaaaagatacggctcgtgtactggcattgcgcgaggtcgatcggttacttacacgcctgaaagatgccgttacccgggcaaacgatcaggcactaggctatctcgaatacaaggtgcgctcacaaggtaattttgatgtaaagacggatcaggtgattgatgcggttgttcgtgctgcggagtcacgtagggatgacgtcacattcgccataccaatgggttggtctcaagggggacttcttagcgagcacgccctgaagatgccagcgaaaaaaccaataaaacgcacaggcgcaatcatccaaaagcgccagttgtcaccagaagaaaaagcacggcggctggttcgccaaataatgaaaggcaaccgcgacgtatccgaggctcgaatcgttgagtacatcaatcgccatgtcaatccaggtggtgtcttggagagcagttctatgaaagtggattccataaacgatctttgtgtattggcaacgttctctcgacttggtttgatcgctgaacgaatggaaaggaacacccgggcaggcattgttcgcccgaagctttacagggaactcgaacagcacattgagattgagctgacgggtgagcgttttgaaaatgaataccttgatgcgcccgctgtaaggattcgacggcgagaagatgggggtacaaaaaatgccagttag

SEQ ID NO: 48795 - DNA, 642 bp, Halomonas sp. 54_146
atgccagttagctggaaccgtattgcagagcaaaacgaggcatacactgttcgagattttcagaaggctgctcagcgactgatcgtggatcaagtgttgtatcaggcaaatcccaagcagaggtcagactatgacttagtagcagcccatgaaaaggagtttgccgaagcgctggatctctttggttgcatgctcgatctcaatgttcaggagcgatacgccgcagcagtgcccacagtgaccgaagttagcaaaattcctctaatgcacacgctattggcattagtgttgaggaaactatacgaccaccacatgaatcttggcacacttaatgcgggtatagcgggtgttagcctgtccgaactagaagcagcgttccaggaatccaccgggcgtgatttaccgatgaagccccaagcagaactgcaagggttgatggatgccatgaaaaggtggggaattggtcgcttagtgaaaactgagaaccttgctgaggaagccacatggtttgcggaaattttcccaggtattcaaagccttatcaatgagcgcactcttgcaatgctgaagtctcatgcggagttgttgtatgagcccgatggaatagaaaaaagggagcaacatgaggagaaagattcgtga

SEQ ID NO: 48796 - DNA, 3411 bp, Halomonas sp. 54_146
gtgaaacatcttaaacgtatctccttggttcagttctaccttcatgaagccgtcgatattgagattgaaggcaccaccgcatttttgggtcccaacgggtcgggaaaatcctcgacattggatgctatacaaatagcaatgctggggggaaatcagcagtacgcacgatttaacactcagtcagtatctagcaagcagcggcgaagtttggctagctattgtcttggaatgttacgcaatccggagaaagacagcgaggttattggacgagcacgagacgaggcgagaacctatattgtattagtatttggtgatggcacagaaaaggggtggatctcagcggggatttgcattgaggcagatgccgacacctatgaccatgaggtgaaaggtctcttcgttcttccagggcaagctctaaaggctgacgattgtatcgtttatgacggtaacgatcggcgtccgatctcgtttgctgattttcgtgaaaacatgcgtgagcaagctcgaaagaatggccgtacacctatttttactgataagtcgagcgaatatgtgcaagagatgctgtatgcgttgaatggcgaacgaatgccagatgctcgacgatttatgtcgtcatttgtgaagtcgatgactctaaagaacgtcgattcgattgatcagtttgttcgagattacgtcgttgagtctaatccggttgatattgcgacgttccgcaaacaggtcgagcaatttgttgcgcttcgtgacctgattctgaaaacaaaggcaagaatctcacggcttactgggatcctctctgaatttaatcgcgcccggcaggctgagcgtcgtatcgcggccctagaagctattaaaacgatattcaacgtcgaatggttgggcaagcaagttgatgatttagatgctcaaatagatactctggaaagccagaaaaaaacggcaatggaattcgctgccaaagcaaagagcggtcgagacctcaagcaaaaggaaataaccaatctagaggtgcgcctcgaaggcgaccaaaatgaacagatccgaaagcgtttagaggagcagatcaacttccagcgcgaagtaatcagtgcctaccagcatcctgcgatgtcccgtgccaaccaattgatcaatgcattgaaggaatcgcttgatgatcaaaatttttcgggcattcgtagcgttatgactaccgctatcaacaagcttgaacacgctaggaaacatgatgtttcagataatgcgttgatcaaagagattggaagactagatgctcagctctcacaaattcgggctatttcgaaaacgagcttggctacaattcagaaacaacatgttgaattaaccgaggagctggaagctattcgacgtcggatatcagcagttacacaaactggccgactgttgaacgacggcgccgcactgctgctggaaattctaaatcgcgctgatatgaatgctcagcctctctccgccctgttacgtatttcagacccaagttgggcacccgctttggaagcctatctagggggggatcgtgatgctctggttattacggatggtaatacccgtgacgcggtcaagctgttgcgcgaagcaatgcgccaaggtcacagaatgcatggggcagccatcattcaaccgtatcatcttcgcaatgttgaaacccatgtgaaaggggatgatgttgcgctgggtatatttgattccgatgacgatacagcgcgccgcttcatttggcagaaatttggaaacatgcgtttagtcgacacggagctggatctcgagatccattcgagagcgattactcgtgatggaatgctgagccaggggggggtgaccaaatccattcgaattgctcctatcagtgatcttcgcattggtaaggagcttcgggacacctctcaattatcgcggcatgcggctgagttgaaaggagatctggttaagcttgagaagcagagagactgcgtcgagagactcgaaaaagcactcgcacccagtgcatcagatgacgattcaaatgttagttggaaactgtctgaagctgagcaagcgattgtacaggctcagcagcaactttcgggcctggacgtgtcccacttggaagaatatcgatcccagcttgatgcagctggagaaaaatacaatgaactggataagcagtatacgacacacgatcatctagcggttgggtttaagcatcaaatagaaacgcgttctgaggaaagggagaagctcaggcagcaactgccagctacgattgaagcgcaaaagacggcagtcgccagcccgttagttgatagtgaatggctggacagcacgaaagacgaaattgaacgtgccgaaaccgactacgagcggcgccttagtgacgtggaaagaaaactcgaacacaaccgtcctagattgagaaaggcagcggaaaacgcgtctcttgaactagctcgctatgtccaggatgaacgtttagacgttcaggttacatatatggactggcatgaccgccataattgggcttttgaagagaaaacgaagctcactaataccgagttacatcattacgagcaagaggctgaactcgctcgccaggcttctgaagaaacactccgctcagatatcgctatgtctcttcacgatcgattcaaagagatggaattggaacgccgagagcgaaacagaatacttgaatcctgtccctcctttacgggcggagaacggtacaagtttacgacttcagtggtgcctcattatgaagcgctcgtgcgatacatcaaccagattgcacaaaacgataacaatctctcactgttctcagagaaccccgacgagctcaacgaaacacttcgaaatcttgtagaagccgctgccgagtctggtaacgccggaggagttctggactaccggcagttctatacttttgatctcgacatcttggtcgatgggaaaagggttgaccgaatgagtaatcggcaaggagctggttctaacggggagcacatagcaccgatgtatattgcagcgggcgcagctctggccaaggcttatcgtctccatagcaataagggaaagcaaagtggtatcggactgatctgtttggatgaggcttttgaggggatggatacgatcaatgcaatggcaacagctcgtttcctgcaaaatatcggcttacagctcattatggccggtccagagcttgaacgtacgaagttggccccagtaactcagaccatctacgacctggaccgagagggattagatctacaaatggagcgaactaagttcaaggaggcagccaataaactgctggtgagcgatatgcctgaagaaaaccccgaggtaatgaaagctgcttaccagcaacttggacttgagcaaccggttgaacacccattagcagactga

SEQ ID NO: 48797 - DNA, 1455 bp, Moorella sp. 60_41
atgaagcttttcgaggtgttgccggagcgtttgtttcaggttttcagcggccggaaccggcagatttacgccgaggccctcctgctgctctacgagcagtaccggattaaccgcttcggcatccagtatgaggtcatgcgggatttgatgcaggagctgatcgagagccaagaacaagaaggcgtcatttacgaggtggaagaagatgaagagcgggtgcccgccgggaccctgttggaagccggcggtgaggacctggcccggataaaggccggggcccttttacgccgcctggacgggctgcagtggatccaggtggaggtacgtgacaacttccgccgctacatagtcctgccccgctatgccagcaggctgctggcggtcttccgagagttgtgcgagaacaggaccgtcgagtaccagcgcttcgccttcgtcacctaccagctcctttccggcgaggaagcccggttaaggccgggctttgccatcctggaggcccataggatgacccaggaatttttagaagaactgcgggcgctggtcaacaacatgaagtaccatatggaacaggtggtggccaagaactccatccaggaagtgctggatcaccattttgaagaatataaagcccacatcatcgaccgcagctaccaccgcctcaagacttccgaccacgtttcccggtaccggcagcggattcttaccacggtccaggagtggctcctggatggggaatggatggcccgggccgtggaagacgccctgcggagcgaggttttttccacgcgggaagaggctgccgcgcagctgcggcgtgctttgatggacatcgaagagatttaccgcggtctggacgagatgttttaccagatcgatctgcgccacaaccagtatttgcgcgcttcttatgaacgggcccggtatttaagccagcacagctccagcgtcgaccgctacctggcgcatatcctggaatggacggcggcagggatgagggagggcaatctccaggtggaatcctgcctgaccggccttttcaatttgatgcgccttaaccttataaacgagcagtccctttacacgccgcggcggcgccgggcgccccataaaccggagcccgtggtggtagtggccgtcccagaggaactgaaaaggcagctgcgggaaaagagcctggagcaggtgcggcaggctataacccgggaaaaggtaggcgcctatgtcctgggccggatggggacgcgccgggagatgggcatcgccgagctggcgccccaaaacatggaagaattcctgtaccttctctatgtttacctttacggctacgacggcctggcgggctaccgcctggtgtcggacggcgaaaaccgcgtcctcgatatcggcggctaccgtttttacgaccggcgggtaatcagggtggacagggtctggaagcggcgggccgtttaa

SEQ ID NO: 48798 - DNA, 612 bp, Moorella sp. 60_41
gtgtttaacccgggagaaaatttaagcgagcaggaaagggagcggctgcgggacgtcatcaaccgcctgctggccgtaaacttcttaaacaaagagcaggaaagggaacgctacctgacggcgcggcgtcaccgccaggcactggaggattttttccgtttcctgggctgggagatggtctttgacgaccgccatgagtgtattttcgttatggctccggaggcgggatgtcggcgcaacctcacccgggaggagagcatctggctcctggtcctccggcttatctaccaggaaaagcgccagggcctttctttgagcgaatacccggtgaccaccctccacgaaatccgggccaagtacgaagccttccgcctgcccctttttaataaaaccaggctgcaggaactggtgcgcctgggtacccagtataagctcctggaacccctggatgatgacctcagttccgatgactgcgccttccgcctgtttcacacccttctttacgccgtccaggcggatacggtggagaagttacatcaaaagatagctaactacgaacagggaagggaggttgcgccggatgaaatggctgcgccgcctgcggctgattaa

SEQ ID NO: 48799 - DNA, 3387 bp, Moorella sp. 60_41
atgaaatggctgcgccgcctgcggctgattaactggcactactttcacgacgaaaccctggagttcggccgccagaccctcatcgccggccgcaacagcgccggtaagtcgaccatcatcgatgccctgcaggtactgctggtggccaaccagcgccagatccgcttcaattcggcggcccatgacgaggcgcggcgttccctcatcagctacctgcggggcaaaaccgggggcgaggaccgcaagtacctgcgggaaggggatttcaccagctatattgtggccgagttttatgatgaagaaaaaaaagaaccctttgtcgtcggcgcagtgctggacgtctacggcgacgacaccgtcgacgacgagtacttcatcctggcgggagtgcgactggccgatcttgatttctggagcccggcggaacgctggaaaaaccgggaagagttccaccgctactgccagaaactgcccggccgccatattttcgagcgcagcaaggcgggctaccagaaggcccttttaaaccgtttgggtcagctgggcgatcgctttttccccgttttcgttaaggccctctcctttaaacccatccaaaacgtgcgcgacttcgtctaccagtatatcctggacgagaaggaactgcagctggaccttttgcggcagaactttgagattcacgagcgctaccgggccgagctggaagccctggaagaaaggcggcagaagctggaagaaatctgccgccagtatgaaacctttgcccgcctgcgggacacagttgccgttcaggagtacgtcatccgcggcttaagacacgcccgggaggcggagctgcagcagcagctggaagaagggatcggtttcctggcaaacgaggcggaacggctgggccgcgagctggaactggcgcgagccgggcagcaggaagccagggagaaggctcaaatagcctatcaaaaatggcaggggcatgagttaaagcagcgggagcaggagctgcaggaaggtctggcccgcctggataaggaattgaaagagcatgaggcgatgctggcagtcctgcgccagaccgttgaaagggaaaaggccctgctggccgcccttgaggcgacggaagaggatgaatactggcagtggcagccgggggaacgggaatacctggcacgggcccgggatctttttgccgggctgctccctgccggtgatcccggttggctccccggggaagataccttggccgcggtgcgcgaagcgggccttttcctggccggggtatacagccgctgcgccctggcggccggccgtttggaagaccgtctgaccctgctggagcggcaaagggtggaactggaaggccagatccgcgacctggaaaataaaaagcggccttacccccagagcgtcgttaacctcaaaaggctgctggaggagcgcctcaaagggcgttcgccggtgtggattttctgcgaggaaatggatattaaagacgaaggctggcgggacgccatcgagggctacctccacacccagcgtttcgacctgctggtagagccggccttttttgccgaggccctggccctttatgagcgggaaaagaaaaaccttcaagttgaaggcgccgggctggtggatacggagaaagaacagaggtacctgggcaccgcccgggagggctccctggcggaggaaatggtgacggctaacccggtaatccaggcccacgtcgaccacctcctgggccgggtgatgaaggccagggacgagcaggacctgcgccgcttttccacggccatcaccaggacctgtatgtcctatcacaaccttgtggccaggcagctggagaaacaccgctacgccgtgccctacatcggcgcccgggccatcgcccgtcaattggagatcaagcggcaggagctggcggaaacaaaggagcaaatcgcgaagctgcggcgccgcagggaggaactggcggaatggctggagcggctgtccgataaaaaatccctctacgccggcatggccgaaaagctggacctcccggcccgcatccgccgtttggaagaggagcgggcttctctggccgccgagctggagcggctggacctgggggaggtggagcggttaaaggaagagtatttctactgggactgccgcgaaaaagagctgttgaacaagattaccgaaatcagcggcctgaaaaaaagccgcgagaacgaattgaaccagaagcagacggagctctacctgcaggagggaaaggtgcgggaggccctggctttctggcaggcctggcgggaacagtatcccgcagagctcctgccccgggccgaggaacggtggcgggaaatagaggggcaggatttacctacggccaacaagctggtcaactgggagaacagccagaagggcaacatcaccaggcgcgagcaggaataccagcgcctgcgcgacctgcgccatgaatacaacctgcgctacacttacagcgccgaccccggcgccgccgacaatgaagcctaccagtccctgctggcgggaattgccacggtggatataccccgctaccgggaaaaactggccgaggctctgcgccagtcggaggaagaatttaaatcccattttatctacaggctccgcgaggccatcgaagcggcacggcgggacttcaacgagctcaactacgccctgaaaaacttccccttccacgaggaccgctaccactttgagattaagcccagcgagaggtaccggcgtttttatgacgttatcatggacccggggattatggagcagggctccctctttgagctgcccgacgacgatcgggcggccgtcctccatgagctttttgagaagctcattcgcggtgaggccggcgatctggaagaattcaccgattaccgcaactacctggacttcgacatcgtggtcaccagcggcgaccaccggtattccttttcccaggtgctgcgggaaaaatcgggcggcgaaacccagacgcccttttatgtggccatcctggcctccttcaaccacctttacaacacgggcaagaccatccgcctggtggtgttcgacgaagctttcaacaaaatggacgaagagcgcatccagaccagcctccgccttatcaagcggatgaatctgcaactcattgccgctgtgcccgacgagaagatgcagcacatggcgccggaggtggataccaccctgctggtccaccgcagcggtttccgctgttttgtagacatggtcagccgccaggaaatcctggccatggaggaagcggcggcagggagtgaagggggtgtaaacgttgagcgtgaagggcgcgaatctgaaggaatattaccgctacaagattctctctttgctgctcggtaa

SEQ ID NO: 48800 - DNA, 1314 bp, Moorella sp. 60_41
gtgaagggcgcgaatctgaaggaatattaccgctacaagattctctctttgctgctcggtaaatatgaagctagccgctcctttcaaacgggaacgccgggcaagcagcggccccagttcgccatggagaggagccccctggccgacgattattttgacgagatggaccaccgcaaaagggaggccatccatgccgccctggatgagcttgcgtctgccggtgtggtggaggtcacctggccccgcttccaggaaggacgccgcgtggaaaaggtgtatttaaacttcgcggccatccctcgggcctacgacctggcaggaatggaacccctggcacaacggttggaaaggatgcgccatattctggcacccctggccgaccacccctgggagtgggtgcggcggtggtgggcggaagtggacggtgccttggccgcccggcgggcggcaggacttgatttaaacgacggggaaggttatgaaaaccttgtcagggtgcttgatgccctgccgggtctggaagacagcatgccggagcgcatcttcagccagcgggtgctgggggattccaaggccttcgagcagggggtgaaaaagcggctgctgtccctgcttaaaagtcacgggccggaggaatatgaaaccgatgccgagtacctggacagcgtcggcctgacagacaatccccaaatggtgctggcggctggcccctttacttttaaggcgggaaatgcggtttgggacgccgggggtttgccgggcggcctgggcttgtccgttcacacggtgcgggccatggaaataacgagtgtggccgctccacgggttctcctggtggagaacctggccagttatcatcaggtcgtgcagaagttttgtctggcggaagccgggagacgggaatgcggaggggaagggcacccggcggcagggcgccctgccgtcctggcggtatataccggcggctttccccaccgcggcgtaaagctttttctgcgccgcctcaaggagtaccgggaaaaccctgcaactggatccaagcccccggtctaccactggggcgatatggactacggcggcatccgcatttacgaatacattcgccgcaatttcatacccgacttgcggccttaccttatggacgtggatacttacaacaggtatttgcataccggcatacccttcggcgacgaatatgctgccaggctccgtcaacttatggatgacgacgtttattacacctggcgtcctctaattcaggaaatgctcgtgcaccgccggtgggtcgaacaggagggtattgacgacttctag

SEQ ID NO: 48801 - DNA, 197 bp, Thermacetogenium phaeum
gggcattgagcaggtatcagattatcgaacgcctggaaagcgatgtcacccaaccggagacgggaatcatcatctacccttccatcctgttcgtggtcaccaacgaaaaaatcagtgaaatctacgagctggcaggggcagatgcaaatgatgaagaggagaacacggaagaaatacttccggaggcggaggaataa

SEQ ID NO: 48802 - DNA, 3408 bp, Thermacetogenium phaeum
atgaagctgctgcaaaaactgcttctcatcaactggcactacatcgagcgggaactgatcgagttctccggcatcaactttttaacggggaaaaacgcctcagggaagtccaccatcatcgatgccctccagctgctgttcttgggggacaccagcggaaacttctttaacaaagcggcgaacgactactcccagcgaaccctgaaaggctatctgcggggagaagtggccgatgatggagggacggggtttatctacctgagagacggagtcttttccagctacattgtggcggaattcttcgacaccatcaaaaaaaagagcttctgcttcggtgtggtttttgatgtctacggagaggacaaccccactcacaagttcttcctcctggaggctccgcttcccgagcaccagttcatcctcaacaacaccccaatggactaccatacactgaggaatcacctcaacagcaccggaaagatcaaataccagtttttcgacagcaacaggagctacagggagtcctttctagggaagatgggtggcctgaacaacaaattcttcacccttttcaagaaagccgttcccttttccccgattatggacatcgaaaagtttatctgtgaattcgtctgtgatgtcagcaacagaatcgatatttccgacatgcaggccaacatccgccattataaacagttggaactagaagcggggttcgtcaaggaacggatcgagcgcctgaccgttatctcggcgaagtaccaggactaccttattgaaaagggacgcctgctgcagcagtcctatctcatggacagggcacagctgcaggagtcggtcgacaggatcgacgccctgcgggaagcaatcaggcaaaataacgaaaaaatggtcagccttgccgcccaactagagaaaaaggaacaggaaataaaaaagctggacgaaaaaagggatcgccttctcaaggaaaaattcgagtccgacctgtacaagaaaacagaaagcctgaaaaaacagctggacgacctgaccgcgcagctgaaacagctcgacggggtccgccagggactggccgacctgataacacgtacaggcaatacctggaaaaaggcgctcaaggattacgccaaacatatcgccccggagaaggcccatgcctatgcctcattgcaaagggaagcggcggatctgtccggcatcaaaccggacggcctgatttgtccggaaactcaacgagaacttgatgccgagcggttgcaggagatcagatcccagatgaaggccttccgcaatgaggtcgatgccctctactttgacaccagatcacggctggaagccgccagaaaacgggccacagaactggcaagtgaaatcgccaatttaaaaaagggcatcaaaccctatgacgcgaaactcctggagctacgccgggaaatcaaaaataaactgcaacaacagtacggtcaagaggtgccggtggagatcttctgcgagctgatcgaggttcgcgacaaaagatggcaggacgccctggagggctacctgcacacccaaaaattctacctgctggtaccgccggagtatttcgtcgccgctttgaaggtctacgaccggctgaaattcgagcgccagttttacgatatcggcctcgtggacataggaaagctgcaggaattgaaccccaaggtgaagaagggcagcctcgccgaagaggtggttacagacaatccatacgcaagggttttcgccgactacctgttgggccgggtgataaaatgcgagcgggtggaggacctgcgccaataccggacggccatcacccccaccggcatgctctaccataactttacagccagacagatcaaccccgaccgctggaaggtcccctacatcgggaaacaggcggtgaaaaaacagatcgaaatcaaggaacaggagctggccgggctcaaccaggagataagaaaaggcgagtttaggttcgaggtgctggaagggctgaaagagatagatccccttggagatgataccatcgcccacatcaccggcagcctgcagcagctgagaacctaccaggacctggtcggggaacgccggcaggtgcaggaggctctggaaaggatcgacctcagctatctggagaaactggaccgggaaattgaagaggtagaaaaacgaagaacagctgttgaagaacagcgggagcagttgaaaagggagaataacaagctggagtacgaaaacaacgccatcagagaagaaaaaatccccgcggaagagtcccggcgggccgactgcaagcagaggatcgacgaaaaatacgacgccgggtggatccgggaaaccggtgagccgcgcttcctgaaggaaatggaaaagagaggctccccccgcaagatcatagaggcctttcattcccagctggagagaaccaaaaaccaggcggaaaggaaatggcaggagctggtcagggcgcgctccgattacaaccgggactacaagatgtcctacgacatcaaccttccggagaacaccccctttgacgaggaactgacggaactaagggatacccacctggccgagtacgaagccaagatcaaggacgccagggaaaaggcccaaaaacagttccaggaggacttcatcagcaaactgaaacagaatatcgacacggtcagggggcagatcgaagaactcaatgacgccctgaaaaacgttgccttcggcagggagagctaccgtttcgagatcaagccgaaccccaactacaaaaggttctacgacatgatcaccgacagcatgctccttgaggggtacaacctcttttcccaggccttccaggcaaaacacagagacgccatcgacgaactgttcaaacagatcgtggatgtgggtgaaggggatctcagcgccgatcagagggcggaactggaaaggaacatcgagaagttcacggattaccgcacctacctgcagttcgatctgatttcgaaagatgaatcggggcgggagtcccgcctttccaaaaccatcaccaagaaatccggaggggaaacccagacgcccttctacatctcggtgctggcctccttcgtccgggtttaccggctccagcagcgctacagaaacaaaaacaatacattgagactgatcgtttttgacgaggccttcaacaagatggaccaccagcgcatccaggaaagcatcaaactgctgcgcagcttcggcctgcaggcggtgatctgcgcccccacagaaaagatcggtgacatcgcccctctggtggaccggacgctctgcgtcaccaggctgaataacatcaccgtggtccgcgccttcgaccccagaaaactggaggatgaagatgaactaccagaacgttatcatcaacctgctgctcgataa

SEQ ID NO: 48803 - DNA, 1230 bp, Thermacetogenium phaeum
atgaactaccagaacgttatcatcaacctgctgctcgataaatacgagcagagccggcacttccggggcaacgctcgcgtaaacaggcgggtggcgctgaagttcgataagaagaactttcccctctacgacatcgagagggtcgatgtcaaagaggccatccaccacgccgcccttgagctgcagcagcgggggctgatcaccgtggaatggatgaagttcgaggtgggcaatatcatctcccgggtgtttctgaacctggagatggtcgccgaagcctatgccctcgtcaaccggaaagggaaaaaggacattctggtagaagcacggcgcaagctggaaaggctcagggagcaagttaccacaccctggatcaaagatttttgtagagagatgctgcaggaaattgaggaaaagaaggaaatgcccagatacctgcccagagaagaggaaaagttcgacctcctggtgagggcgctgcaagggatagaacagaaaggggaagatgagcttttagaacggatcttcagccgccgttacctgggtggaagcaaggaatttgaaagaaagatccggagccgccttattaccattgtcaaaaactatctgctcccaggccgggacatggatgacgaagaggttctggaacacatcggcctgctcaaaacatcggaggaactctcctttttcggcccgctggtgatcgatctgcacgggcaggtgatcgatttttcccccttctgttatgggacatcgatgaacgcggaaatgatcagaaatttcgaggtatccaggctgccggtgaaccgggtggtcaccatcgagaacaaggcggcatacctggaatacatcaaaaacaccccggcggagcgggaactggtggtctacctggccggtttctatagtccgctgaagcgcctgtttttagaaaaaatccataaccatctgcggaagcataccccccaggccgcttattaccactggggggatctggacctgggcggttttcagatcttcgtttacctgaaaaacctcatccccgagctgcaaccgcttcacatggatgtggcaacattaagggagaacgcccggtttgccgacactttcgacgataaataccggaagcggctggagcagcttttaaaacaggaggaatatgccgtcttttttgaggtcatcaacttcatgctgcaggcgggcatcaaactggagcaggaagccctggtataa

SEQ ID NO: 48804 - DNA, 1452 bp, Aeromicrobium erythreum
atgtcggccctgtcgaaggcactcgcctaccggcgtctcgtggatgagcacgctgccctgcgactcctgcgcgccgacctcgcacccgtcatcgcaggcatcctcgccgagcgtctgggtgcacccggaatgcgcatgcccaccgaagagctccacgcggccgtggaggcagatctcgaggagctgcgtctgcacgaggagctcaagcagaacgcacgtgcctactgcgacgactggcgcaacgccggctttctcgtgcggcgcaccgatcgcgacagccgcggagagacctacgagctgtcggccgccgctcacctcgcgctccggatgttctcccagctcgagacacctcgcaccacgatcaccgagtcgcgtctcgtcgggcttgctgccgccatccgtcagctcgcccgcgacaccgaccctgacggcacccgtcgactcgaggtcctgctgaccgagcgagaccgcatcgacgccgagatcaccgcggtacgcggaggtgaggtgaccacgctcgacgaccgccgcgccgccgaacgcctcgccgacatcctcctgcaggccgagcatctccccggcgacttcgccggggtacgagctcgcttcgagagtctcaaccaggacctccgcgccagcatcctcgacgccgacgaacgacacggcagcgtcctcgacgacgtctttcgcggtgtcgacctgatcgaggcctccgacgaaggccgaaccttcaccgccttcgccgcgctcatccgcgaccccgagcggtccgccgccctcgacaccgacctcgccgccctgctcgagcgtgacttcgcccgcgcgatcgacccaggggcacgtcgcgcgctccgcacgcttgtccgcgacctcaagcacggcagtcgcgacgtgcaccaggtactcaccgagttcgctcgcggtctgcgccgctatgtctactcccaggagttccagcgcgacaggcggctccgcgacgcgctgcgggagtcgctctccgtcgccgtcgctgcctctcgccgcatcaagccctacgcgcggatgccgcgcgacatcgagctgtcggcgctcccgttctccaccgtgggagagatcagtgcgcacgacccgtccgactacgacaccggtgccaccctcgacgacgcgaccaccacgacggtcgacctcgaggcactccgcgcggtcgcgcgagagagcgagatcgacttcgtcgagctcgtccgcaacgtcaacgccgtcctcgacgaggtgccgtccgcctcggtaggcaccgtcctgcgccaccgccctgccagccagggggtcgccagcgtcgtcgggctgctctccctcgccaccgtccacgggcggctcgacccgaggtcggccgagtcgctcacctggacggggaccgacggtgtcccgcgatccgccatcatcgccacccacacctttacggagaagatcagatga

SEQ ID NO: 48805 - DNA, 618 bp, Aeromicrobium erythreum
atgagtctcgcggaccccgccggcgccccgcgcctctggaaggacgacacgggcaggctcgtcgaggactcgcggcgggcggtgctcgagatcctcaagggcccgtacctgtcagggcgccgacggccacagctctgggccgccctgatggccgacgaacgcgccatccgatcgctcctgcacgatctcttcctcgagctcgtcatcgaccccgtggacgagttcgccttcacccgcaaggtccgcaccgacgagatcgaggtcccgagcacgctgcgcagcgagagtctcgcgttcatcgacaccgcgatgctcctcgtgcttcgtcagctcctcctcgcgacgtccggagagcggcgggtgatcgtcggccaggacgaggtgtacgagcggctgagcatctactccgacggcgacgagtccacgttccgtcgcaacctcaatgcagcctgggggcgcatgatgaacaagctccgggtcatccaccctgcgggcgaggagcgagccgagatctcacccgtggtcaagttcctgctcgacgaggatgaggtccgcgctctcaccgaggagtaccggcgcatcggcgagggtgccgcgtcaggtgaggacgtctcatga

SEQ ID NO: 48806 - DNA, 3321 bp, Aeromicrobium erythreum
atgacccttcccctcgacctcccggtcccggccaccggacagtggcgcctcgccgaggtccagctcgccaactggggcacgttcgacggcaagatctaccggctgccgatcgcccgacgaggtcacctggtcaccgggccctccgggtcgggcaagtcgtccctgctcgacgcgatcgccgctgtcctcaccccggataagtggctacggctcaaccaggcggcgcaaggcagcggcgcccgggccgatcagcgcagcctcgtcagctacgttcgcggtgcatggtcgcgcaccgtcgacgacgacgaggaccgcgtcgtcagtcagttcctgcgcaccggagcgacctggagcgggatcctgttgcgacttgagtccgggaccacccaacccgtcacgctggcccgcttgttcttcctgcgcgccggcggctccagcaacgccgacatcaacgacgtctgtgtgctggagcgatcggccatcgacctgcgcgacgtcgagccgttcgtccgtaagggcgtcgaggtgcgcaagctgcaggccgcctggccggacgccgtggtcacgagcaaccggtcccacgcccgcttctacgcacgactcaggtccgtcgtcggcatcgcggacgagaccgccctccagctcctgcacaagacgcagtcggcgaagaacctggacagcctcgacgacctcttccgcgactacatgctcgaagaaccgtccaccttcgcgctcgcagacaacgcggtggcgcagttcggtgagctccgcagcgcccatgaccgcgtcgtgcagctgaggttgcaacgcgatcacctcctgcggctccgcgacgctgcctccgcccacgacgaggcccgcgtcgcagcggagaaggcgaaggacctcgccagccacgtcgtcggctaccagcatgcccgcacgcttctgctggccaccaacgaggctgaggccctcagggaacgcctggtcgtcctccgggaggacgtcgcgactgcacggctgcgcgacacctcgtcggacgaggcactgcgtcgcgccgagcgcctcgcgctggagctcggaggtgcggaggccgagcacgtccaacgggcgatcgacaccgccgagcaagccgcgcgcgacacggaggaacgctggcagactctggcgcggcagctcgccgccgcgggcatccagagtccgccccggacggcaggtgagttcgctgagcttcgtcgggccatcgaggagatgatcgacgacaccgaaccggagaccgcgtcgtacgagcagctccagcgcctgttcgagacccgcgccgaacgggatcggctcaccgacgacatcgcgtcgctccgcaggaccgggagcacggtacccccgcgactcctcgcggttcggacggctctctccgcgcacctcgggctgccggacacggcactcccgttcgcggccgagctgatcgaggtcgcccctcgtcacgtcgcctggaccggtgcgatcgagagggtgcttcgaccgctctctctcgcgatgctcgtgcggtccgagcacctccggcccgtgcggcgctgggtcgaggaacaccagctcgacggcctccgcctggtcttcgaggaggtccgaccggacgccgcgccgccacgaccggcgcgcagcgacgtgtcgctgctgcaccgggtcgtgatcgccgacggaccattcgccgggtggcttggagggcagctgtccgagcggttcgactacgcctgcgtcgacagcccggatcacctggaccgtcacgacaaggcggtcacgatcggcggccaggtcaagacgtcgcgcacgcggtacgagaaggacgaccgcatgcgcatcggtgaccggcgcgggtgggtcctgggcgatcgcgaggcgaagatcgaggcgttggtcgagcgcctcatcggcgcggaggccgagctggccgcagcgcaggaggtcgccgccgacgtcgagcggcgccgagcagcgtcgatcgaacgccgtggtgtgctcaagaccgtccgtgagcagcgttgggctgcggtcgatgtcgagggtgcgcagagccgcgtggccgagctgcagcaccagctcgaggatctcacgagcgccgactccgagctcagcaccgcggtgcagacggtggctgcgcgtcgcagcgagcggcaggcgtccgcggaggtgctgcgagccgctgagctggcggtggcgcaagcggagagcgagcagcgtcgcctcggggaggagatcgatcggctgaacgcgtcgtcgcgcgaggagggcgcgctcgaccccgaggtcgtcaccgagctggacggacggttccgtgcgaggcggcggcacctggaccgggtcggcatcgccgccgtcggacagcaggtcgtccaggatctccgcgacgatagcgacgcggagacccgccgggccaacaccgcggcggaggccatcgtccgcgaggccacgtcgttcaacgagcagtggcctgccgctgcggtcgcggctgacctgaccccgtcggtggacgatcgcggcggctacctcgacgtactcgaccagatcgtcgcgaacggtctgccccagcacgaggccagcttcctgcggctcctgcgggagcgctcgcgcgacatggtggcagacctcgtcaacgacatcctggcagcgccgcgggagatcgccgaacgcatcggcccggtcaacgactcgctgcgcaggtcgccgttcgacacggaccgctccctgggtctgaaggtcaagacccgtcacaccgacacggtcacgcgattcatcgccgacctgcgggccgtggcgagcttgggctggacggaggatgacctggaggccgcagaggaacggttcgccgtgctcagccgcatcatggagcagctggcctccagccttccggcggaccgtgcgtggcgccgtcagtgcctcgacacccgccaacacgtaaccttccgggccgaggagatcgaccccgacggccacgtgcacgccacgtacgactcgggggcggcgatgtcgggagggcagcagcagaagctcgtagtgttctgcctcgccgctgcgctgcggtaccagctcgccgacgcagacgacgtcgtcccccggtacggcacgatcgtcctcgacgaggcgttcgacaaggccgatacgaggtacacgcgcatggccctcgacgtgttcgtcgagttcggtttccagctcatcctcgccaccccgcagaagcttttgcagacgatcgaaccgtacgtgggtgcggtgacctcgatcgagaaccccactcggaagctctcccaagtctcgagcgtcgtctgggacgatgaggttccgtcgtga

SEQ ID NO: 48807 - DNA, 1098 bp, Aeromicrobium erythreum
ctgcggcgacgtggcactgattgggccgttgctccgcccgacgagccggctctcacgatcctgctgaagccgcccacggagcgcgaggcgatggtcgatcaagccggtgccgaggcctgggcgcgcgcatggacggaccccgcgttcgtcggtggtctcaccgtggagtgggaggagcgctcgtggcggcgggtgggtcgtcagcgggtgccggtgagactggtggcccgtcgtcccgacgatgtcgcagcgttggcggggggccgggtcgcttccgagtggaggctattcgctgctcgtgtggcagagatccgaggacggtggggaccgtcggaggagctcgacgccacctgccgacgtcatgcgcgtgagatcaccgggtgggacgaggaccggttcctgcaggtcctcgacgtcgctcagtggctcgccatccacccctccgacgggttgcgtccgcggcaggtccctgtgcgaggggtggacagcaagtggctagggcgccaccgcggcgtgctcacggctctcacgactgccacgacgggccggcctgggttggggctggtcgatggggacccgcttctccgggtgaggtgcctcgactcctcgctctgcatcggtgggctggcggacctcgccgcaccggtccgtcagctcgcgagcctcgctctgcgcccggacgtcgtcttcgtgttcgagaatctcgagaccgtcctcgccatgccgcagtggcccggcgccgtggtgctacatggctccggctatgccgtcgacgtcctcgagaagctgccgtggctggcgcggtgtccgatcgtctactggggagatctcgactcgcacggtttcgcgatcctgaacaggttgcgatctcacctcgacggggtgacgagcgtgcttatggatgagaagaccctcctggaccatcgtgacctttgggtgatcgagccccgaccggcgcgcggcgtgctcgacgaactgacgtcggacgagcgtgccgtgctagcgcggattcgtgcggagggtgacgtccggctggagcaggagcgaatcccctgggacctcgccctgagggagctcagatcggtttcgcgaggctga

SEQ ID NO: 48808 - DNA, 1488 bp, Streptomyces regalis
atgcgatcggggggttgtgtggatttcgaccaggtcacagagctcatgcgtcatccggcgtgggtgctgctgcgcgcggacaatgccgctttggtgctgtcgttctgcggcacggtgttcgtcgacgagaacgcgcgcggtgtgccggagaccgtgctggagtcccggctggacgaccggctctacgtcctcaacgaggaaaagcccggctcgtttccccggcctgccgacgcctatctggcggagtggacgaagaacggctggctgcgtaagtactacccgcctggggaggacgaggcgcacttcgacgcgactgcggcactcgagaaggccgtggcctgggtacgggagctgcccgcacgttcgttcatcggaaccgagtcccgcctgaacaccatcgtcgcgctcctgcggcagatggcgttcggaacggagaccgatccgcagacacgcatcgacgaactgcgccgggagcgtgacgcgatcgacgcccagatcgcccggctgcgcgccggtgaggtcgacatgctgtccccgctcgctctgctggaccgctaccagcaggtggagagcaccgcggtcgaactcctgcgggacttccgcgaagtggaggcgaatcttcgggaactggacgtacggctgcgccaccaggtcgccaccgccgagggcgggaagggagagcaactggccgcgttcctgctggaccgcgacgagatcgcccggtccgatcagggacagagcttccaggcgttcttcgattacctcctctccccccgccgccagcaggaactgcgggagctgctgcaacaggtcaaccagctgccgcagttggaaggcagggccaaccagagcctgctgaaagtccccttcgcctggcttgaggcagccgagaacacccaggacacggtccggcagctgaccgagcaactgcgccgcttcctggtcgaccgcagccgagcggaggaccgccgcgtactggcgctggtgcgctccacccagcgtcacgtcaccgccctggaaggccaagccgacctgcccggcatgacgctggacatccctcaggcacatctgacgctgccgatggagcgacggctgtacatgcccgtcgaacgcatcgagctggacacgattgcggtggaggaatccgacgacgcggaggtggacatctccgagcttttctccggcgtccacgtcgacaccgaggcgctggccggtcatgtcctggaggcggtcgccgcaagcccgagcggccaggcgaacctggccgccatcgtcgacgaccacccgctgaccctggggctggcggaactgctcgcctacttccaggtggagcaccccggcctggacatgatcgtggacccggaccgcaccgacctcctggtctacccgcgcgtccacgtgcccggacacacgcaggcgagagtgccgcacgtgacgttcgtacgcgacgaaggcggcaacgccgccggaaaggcggagcaggagtga

SEQ ID NO: 48809 - DNA, 591 bp, Streptomyces regalis
gtgagcgacgccctgaccgtccccgtggtccacctgctgaaagggggcgtgctctatcagagcgacgcccctgccgtctgggagcagatcgtcagccagcaggcggcgatcggcgactacctcagcgtgatcggcctcgacgtcgtcatcgaccgcgccgagggctacgcctacgtccggcagcaggatctcgattcccgtgacgacggcgccccggtgccgcggctggtcacccgccaccggctctcgttccccgtcagcctgatgctcgtcctgctgcgcggacggctcgcggacagcgacgccgactccgccgacccgcgcctggtactcacccgcgacgacctggtcgagatggtccgcggcttcctcccaccacgcagtaacgaagcccagctcgtcgaccagatcgacgcccacatcaagaagcttgtcgacctcaaggcactgcgccagacgaaacagaccggcgcctacgaggtccgccgccacatcaaggccctggtcgacgcccaggccctcaacgacttcaacgacctcctcgccacctaccgcgacgctgcctccaccacggccaaggacgacacatga

SEQ ID NO: 48810 - DNA, 3414 bp, Streptomyces regalis
atcccccggcaggcgacgcccgcagagtcggccggcacgttcggcgtcggccccggttaccggctcgcccgcctggaggtgctcaactggggcaccttccaccgcaccacctgcaccttcaccatcgacgggcactgcgccctgctcaccgggggcgtgggatcgggcaagtccaccctcgtcgacgccctcaccacgctgcttctgcccgcccacaaaatcgcctacaacaaagcggcgggcgccgacgccaaggagcgcgacctgcggtcctacgtcctcggccatcacaagaacgagcgcgtcgaggcatcggacaccacccgccccgtggggctgcgcgaccacacgtcctacagcgtgatcctgggcgtcttcgccaactacgccctcggcgcccacctcacgctcgcccaggtcttctactggacatccccgaccagcaccgggcagcccgagcggttctacctcaccgccgaggcaccgctgtccatcgacaccgacttcaccggcttcggcaccgacatcaccgacctgcgccggcagctgaaacagcgcggggccaccatccacggcagcacatacacccagtacggcaaggcattgctgagaggtctgggcatccccagcctgcaggccctggacctgttccaccagacggtgtcgatgaaggccgtgggcagcctggacgagttcgtccgcgagcggatgctggagccgttcgacgcgaagacggccgtcgacaagatcgtcgcccacttcgacgcgctcaccgccagccacaacgaagtcgtccgggcccgtcggatgatcgaggacctgacgccgatagtggtggcatgcgaccggtacgacaccgtccagggggagatcaccgccctggacaagcgccgcagtgccgtccccgcgttcttcgcccagcaccgccaccggctcctcacgactcgtcacacggcgctcatgtctggtgcggcggaactggaggaactgcagtccactcgcgggcggcagctggaacagctgcgcgggacggccgacggcctgcggcgccgtatcgacggcgtcggcggggagaagctcatctccctgaccggccgcatcgaagagctcggccgtgaacgcgaacggcgccgcaagcgcgccaccgagtacggcacctggctcgcgcaggccggcatggatcccgtccccgacgccgcctccttccgtgagcggaccgaccagatctccaccgcccgttcccgggccgaggagcaagagcagcaggcccgcgggaaactcgacgatctcgccatcgcgcgccacggcaacaccatcgcgaccgacgcgctgcggctcgagatcagcagcctgcagcagcagcgctccagcatccccgcccagttgctggtcctgcgccacgaactcgccaccgccgcaggcgtctccgacgaggtcctgccgttcgccggcgagctgatccaggtccgcgacgacgaagccgagtgggccggcgccgccgagcgcgtactgcacgggttcgccttgtccctgctggtcccacacgcccactacgacaccgtctcggcctgggtcaacggccgtcacctgggcctcagactggtctactaccacgtccccgcccacacacccatcaccacgctgccggacgaccccgccctgctgagcggaaaactccagctcaagtccgacagctgggcctgcgactggctcgccgcgcggctgcgctcgcgtgccgactacctgtgcgccgaagacctggacgcgttcacccgcgccacccggcccgccgtcacgcggcagggccttgtcaagggcggcggaggccgccacgagaagaacgacgcctaccgcatcgacgaccggcgtaactgggtgctgggctggagcaaccaggccaagctcgacgccctcctcgccgaggcgacccgcctcacccgcgaaagcgccgacatcaccacggccacccgggagctcgagaagcagcagcgggcccgcgccggaaccagtgccgccctcaccctgctggccagcgtcgacacctacgcggaactcgactggccaagcaccgtcgcggatatcgagcagttcgagcagcagaagaaagccctggaagcagaagccggcctggacaagctcaccgcgcagctccagtggaccgaggacgagatcgtacagagcagcaagacgttcaccacggggcaggaggaactgggcggtctgcgccgcgacgtccagaacatcgccgacctgctgggcaggaccaccacgttcctcgcgcagtgcgacctcgacggcatggcggagcacgaggaagccctgaggaagttcctgcccgcagccgacagcgacgagcacagactcctggagatgctggacgacgccgagcgccatgccgaagcacgtctgctgcgcagcagcggcagccgccacgacgccctgcgccacgccagcagccaggcagcggggctgatgaccgccttccgcggcaggtacccggtccacaccgccgagctggacaacaccatcgaatccgccgacggctaccgcgcgttgcacagccggctcaccgatgaggacctgccccggttcgaggagcagttcctccaatacctgcgcaccaacgtcatccgcgacatcgcttccttccaggcccgcctcggcgctcaggagcagcagatccgcgagcgcatcgacgtgatcaacacctcgctggccggcatcgactacaacccgggccgctacatccggctcaacgccgcccccactccgaacaaggaggtccgcgagttccagcacgacctgcgcgcctgcaccagcgaagcactctcgaacgacgccgacgacacctataccgaggaaaagttcctccaggtcaaggtgctcctcgaccgcttcaagggccgcccggagcacacccgtctcgacaaggagtggaccgcccgggtcaccgacgtgcggcgctggttcgtcttctccgccagcgaactcaaccgcgaggacgacgccgagtacgaggtccactccgactccggcggcaagtccggcggccagaaggagaaactcgcctacaccatcctcgccgcttccctcgcctaccagttccgcatcgaccccaccgcccccaaacccaagaccttccacttcgtcaccatcgacgaagccttcggacgcggtgacgacccctccgcccacttcgccctcgacctgttccagcgcctgggtctgcaactcctcgtcgtcaccccgctccagaaactccacgtcatcgagccccacgtcacccgcgtcggctacgtcgaccgccccgacaagacccgctcccgcctgaacaacctcaccatcgaggagttccgtgcgcgcaagcaggtagcagcccagcaggcgaaccagccctcgaaggagcagtcgtga

SEQ ID NO: 48811 - DNA, 1185 bp, Streptomyces regalis
gtgaccccggcagaatggacccgccccgagcatgtggtggaaaccctgcgccgcaagtggaccagcggccgctacctcaccgccgccgcgggcggtcaccccttcgaagccatcggagtgccgctgaagggaccgaccgcggccgatgccctgcagcactacgagcaggcactcgcctgggcccagtgctgggcccccgaccggaacccccatctgcgtatccagaccaaatccatcggcggccgcaacggcaccccgtcgaataccgttccggcccgagtctgggtcgacacccgcgaccgcctctggacgctgctccgcgtcaccacccaggtcgaccgcttccacaccctgcacgagcagaccgcacgccaggaccccggcatcgcacggtggatggccgaccatcccatgaaggtcctcgcccacgctgcagactggcaccggctcgtgcgcaccacgtgttggatccgcgaccacgacaccgaggcggtctacctgcgcgagatcgacatcccaggtgtggacaccaagttcatcgagaccaacaaaggaatcctcgccgaactcctcgactgtgtgctccctgaaagccgcgtcaacaccagcgcgccgaagagtgatcttgttgcacgctacggcttccgggccaagcccatgtacatccgcttccggtacctcgggacctctcccctgcccttcagcgaactcaccgttcgcgccgaagaactcaacgcgcacccgcccaacgcacgcaccgtcttcatcctcgagaacgagaccacctacctctcgctcccaccggtccccgacgccgtcgccgtcctcggctccggatacgccgctaccctgctgcgccacctggcctggctcaaagacgtcgacctctactactggggcgacatcgacacacacggcttcgccatcctcaaccaggtccgaggactgttcccccacacaaagtcactgctcatggaccgcgccaccctcctcggccacgagccccactggggcgaggagaagacgcaggccccggacgtcctgtcccatctcacccccgaagaggcccagctcgcacaggacctccgcaacggcacctaccggccacacctgcgcctggaacaagaacgcatcagcatcgctgccatccgagtcgccctgacacagagtcagcgtgagccatga

SEQ ID NO: 48812 - DNA, 1413 bp, Mycobacterium neoaurum; identical to SEQ ID NO: 43377

SEQ ID NO: 48813 - DNA, 672 bp, Mycobacterium neoaurum; identical to SEQ ID NO: 43378

SEQ ID NO: 48814 - DNA, 3372 bp, Mycobacterium neoaurum; identical to SEQ ID NO: 43379

SEQ ID NO: 48815 - DNA, 1461 bp, Arthrobacter sp. EpRS66
atgcagccctcgcaccgcgcgaatagtttgtggcttcaggctcagcagttcaaaggctcggcagcatatcgtcttttgacggcccaaccttgggcggttgccttcatccgagcagaattcaccgcagatcgctcccgcgtagcgttggagctcttccatgcgtcgctggattcgtttttgaagcaggcccggaaaagcgacgaacagatcccgcagtcgtattccgcccaggattttgccgaagcctgggtcaagcaagggattctggcccgtccgctgatcgatggtcgcttcgtctacgaacccagcgcccagaccctgcgcgcgcttcgtttcctcgcagatttttccaccgatgattcgcacctgaactcctcgcgcctcaataccctgctttcctcgctggaatccttggtccacgagacggaccccgatcccgaggcccgaatccgcgccctggaatcccagatcgcccaacgccaggcgcagattgaacagctgcgcagcggggatgatcctgcagtgttgtcgcggaccacagccctgtcggccacgcgttcgctgctggaccttgcttcaagcctcccggcggacttccgccgcatgcgcgatggcgtccaggacatgttgcactcgcttcgtgaaggcatcctcgatgcttccacagccaagggcgtcgcggtgggccaggtgctcgaagccgatcgccagctgcgttcgacggccgaaggcgaaaccttcagcgggttcaccgaattcctcaactcccccgatgcccagcagcgattccgctcggcgctggctgaagtcctcgagcgcgattttgttgacgacctggagaccacagaacgccagatcctcacgaacctgctgcgggaattgcgccggcaggcggccgaggtgcacgcgtcctacggcaagctgtccgagtccttgcatgcctttgtgcaatccgaggattacaagcaagctgagcttctgcgccaggcggtccgcgaggcggagctggcaatcagcaagtcaactgcgttgaaaccgcgcagcggcctggccccgatggacctgtacaccccgcagctgatgacgctctcgggattgggcatttacgatccctccgaacatgtcgcacctcctccgttggcccaggccccggaattcagcgaagccgacatcgtccgcaacccggcgacgccccaggccgatatggccttgctgcgcgcatcgattacccggcacctggatggctcgccaggctctgcggtgcgcatggatgaagtattcgccgccttggatgatgagcatcggcatttgaataccattcgcgccctcgtggagatcggccgcaccaatggcgagtcgctcaacgaggctgacctggtcaacattgaattccagcaacttgatggttcgatgagaaccgctatcctgcccgccttaagcttcacgaaggagccgctatga

SEQ ID NO: 48816 - DNA, 687 bp, Arthrobacter sp. EpRS66
atgaccacgagcgaggcctacgccgcaccgatcgccgaaccgttgttcgaaggtgataccggaaagtactccctgccgctgcgccagctgctggttcgcctcttgcgcggcccttacctcgacggctcgatcgatgccgcagcctggcagctgttgctggatcagcagcagacgatcgccgattacttctcggagatcttcctgtcattgaccttggatatggatcgcaagatcgcgatgctggcgccggtgcaaatcgagcaggtccatactgcgccgattgccccgcgacgcccgttgaagcgcgatgaaacgctgctggcactgcgcttgcgcctgctgctggagcggcagtccggcagtggagccgatgcagtggcctcccgttccacgatgcacgagatcctggccgagcaccgccagtccagcgaccgcgatgacaagcgcttcgccgaatcctgcgatgctgccattgcccgcctgcagtccctgcggctgttgaccggcaccgagttggagaacgagttccgcatctcccctgcgttggcgatggccttgcctctgggcaatatccaggacatcccgcgttatatcgcagccattgatgccaatgagccggccttcaacctaacagctgacgagaacgacgaactggctgaacagacccccgagttggtgcaggagtaa

SEQ ID NO: 48817 - DNA, 3327 bp, Arthrobacter sp. EpRS66
atgagcattgaaatgactcttccgctgggcggcgccatcaaccccggccagcatcgcctcagccgggtgcagatcgttaattggggcaccttccacggacttcatgacctggccgtcgaccgtgccggaaccctggtcaccggccatcccggcgtgggcaaatcgacgctgtttgatgccatgggccacgtgttctttgcaacgccgcggctgaatgaatcggccaatgacgccgccacccgcgaggatcggcgcaccaccttctcctatatgcgcggccgccagttcaagaccgccgaaggcaccgtctaccagcgtcccggggcaacctggagcgccatcatcctgagctacgacgacggcatgggcaataccgtcaccgccggcgcggtgttcgacctgcccgacgccggcttggaaggccaagtctccaagcactacctgttgtgcgaaggcaaggtcgatatcgcggagctggaacaccatggcccgcgccgcttcaccgtctcctcgctctccaaggcactggctcccaccgaggccttcgacacccacaaggcatttatcgagcgcctgcgccgtcgcctcggggttgaaagcgacaaggcctttgccctgctgcgcaccttgcaaaacggcaagggactggccaagggcgtcaaccagttcttccgccacgaagtgctcgaagaaccggcaacgcttaaggccgcagccgcggcagtcgaggacttcgcccaccttcgcggcatctaccgccagctggataccgctcgcgcccagcgtgatgcactggccgatgttccgcagcaggaccaggactaccggcagctggaacagcagatcaccgagacccgccagctgctcgatagcgacgtccaggagctggagtcccaggtccgccagctggtcctgcgcaatgatctagcctcccatcacagcgaactgtcgaccttgcaggcggaagaacaagagcttcgctcccgcaaggagcagctcgatgaccagttgcagtccttggaagccgcccacgattcggctggttctgcctcgctgatgcttctggaacgcgaagccgatgttgcccgcaaagcgctgagcgagaaggaaaacaccattcgcgccctgcagcagcaggcatcggacgcggggttgaacttcgaattctccgccaccggattggacgagttgcgcgcgaatgcagcgcgcaccttgcagcagctggcctcgatcacccatgatgcgcagaccgtggaatatgaagccatggcctcgctggtgaacttgcgcaagcgggccgagactctggctgaacagattcgctcctaccagcgtcgcgccagcaacatcgacgaccgctccatcgcggctcgccgtgccattgcctcggcctgctctctgagcgaggaacagcttccgttcgccggcgagctgatggatgttgcggccgatgcctcgacctggcgcttggcggccgagaaagccctgcattccctggcccgcaccctgctggttccgggcgacctgctcggccaggtgacccacgctattgaccagctcgatggcctggggcgagtgcggtggaccgatatttcacagcagcccaaggatgccgaagccgggccagccgatctggtgaccaaactcgacttcgctcccggcgaggccggcgcctggctcaaggccaagatcaccgccgactacccgcttgcctgcgtcgagaacgatgcagccatgcacgtgcatcccaaggccatcaccccggcgggcacgatgaagaccggcaatggcacctttgagcgcgatacccgcgggcttcctgcctccgagtacctgctcggctttaccaacgaatcaaaaatctccgagctgcagtccaaggccgcccgcttggaagagaagatcaccgaagcccagacttcagccgatgagcgcagcgccgccaagaacaaggtggtcgccaagtcgcagctgctcaaggcgatcatcgctgacgagcgcagcttcagccagttggattcttcgccggcgttggaggctcttcgccgcggcgagcagaaactcggcgatgccctctcgctctccggcgattcctcgcgggttcgccagcagatcgaatccgccaaggccgaagccgaaaagctggtcggcgatttggcgctggttcgctcccgcatccaggatctgcagctgcagatccagcgcgccgagcaggtcctcgccacagcgcaggagccgagacaggactgggagcaggcgattccgctgtccctgcgccagcatcagctcttgggcccggtcctggatcaggtcgtttccggcaactgccctgccagcgagcagatcagcgaggctttcgccgaggtcaagctgcaattgggcagccagatgaactcgctgagcagcaagcgccaggaaatcggcagccagctcagtgaaaccttccgccgttttgcccgggatttcggcacctcgcatgcccagacccacggcacttctgccgaggctgccgagcactacacgcagctgcacgaccagattgtcgccgacggcttgcctcatcatgaagcgcagttccgcgaatacttcgccaaccgctcctatgagcgcttcagcgacctgttgcagctgctggatgaagaacgccgcatgatctccgaacgcatcaagccgctgaaccagatcctggccgaggtgaccttcgagcatggatccatcctgcgcctggaggtcgagaacgcgattccggtcgaggccggaaacttccgcaaggaattgaaggatgccctgcaggaggcctacacgaccaaggatgaaaccaccttggcaacctcctaccaggcgctggaatccctggtgacggcattgagtgatccggcgttgaacgcctggcgatccaccgtgctggatgttcgccagcacgtggtcatcagctgcaatgagcacaagaccaacggtgagatcgaaaccggtttggagcctggaaccctctcgggtggcgaggggcagcgctttacctccttcatcatgggtgctgctctggcctaccagctgggcttcgcttcggccgggttcacgtccttcggtaccgtgatgatcgatgaagccttcatccaggccaactccgaatatgctgctgccggcatacgtgccttgcaggaattcggcttccatctggtgctggccgctcccgaggacaagatcgatctgagccgccatttgggttccattacggacatcatcaaacatccgggatcgaatatctcgggcttcgtgaccaccggccgctcaccggctatggctaccaccatcacgctgcgcagctag

SEQ ID NO: 48818 - DNA, 1458 bp, Arthrobacter sp. EpRS71
ttgtcccgttcagccatgtcctccgccgacgccatcagcgcccggctccgtgatctcgaacagctgaccaaaggccccgcgtgggctctgacacggtcggctccgtgggtgatcgccgtgctgcaggcctcctttacccgcacccggccgcagcttccgctcgaagagttccatgccgacgtcgacgctttcctggagcagctccgccgccaggatccggcccttggcggccagcaaaacggcaaactcttcggcgatgagtggacccgcaagcagttcctgacgcgtcgtaaccagtcgggccagatcgtctacgaagtcaccgagcccgcagcccgcgtgctcgcgttcctggacagtctttccagtgagcgttccacgctgaacggttcgcggctcggcacactgttgggcgatgttgagaaactcgccaacgagaccaaccctgaccagagcgcgcgcttggaagcccttgaagaggaaatccacgagcgccagcagctggtggaagacatcagctccggggagttcgatgggcttttggacgatgaggaagcagttgaagcggccggcaacatcctggacctcgcggccagcctgccagccgactacaaaaagatgcgtgaccggatcgaagaactggtgggcgagctccgcaaccagatcatcgaggaatccctgagcaagggcgccaccatggcccaggttttggaggccgacaaacgcctgcggcaaagcccggaaggccgcaccttccgctccttcacggccttccttgaggatccgcagcagcagctgcggttccgttcggcgatcggcgaggtgctgagccgacaattcgctgacgacctctcccacgaggaccgggagacgctgaaaaacctggtggccgaactgcgcacacagcacagccacatccagcggatctacggcaagctctccgaaagcctgaacacctacatccagagcgacgacgtccggcagtccgtcagcctgcgtaaggtgctggccgaggcggagcaagccatccggtccatgccgtacgaacgcgaccgcccaggcctggtgcgcgggccggtcctgttcaacgccgggtttgagtcgttggccatggtcaaacttttcgatcccgacgaatttgcaacacccccgcgcctggccgatcccatcgccttcagcgactcggaccgcgtacggtcggcacgcaccggaaaggccaagcccgctgtcatccggacagccatggccggtgcatccactctgggcgacgcgtgggaaaacctgcccgctgaagaacgtcacatcaacaccgtgcgcaccctgttgtccatggcgcttcagacgggcgctgccttcgacagggctgcctgggaacacatcgacttcgaacaaatcgacggcagcatccgcacggcgtacctgcctgtcgtcacgctgaatgaggattctgatgactga

SEQ ID NO: 48819 - DNA, 948 bp, Arthrobacter sp. EpRS71
atgactgaagaaatcacgacgacggacgtcaccgacgcggacgacgtcactgatacggacggcctcgccgaggcggacggcgtcgccgacacggacggcgtcgccgacgacggcgtgcaggtggaagcccccgaacctgaacccgggcccgctgaggctgagccggctgctgacgtcagccacgctgacccgttccgggtgactccgcgggacaccttcgtggacggcgctgcgttgttcccgggcgacaccggagtgattcccatgaaggtccgccatgcgctggtgaagctgctgaaaggcccgtacatcgacggtggccgcgacgagaaactgtggaccacgctgctggacaaccagctgatcctccgcagccgcctctccgagctgttcctcagcctgcaactcgatcacgaccgcaaaatcgcggtcctccggcccgtcgatccggaagtcatcggcgcgagctcccgctccagcatcctgcgtcagcagcgtgccctgagccgagtggaaaccatcgtgctgctgcgcctgcgcctccttctggaccgccatgtcacagcccaaacggaccccaccatcacccgcgaagagatctcggacctcgtggccaactacacacccgccggccaacaagatgccctgcgcgattccgacgtcgtcacgcgcaccatcaccaaactcctggcccgccaactcatcctccccacaccgttggatgacacgtacaccatcagcaacgccctccccctggccctcccgtttgacaacatcggagacatcccggcccaaatagaggccctgatagcagtagccgccgacgaatcaggaacagaacccctcctggacctggactctgactccagtcgtgaagatggcgatgacgacgccgatgccgcccccgccgcggacggcgacccaacaacagaggaggcagccaagtga

SEQ ID NO: 48820 - DNA, 3477 bp, Arthrobacter sp. EpRS71
gtgaccatcgcaagcatgctcccgctaggcgagcttacgaacccaggccagatgcgcctcgcgttggtgcaggtggtcaactggggcacgttccatggcgcccacaccatgcatgtggaccgcaagggcaccctcctcacgggtaactcgggcgtgggcaagtcgacgctttttgatgcgatgctccgcgtttttgatgcccggccgcgctcgaacgaggccgctgcccagcgttccggcggtgctgtggaggacaagaggaccacgttcacctacatgcgcggcaaggtgggtgataaggcggtgggcgatagttcggccagtgccttccaacgccctggtgccacatggtccgccgtcgcgctgacgtttgataacgcggctggcacgaaggtgacggtgtcggcgctgttcgacctgccgaagaacggcacggagtccagtgtcgggcgtttttatgtgatcgacagcaaacctttggaccttgaagcgatcgagggcattgcccagaagcgctttaccaagggtgcgctggagtcgatcttccctgagggccaggtcttcgacgtgcacaaggcgttcgccgaacgcttccggcggctgctgggcatcaactcggaccaggcgcttccgctgcttcgcgtgatccaggccggcaagggcttgggcggcagcgtgaacacgttcttccgcgaccaggtgcttgatgctcccgccacgttggctgcagccgatgatgtggtggaggaattcagcaacctgatgtccatccggcagcggttggaggatgtgcggcaacagcgcgaccagttggctcccgttccggagctgaacaaggagtacgcgcaggcattgctggacgcgaaccgtctccgggagctggctggcgaagaatttgaggcctacaagcagcagcttgcggtcacggtccacgccaagacgctggcccggttcaaggaattggctcagtccaaagcccaggagctggccgccgagcgcacggtgcgggacggcttgtccaaggagctccgcgaccttgaactggattacaacaaccgcggcggtaacgcgatttcggcgattgagcagtcgttggagaacgcgaaggttggcctgaagctgcgtcagcaggtggaggattcggccaggaaggctttggccgacgctggactgaaccttgagtggtccgccgagggctgggatcaggcccacgagcaggcagcagcccgttcagcagaactaaaggacgattcggaggctttgaaggagcttcgtttcgaggctttcgacggccacgccaccaagaaacgcgagcttgccgcggctcagcaggagctgctgtccctgcggtcccgcaagtccctgctgccgccgtcgagcattgaaaaccgtgccgccatcgcggcgtccacgggcattccggaagagcggatgccgtttggtggcgaactgattgatctcgccgaggggcaggatcagtggcgcccggccgccgagcgcgcgctgcgtaacctcgccaccacgttgctggtacctggcgagcacttcgcggcggtgacccgttatttgaatgacaacaccgtccgcggcgccctccgcgccgttgatgtctccaagccgctcgccgggggcgccctggctgtggaggacgtgtccgacggcgacctcttgacgaagttgagcatcctcacctcgggcgccaacgccgacgccggtgaatggatccgcgagcggatcgccttggacttcgcgtacccgtgcgtcgaggacccggacgagctggcttcgatggacaagggcctgagcctgggcggtgtggtcaagcgcaaccgccataccgtggagaaggacgaccgtttcacgagccgccaggattacgtcctcggtttcgataacgcctccaagctcgagctggttgcagcgcgggtgggcgagctggaaaacgagctcgtgaaggccgcggaactagcccaaagccgcgaggattcgcaccagggaatggcccgtcagctcgaggcactgcgccgggttgccgaagatgagcggccttgggagcaagtgtccgcagccgtcgccgcggatgagcttgccaggatcgagcagcgcctgacggatgctttggcggctcaggcagacctggagccgttgcgtgccagcatcgaaaccgtgcgggaaaagcaccagtcctccacaggtacggccgccgttctccagagcgaatacaaggcgctggaccacaagatgaccacggcggacggcctgctcgatgccgcgaggctgaagctggagcaagcaccgccgtcggctactactattaccgcgctggagccgtacttcgacggcgtcgccgacgtctccgaactgtacgagctcgacaacctggccaacagcgtccgcaacaagttgctcgacgaactgcatgctgcggaatcgcgcgggcaggcgaccgccgagcggttaacccgcatgttcgaagcgttcgtgcgcgactggggcagtgccatcagcgccgatcacgggacgtcgatcggcgccgccggggacttcgaatcccggtaccacgcgatcgtcagcgatggcctgcctgcccaagaagccgagttccggctgttcttcaaccagaggacgcacgaatcgttcagcacgctcctgcacttgctggacgaggaacgccgcagcatcaccagccgcatcctgcccctcaacggcatcctgtcccaggtcaacttccatgagggcagcttcctggaactggatatcaagcagacgcttccggccacggccaaacagttcaaggacgcgatccagaacgcgctcaaggcgaagcacacccggccgtcacgcggagctgctgctggttcgccagcagaaatcgacgacgacgccgaactcacctcgcgctacaagtcgctcgaaaccctggtgaagcggctcggatcgcagacgccggaggaccggcgctggcgggctgaagtgctggacgtccgcgggcacctgtttattcagtgcaaggaacaccgcgaggtggcttcgaagtcgaataaaaccggtaccggcaaagccgccaagcggaagaccgaagtcttcatgcatgccgataccggctccatgtccggcggtgaacgccagcgattcacagcgttcatcatggctgcggcgttgagttaccagttgggcatcgccgagcaagggttcaccacctacggcactgtgatgatggacgaggcgttcgtgttggcttcggaggaattcgcgggcgccggcatcaaggcgcttcacgaattcggattccaattgctcctcgcggctccggaaaacgtgatcgacctttcgaggcaccttggatccgtcacggaaatcctccgcgacaagcgaaccaaccgctcgggagtgctcacggctccggtgattgccggacccggagagcccggagcgtggcgttccgaagccaacccggtggacatcgtcctgcgctaa

SEQ ID NO: 48821 - DNA, 1449 bp, Arthrobacter sp. EPSL27
gtgtcccgctccgccctgtcctccgccgacgccatcagcgcccggctgcgggacctcgaactcctcaccaaggggcccgcctgggcgctgacgcgctctgcgccctgggtgatcgccgtgctgcaggcgtccttcacccggacccggccgcagctgccgctggaacagttccacgccgacgtcgacgccttcctggagcagctccgccgccaagacccggggctgggcggctcggcgaacgggaaatcgtttggtgacgaatggacccggaagaacttcctgacccgacggaaccagtccgggcagatcgtgtatgaggtcaccgaaccggcggcgcgcgtgctggccttcctggacagcctctccagcgaacgttccacgctcaacggctcgcgcctgggcacgctgctgggcgacgtcgagaagctggccaacgagaccaacccggaccagagtgcccggctggagtcactcgaagaggaaatcggcgagcggcgccagctgatcgaggacatcagctccggtgatttcgacggcctgctcgacgacgaggaagccgtcgaagccgccggaaacatcctggacctcgccgccagcctgcccgcggactacaaaaagatgcgcgaccggatcgaggagctggtgggagagctccggaaccagatcatcgaggaatccctgagcaagggcgccacaatggcccaggtgctggacgcggacaaacgcctccggcagagccccgagggcaggaccttccgttccttcacggcgttcctggaagacccgcagcagcagctgcggttccggtcggcgatcggcgaggtgctgagccgtcagttcgcggacgacctcagccatgaggaacgcgagaccctgaagaacttggtggcggaactgcgcgcccagcacagccagatccagcggatctacggcaagctcagcgaaagcctgaacacctacgtccagagcgacgacttccgccagtcggtgcggctccgcaaggtcctccgggaggcggaacaggccatccggtcactgccgtacgaacgggaacgccccggcctggtccgcggtcctgtcctgttcaatgccggcttcgagtccctggccatggtcaagctgttcgacccggacgaattcgcggccccgcccaaactggccgacccgatcgcgttcagcgactcggaccgggtgcgctcgccgcggaccggcaaggcccggcccgaggccatccgcgcggccctcgccggcgccacgacactgcccgaggcctgggaacagcttccggccgaagaacgccacatcaactcgatccgggccctgctgtcccacgccctgcacggcggcgccggctttgaccgcgccgcctgggacaccgtcgagttcgaacagatcgacggctccacgcgcaccgcgtacctgccagtggtcacgctcaagaaggactga

SEQ ID NO: 48822 - DNA, 885 bp, Arthrobacter sp. EPSL27
atgactgaactttcccacgacacggcggagagcaccgtggaagacgcggaccaggcagccgacggcgcggcgcagcccgcggggccccagcaggtcggccacatccacagcgacccgttcacggtcaccccgcgggacaccttcgtcgacggcgcagccctgttcccgggggacaccggcgtgctcccgatgaaagtccggcaggccctggtgaagctcctcaagggcccgtacattgacggcggccgggacgaaaagctctggaccaccctgctggacaaccagctgatcctgcgcagccgcctgtccgagcttttcctgaccctgcagctggaccacgaccgcaaggtggcagtgctgcgcccggtggaccccgaggccatcggcggcaacacccgctccagcatcctgcgccagcagcgggcgctcagccgggtggagacgatcgtgctgctgcgcctccggctgctcctggaccgccacgtcacggcccagaccgaccccaccatcacccgcgaggagatcgccgacctggtggcccactaccagcccgccggccaccaggacgccctgcgagattccgacgtggtcaaccgcgccatcaccaagctcctggcccgccagctcctcctcgccaccgggctggacgaggtctacacgatctccaacgcccttcccttggccctgcccttcgacaacatcggcgacatcccggcccaaatcgaagccctcgtcgcagcctccaccgaccagtcaggaacggaacccctgctggaactcgacggcgacgcgacaactccggctgacgatgacacggacgacgacgccggggcggcatcgccgtcggcgtcgaacgcaaccacggaagcggaggacaccaagtga

SEQ ID NO: 48823 - DNA, 3513 bp, Arthrobacter sp. EPSL27
gtgagcatcgcttcaatgctccccatgggagacctcgccaaccccggccagatgcggctcgccctggtccaggtggtcaactggggcacattccacggcgcccacacgatgcacgtggaccgcaacggcaccctgctgacgggcaactccggcgtcggcaagtccacgctgttcgacgccatgctgcgggtcttcgatgcgcggccgcgctccaacgaggccgcggcccagcgcgccggcggcgctgtggaggacaagcgcaccacgttcacgtacatgcgcggcaaggtgggggacaaggcggtgggcgagggctcggccagcgcgttccagcgccccggcgccacctggtccgccgtcgccctgaccttcgacaacgccgcgggcacgcgggtgactgtgtcggcgctgttcgacctgcccaagaacggcacggagtccagcgtcgggcggtactacctgatcgacaacaagccgctggacctggcggcgctggagggcatcgcggagaagcgcttcaccaaggcggcgctggacgcgattttcccggacgcgcaggtctttgacgtgcacaaggccttcgcggaacgcttccggcggctgctgggcatcaactcggaccaggcccttccactgctgcgcgtcatccaggccggcaagggcctcggcggcagcgtcaacaactttttccgcgaccaggtcctggacgcgcccgccacgctggccgccgcggacgacgtcgtcgaggaattcagcaacctcatgtccatccggcagcgcctggaggacgtccggcagcagcgcgaccagctggcgccggttcccgggctgaacaaggactatgcccagtccctccttgacgcgaaccggctccgggagctggccggcgaggagttcgaggcctaccggcagcagctggcggtcaccgtccacgagaagacgctggcccggttcaaggacctcgcccaggccaaggccagggagctcggcgccgagcgcggcatccgcgacggcctggcgaaggagctgcgccagctcgaggcggactacaacaaccagggcggcaacgccatctccgcgatcgaacagtcgctggagaacgcccgggtggggctgaagctccgccagcaggtggaggaatccgcccgcaaggcgctctccgacgccggcctggaactggagtggaccgcggccggctgggagctggcgcacgagcacgcggccgcccgctcggccgaactgcaggacgactcggaggccctcaaggagctgcggttcgaggccttcgacggccacgcgacccggaagcgtgagctcgcggcggcccagcaggaactcgtctcgctgaaaacacgcaagtccctgctgccgccgtcgagcattgaaaaccgcagcgccatcgcggcggccaccgggattcccgaggaacggatgccgttcggcggcgagctgatcgacctcgccgaggggcaggagcagtggcgcccggccgccgagcgcgcgctgcgcagcctcgccaccacactgctggtcccgggcgagcacttcgccgccgtcacccggtacctcaacgaccactcggtgcgcggcgccctgcgcgccgtggacgtctccaagcccctggccggcggggcgctggccgtggaggatgtggccgacggcgacctgctcaccaaactggacatcctcagcaccgggcccagcgccgacgccggcgagtggatccgggagcggatcgccctggacttcgcgtacccgtgcgtcgaagacccggaccagctcgccggcctggacaagggcctgagcctgggcggagtggtcaagcggaaccgccacacggtggaaaaggacgaccgtttcaccagccggcaggactacgtcctcggcttcgacaacgccgccaagctggagctcgtcgcggcccaggtggaggacctgcagcaggaactggcgaaggccgccgaacttgcccagagccgggaggaatcgcaccaggggatgacccggcagctggaggccctgcgccgggtggccgaggaccaccggccctgggagcaggtctcggccgctgtggccgcggacgaactggcccggatcgagcagcgcctcaaggacgccctcgccgcgcaggcggacctcgaaccgctgcgtgccggcatcgaggcggcccgttccaagcaccagtccagcaccgaagccgcggccgtgctgcagagcgaatacaaggccctcgactcgcagctgtcggctgcggactcgctgctggacgccgcgcgggcccgcctggcccagtcgccgccgtcggacgccaccgccacggcgctggaacagtactttgcggatttcggcggcgtcggcgacgtcacggaaatgcacgagctggacaacctggccaaccaggtccgcgcccggctcctcgccgagctgcacaccgccgaatcccgcggccaggccacctcggagcggctcacccggattttcgagggctttgtgcgcgagtggggcacctcgatctccgcggaccacggcacctcgatcggcgccgcaggggagttcgaagcccgctaccacgccattgtcagcgacggcctgcccgcgcaggaggccgagttccggcagttcttcaaccagcgcacccacgagtcgttcagcaccctgctgcacctgctggacgaggaacgccgctccatcaccagccggatcctcccgctcaacgggatcctctccgaggtgaacttccatgagggcagcttcctggaactcgacatcaagcagacgctgcccgccaccgccaagcagttcaaggacgccatccagaacgcgctcaaggtgcggcacacgcgcccgggcaagacggccagccccccggctcccggggctgaggcggacgacgacgccgagctcaccaaccgctacaagtccctcgaaacgctggtgaagcggctcggttcgcagactccggaggaccggcgctggcgcgccgaagtcctggacgtccgcgggcacctcttcatccagtgcaaggagcaccgcgaggtccaatcggccaaggccggccaggccggccaggccggcaagaacggagccggcaaggccggcgcggtcaaaaccgaggtctttatgcacgcggacaccggttcgatgtccggcggcgagcggcagcggttcaccgcgttcatcatggccgcggcgctgagctaccagctgggcatcgccgagcagggcttcaccacctacggcaccgtgatgatggacgaggcctttgtgctggcctcggaggaattcgccggcgccggcatcaaggccctccatgagttcggcttccagctgctgctggcggctccggaaaacgtgatcgacctgtcccggcacctcggctccgtcaccgagatcctgcgcgacaagcgcaccaaccgttccggagtgctgacggccccggtcatctcccccgggtccgccccggagggcacgtggcgctccgaggcgaacccggtggacatcgtcctgcgctga

SEQ ID NO: 48824 - DNA, 1455 bp, Burkholderia sp. Bp5365; identical to SEQ ID NO: 45650

SEQ ID NO: 48825 - DNA, 645 bp, Burkholderia sp. Bp5365; identical to SEQ ID NO: 43006

SEQ ID NO: 48826 - DNA, 3378 bp, Burkholderia sp. Bp5365; identical to SEQ ID NO: 45652

SEQ ID NO: 48827 - DNA, 1248 bp, Burkholderia sp. Bp5365; identical to SEQ ID NO: 45653

SEQ ID NO: 48828 - DNA, 1479 bp, Streptomyces bungoensis
ttggactacgaccggttggttgcgttgcgcaagcagagcgcagcgtggcggctgctgacggccaacaatgcggcgttgatgctgagcttcctcaacaaggtgttcgtcgagcagggggcgcgctcggttgctggtgtggaacttgtcgagcggctggatgacgagttgttcgcgctcaatgagcggctggggcacgggacgtttccccagtccgccaaggcgtatctggacgactgggcggcgccggggaacggctggctgcgcaagtattacccgccggattcggacgagccgcactatgacgccacggccgcggtcgagaaggccatctcgtggatcaggtcacttgaggagcgttcgttcgtcggtacggagtcgcgcctgaatacgatcttcgatctcttgcggcagatgacgttcgggacggaaaccgatccggaggcgcggctggctgaactcgcgcggcgccgtcacgaaatcgacctggagatcgagcgagttgaggccggagaggtggacgttctggacagcgcggcgctgcgggaccgatatcagcaggtgaccgatacggcgcatgggcttctggccgacttccgtgaggtcgaggcgaatttccgggatctggaccgcgatctgcgcagcaagatcgcggcttgggacggggccaagggcgaactgctggatgaggtgctgggcagccgcgagagcatcgcggagtcggaccagggccggaccttccaggcgttctacgacttcctgctcgcgccgagccgtcaggacgagctcaagacgctgcttgccgaggtcgaggcgatggaggccatcgacgaacccgatccgcgcatgcgacgcatgccccgggactggctggaggccgccgagcgcacccaggccaccgtgcgacagctgtcggatcagctacgacgattcctcgatgaccaggtgcgctcggaagaccgccgtgtcctggagctggtacgcgcgatcgagacccacgcactggcgctgcgagacgtgccgggcgtggatctggtcgccgagatcgacgcagcgaccccggccatcgctctgccgatggaacggccgctgtatacgccgctggtcaagacaccgatcgacagcaccagcatcgaagcgggggacgaggagttcgccgccgacgcgctgttcgaggcggtctacgtcgatcccgcccggcttacggcagccgtccacgacgccctcggcgcgcgcacgcaggtgtccttggccgagactctgcgtgagcaccccctggagcaggggctcgccgaactggtcgcctacttcgcgctgcccgacgacgggttcgccacggtcttcgacgaccaccgccaagaagagatcacgtggatcggcgaggacgacgtccagcaggtcgccaccgtgcccgtcgttaccttcgcccgcatcaaccccggcatcgcctgggccaccgaccagaagaaggaggggcgatga

SEQ ID NO: 48829 - DNA, 624 bp, Streptomyces bungoensis
atgacgacgccttccacttccgccccacagccgtacaccctctccttgccggtcaaccagctgctgaagggtccggtcttccgtgaccagcacgagcgggcctgggacgcgctggtgcacctgagtgctcgggtgaaggactacgtcgaggtcatggggctgcgcgtggtgatcgacgaaatggagggctacgccttcctgcagtcgatgcccgacgacgaggacgctgtccgggaccctcgcatggcgccgccgcggttgattccgcgccgttcactgtcctaccccgtcagcctgctgatcgtgctgctgcgcaagcggctcgcggagttcgacgccggcgccgacggcacccgcctcatgatcacccgggacgagatcgtcgagatgatccgcacgttcctcccggccggcagtaacgaggcgcgcctggtcgaccagatcgatggccacatcaacaagatggtggaactgcagttcctgcgccgcgcccgaggacaggagcagttgttcgaggtgcagcggatcatcaaagccttcgtcgacggacagtggctcgccgacttcgagaccaacctggcccagtacgcagcctcccacatcgttcaggagaagacgcagtga

SEQ ID NO: 48830 - DNA, 3414 bp, Streptomyces bungoensis
atccccgttcagtctggccctgccgacccgcccattcccgccaccttcgccgcggccgggtttcggctggagcgcatggaggtctacaactggggcacgttcgacaagcacgtgtggtcgttcggcctcgccggcgccaacgcgctgctgaccggggacatcggttccggcaagtccaccttggtggacgcgatcaccaccttgttcatgcccgcccgcaagatcgcctacaaccgggctgccggagcggagagcggcgagcgcagcctgcgttcctatgtgctgggccactacaagtccgaacgcaacgaagagaccggagccaccaagccggtggcgctgcgcaagcccggcagctactcggtcatcctgggcgtgttccacaacgccgcgctggaattgaccgtcacggtgggccaggtgttctggctgcccgacgccaacgccaccagccccgaacggctgttcctggtcgcggatcgggccctgtccgtggccggtgacttcgcggacttcggcaccgaagtgcgagccctgaagaagcgcctcgaagctagcgatgtccgtgtccacaagtcgttcccgccctacagcaaggacctacggcgccggatgggcatcgagtccgagcaggccctggagctcttccaccagacggtgtcgatgaagtcggtgggcagcctggacgacttcgtacgcagccacatgctcgagccgttcgatgcggccgcgatgaccgacaacatcgtcagccacttcgacgccctgaccaccacctacaactccgtgcagcgggcccgagcccagatcgaagccctcaccccgctgctcgcggacttcgacacctacgagagcctggccgcccggatcgaggaagccgatgccgagcaggctgcgctgcggtacttcatggccgcgcgtacggcggttctccacgaggcagaacgcgccgagctggaacggtcgctgatgcgtctggagggtgagaagaaggctgcccatgaggagctggagcggctgcgcggccaggaacgccggtgggaacttgagcgtgagggcctgggcggcgggcgccttggcgaactggaacgccagatcgaggaggcggagcggctgcgcatcgcgcgcgaaaggctcgcccgccaccacgcccacctgctggaacaggccggactggctccggccagtgatcaggcccagttcaccgaccgccttgaggagatctcccgggcccaacacgacgtcgccgcggacaagaaggagacgcgagcggccctggagaagctcgccgttcaggccgatcgccttcaccagcaggcccaggacatcaatgaggacctggtcagcctgcgttcccgccgcagcaacatcccccgcaaacagcttcaggttcgcaccctcctgtgccaggaactcggcatcgaagagagcacgctgcccttcgtcggcgaactcatccaggtccgcgacgaagaacagacctgggcgggcgccgccgagcggctgctgcgcggcttcgcactgtccctcgtcgtcccccaaggccagtacgcccgcgtctccgagtggatcaacgaccaccacctgggcacgaagctggtgtacttccgcgtccccaaccacaccccggcccggcgcacccagccggccccttcgaccgcgttgttcaccaagctcgaaatccgcggcgactcgcccttcgccgagtggctggccggcgaactcgaacgccgggcctcgcacacctgcgtggccaccatggacgacttccggcaggccgaactcgccatgactgcaaagggattgatcaaggggacgcggggccgccacgagaagaacgacaccacccgcatagacgaccgcagcacctacgtgctcggctggacgaaccaggcaaagatcgacgccctcctggaccaagccagcaaagtccatgcagcccagtgcgagacggccgacacgaaacgcagcctggaagccgcccacgaggatgccatcagccgcgacaaggtcctcgaccggctggcggccatgggggagttcagcgagatcgactggccttccgtcgtgcggcacattgccgagctgaccgaggagaagcagcgcctgcaggccgactccaaggacctgaacgaactcacccgccaactggacaagatcgccgctgagatcaagcagcaggaagcggcctacgcgagcgcgaccgagagctggggccgcatcgacggggaacgggacgccgccgaacgcgcctgcgacgaagcacgcgtcatcctcgccgagccggccgccaccgacgcccaggcccacttccccgccctcgaacaacgcctgaacgaagcccgactcacctgcgccaccgccaaggagtgcgcccgcgccgagacccggctgcgtgaggaggggacggcgcgaaagaaccggtggagcaaggagcagacccgcctcgcccaggcgatcgcctcccagatgcgcaccttccgcaccgactacccggccgagaccaacgagctcgacgactccgtcgcctccgccgccggctaccgcgccctgcaccgccagctcgtcgccgacgacctgccgcgcttcgaagagcagttccgcacctacctgaagaccaacgtcatccgcgaaatcgctggattccacgcgcagttgaataactgggccgatgagatcggcgaacggatcaccaccatcaacgagtcgctggccgacattgactacaacccgggccgctacatcatgctccagcccgagaagacccccaacaccgagatccgcgacttcaccgccgaactgcgcgcctgcaccgacgacgtcctctcgggtgacgactccgacctgtactcggaagagaagttccaccaggtccagcgcctgatcgaacgcttcaagggccgcgaaggccacacggatgccgaccgagcctggaccaggcgcgtcaccgacgtgcgctactggttcgtcttcagcgccagcgaacgccgccgcgaggacgacagtgagtacgaggtgtactccgactccggcggcaagtccggcgggcagaaggagaaactcgcctacaccatcctggcagcctccctcgcctaccagttcaagctcgacaccaccgccaacaggagccgcaccttccgtttcgtggtcatcgacgaagccttcggccgcggctccgaggaatccgcccgcttcgccctggacctcttcaagcgcctgggcctgcagctcctcatcgtcaccccgctgcagaagatccacgtcatcgagccgtacgtgtccgccgtcggcttcgtcgacaaccccactggacaccactcccgcctgcgcaccctgaccatcgcccagtaccgccgagaacgcctcgcccacgccctggccgccggacagcccgccaccggacaggaccactga

SEQ ID NO: 48831 - DNA, 1185 bp, Streptomyces bungoensis
atggcggccacctccacccccacctggaccacgccccgcgacgtcgccgcccgcctgcgcaaacgctgggagcgcggcgagttcctcagccagctcgccgacggtacggacttcgacccactcgccatccccctgcgcggtccgaaggccggcgacatcacccagcactacgacgacgtcctcgcatgggccacctcatgggcccccgacaaacaccggcacctgcgcatcgagtaccggaagctcggcggacgcctagccggcgtgaacaacgcccccgcccgggcctggatcgaccaccgcgacgacctgttccaactcctcggcgtcaccaacacggtcacccgctacacgtccctcctggccgccgcccgcgagagcctgcccccgctggccgcgtggatggccgagcacccgatgaaggtcgtccagcgggatgccgactggccccgcctccaggccacggtccggtggatcaccgactaccgcggcccggccgtctacctgcgccagctcgacgtgcccggcgttgacaccaagttcatcgaacaccaccgtgccatcctgacgaccctgctggagcactgcctgcccgagaaccgcatcaactccgaggtcgtgcgcaccgacttcgccgcccgcttccgcttcctgcgcaagcccgtctacctgcggtttcggctcctcgacggcgcgtcagtggccggctttcgcgagctcacggtccgcgcggacgagttcaccgcgtcaccgcccggcatcacgactgtgtacgtcgtcgagaacgagaccacctacctcgctttccccgaccaacctcacagcatggtgatccacggcggaggctacgccgtcacccaactagctgctctgacttggctgcacggcacacgcctcgtctactggggcgacctggacacccacggcttcgccatcctcgaccggctgcgccgggccttcccgcacacacggtccatcctgatgaatcgggatgttctcctggagcaccgaggtcagtgggtgaaggaggacacccccacccaccagcacctcggcacgctctcaccggacgaagccgatgcctacgacatcctggtgtccggagagttcggctccaaggtgcgactcgaacaagaacgcgtgcggtttcacctactcgaagaagccctcaacgagctccgctga

SEQ ID NO: 48832 - DNA, 1461 bp, Serratia fonticola
attagtttctatgagttccaagccagattccggcgtatctatcaggaaaatattgcctggaagttattgcgcacggataacgccccgctgatattggctttcgtcgccgatctgttcagtgaagaaaatgaggtgccctatgggcgtgcccgcattctgttggatagcattttagaacagtgccgcctccagggcatttggatcaccgaaagcccggcgaccagctatctgaaccaatggatacaggcagggtggttacgtgagttggatggccaactgaccaaaaccgatgcctgcgaaaccgccctacgctttagcctctctttagatcagcacaatgccaccaccacggcctcacatttacgcatcgtacaagatgcggtacgtgattttgtgatttctatttcccccaatcccgatcgccgtttggcggtgcttgagctgaagaggcgtgaaattcagcgtgaaatcgacgcggttaaggccggggtgatcgttgagctatcgccttctcaacaacgagagcgcttacgggaaatctatcagttggcttcggtgctgacgggggattttcgccgtgtcgaagacgaaatccgcaccatggataaagatattcgtatccagatgatcgagcagggagcaagccgaggggaagtgctattggcggtattggaaaaagaacaactgttgaccgagactgacgctggcagtgccttcgagggttttttccaattgttgtgcgatcaaaaccgcacgacggaatttcgcgagcagttacaggtgatcctgaatctcccggtcgcagaatcattaacggcccagcaaaaacagtttcttgggcaactgatgcgtgaactgagccgtgaaagtgaacgggtgtttctgatccgccgcaagaccgaagagagcctgcgtgcctatatcgaaagcggggcattgtctgaacagcgcgcggtggatcgcctgttggggcggctggagcggttggcgatccgcttcaaggaagaccagaacagcttgaaaatcagcacctcggtgcgtctacccactgggcatattcgcttttactcgccagatgcgctgctgctgaagtctcccgatgagcagttggatacctccggcgtagaagttcaaaccaacggcaatattcccagcgacgatatgctggactatttggacaccgtaagcatgctcgaagtggcgcagtgcctgctggatatattgcagcgcggtggccccatgacccttgccgcattggcgcagcatcagccgttagagatggggctggaagagttggttgcctggctgcgcgttgccaaggcggtgaaagcgacggagctggatgaaaaggaaacgataatggtgacggataaacaaggtgtgcaactgaatgcggtgatccccggctatctgctgagtgcggccatgtttcccgcgaacttgggggagctggcgctgtga

SEQ ID NO: 48833 - DNA, 813 bp, Serratia fonticola
gtgagcgaagataaagtgtcatcaggcgatttactggatcgtatgcggcgtttaagccagcttagcaaagagcagcgggaccgagctcccgagcctgaacccgtggcaaaacagccgcaagagcggctggatttggagctggatttgccagcaccagaggttgctgccgctgaacccgaggtaacgcaagctgataccgaggcgttagccccggagatccggcgtactctggttagcctgctgcgcgttggcgtcgtactggccacgcaaaagcccaagctgtttgaagccttatgtcgccatcaggccgttatcagtaatcacctggccaatatgtatctgcgtttattgctggatgaaccgagcggagtggcttttgtcctgcaacaagatctggaggaggatgaggagacagaaaccatttccctgattaaccgccgcaccttgtccttgtatgacaccttactgctgttggtactacgcaagcattatcaggagcgggaacgtgcaggcgaacagcgtgtgatcattgacattgagcgtatcgaaagccacctgacgccctttctgccgctaaccaataacagtaaggcggatagaaaaaagctgaattcggcgttagataaaatggccgagcgctatattttgtcggcgatccgtggcgagagcgagcgctatgaaattaccccggtcattcgttatgtggtcaatgcggcatttttggaggctatgctcgaagagtatgagcggctggctctgaacgcggaaacctctctggctaacaaggaggaagcagatgatggcgaagagtga

SEQ ID NO: 48834 - DNA, 3387 bp, Serratia fonticola
atggcgaagagtgaacaattgacgctggctggtgctgattgtgggcaaatcagactggctgagttatccgtctataactggggctcatttcatcaactgcatacggccgtcatcgatccgttgggcacgctggtgaccggggataacgggtcaggtaaatcgacgctgatcgatggcctgatggcgctgctgctgcccgcgggtaaagcctcatttaatattgccgcggcgcagggggatcgcaccgatcgttcgctggtgtcctatatgcgcggcagtttcggctcggagcatgacggggccaaaacgcgggtcaaaagcaagcgtgaagggccagtgcttaccgcattaagggcgttataccgtgccgacgatggctcttgcatcgtgttggcagcgctattctggaccaccaaacacagccacgcgctggcggacattagccggatctatctggtggcccggcgcgatgttgccttgaaagagctgttagatcgctttggtgaaggcaacgtgcgtggcttgaaccaatggttgaaagaagatcccgccattacgccatgcggcgataattttagcgattatcaggaaacttaccggcgctgcctgcatatggaaaataaaaatgctccggcattgctggcgcgggcgctgggtttaaagaaaatcgatgatttaaccgaattgatccgtgaactggtgctggaagccagcggtgttaaagacgatgcccgccgagtggtggatgagtttgccgatctggtggcaatccatgaacgtttgctggacgctcgcaatcagcgggatcacctgatcagattccccgatttagatcgtagcttgctcagcagtgaagcggagatcaagcggctgacggcccagcttgatgccttaccggtttacatgggggaatgtggttttcgcctgtgggatagccggatcaaagggttacaaaaccaactggacgcgctggcgttggagatcaggcagttggatcgcgatgagcaggaaacccaggaacaggttgaaaaaacgcataccgattatattaacgccggtggcgatcggatcgaaatcatcaaacaagagttggcgcaggctcagcgtcaactggaaagcgtgggagttaaagcctcggagtatcagcaagaggttaaagcgctggggctggagaccagcctgcgtgaaggggtctttctgcataatcaggcgatttcgcgggaaaagctgcaaaccattagcgatgaaaagcgcgcagctcaagatggatttggtgcgctgagcgccgagttggcaaacttgcaggggcagttgcgccaacttgaacaggaattggaagggatacgcgcccggcctgattcgaatatcgatctgcgtttccaacgtttacgtgacgaaatggtggctgccttggcgttgccacgtgaacaatgcttgtttatcggggagttggtggatgtcgacccggatcagcaacattggcagggggctatagaacgggcattgggcggtatacgcacgacgctagctgtgccggaggcgagttttcatttagtgactcgctggctgaatcagcgccataccgggcttcatgttcgagtgcaggtggttcgggaagctgtcgcgtcagcccagcccgcgttccatcatgatggctacctgcataaattaacctggcgcgagcatccttaccgcagctggctgcaacaccatctggcgcgttttgatttgcactgtgtcgatacggtcgcaaccctggatgccaccgcattttccatgactcagcaagggttgattcatcgcgaccaaggtcgttttgagaaaaaggatcagcataaggttgacgatcggcgggcatggcagctggggttttctaaccagacgcgtattgcgttgttagagcaggatatcaagtcatcaggcagtgagctgagcaaaacgcaaaaggcgctggaatcggctcgaatcgatctggatgaggtgaaccagcgggaggcgttgtggcaaaagctgcctcgctatcgttgggaagaaatcgatgctccgttatggcaaggcaaggttggccggattgagcagcagcttaatcagtgggtggcttcggggagcgatctccagcagtgtaaagcacgttgggaagaggctaagcagcgtttagccactttgcggggagagaaagaccgcaagaatgccagccaaggtgggttggataacgaaaaagccaacgcgcagcgcgagcaggacaaggctggcaaggcggcggagcctgggatggaggacgaggtgcgtcttctgctgcaacaacgagtcgggaccttggacgacgcggagttgtctcaactggcatttttggctgaatcacaccgcaagcggttggtgacagctcaggataaagccagcgatcgcaagaacaatgccctgagggaagcggtgggcagcatgtcatccttccgtaccaagtgggaaattatcgcaggcagttggggagctggtgtcgacagcctgcccgagtatttgcaacatctcgaacagttggagcgggaaggtctgccagccttggtggagcagttcaaagcacgtctaaataaacatgccacccagtcaatggtacgtattcgccaacgcatcgatgccgaacgcgatgatattctggagcggattgcgactatcaataaagtgctggctcgcaccgagttccgggccgggagctacttgaagttgggtaccaagaccgaactgtatcctcatgtgcaggattttaatcgccagttggataaggttttcgctcaggcaaccagtgacgatcatctggcccgctatcagcagctaaggctggtggtagggatcctcgagaaagccagcaatccggtttcttcggggacgcaagaaagcctgcgcctgttggatgcacgttatcaaatgtctttctttgccgaagagcgggatatggccaaccatgaagtgcgtgacgtcctgctatcttcgggtggtaaatccggtggggagaaagaatccttcgctggcactattgtcgccgccagcctggcctatgtgttgacgcccgaaggccaggatcggccggtttactgtacggtgtttctggatgaggccttttccaatacggcggaggccgtcagccgccgggtattgcaggtcttccgtgagttgcacatccacgtcaatattattacaccttacaagaacctcaatctggcgcgtgaatctgcgcgttcattgctgattgccgaacgtgatgccaagaaccatgaaagccgcctgtgtgaagtcacctgggcggaaatcgatcggcggttggatacggcacgccaacgccgtgcgcaaaacctgggcatcgaattaaccgaggttggccaacatggcgaatga

SEQ ID NO: 48835 - DNA, 1191 bp, Serratia fonticola
atggcgaatgagtgggggcgcttgcctgagcaggcttatgccttgatctcgaagcgtgaatggttacaccggggcaacttgaaagcccgccttttaggggaacgtccttttcccattcgcgtttcgctaaaaccaccgacgaatcgggcaatattagctgacctggcgcattttcagcgctacgtcggtgcctggcggcaatttccgcaccagcaatggcttgagtgggaggagcgtaattatcgaacgttgggaagccagcgggtgccgctggcgttggtgcttgaggatatcaccagcttgctggcttatctggggaaagaggcgcaagcccgcagcgatagctgggtacgaaatatggcgccattattggcgatagagtccaaattgtacccggtactggtgaattatctggagttgttagcttcgttgtcctcaatagatattcagcggttgcagcagttaattcctcagctcaaacccggcatggggaatgggcagtatctacgtgctttaccgctgcaaggcgttgataccaaatttgtcgagcaatatgttcgcttgattagcgatctgctagattgcctgcatgatggggcgatcgcagcacaaggtggtttggctaactggctggatgtcaaaggcaatcataaaggctggttaacggtacgcccgctatgcgccgcggctcaggccgggttggggggattagggttgttacagttaacggtggatgagttgcgccaacagccgttaccggccaaacatattctggtggtggagaacgtgcagtcaggattgggattgccctttatggcagatacgatagcggtatccggtggaggcaaaaatgtcagttggctggatgctccctggctagccgataaacaggtcgcatactggggcgatatcgactcgtggggattgcatgttttgagtgatgcgcgcagcaaattgccacagctgacggctctgatgatggatcatgccaccgtgatgcgttattcagcgatgatggtagaagaggtctcttcgatgactgcaatgccaacgcacctgacggtggaagaacttgcgatgtttgaggcgttgatcgcgggaagttacccaggaacgcgtttggagcaggagaagctggcgccggattatatccaacagcggctgaatgaatggttgagcagtttacagtag

SEQ ID NO: 48836 - DNA, 1446 bp, Mycobacterium pseudoshottsii L15; identical to SEQ ID NO: 43816

SEQ ID NO: 48837 - DNA, 696 bp, Mycobacterium pseudoshottsii L15; identical to SEQ ID NO: 43817

SEQ ID NO: 48838 - DNA, 3393 bp, Mycobacterium pseudoshottsii L15
gtgcgccagcagaggaagaagaacccgaaggtgactgaacagttccacctgtctcggctgcaggtcatcaactggggcgtgttcgacggctaccactcgatcccgttcagcgtaggcggcgcactcatcgccggagcctccggcagcggcaaatcgtcactgctggatgcgatttcgctgggattcctgccgttcaaccgccgcaacttcaacgcgtccggagacaacaccgccgccgggtccagcgccgggcgccgcactgtcgacaagtacgtccgcggcgcctggggccagcgcagcgacggcggcaccagccgggtgatgtatctgcgcggcgacggcaccgcctggtcggccgtggccgtcacctacgccagtgactccggccgcaccgtcaccggcctggtgctcaaatggctgacaggcgagtcccgcaacgactcgtcgagccgcttcgtactcggtgacggtgacctcgacatcgaggaagtctgcaaccgctgggcctccggccgtttcgacgcaggagtcttcaaagaagactggcggttttccaccaaggtcgaatcgcagtacctcgcccagctctacgcggcgatcggcattcgcgcgtccgacgccgcccagcagctgctcggtaaggccaagtcgctgaaaagcgttggtgggctagagcaattcgtccgcgaattcatgctcgacgaacccgacagcctggcccggctgcccgaggcgctcaagcagatcgaccccctggtcgaggctcgcgaactgctggccgttgcgcagaagaaacgcaagatcctgggcgacatcgaacagatccagcagcgctacgcctcggagtcctccgacctcggcatcatcgacctcgtcgacgcgccgatggtgcgcgcctacaccgaccacgcccggcttgcgcaatgtcccgcccagatcgccacgctcgacggcaccgtcgaccagctcgaaaacgaatacgaggacgttacccgcagcctcaatctggccaaggccgaggcggattcgctcaacgcgcagatcagcggttccagcgcgaacatcgctccgctgcaatcgcaggtcaccgccgccgagacccaggccgagcaggtggagcgccgccgaacgacctacgaggacatgctggccgcccagggtatcgaaatacccgacaccgcagacgagttctggaaccttcgcgaggaactgctcgcgcaggccaccgaactgctcgccaaggtcgaacgaaaccgagaggcatccaccgacgccgagtacgcgcagaaggctgcccgcatcgcccgcgacgatgtcgccaaggagctcaagcgcgtcgaacacgtcggttcggcgctgccggagttcgcgctcgcgatgcgcgaccacatctgcgctgcaatcaaagtcgacgccgccgagctgccctacatcgccgaactgctggatctcaggcccggccagacccgctggcgcctcgctgtcgagaaggtgctgcgcggggtgggcttgcggctactggtgcccgaccagcattgggagaaggtgctgcggttcgtcaacgagaccgacatgcggggccgactgcagctgcaccacgtgcgggcgaagttcctcggcgccgaacctgctgagcccgagccgaacacgttggcgggcaagcttttccccgtcgatccgaagcatctttgtgccgccgaagctgtcgacgtcatcaccggagccggcgaccatgtgtgcgtcgatactcccgacgtattctcgcggttccgccgcgcggtcaccgacacggggctgtacaaggactccgaccggttggccgtcaaggatgaccggcgaccggtcaagctgtccgagtacctctaccagggcgacgtcaccgcgaagatcaacgcgctgaccgtcgagctggcggccgccgaggaggcctatcagaaggcccgccgcaccgccgacgacatcgccgcccagcgccagcagtggcgcgaccggacggcggcgtgcaaggcgatctgcgagcaatacccgcagtggagtcagatcgacaccgagaccgccgacgggcatgccgagcggctgcgcgagcagtacgaactgctgatggccgacaatcccgacatcgcggcgctcaacgcccgcgccgacgaatgctggtcgcagattcagaaactgatgacgcgccgcggcgcgatccagacgcgccgcgacagcctcgacgagcggcgcacccggctgctggagctccaggagcggctgtccccggcgttcgtgtccgagccgttgacagagctgctgcagcgctacgccgcgcagctgcccgtcgcgctagagctgcttgacccggaacctcaccgcgatgcgctgttcgccgcgatcaagaaggaacgtgaacaactgcgtgaaagccgccgtcgttcctatgacgaattggcccgcatcctgaacacgttcgacacgtcgtttcccgatgcgattccgaatgactccgacgattttgacgagcgtgtgcacgattacgtcgcgctgtgccgccacattgacgaacgcgaacttcccgaagcctacgagcggatgatgcggctggtcaccgagcaggcgcccgatgcgatcctcacgctgcaccgtgtcgccgagcaggaggcgcgacggatcagcggccagatcgaccgcgtcaacacgggtttggcggcggtggagttcaaccgtggcaccaggctgacgttgcgggcgaccccgcggcacctggtagcggtggatgagctgacccagatcgtgcggtccatctcgcggcgcatcgccgaggtcgggctgggcgacaagcaggcgatcctcgaccagtacgccgagatcctccgactacgcaaccggctggcctccacggcgccggaggacaaggcgtggacgcgcgacgcgctcgacgtgcgcaaccggttcacgttcgactgcgccgaatgggacgtcgacaccgaggaactgatccgcacgcacagcaacgccggcgacaactccggtggcgagcaggagaagttgatggcgttctgcctcgccggcgcgctgagcttcaacctggccagccccgaaagtgacaacaacaagccggttttcgcgcagctgatgctcgacgaggcgttctcgaagtccgacccccaattcgcgcagcaggcgctgcacgcattccgcaagttcggcttccagctggtgatcgtcgcgacggtgcagaacgccaccaccatcgagccctacatcgacagcgtggtgatggtgtccaaaaccgaacccaccggcggcaacgcgcgaccggtggcgtcggtggcgaccaggacgatctcggagttcacgtcgctgcgacaagagatgcgcaagacggcggaacgagtaccagccggggtgtga

SEQ ID NO: 48839 - DNA, 1407 bp, Desulfosporosinus sp. BRH_c37
atgggacttttcgatgtggtaccgagcagttttttttcggtattagtatcaggaaacagagaagtatatgttgacgcgctcatgcttctgcaccagctgttcaaattcgagctaaacattagggtggatgattatatttcgtcattaatttccctattggaggacaaagcttttgttcccgaagatgatgatgagatgccggaaagcagcctcacgcccagtggaaaagcccgtttgatactaaatcgttttgtcaaaacaggctgggtcgacaaagagtttctcgacggctcatttgttgaaattattacgccccgtaattacgccatatccgtcatgaagctgctcagtgaacttggcgacaaatcgctgcatgaatacaattcgctcgtttttgccacctattccggcttaaaacaagcaaaaaatgaacatgaatcacaaatgtatgaggctgttttatcggcgaaggccagcactgaacggctggaatacgagttgcgcaggctctatcatggaattcgtggatttttacgcagcattcaggagcagaataatgtaaatctgctgctggaaaatcactttgaagaatacaaaaggatgtcggacctaatctatcatccgatcaagacgatggattccatccatcgttacatggctccgattcaaaatattttatccgatatactggcagatgagaaactcatgggtatcatgcgtgagagggccatgactatcaaaaagtatgatgatggagccgaggcggaggaagaaatcatatcggcaattgattatgttctagacgcttatcaatctgtgggtagcatcataaatgagatagacagaaaacacagtacttacacaaaaagttctattgaaaaaattcagtatcttatgaccgccgaccaaactatcaaaggtaagctcgtcgagcttttaaaaacttacgctgacgcaaagagcgaggatcgcaacgcattgggtgacatgtttgaaaagaacattcggattaaccgtcaggagtttgtggacggcaagtcactttatcataaaagtgtcaggagccgacgtgtcaataccacgccgcttcctattgatcaggacaataccttctctgatttggcgatggccggtatgctggagcagatgaaaaatggatatccagttgcgaggattcgtgcctatgttgataggctcttcgcccatggagcggaatccgtaaggagcgaagatatacgactaaacagtgacgctgattttatcctcctgattttagctattgttcgcgctaacgacaggggaatgacttatcgggtgcggatgggagagggacgaatcgagcgaaacggataccgcattcccaacatgatcatcagtaagaaggagggcaagcgccatgtggaatga

SEQ ID NO: 48840 - DNA, 642 bp, Desulfosporosinus sp. BRH_c37
atgtggaatgaacaattcgaagctttatccagttatgaaaggggagagttccgcagattggccaactatttactatctcatacctacatggtgagatacgagtatcaaccttcccagcagatgaccttgcctaacgctgaatatcagatggccgcgcggctttttcctgtgctgcgggattactttacagttacgggatggcagcttgagaaagatgacaactacggaattatatcgttgttcaatatatacgaccacaatcgattgcgaattgatcgctttacaacattatttctctacacttgccgcctgatatatgaggagcagcgggagcaggccagtagcttccatatggtgaaaaccgacacacaaaccgtggttgagaagatgcggatgcttggcctgctcgataagggcaaaacgacgcaaaaagagcgaatcgaagcccagcgcactcttgggcattataatattattcaaaaaatggagtcggttgcgtggagcaatgacgggaatgaagtattgattttaccgtcaattttgtcaattatttcgaatcagggcattaacgatatgctgatggaattggaagaaatgcgtgttgatggctctgatgaatcagggcaagaggattcggaatga

SEQ ID NO: 48841 - DNA, 3399 bp, Desulfosporosinus sp. BRH_c37
atgaaaaagatgaccaagctcctgctgatccactggcattatttcgtacgcgagatggtggaatttgatcaattgaattttttaacgggcaaaaatgcttccggcaaatccacaataattgatgcgttgcaattaattctgctgggtgataccagtggcggcttttttaataaagccgctaatggacggggtaatcgaaccctgaccggatatctcaagggcgagttgggcgacgatgaagactcgggtttcaaatatctgcgcagcggacggtttaccagctatatcgcggtagagttttttgacgaggagaagaaaaggagctttaccgtcggttgctgctttgatacattttcggaaaacgatatgcagaagctgttcttcttgtatgacggtgctatacccgacaatgagtttgttgagacagggagtcctatggtgattaccgcgctgcgtgcttatttgaaagagtattttgccggacaccactccacgaccgatgttgggagagatttcaggacaaacctgtatggtaaactcgggggcctgcgtgaacgctttggtcagttactaaaaaaagcagtgtccttcaatccaaatgttgaaattcaacagtttatttccgaattcgtatgcgatactcagcagactgtagatgtaagccgcatgcaggaaaatatcagaagttacaaaagcctggaaagcgaggctgatgtcctaaaaggcagaatcgcattgcttgaccagatactaactatccatcaaagttttacagtccatcggcaaaatgaaacgctgtactcttacctgatagaaagctctcaagcggatataaaggcaatagaactggaagcggccaaggataaagcaaaaacctatgacgctcagctatccgaattaacggaaaccatcaacgccgaaactgcacgccttagtaaacttcaggaagaacgcgatatgatgcaggctaagctcctgaacaacgagcaggcgcaggctctactgcttattgaaacacaaattgcggacaaggagcaacaaatcagcgctttgcgtggagaatatgataaggcggttgccattctgtctaaatgcgtatcatcctggagaatgagctcctctgctatgctacaaaagataggttccatagaaaaagctttactcgatccattgcttgtttcccgcatcaacgatctgtactcagaagggcaagctttcttaaatcgaattgagtcactgccccgaattgactccgctgtaatcttagagactggtcaaaagggacttgatgaatatgccgcactggccgatttgctcaaagtgcattctatagaactagcctctcgtatgggagaggagcaagggacacttgccgaacgtcgaacaatgctccagcaggaaaaggaatccctggaaagcggaatctatcgttttcctcaagatgtgaccgatttgaaagaagcagtctcttcccgcttgcgcctaaatactggaaaagacgtaaaagttcttatcgttgccgaagcagctgaaattaaaaaagaccgttggcgtaatgttattgaaggatacttgaatacgcaaaaatattacatcattgttccgcgggagcactttcagacagctctacgtgtttttgacgccattaagcgccaaaggcaactatatggtacaggtatcattgatattgaaaaaatgaaacatattaagccaacagcagacccgggaagccttgccgaggagattgaaacggacgagccggatgtccgcttgtttctggactacacgattgggcgggtaaagaaatgcgatcgcgtgggcgatttaaggcgctttcgtacatctgtgacagacgaaggtatgatgtatcaaaattttgttgtccgggcgatggacccgaaacgctggtcaaagccggcgattggtcagggcgctatacagaggagattagaagacgttaaaaaggagatggacgtattagtacagcaaatagccgcatgtgccacgataaaaaccggtctccggctcagtagtacattggtcgcacttagccaagcagagattgagcatgccatttcctcggcaaagggtgtatcttccgtgaaggatttagagaatgatgtgaaatctttgcgcgaaagcctcgcgaccattgataagagcgcggtgaaagcgttgaaagatcggatcaacactcttggacaaatgataaaagagctcggcaatcgacttgatactcataaggacgaccgcagtacacaaaacgagcggcttcgtgtttgtcgggatgaaaccattccaaagcttacaggcgaattagagacattggaagcggagcttacaagaaagtacagtgaagaatggctggaaaacaccggccgcttgagatatcaacgagagttatcttcccgaggcaatgcagaggacatcaaccgggcattcccacgagagctaagtagatctacaaacgcacgtgtgactatgtgggaggatctgttaaatttacgtcgcacttacaacgaaaaatatatcatgggctatgatatcaaggcagaagataatgaagtatatgataatgcctggcttgaactcagcgaaaacaaattacctgagtatttgacgagaattgaggatacacgcaaaaaggcctttgaacaatttcaggaagatttcctcagccgtttgcagaacaacattaatgacgcaaaacgccagattgacggacttaacagcgcgctgagcgggagttccttcggtgaggatacatatcgatttcgtattgtgccaaaaccggaatataagcgctatcatgatatgatcatcgatcccatgctcatcgagggtggatataatctactttctgagcagttcaatgcaaaatacaaagaagaaatcacagagcttttcgccatcataaccaatgaaggcgctcctgcaaaggtacgcgagcatgacgattacgagaagcgcgtacaagcatttaccgattaccgaacttatttgtcctttgatttggaagtcgtaaatcgcgacggcgaaacgcaaaggctgtcaaagacacttggcaagaaatccggaggagaaacgcagacgcctttctatatcgcggtgctggcctcctttgcccagctatatcgaatagggagagacaaaaactctagtacatctcgtctaataattttcgatgaggcattctctaaaatggacggggagcggatcgtccggagtattgagcttttacgtcagttcaatttccaagtggtgctttccgcaccacctgataagataggagatattgctactctcgttgacaggaatctgtgtgtacttagagacggaaaacatgcctgtgtcagaagccttgaccccaagcggcttgaggaaatagagtatgagtga

SEQ ID NO: 48842 - DNA, 311 bp, Desulfosporosinus sp. BRH_c37
atgagtgataagattcaacgacaattgctgtcagctctgctggacaagtatgagcgcagcagctttttccgtgaaggaacacagccaacccggagaatcatgctgaaattatatgataacgggcagtctgattttccacagtatgatattgagcaaagtgagaagcgcgttttagtgaatcgcgtggtttcgtcaatggcggagaagcggcttgtcttctatcaatggatgaagggcgaagaaaatcacattatcgcacagatatggctaaacattgaaaacttgcctatggcctacgaatctgttggacg

SEQ ID NO: 48843 - DNA, 1473 bp, Gracilibacter sp. BRH_c7a
atggcacagcaaaaaactgagctcttagatcatatgtcttttgaattcctagagttattacgaaagaaaaatccagcttggcgtttgttagcctcacctcaggcgcctttcgttgcggcctttctttataaagaatttattgcgcaaaacaggcggcagattgcggaacaagagctgattagccgtttggaaagctatatcgattttctaagtcaagggcggagtgatacgctttttccccgtacaggacgggaatacctggatgcctgggccaatgatgagcatgggtggctccggaaattttatccccagggacaggacgagcctcactttgatataacctccctggcccaaaaagccattgagtggcttctgagcctaaggcagcaagctttcatcggcacggagtcgcgcctgataaccgtatttgaactcctgcaccagattgtggagcgttcggaaacggatcccgaattgcgcctggcggagcttgaacggcgcaaagctgaaattgaacaggaaatcatccgagtgcaaaacggacaagtggagttgttcgatgaaacacagattaaagaacggttttggcaagccatgaccacagcccgggagatccttgccgatttccgagctgtagaacagaatttcagggaattggatcgcggtatgcgggagcgaattgccacctgggatcggggaaaaggagagttattggaatcaatctttgaggaacatgacggaatcgcccagtcggaacaagggaaaagtttcgcagcattctggaaatttttgatgtcgtcatcctatcaggatgactttcaggatacgctagataaagttttacaattaagacccgtgcaggaaatgggtattagccgaaatatcaatcatattcattatgactgggtaaatgctagtgcccatgttcaagagacggttgcggctttatcgcaacaattaagacgatatgtggatgagaattttctggaagaagaacgtcggatcaatcagatcgtgcgggaaattgaaggaaaagctgtatccgtacgcaataaccagcctaaagcatgggaaatggaaatcgacggtgtaaagccggaaattctattacctttggacaggcctttattctcacctcctcagcggcctgagattaaagatgatacagttgatgcaggcgatgaggatatatcggcggaagcacttttttcccaggtttatgtggataaagaaaaattgacagaccggatcggctacatgctgcagacccaggatagaattaccttggcgcaaattattgaatactatcctttggagttaggactgagcgagctgattacctatctggtcattgccggtgaaaatccgcaggccgctttccatcctgaagatttggaaaaagtgttctgggaagatgaaacgggaaagaaacgggtggcaagcatagctaaggttatttttcaacggtcttaa

SEQ ID NO: 48844 - DNA, 600 bp, Gracilibacter sp. BRH_c7a
atgaataatttagatgatttagcattttcgcgtgctttggtggcactcttcaagaatgttgtctttaaagaagaggagcaggaacactgggaaattattacgaaaaagaaaaatgatatagaagactatgtaagcaaaataggcctgacgctgatcgttgatgaaatggacggttattgctatttaaagcagcgttcttatggagaaggggaggaggcaattccacgcttggtgccccgtcatgccttgagttacccggtgagtctactgcttgtactcctccggaagcaattgttggagttcgattcaacaacgggagaccagcgccttattgtaaccaaacagcagattgcagagaggatgagtatattcttgaaggataccacgaatgaagccaaactggtcgctgatattgataaacacattgaacgcgttgaaaaaatgggattcttgcgccgcctgcgaggtagcgaggacaggttcgaggtgcagcgtatcctccgtagttttgttaatggagagtggctaaataattttaacgagcggcttgaaatgtaccagcattatgctaacggtggtaaattgaaagaaggggagtag

SEQ ID NO: 48845 - DNA, 3408 bp, Gracilibacter sp. BRH_c7a
atgagtttgtttaacctggagcaggatgatcccggtatgctcttcgggaagacaccagggtttcgtttacacaagcttgaagtatataactgggggacctttgacggcaaagtctggactttttctcctagcggggaaacggcactattaaccggcgatgtaggttcagggaaatcgacccttgtcgatgctttgacgacgctgttggtctcgcccaggaaagtggcttacaataaagcagccgattccagtgctaaagagcgttctatcaactcgtatgtccgaggatatttcgggcagaaaagaagtgaagctggagcaggacagcctgattccttgcgggatattaatcattattccgttttattggctacgtttcaggatcaagggctatcccagtgtatcacgttggctcaattcttctggtttcaggatccccagaaacttcccgcccgtttttatattgtggccgacagggaaatgcggatttcccaggacttttccaagtttgacaaggatgtccggttgctgaaaaaacgcctgaagaatagcagcggggtacaggtgtttgaggactatacccgttatgcagaatttttccggcgcaagctgggtattgaacaggaacaagcgttggatctattccagcaaacgatttccatgaaaaaggttgaggctttaaccgatttcgtacgggctaatatgctggaaaatccgaatacggccgatgatgtcgagaagttgatcaagcattttcatgacttgaactctgctcatgaggctgtgcttaaagcaaaaaaacagattcaactgttaaatccgatcgttgaacaaggaaaccgctgcagggaattggaaaataaagaaaaaatattaggaaaagcgcgtctggctttgaatccctggtttgcagagcaaaagatagaattgttgactgtgaaaatcacccggtttgaacaaaacctaattcttgccacggcagcacgggaacaggcagaaacggtcaaaggtcaaatcgagaaaaatataaaagaaacagaaagagctatttatgccaatggcggcgatgcaattgaagcactaaaaatagatattataaacagcaagcaaacgctcgagcgtatccgaaaagattttttaaattatgacaatcaagccaaaaagttggaacttcccttgccggattccttaaatatttttatcgataaccggaggaagctaccggaattaaagaatgctgaagaacaattgcagggactgttacaggaagatttcgtaactgctgccacggaaggtgacagcgcggaaaaagaagccaataaaatagctgccgaactggagtctcttcgttctcgtaaatcgagtattccccgaaactacattgagaaacggaaacagctttgtcaaagccttgatatcgcggaagatgaactgccttttgtaggtgaattgttggaagtcagagctgacgaagagagctgggaaggtgcgatcgaaaggctgatgcataatttcggcctgtcgctgcttgtaccggaaaatcattatcaatccgttatgcaatgggtgaaccagacttccctggggatgcggttagtctattaccgcgttcaacatgaagcattgcagcctgtttccgggcagcccaatcctttagcggtgtcggaaaaactaaacattaagcccaatacaccttttggcgtatggatagttagggaactccgacaacgctttgcccatatctgctgcgaaagaatggaacaatttcaccgcgaaatgcaggccattaccaaagctggtcagattaaaaccggtggcaggcgtcatgagaaagacgaccgctacaaaataaacgaccgccgccgttatattctgggtttttccaaccagaaaaaaattgctgcgctggaagaaaataaacggggcctattagaggaagctagattttatcaagaagagatgacagatattcgtaagaagcagcagataagccaggaacgaataaatgcagttgctgttttggaaggtatcgatgattttgccggtattgacattaactcaaaagaaaaggaaattacggaaaaagaagagagaagaaggaagctggagcaggaaagcgatgtgttgcaaggacttcagcaccagttgaatgaactggaagataagaaaaaagctcaggaaaatgttttaaacaaggcgcgaaaagatgaaacaaccctggaaacaaaactggagggtcttattcaggataaagaggaatccgccaaaatagccggtgaagcatcttcaactatgaaggaacaggaatacccctttttagacaagtgcaagggaactgccttgaagaatatcagattgactttagataatgttaaaactctagaacgggactatcaagactggatcgaaagagaacgcaatatactgacagaggaaatcaataagttaagaagcaagatcataagatcaatgtcggattataataatcaatattccgaggaaaccaaagaagttgattccagcattgaaagcctcccggaatatgaacgtatgctggcgcaactggaaaacgacgggctgccgaagtttgaaaagcggttcaagcaactattgcatgagaatgccatcaatcagattgctttattccaggccaaattaaaacaagagcaggagaccattaagacccggattgaacagattaacggctgtctcagtacgattgactataatgagggacgctatattcgcttggagtatgaggaaacctatgatactgatatcaaggatttccggatgcagttaaaagcctgtaccgaaggggcgttaaccggctctgacgatgagcaatacgctgaagctaagtttttgcaggtgaaagctatcattgagcgttttcgaggaaggcccaatcagactgaaagcgatgcgcgctggaccaaaaaagtcattgacgtacgcaactggtttttattcgccgcttcggaaagatggcgtgaaactgatgaggaatatgaacattatagggattcgggcggaaaatcaggcggccaaaaagaaaaattggcgtataccattttggcggcaagcctggtctatcatttcggcttagaagggcaggatacccggccgcagtcctttcgcttcgtggtcatcgatgaggcctttttgaaaagttcggacgaatcggcgcgttttgggctggaactgtttaaaaagcttgatttgcagctcgtcattgtcacgcctttgctgaagataccgacaatcgccaagttcatttctcacgtcggttttgtccatcatgatgatgtgaagcatcaatccatgctgcgcaatatttccattgaagagtatgagctggagcggaaggctagggaggtggcgcgttatgtccaccaagtggtctga

SEQ ID NO: 48846 - DNA, 1170 bp, Gracilibacter sp. BRH_c7a
atgtccaccaagtggtctgacccgcaatggatcagggaagagttaaggaagaaatgggactccggccgtattttgcgtactatgttggataaggatgatttattcccgttccgtatgccgctaaaaagaccgaaaagtagcgaagtaaacgagaatttcgccgaaatctctcactggattaaacggctcaaagagcacagcaagcaacaaattggttatggctatgagctgatcgaaaaagaaatggttcaccgccaatccggacggaatctcctgcctacccacgctgtaattccgacagtacaagattctttacgtttgttaaaaaaggaacgcgaagcggaaaagttcctggagattgttcggatgattcaaaccgaatggcctgttttagtggaatggattggcaaatacccccataaagttctagccgccggtgatgactggatcggtattctggctgtgttaaagtggttttttcttcatcctcgttgcggcttatatctgcggcaattggatattggggggattgataccaagtttattgaacagcgaaaaggggtgctggcagaacttttgaatattattttgccgaaagatgcgattgacctcaatgctccgtctttcgaactgcgttacggattacgggttaagccgttgccagtcaggttgagactgcttgaccaagagtgctatattcagaatctatccgatctgactattccggtggagcagttggcggcattaaaacctgaggtttctagggtatttattactgagaacgaaatcaacggcttatgttttcccgacgccaaaaacagtttggtgatcttcggtttggggtacggcgtggatgtgctgaagagcgtcacctggttaagggagaaggaaatctattattggggtgatatcgatactcacggattcgccatattggatcaagtccgtagttttcttcctcgaaccaggtcaatgcttatggatgagagtacgctgcttgatcatcgtgacctgtggagtgtggaagaaaaaccttttcccggacagcttatccacttaacggcagatgaacatcaattgttctgttcgcttcagaataatacatggggcaagggtgtgaggttggaacaggagcggatttcttttcaacgtgtgaaagatgcgatttag

SEQ ID NO: 48847 - DNA, 1359 bp, Pseudomonas aeruginosa; identical to SEQ ID NO: 48658

SEQ ID NO: 48848 - DNA, 738 bp, Pseudomonas aeruginosa; identical to SEQ ID NO: 44575

SEQ ID NO: 48849 - DNA, 3306 bp, Pseudomonas aeruginosa; identical to SEQ ID NO: 44576

SEQ ID NO: 48850 - DNA, 1161 bp, Pseudomonas aeruginosa; identical to SEQ ID NO: 48661

SEQ ID NO: 48851 - DNA, 1353 bp, Pseudomonas aeruginosa; identical to SEQ ID NO: 43230

SEQ ID NO: 48852 - DNA, 750 bp, Pseudomonas aeruginosa
atggcaggggtcttcgatcgaattgcaggcgcctctggtgccgacgaaacggagctgacggtggagcccatggcgttggatgacggcatggatgatgaacagcctctcatgagcgccgctgtacaggtcgatgagcgccggacgccgcaacgggtacgggaggccgtacaggaaatgctcaagtacggtctgctggaagagagtcacaagcccaacctgtatcgctcagcgctttccaatatcgaggcggtcgacagaatcctggagccgctcgaccttgccatgggggtcgacgaggttcgggggctggtgttcgttatcgttcgccagggcgaggtggccgagcaggatgactggtcgcaccccctagtgcgtcggcaaaggctgaatctggagcagtctctgctgatagccatcctgcgccagcagttcatcgcctacgaacaggaaagcggtacgggcgccagtcaggcatcggtagtggtcgatgagctgattccccaattgcaggtttacctgggcgagctgggcagtgaggcaaaggagcgcaatcgcatcatcatgctgctggatcagctcaaggggcatggcctggtgtcggctttggacgcccatgatcgcgtcatcatccgtcccatcattacccacttggctaacccggagaacctgcaggcactcgtggcatggctgcgagagcaggtggagggcgcggcgacgccggctgccgatggcgaggaggatatggcatga

SEQ ID NO: 48853 - DNA, 3306 bp, Pseudomonas aeruginosa
atgaagcaggcactcctttggcgtgacagcgagaccttcattctcaccagcatcgagctctataactggggcggctttcagggctatcaccgtgccgagatcgacccctccggtaccgccgtgatcggcccgacggggagcggtaaaacgacactggtggacgctctgatgaccttgctgtgcgccaatccgcgctacaacctggcatccacgggcgggcatgaaagcgaccgcgacctggtgtcctatgtccggggagttaccggccccggggacggaggtatagagcagtctcatatcgctcgccagggtaagacagtaaccgcaattgcggccacgctcgagcgtgatggtgcgcaggtacgactgggggccgtgatctggttcgaaggcacaagctcctcggcatcggatctgaaaaaactgtggctgttaagcgagtcccccgagcagactctggagcattggctcagccagcatcacgcaggcggtatgcgggctttgcgtcagatggagaaggatgggacgggtatctggccttatcccagcaagaaagctttcttggccaggctgagggattacttcgaggtcggtgaaaacgcattcaccttgctcaaccgcgctgccggcctgaagcagctcaatagcattgacgagatctttcgcgagttggtgctggatgaccgttccgccttcgagcgggccgccgaggtcgccggcagcttcgatgatctaaccgacattcaccgagaactggaaacggctagaaagcagcagcgctcattgcaaccggtcgccgatggctgggagcgttaccaggtcttgcaagaacagctgcacgataagcaggctctcgaaggtatcctcccggtttggttcgccgagcaggggtatcgactgtggttggctgaaaccaacaggctcgagaaggagtacaaaaaggccgaactggatcaggagcaatgcaaaagtcagcttgaggcccagaaaggtgtggtcgatcaacatcgccagcgctacctgcgagtagggggcgcagggatagatcaattgcgcgagcgcatcgctgattgggtgagggagtgcgataagcgcagcctgaaagccgagcaataccaactcttggccaaaggccttggactagcggatgagttatcggccgctgctctcaaggagaatcagcagcatatcgcggcacgcctggaaatactggaccaacaaattactgatgcgcgccaaaaggcgttcgacgcaggcctcgtccagcaggaactcaatggtcgcctacagaccttacagcaggagggtgctgaggttgagaaacggccaggctcgaacctgcccgggcaatttcatgctttccgaagcgatctggcgcaggcgcttggtgtcaatgagtcggccctgcctttcgttgccgagctggtgcaggtcaagcccgaggagctggactggcgtggcgccatcgagcgggcaatcggtagccaccggctacgcatcctggtgccgcaggactcatcccaggccgcactgcgttgggtgaatcaacggcacaaccgcttgcatgtgcgcttgttggaggtacaggagccgacgtcgcgccccgtgttcttcgacgatggttttacccgcaagctgaccttcaaggagcatccgtaccgagaagccataaaggcactgctggcggacaatgaccgccactgcgtcgaaagcccggagcaattacgtcatacccctcatgccatgacggcccaggggctgatgtcgggcaaagaacgcttcttcgacaagcaggaccagaagcgtctggacgaagactggctgaccggcttcgataaccgtgaccgtctggccttcctggctgagcagattcgcgaggtcaatgagcagctcgagccagccaagctcgccttggatgctgcccagggcgacgttcgtcagttggagactcaagcttcgctgctgaatcgtgtcaaagaactgcagttcgaggatattgatctgccgggtgcccagagtcagctggagtcgctgcgtacgcaactggccaccctgacgcgccccgattctaaccttgccatgatcaaggtcgagctggatgcggccgaggccctgcaggagtctctggatcaacagctccgccaactgatcgaacagtacgttcagttaaaaactcagtttgaccaggccgcatccgctacccgtaaggcctataacagcgcggagaaagggctgaacgatacgcagcgtgaactggcgcaagcgcatttcccgactctgaccgcggatgacctcggcgatattgtcgagctggagcgcaagcatacgcgtgagcttcaagggcagctcaaagcgcttggcgagaaactgggcgatcagaaatcagagcttgccaaacgtatgtctgatgccctcaaggtagacaccggggcgcttgcagaggtcgggcgagagctggtggatgtccccaggtatctggagcgtctgcgtgtgctgaccgaggaagccttgccagagaaactcaagcgcttcctggaatacctcaatcgctcctcggatgacggcgtcacccaactgctcagctatatcgaccatgaagtctcgatgatcgaggaacgcctggatgacctgaatagtacgatgcagcgtgtcgactttcagcccggacgctatctgcgcctggttgcaggcaaggtcatccatgaaagcctgcgcaccctgcagcgcgcccagcgccaactgaactcggcgcgtttcatcgatgatgaaggcgagagccattacaaggcattgcaggatcttgtggggttgctcaaggacgcctgcgaacacagcaggaatcagggagccaaggcgcttctggatccgcgcttccgcctggagttcgcagtatcggtgatcgatcgagaaagcaggaatgtcatcgaaacccgaacaggttctcagggcggtagcggtggcgagaaggagatcattgcctcctacgtgctgaccgcttccctgagctatgcgctttgtcccgacggcagcagccggccgttgttcggcaccatcgttctcgacgaggcgttctcgcgcagctcccatgcggttgcaggtcggatcatcgctgcgttgagggaattcggcctgcacgctgtcttcatcacgcccaacaaggaaatgcgcctgttacgccaccacacgcgttcggcagtcgtcgttcatcggcgcggcctggagtccagtctggtttccctgagctgggaagctttggatgagcatcatcaacagcgcatcaaggccatgcatgaagtcgcccactga

SEQ ID NO: 48854 - DNA, 1182 bp, Pseudomonas aeruginosa
atgaagtcgcccactgacatcggtcgcagcttggccaggcaatggcagcgttctagtgttcggttggatcgcttactcaattctgctagctggccgcaaagcttcaacatcggcaagccttcggcacgactattctctgacaacatccggacggtgcttcggcatgtggaaaattggcggagcgtgaaagtgggtaaggtcgactgggaacccgtcagctaccgagcagggttggctccaatttccttgccaatgcgctggcacttgcgcagtccctccgaatggattgccgcaaccgacgatccttcggtcagccaggaatacgctcaactcgagtatctggtcgagcaggtagatagttcctttcatgctctgctggtggcgcaacggagcctgtggttgacgaagccctctgaagaagtcatcgctacagcgcagctcgccactcaactatctccgggctgcgctcaaggccgcccattgcgcctgcttgcagagcacggagtggacaccaagtttttcgagcgaaacgctatcttgctgacgaaactcctcgatgagcgcttcgaaggcgcggcgtccgagcaaggtctgacgacttttctggatgcctttgaagaaaccagtcattgggttctagtcgttcctcttcagcctgagctgctgcctttcaagcgtatcaggctcacgacttcggaactggccgaaacctcacttcccggttcgcgattgctcgtggtggaaaatgagcaatgtgttcacttgctacccgaaacgctgccggacaccctcgctgttctgggcgcagggctcgatttgcagtggttggcgtctgcgcatctggccgggaaacagatcgcttactggggcgacatggatacctggggcttactgatgctggcgcgagcgagacaccatcaacctgcagtcgaagcactgctaatggaccgggagctgtttgaccagcactccttgggaagcgcggtcgtcgagccagctaaagctcaggaattggctcccgaaggattgatgaccgacgaagctgttttctatcggtatctccttgcacaggagcgggggcgccttgagcaggagtatctgccacgcaggcaagtcgaacaggctattagtaaatggtttggagagtcggtagcgccggctcatcctgagcgaacggcttga

SEQ ID NO: 48855 - DNA, 1353 bp, Pseudomonas aeruginosa; identical to SEQ ID NO: 43741

SEQ ID NO: 48856 - DNA, 750 bp, Pseudomonas aeruginosa; identical to SEQ ID NO: 43742

SEQ ID NO: 48857 - DNA, 3306 bp, Pseudomonas aeruginosa; identical to SEQ ID NO: 43743

SEQ ID NO: 48858 - DNA, 1353 bp, Pseudomonas aeruginosa
atggaggatgcgctgcaagcgctgtccgaaatgctggctgcttatgccagccaggagctttacgaaatcgacccggatgcaacgcatctccaagcaggtcgtgaacttcgtgaatggatcaagcggcgtctggtcgtagaacgagaggatcgtatctatgcaaccgacgcgttggagtccgccatccagttcgtcgattcgctggatagtcggatcatgacctccacggcatctcgcctttcggtggttcagcgcgagatcgaaaacctggaaacgggtctgaaccccagccctactggccgtattgccagcctgcgccgccgcatccaggatttggagcacgagctagcgcaggtagaagctggccacgtcgtcgtgctggacgaagcgcaggcgatagagggtatacgcgaggtatataacctggccaccagcctgcgcgcagactttcgacgagttgaagactcttggcgcgaggcggatcgcgcccttcgacactccatcatcagcgagcagtctcaccgtggagagatcgtcgatcggttattggacgggcaagatgctctactcaacacgccggaggggcgtgtcttcgaaagcttccagcagcaactgaggcagtccgctgagctggaaaccatgcgtgagcgcttgcgcaccatccttcgtcatcccgcggttccaaaggcactgaatcgtccccagcaacgtgagctgcgttggctggcgttacgcctggttcgggagtcgcaggctgtgctccaagcgcgcgcccgaagcgagcgcgatgttcgcggcttcatgaagacggggctagccgccgagcatcatcgcgtcggacagttactcaacgacttcttcaatctagcgctcagcgtcgactggcaacgtcagtcagagcgccgtaagtctgcatgtttaccaccggttggcgtagccatcaccggtatcccggcaatcgagcgtctccgcttcaagaccctggatgacgatgatacgggcgagctggatctgagtttgaagcctgcggggttggagcagattgatgatgacttctgggatgccttcgacgggctggatcgtgaagagctgattcataacaccctggctgtgctggtggagcagggtcgccctgtgagtctcggggaacttgcgtctttgcttccacctgctcacgacctggaaacctttgcgctctggttggcgatggcgcgcgaggcaggtatcgaggtgctgacagaggagcgtcagctcgtggagctagttgacgaggatgagcaacgctggcgcttcaatctgccttatatcggactcgaccacgaggcactcaaggacatcgattgggagttgtga

SEQ ID NO: 48859 - DNA, 750 bp, Pseudomonas aeruginosa
atggcaggggtcttcgatcgaattgcaggcgcctctggcgccgacgaaacggaactgacggtagagcccatggcgttggatgacggcatggatgatgaacagcctctcatgagcgccgctgtacaggtcgatgagcgccggacgccgcaacgggtacgtgaggccgtacaggaaatgctcaagtacggtctgctggaagagagtcacaagcccaacctgtatcgctcagcgctttccaatatcgaggcggtcgacagaatcctggagccgctcgaccttgccatgggggtcgacgaggttcgggggctggtgttcgtcaccgttcgccagggcgaggtggccgagcaggatgactggtcgcaccccctcgtgcgtcggcaaaggctgaatctggagcagtctctgctgatagccatcttgcgccagcagttcatcgcctacgaacaggaaagcggtacgggcgccagtcaggcatcggtagcggtcgatgagctgattccccaattgcaggtttacctaggcgagctgggcagtgaggcgaaggagcgcaatcgcatcatcacgctgctggatcagctcaaggggcatggcctggtgtcggctctggacgctcatgatcgcgtcatcatccgtcccatcattacccacttggctaacccggagaacctacaggcactcgtggcatggctgcgagagcaggtggagggcgcggcgacgccggctgccgatggcgaggaggatatggcatga

SEQ ID NO: 48860 - DNA, 3306 bp, Pseudomonas aeruginosa
atgaagcaggcactcctctggcgtgacagcgagaccttcattctcaccagcatcgagctctataactggggcggctttcagggctatcaccgtgccgagatcgacccctccggtaccgccgtgatcggcccgacggggagcggtaaaacgacgctggtggacgctctgatgaccttgctgtgcgccaatccgcgctacaacctggcatccacgggcgggcacgaaagcgaccgcgatctagtgtcctatgtacgcggcgtcaccggccccggggacgggggtgtagagcaatctcatatcgcgcgccagggtaagacggtcaccgccattgccgccacgctcgagcgtgacggtgcgcaggttcggctgggcgccgtgctctggttcgagggcaccagctcctcggcgtccgatctgaaaaaactttggctgttaagcgagtcccccgagcagacgctggagcattggctcagccagcatcacgcaggcggcatgcgggctctgcgtcagatggagaaggatgggactggtctctggccctatccgagcaagaaagctttcttggccaggctgagggattacttcgaggtcggtgaaaacgctttcaccttgctcaaccgcgctgccggcctgaagcagctcaacagtattgatgagatcttccgagagctggtactggatgaccgctccgccttcgagcgggctgccgaggtcgccagcagcttcgatgatctaactgacatccaccgagaactggaaaccgctagaaagcagcagcgctcgttgcaacccgtcgccgatggctgggaacgttatagggccttgcaagaacagttgcaggataagcaagcgctcgaaggcatcctcccggtctggttcgccgagcaggggtatcgcctgtggttggctgaaaccaacaggcttgagaaggagcacaaacaggctgaactggatcaggcgcaatgcaggagtcagcttgagatccagaagggcgtggtcgatcaacatcgtcagcgctacctgcgagtagggggcgcagggatagaccaattacgcgggcgcatcgctgattgggtcagggagtgcgataggcggcgcctgaaagccgagcaataccaacgcttggccaaggggcttggactcgcggatgagttatcggccgctgcgctcgaagaaaatcagcagcagatcgcggcacgcctggaaatactggcccagcaaattacaggcgcgcgtcagaaagcgttcgacgcaggtctcgtccagcaagagctcaatggctgcctgcagagcttacagcaggagcgtgctgaggttgagaggcggccaggctcgaacctgcccgggaattttcatgcttttcgaagcgatctagcacaggcgcttggtgtcgatgagtcggccctgcctttcgttgccgagctggtgcaggtcaagcccgaggagctggcctggcggggtgccatcgaacgggcaatcggtagccaccggctgcgtatcctagtgccgcagggttcatcccaggccgcactgcgttgggtgaaccaacggcacaaccgcttgcatgtgcgtttgttggaggtcaaggagccgtcgtcgcgccctgtgttcttcgacgatggttttacccgcaaactgaccttcaaggagcatccgtaccgagaagctgtgaaggctctactggtggataatgaccgccactgcgtagaaagcccggagcaattgcgtcataccccttacgccatgacagctcaggggctgatgtcgggcaaagaacgcttcttcgacaagcaggatcagaagcgcctggatgaagactggctgaccggcttcgacaaccgcgatcgtctggccttcctgactgagcagattcgcgaggtcaatgaacagctcgtgcccgccaaactggcactggatgctgcccagggcgatgtcggtcagttggagagtcaagcttcgctgctgcaacgcgtcgaagaactgcagttcgaggagattgatcggccgggcgccgagctccagctggcgtcgctgtgtgctcagatggacaccttgacgcgccccgattctgaccttgccatgatcaaggccgagctggatgaagctgaggccctgcaggagtcgctggatcaacagctgcaacaacggatcaagcagtgcgttcagttgaaaactcagtttgaccaggccgcatccgctacccgtagggcctatcacggtgccgagaaggggctgagcgacacgcagcgtgaactggcgcaaatgcatttcccgaccctgacggcagatgacctcgacgatattgtcgagctggaacgcaagcatacgcgtgagcttcaagggcagctcaaaacgctcagcgagaaactgggcgaccagaaaacagagcttgccaaacgtatgtccgacgccctgaaggtagacaccggggcgcttgccgaggtcgggcgagaactggtggatgtacccaggtatctggagcgtctccgtgtgctgaccgaggaagccctgcctgagaaactcaagcgcttcctggaataccttaatcgctcctcggatgacggcgtcacccagctgctcagctatatcgaccatgaggtctcgatgatcgaggagcgcctggatgacctgaacagtacgatgcagcgtgtcgactttcagcccggacgctatctgcgcctggtggcgaaaaaagtcatccatgaaagcctgcgcaccttgcaacaggctcagcgccaactgaactcggcgcgcttcatcgatgatgaaggcgagagccattacaaggcattgcaggcgctcgttggcctgctcaaggatgcctgcgaacacagcaggaatcagggcgccaaggcgcttctggatccgcgcttccgcctggagttcgcggtatcggtgatcgatcgggcaggcaataatctcatcgaaacccggacaggttctcagggcggcagcggtggagagaaggagatcatcgcctcctatgtactgaccgcttccctgagctatgcgctctgtcccgatggcagcagccggccgttgttcggcaccatcgtgctcgacgaggcattctcgcgcagctcccatgcggttgccggtcggatcatcgcggcgctgagggaattcggcctgcacgctgttttcatcacgcctaacaaagaaatgcgcctgctgcgccaccatacgcgttcggccgtcgtcgttcaccggcgcggcgtggaatccagtttggtttctctgagctgggaagctttggatgagcatcatcaacagcgcatcaaggccatgcatgaagtcgcccactga

SEQ ID NO: 48861 - DNA, 1158 bp, Pseudomonas aeruginosa; identical to SEQ ID NO: 44226

SEQ ID NO: 48862 - DNA, 1353 bp, Pseudomonas aeruginosa; identical to SEQ ID NO: 43763

SEQ ID NO: 48863 - DNA, 750 bp, Pseudomonas aeruginosa; identical to SEQ ID NO: 41752

SEQ ID NO: 48864 - DNA, 3306 bp, Pseudomonas aeruginosa; identical to SEQ ID NO: 43765

SEQ ID NO: 48865 - DNA, 1146 bp, Pseudomonas aeruginosa; identical to SEQ ID NO: 41754

SEQ ID NO: 48866 - DNA, 1353 bp, Pseudomonas aeruginosa; identical to SEQ ID NO: 43763

SEQ ID NO: 48867 - DNA, 750 bp, Pseudomonas aeruginosa; identical to SEQ ID NO: 41752

SEQ ID NO: 48868 - DNA, 3306 bp, Pseudomonas aeruginosa; identical to SEQ ID NO: 43765

SEQ ID NO: 48869 - DNA, 1146 bp, Pseudomonas aeruginosa; identical to SEQ ID NO: 41754

SEQ ID NO: 48870 - DNA, 1632 bp, Bifidobacterium longum subsp. longum
gtggccgatgtgatgcgggagctggaacggctgcgaccggtgtatgagacgggcgtcctgcggttgctgttgcgccagaacgcgatgctgtacgtgtcgctgctgcgttccacgttcgacccgctcaccggcgagctgccgcgcgagaccgtggaggagcggttcgcgcaaagtctgaacgctctggccgacgccggcgaatatgcgccgcgcgaggaccagaccttcgccgaggccgctcatcagatcctcgccgacctgacccgtgaaggcgaaggcgactacgcctggctcgccaactcgcatgatgcggcctcacaccgattcctctaccgtttgacggcccgcgcccaccgcgccatcgaggcgctgagcaggctcgaagacgaatcacgcgccctgtccggcgcgcaggccaacagcatcatcatggaaatcgagcacgcgcgcatgcagctgaccgccgaccccggcgagcgcatcaaactcctcaaccgtgaaatcaaggaacgcaagcacgagatcaaacgcatccaacagggcaagcagcatgccacgctgagcgaagcccaggtggaggacgtgatcgccgtgatccacaacacgctgcgcggcgtgcccatcgacctgcgcgaactcgtgctcgacgagcgggacaacggcgacgccttgcgccggcgcatgcaggccggcgacatcagcgtggacgagaacctgacccgctaccacgatgaataccgccgctcgttcagcgaatcagacagcggccgccgcttcgaggacgccttccaggtgatcatcaccgacgagggccgccagcaaatcgacgaagccctgcgcgccatcgccaaaaccccgtatctggccggcgaatccggcgtgctgctcggccagatccgcgacgaactggcccgcatctacgacggcatcgaagccgtgcgccgccagatgcgcgtctccgacgaggcgatcagccggctcgtgcgccagcaaaccgacactcgctaccgcacgatgctcacccgcttgaaccgactgtacgcgcgcctcaacgcggatgcgaaaacccatatgggagacgcctcgcgcccgtacgacacggccacctcggacgcgctgttcgcgccattgccgatgcgcccggccaaatccatgacccgcgccaccgcacccggcctgagcgacctcgccgccgaagccccgcagccgactccggtggccgatctgcgggacatggtcaacagcggcggcccccgactcctgcgcatggtcagcctcatccggcgcaacccggtgaccgttgacaggtccgatgacaggcccggcgcaaccctcgtggacatcgccgccagcttcaaccggctgcccgaaagcgaacgccgcgaaagcgagatcgtcggcttcctgggcgggctgggagccgtaagcggcaacgccatcgccgacgagccgtccactgacggcgtcggcgtcggggtcgacagcgacatcgccaccgagccggctccggcgcagcgcggcgatactgcgacctggcattgcgtatcgatcgacggcgagccccggaactggatcactagaccggtgctggccgacatggacgagctgagcatcattgtggaggaaggatga

SEQ ID NO: 48871 - DNA, 675 bp, Bifidobacterium longum subsp. longum; identical to SEQ ID NO: 41629

SEQ ID NO: 48872 - DNA, 3549 bp, Bifidobacterium longum subsp. longum
atgatgcaggcgacagacgtgcagatgatcgcggaccggtggatgctggaatcccgccgactcatcaactggggctcctatgagggctaccacgaattccgcccctccacggaccacaagctgccggtgaccctgctcgccggtgccagcgaatccggcaaatccacgctggtcgacgcgcagatctccctgctgtacccaaccggtacgccgttcaacaaggcctcgaactccggccgctccgaacgcagcgactacacctacctgcgcggcatggtcggcgtgggcagcaccgaaaccggcgacgagccgctctacctgcgcggccgcgacgagaacggcgcaccgcaacccgtgtggggcgccatcgtggacacctatcgcaaccagaccaccggccaggtgctctcctgcgccaaattcctctacctgatgcccggcgacggccgcggcgacgtgcgccgacagtacgtggtctggggcaagcccgtggaccccaggcgcatggaccaataccgtgacgccccgttcacgccggcccagctcaaagccacctaccccgactgcctcacattccccagcgccgaagcgttccacacacacatctggagcgcaatgggcctgagcgaggccgcctgtcgactgctgcacaagatccagtccgccgacgcgccctcccggctcgacgacatcttcaaacaaggcgtgctcggcgtgcccgaagccctggacctggcccgcaccacggtcgaggactacgaacgttacgacgagaacttccacgccatggacgagaagacccgccgcatggacacgctgcgcggcatccaacaggcctacggcgaatacgccgccgcacgcggcaaggcccgcgccttcgaaccggtcaagccggccgtcgacggcacggtaccggccgtgctgcgcgactgggcattggcccgcatgcgcggcgaagtcgccgtccaactgcccgccgaccgcgccgaacaacagaacagcgaggcggaagccaagctgctgcgccgccgaaccgaagacctgcgcacccgtctcgacatgatccgcggccagatgcagggtctggacggcggcaacctgacccgactcgaactcgaactcgaccaggcccgccgcaccctcgaagacgtgcaagccaaccgaacacgaatcgaacaaacgttcgcatccatcggcgagacgctgcccggcgacgaacaagcctggaacgaacgccgcatcaacgccgtgaacttcaaacgcgaatacaacaaacgagacggcgaatgcgaggaagccctcaccgccgccatcaacgcgcgggccggcgcacgcggcgacctcgaacgactgcaacgcgacttcgaccggcaacgctcccagcgcacccgcatctcccagcagatggacgaaacccgcgccatgctctgccgcgccaccggactcacccccgccgaactgccgtacgtggccgaactcatggacgtgaacgaacacgaggaagactggcgtctcgccatgaacgtcgcctacgcgcccatcgcccagaccatcctcgtcgacaagcgccacgaacagggcttcgccgccaaagtcagcaccatcgacccgcgcaccatgccccgacgcacctggcagttcgtggacaccgcacgccactacgacgacaccggcgcgcacgcgaacatactcaccggagaacaggacggcgactggctgtccggcaaactgcgctaccgcgacgactcgcccttcgccgactggctgcgctcgcagacccaggacgaacgattcgacgccctatgcgtcaccgccatcgacgacaccgaccgcaccaaccgtcaggtgcaggccgacggtcagatcaaatccggcgcacgcggccagcacggcaccaaagaccgcgcccaggtcatcggattcgtcaacgaaacctacctcaacgcgctcgcagcgcaggtcgacgccgcccgcaacgcgctcagccaagccgacaccgactacacggccgccaaaacacagtccgataacctccaccgcgaactcgaactggccaaccagctcgcctacacgtcctgggagcgcatcgacatcgccggcgcgcaacggaccatcacggacacgcaggacgccatcgcatccatcaaaaacgatcccaagctcgccgaactcgccaaacagcgcgacgaactgaacgccgaactcgaccgtgtggaacgccagcgcatcgaatccgaccaggctgcggcccgcgccggcagcgccgtcgaagcggcgctcatctggctgcgcgaccatgccgacaccggcacgacggacgccgccggtgccaccgccgacaatgacgatgacgccgcgtccggcccgctgccggacgaagtcacggcggcgctcgccgaatcctacgacaaccgattcgccggactggcggacgccgccatgcgcgcgcacatgatcatcggcgcgggcgcggcaggaacgcaggcaccgggggagagcttccccgaacgcaccatcgccggcatcggcaaggacatggcctcccgcatcaacctgctgaacggccaggccgatgccgcacgcaccggcgtcgaatcgaagatgagcacctacatcgcgctctacgcggccgacgatgattcgctgaccgccagcgtggaggactaccggtactatctcgacgaactcgccagcctcacccagctggccgcggttgccgccaccgacgccgaataccggcgctgcctcgaacagctgctcaggagcttcctgaccatcaaacgcgccatcgacacggatgccagcgacatccacgaccagcttgaccgcatcaacgccatgctcaaaggccagcagttcggtcccaagcacggcagcctgtccctgcacgcggacgtgcgccgtcccgagcgcaccttctgggcgcagttcatccgcgtcatcggcaccctgaacgattggaaatccgccgacgtcaacgattccgacgcctcgcgcaaggctttcgcggcctgcgcgccgatggtcgggctgctgcgcgccgaactcgcgcaggtcaaggacgcgaacggcgtgaaaagctacggcgcccgcaacctcgacccgcgttgccgctcgtccttctacgccatcgtgcatcatgccgacggcccggatgaacgcatcacctccaccggcggccgttcgggcggcgccttgcaggagctcacctcattcgtatacggcgcggcgctcatctacctgctcggcggcggcctgaccagcgagccctcgtacaccacgctgttcctcgacgaggcgctcatcaaggccgacggccgttacacgcagcgcgccctcacggtgctgccgcgcctcggattccaggtcatcgtctccgccccggaaagcaagaccggcgaaatcctcgaggtctccaccaaggcctacgtgacctacaaggaccctgacaccggcctcacctccctgcgcgaggccgtgctgcatcagaatgacatggacgatgaatcatcgtcggatatattgaaggatgacggggttgccgaatga

SEQ ID NO: 48873 - DNA, 1185 bp, Bifidobacterium longum subsp. longum
gtggccggcatgaaagacatcgctgcgatcaccacatgcgtgaagaaacatatgcgttcacatatgtacgacatcgaaccggcatggccatttcccgtgccggtgggattgccggaccaagcatttttggaaaccaatgcgattgcggtgcatgacaacaacaatgagatacggcaatgggcaagcaagaatggttgcgaaatcataaccaagcatcgcaccataggcacctctgtcgagctgatctccaaagtcgtcgttcctgacgaatcaatagccatgcgtgtggttggtcgtacgctggcggcggaatgtcgcgaagcgcgccgccgcatagcatgtctggttgctgcttgtgacgttgctccggaaacaatcgaatcggccgctcgcatgacaggccatgaacagcctgacgacttcgatctgcttgtcagcgcagttcgatatttcaggcatcatgacgtgaccggtatgacgccgcgacagattccactgacaggattcagcggcaaatggctgaatgagtcaaaaaccaatcgtcgtaaggccatttgccgactgctcggtgtcgaaacgttgggtctgtcaaaacggccgaccgaactgcggttccgttatctcgatccggtccgcgacgatgctgagctcgaacgcatcatatggtgtccgtgggaaggcgaagcgttatccggcattaaatatgctgtcatcgttgagaacaaagacacgtatcagactatgccgccgattgcgcagggcatctgcatatggggttctggtcgcgctgtaagcgatgctgtacctgcggttcctgcactgcgtgacatgcgtatcgtgtattggggtgatatggatgcggatggactggaaatactttcgacattacgtgaatcaggtatcgaatgcgactccatcctgatggattgcgatgcatacgatcggtaccacagatttggtaccgatcgtactgaacgcagcgcgaagattgctatgcgggagcctaagccgacgcccggccttcaatcggcggagcgacgtctttatgaacgactgtgtgctgacaaaaccatcgcttatcggcgcatcgaacaggaacgcattcccatgcgtgatgcagttgacgaattacgcaagcttggcatccccgtggagtccattgaaaatcaggatttgccgatttag

SEQ ID NO: 48874 - DNA, 1398 bp, Marinomonas fungiae
atgctattcacccatttgcccgatgaaatattccaagctctatcgggctccaacaaagcgctcatagaagccgtattgttcgatctgtctgatgtgttttatgaccatgcagaagatcctattaaagataaatccaccatcattgaagcgatagaagactcgttgcataagctcgacacactggcttggcacgacgatcttaaagatggctttgattcgccgaaaaccattcatgagtacgcgttgcgtatctatcaccgtttggtcaacactggctggttgattgaagagcaagagttgtatcgtgtcagcgtgctgatgtcgcctcaggtctctatgctgctgcgctccttggtagaaattagccgtcacggtaagcgtaattacggtgccacggtactaagtatcttgagtaaccttgaatcggttgctaagcatccgcaagaacgaggtgtaacactgagtcaaacagcggaagcggcacgcgacttctcagcgcatttgaaccaaattctattaggcattcgcagtcttcaacgtgagctgtttaacaaacgtgagccaaaagagatcgtcgcaggattctttgatttgtttgtggaaggtattttgattgccgactataaaaccatcaaaaccagcaataacccgtttcgttttcgtcgtcagattttagagctgactcaaagctttctcgctgaagcaaatttgatgggcaatatcgcccaatgttatgccgatcaacaattaatctcggtagataaagcgttagctgcggtcgaaaaagattgtcgcgatatcatccaaaccttcaccaccatcgatcagcgtttggatcgtattgatgagtaccgttaccgcttggaaaaacgtgccgctgatacggcccgttatatggactcttctcgtcctggcttggctaacaaggtggcaggcatcattgctgatgtcgccaagtttgaaaaattaccaatcttgaaaaacatggtcagtgttaaagcggtaggggttgaatcttgtgcccaaccagcgaaacgtcgtgagccaccaccgccgcgagtgattactcaggtggaggtttcgcaagcggcgattgccttccgtgaccgccaacgtcgcttccatgaagcgcgtcaggtgagtgttgccaagctacaaagctaccttgatcgtcagctgttagaaaagccggcgatgcatattttggacttcaccatcgaatccgtagaagattttgtttgtttcgatcatttacgttacatcggttctttgggcgtcaatgccaaacgcattgagaagtcgtttgatgttattttcacagatcaatatatcaacgttcacgaattcgtcgaatgtcgagagtttaatgtagtgcgcaggagcaaatctcatgcttag

SEQ ID NO: 48875 - DNA, 696 bp, Marinomonas fungiae
atgcttagagaattaaaaagggtcgtagaagagtccggtaaagacccgcaagagtttcagcagactgcgaactatttacttgccaatcaatttgtcagtgcttttaagcacggtcaacgtcgtcattacttattggtagagatgtatcaacagtactttagcaatctgtttgacgcgttgggtatgaagctttacgtcaatgagaacgaacgtctagcgggtgtgttgccggttgagcgtgaagcctttgtccgtttgaaaaccgatgaaacgctattcctattggtgatgcgtcaaatctacgaagaaaaagtagagaactttgaaatcgacaacgggttcgtatcgactaactctgtggctattttggaacgctacgtacagttggtaaaacgcgaaattccaacagaaacgcgcttcaaagatatcctgacgctgttcagcaaacagggggtgattattcgtggtaaagcttacgacgaagacgctaagaacttgatgattagcattactcctgtagtacgtttgattgttaccgaagcgtatttacgtcagcttgagtctttcaatggctcggatcctgatgaagacgaagtcattgacgaacaaacagaacagggtcttgatggtcaagagaatggcagccaagcggcggttgaccctgatccagaaacacaagaagaagcggtacaatag

SEQ ID NO: 48876 - DNA, 3450 bp, Marinomonas fungiae
atgaaaaagttaaatcgaattgttcttgtaaactggtacctattgggcgcagaagaaatcaatattcgcggtaacacagccatcattggtccaaccggttcaggtaaatcgtccttgttggatgcgatccaaaccgtgctaaccggtgctagtaagcgtcacttaaactacaacgccagtgccaacgatggtaaagcgtctggtcgaagcatccgctcctacattttggggatgatcgactcggggcaagcgagcgaaaaagtcactggtgtgcaaactcgtcaagacgcaatctgttacttggccttggtgtttgaagattccaacaccggcaaagagtcaaccgttggtctatgcttgtcagcctccttagcaacaccagaagaagatattttaggtcgttttgttctgtcgaactacggcgttcgtcgcgaagactttattgaagtattgggtgagaagcagtaccaagctaaaccttggcaagaagttcgtgaagccatgaagaaagtctgcctagacccatttatcaagtctggcagtgcttcagcaactcaatatatgaaccgttacttggaagaactgagcccaagtgcggaacatttgattactttagattcgttcttaaagaactttaagaacgctttgaaattcgtacccattgcttcgccaacgcgattcgtacaggattttgttttagctgagcagccgttacaagtgggtgcttatcagaaatctcttttggaataccgtcagctagaagccaaaacgcaagaagtcgccaaacgcatcgacgatctaaaagcgatccaagtcgagtgtgataagaaacaccagcaagaacaaaccgtagtcaactatcaatggattgccaccgaagcccgctttgatcagctgggcagcaaacaagacgaaattcaagatcaatacgaaaacttcaaagagcgtgaagaagagatcgacgaggaaatcgttgcgcaagcgaacctgctaaaacaactgcaaacccagctagttcgacttgagcaacagtatgagcattcagatgtaggcttgaagctgcagcagcttgaacagaacaaaaagctattgacccttgaaggtcaagaagaccgtaaactggtgattcaagcccaccaagttctgcagttattaggtgcattgcaggcgtttgaagatgttttgtctcaggatattcgcaacctgattacagaggcacaagggctagcgggtagcattgatagctcaggcaatattctcggttcagcaaaagcggtaagccgtttgttatctagcattaataacctgctagatgaaggtaagggcgctttgttccaacagcgtacccagttaaaccgtaatatcttgaatttgaaagatgagtgtcgccagcttgaggccgatgttaaatccttgaaaggcggtaccacaccgctgtcgccaaacgtgaagcgactgattgagttattggatcacgctaacatcaaagcaacaccgcttagccatttagccgaagtgaccgaccataaatggcaagatgccattgaaggctaccttggcagccagcgtgaagccctaatcgttgagccagatgatgcggaagaagcgatccgtatcttccgtgcccaccgtcgtcaattgatgggttgtcgagtgattgacacgacgcaaacgcgtttatggctaaatcgtggtgataataattcggtgctacgctttattcgctgcaataatgatcatgctcaggcttacttgaaccgccgtttaggtggcatcaaacccgttgaaaccgagcgagagctgttacgcgaagacagtgcgatgacggctgatggtatgttgaagctttcgggtactatctcaaccatccgcttcttaccacacatgatggtgggcattaatactgaagggatgcgccaatctcgtgaagctcagctgcaacagttaagtggcgaattgatggattacatgaagactgaccaacgtcttgagcaagcggactcgatgttggggcgaatcatggcgtcgaaccagtttgatccgcaatcactgcaagatgctggtattgcaaatactcgtgtagcacaggatttggcagatgttgaagctcaaatcgccgctctccaacagcgcgacgatacggatctgcaagaacgtattgaaagcctgaaagaacgtatctctggcattgagttagagcgtaagaagcttgatcgtgagcgacagcaaattgctgaacaatacggctccttgaatactcagaagacccagctatctgaagccttgtcggcattggacgaagaacgtacacgtattacttcaaacccgttatttaacgcagaatacgccagtgagcgatacgatttgttggaaaatagcatggttaacggtggcgcgatttacaaagaagccatcagtcgttctgaaaaagccatggaaaaggtcaaaatgtttgaccagaaagtgcgtaaggaagtggctgatcactatgcgaaataccataacagcagcctagacgatgatatccaattggattatctagagtctaaatttgaagagttcgagcactatgttacgcatcaaattaatgtcttgaatgatacagagctggcaaaatacgcaaagcgtgccgagcttgcgcgtcgggaagcagaagagacgttccgcagtgactatgtgtcgaagctgaaagattccttggatcaagtggcgctgatcatcaaagagcttaaccacagcttgaaacgccgtccattcaaccacgaagtctaccagttccgttactacccgaacggtgatatgaaagatatcctagacttggtggcgaagttcagctcgatggatcaagcgaacgtaggtggcttgtttgatcctgagcaaacgggtgatcctgagcatgctaaagccattgccttgatccaagaactgatcacagacgatgagaagcaaaaagacttagcggattatcgtaagttctacaacttcgaggtcgatattctagatctagaagggcaaaagaaaaccacgctatcgcaacgtatccaaactggctccggtggcgagcaccagatcccattctatttggcgattgcggcggccttgtcgactacctaccgcctgcatgaaacgatggagggcgatatcgtcggtggtttctcgttggcgatgtttgacgaagccttcaacaagattgacatggcgaaaacgtcgacctgtatgggctttatgcgtgatatcggcctgcaggttatcgctgcagctccggatgacaaacgtgcagtgatggcggctaatatggacaccattatcagtgtttggcgtgagggtggtgcggtatccattgacgtggcatatccacaacagcgcggtcaagccttgctaagtggcgaccatgagttagataatgatggtccacaacaaaacttaaccgaaacagcagaagcagaataa

SEQ ID NO: 48877 - DNA, 216 bp, Comamonas thiooxydans
atgacgctggccgaactggctgccgcgatgccgcctgccggacatgatctggagacgctggcactgtggctgtcaatggcgcgtgaggcaggtatcgcgctgcaggatgcacaggagcaaatcgacacgcaggacggcgagcaatcctggcgttttaccgtgccgcgcgtagcactggacgcggcgcaactggcatcaatcgattgggagctttga

SEQ ID NO: 48878 - DNA, 744 bp, Comamonas thiooxydans
atgaaccaagagccggatatttttgacctccttgccagccagcccacagcgcaacagcaggacctgcctcaaaaagaagagttgccagcgcatgaatatatagaacttgaagctgatatccaactgagaaccccgcaaaatcagcgcaaggcgcttcaatttctattggccaacggttggctggaagaaaccagcaagcccacgctgtttcgcctgatcgcggcgcagagcgcccaacttgaccggatgctggagccgctggacttgcgcgtgcaggtggatgatgtacgcggcctggcatttctggccgtggtggctgactacgaaaacgatgatgtcgacgaaagcgagcaagacgactggacgcatccgctgatgcggcgccagcgactgaatctcgagcaatccctgctgctggcgatcttgcgtcgtgaatttctgcagcgcgagcaggaaagcggcaccggcgtggccgtgcgcatcaccgtggagagcctgctgccgcaactggagacctatctgggcgcaaccggcagtgacatgcaagagcgcagacgcctgaaccaattgctggacaccctgcgcaaccacggcatggtgtccgaagccgatgcccaggactgcatcaccattcgtcccatgatcgtccacctgctcaaccctgagaacctgcaagcgctgctgctgaagctgcgcgaagtggccgacggcgcagcatcggacagcccaaacaacgccccatga

SEQ ID NO: 48879 - DNA, 3285 bp, Comamonas thiooxydans
atgagcaccgaggcctcctacatcctgcaagagctgcatctgtacaactgggggccgtttgcgggccgccaccaggcaaatatcgatgcagccaatagcgccatcatcggccctacgggcagcggcaagaccacgctggtcgatgcactgatgaccttgctgtgtgccaacccgcgctacaacctggcatcgacgggcgggcatgaaagcgaccgcgatctggtcagctatgtgcgcggcgccagcggtcagggcaacgaaagcggcgaccatattgcacggtcgggccagtgcatcaccggcatcgccgccaggctggagcgcggcacggcgccgttcgcacaatcggttctgttgggcgcactgttctggtttgacggtagcagccagtcggcgggcgatatgcaaaagcgctggttctttgcgcagggccaaggacagacgctgaacctctggctggaagaactgcacaacggcggagcacgcgccttgacgcgcctgaccaaggacagtgacgacctgcagatgtacaccagcaagacgtcctacctggccaagctgcacagctttttcgaggtcggcgccaacgccttcaccctgctcaaccgcgccgcaggcttgaagcagctcaacagcattgacgaaatttttcgggagctggtgctggacgaccacgccgcctttgacgatgcacagaaagtcgtcgatggcttcgcggaactggcctccattcatgcggatctggaactcgctaacatgcaattcgtctcgctgctgccgctgcgcgacatggccgcacgcgagcagcagcaaagcctgcaccttcagcatttgcagaccttgcagcaacagctgccacactggttcgcaacgcagggcgcgcaatggtggctgcagcatgtgaatcaacttcagacgcaggttgagcagcgcaatcaggaactgcacagcgcgctggcctatgtcgacaccgctcgccagcacgagcaggatctgcacggcatttatctgcaggctggaggtgccgacattgccacgctggaggaaaacattcagctggcccacaaggagctgggacgccagcagcacaacctggctcagtacctgaaactggctcgcaatctggggctggaccccgcggcaggtgcccagagcctggtgccccatcaagccatggctaccgccgcactgcggcagctggaggctcagcagcaacagttgcaggccgatgcggaagccgccatcacggccgaacgcaatgcacaccagatctggaaggatctggaggaagaacatgaagccgtgcgccagcgcccgggcagcaatctgcccatggaatttcagcgctttcgtgcggagctggctgcgaaactggacttgcctgaagacgacctaccctttgtggccgagctggtggaagtgcaaaaaaaccagcagcactggcgcggagccatcgagcgcgccattggcagccaccggctgcgcattctggtgccgcccaaggccatgcgtgaggccttgcactgggtcaaccatcgccataaccgcctgcatgtgcgcctgctggaaatacgggccaccacagcctcggccagctttctcagcgatggttttgcctgcaagctcaacctgaaaccacagacccctgccacgcagcttcacgcactgcgccagttgcttgccgatctggatcgccactgcgttgccgacgtcgagaccttgcagaacacgccacatgcgatgacggcgcaaggcctgatgtccggccgcgccgatcagtttgacaagcaagaccacaaacgcctggatcaggactggatgacgggcttcgataaccgcgaccggctggcacaactgcttcaacaaaaagagcagacagcgcaggactggaaagcgttagaggccaagaagactcaaaaactccaagcccaaaaccatgcccgcagccagcgccagctgtggcattccctgcaagcgctgcgcccggaagacctggacaccacaaccacccaacagcaactgcagcaaaaacagcatcagttgcaggcactgctgagcccgcaatccgataccgcgcaggccaagcagcaatggatggatgcgcagctgcagacgaaaaatgccgaagcccatttgcgagagctgcaaagcgcgcagacgcaggatgaaaccctgctacgtaccgcacaccagaagcacagcgcttttgaggataggctgcgcaacgcagcccccgtggatgaggactttccgcagttgctcaggaagcagcttggcaaaggcctgcctgtgctggatggcgacaatctcgatgcgcatgaacgcgatgccggcaatgcgctgcaaggcaagatcaacgaggctcagaaaaaactcgccggccaacacaacgagatcattcgccaaatgggcaagaccaaggctgaagaccgtggcgccttggaaaaccatgcgccggagctggaagccttgccccactttctgcagcgcctgcaggtgctagaagaagaagccctgccgcagaagcgccaacgttttcaggagtacctgaacgagacgtcgcagcaaggcgtggacacgctgctcaatggcattgccgcccatgtggcagacatcgaagaccgcatcaccaaactcaacgaaacgctcaagcgcgtggattttcaacccggtcgctacctgcagttagagccacgctccgtcgtgcaccaaagcctgcaaagcctgaccaaggcacaggcacagctgcgtacggagcggctgcgcgatgacggcggcagcagccattaccgggcactgcgcgccatcgtcgaaatgctgcaggagcatgccagcaaccgccgcagcaaggcggctcaggcgcttctggacccacgttaccggctgcagtttgccgtgctggtactcgaccgagccaacgatcaattactggaacgccgcacgggctcgcaaggcggcagcgggggcgagaaagaaatcatcgccagctatgtgctcacagcatcgctgagctatgcgctgtgccccaccggcagcagccgcccggtgttcggctccatcgtgctggatgaggccttctccaaaagctcgcaggctgtggcagcgcgcatcatccaggcactgcgcgagtttggcttacatgccttgtttgtcacccccaacaaggaagttcgcctgctgcgcagctatacacgctcggccgttgtcgtgcaccggcgcggcgcgcaggccaccctggcatccctgcgttgggaagagattgatgctttccgaaaggcggtatga

SEQ ID NO: 48880 - DNA, 1185 bp, Comamonas thiooxydans
atgaaatctccacaagacctagccgccagactggcacagcaatggcaaagtgcagactggcgcgaacgccagcttttgggcggggccagcgcatggcccgtggtgctctccattggccagcccacagcacaagtcttcatgggcgactcggccctgctgcgcagccacctgcagcagtggcgcggcattgagcagcaaggaccgggcaccgtgcaatggcaagcacgccgctaccgcggcagcaacgatgtgattgaagtgcccacacactggcaactggctcgcccctccgaatggctggccaccattcagcaactcaaagcccccggccatgcacagatccgggcggactacacaagactcagcgccatcatcaaggcggtgcagcacagtggccttcagcgcctactagtgcgacgcctgacccaatggcaaagcattccctccagtgacgtcattgccgccgcacaaatggcgctgcagctggagcccggctgcgcccagggcaagcctttgcgcgctctgtcggtccagggaaatgacagcaagttctacgaacgccatgcaggcctcttgacaaccttgctggatgagcgttttgacaaggaggtcagccgccagggcctgaccgcctttctgggtgccctggctgaggatgaccattggctgctggtggtgccactggcccccggcctgctgccctttgcgcgccagcgtgtaccggccagcgagctgcaagccacgcccttgcccgcaaaccgcatcctactggtggaaaacgagcgcagtctgcatcagttgccgcagccgctggaggacaccatcgccattcttggcgcgggcctgaacctgaactggcttgacgcaccctggctgcgtgagcgcagcgtggcttactggggtgatctggacacctggggtctggccatgctggtcacagctcgccagcacctgcctcatctgcatgcgttgttgatggaccaaaccacattcgacacgcatagtcatctggccgtgaccgaacccgtacacgcagaaaagtttcctgctcttccacctggggaagcagctcttgatgcacatcttcgtagactggagcgtggacggctggaacaggaattcctgcccgccagcctagtgaagcaggccgtacgggcctgggcggatcaagctgccacaatatga

SEQ ID NO: 48881 - DNA, 1473 bp, Tepidiphilus thermophilus
atggaccacgccaccctctccctcctgcgcgagcgccatcccgcctggcggctgctggcttcgccgtacgcgccgctcgtggcgagttttctgcaccgggtgttcgtagcacctaacgtgcgggtaatgccggaggtcgacctcgtcgaagcgctggaggatgatctctatgcgctgcgcgaacagctcgggcctgacgcctaccccaagagcgccctggactacctcaacgactgggctgcacccgacaaggggtggctgcgcaagttctacaagcccggcacggacgaggcgcagttcgacctgacgccggccgccgagaaagcgatcgcatggctgcagacgctcaccgagcggccgttcgtcggcaccgaatcgcgcttgctgacgctcttcgcgttgctggagcagatcagcgccggaaccgaagccgacccggccaagcgcgtgaaggaactgcgcaaaaagcgcgatgcgctcgacgccgagatcgcccgcgtgctggcaggcgaggtaccgctcttggacgacacggcggtcaaggatcgcttcttgcagttccagcatctggcacgcgagctgctcgccgattttcgcgaagtggagcacaacttccgccagctcgaccgcaaggtgcgcgagaagatcgcgctgtgggaaggcgccaagggcgagctgctcgacgagatcatgggcgagcgcgacgccatcggcaactccgaccaggggcgcagctttcgcgcgttctgggacttcctcatgtccagccggcggcaggaggagctttccgaacggctcgatcgggtgctggcactgcccgcggtcgcgcagcttgcaccggatccgcgcacgcgccgagtgcactacgactggatggaggccggcgaacacacccagcgcaccgtggcgatgctctcgcagcagctgcgccgttttctggacgaccgagcattccttgagcaccgccgcatcctcgacctgctgcacggcatcgagagcaaggcgctggcactgcgcaaggccatgcccgccggcacggtcatgcacatcgacgccatgggcgcggacgtagaactaccgttcgagcgtcccctgtatacgccgagcgagaagcaacgtctggccgatctggcactcgtcgctggcaaggacgatatcgataccgcgcgtctgttcgaccagatcgtggtagacaaagcacgcctgcggtcagccgtgcagcgagcgctgcgctgccaaccgcagatcacactgcgcgagttgctggaggccgagcccttgcgccagggtctggccgagctggtggcttatctggagctagcccacgccgctgatgccggtgatgcgccgaacggctggcgggtcgtggtggatgatgctcaccccgagacgattcgttggcagggcagcgatgccgcgggcgagaccgtgatgcgcacggcacacctgccgcgggtgattttcacgcgctga

SEQ ID NO: 48882 - DNA, 681 bp, Tepidiphilus thermophilus
atgatgagcgatgccctgaacgacgacagcacgatggacgtgccgtccagcgcaccgccggccgtgcccgagctgtcgcggctaatggtgcacctcctcaagggcgtcctttaccgcgacgacgacgagcggctgtgggagagcctcttgcgcctgcaggcgcgcgtcagggaacaggccgccgtgctgctgctcgagctggtgctggacgaagccgagggcttcgcgttcctcaaaagccgcccagacccggacgaagccgacggcgcaccgcgcctgcctcggctcattgcgcgccggcctctgtcctacccggtaagcctgatgctggcgctgctcagaaagcgcctggccgagttcgacgctggtggcggcgacacgcggctggtgctctcgcgcgacgagattgccgagctgatgcgagtgttcctgcccgatggcaccaacgaggcccggctgatcgaccaggtggacgcgactctcgccaaggtggtcgatctgggctttctgcgccgactcaagcctgctgccggcagtgtgcaggaccgggggcactacgaggtgcggcgcatcctgaaagccttcgtggatgcgcaatggctggccgagttcgacgcgcgcatggagggttaccgcacggcgctgtcgtccggtgccgccaaggaggcaggcgatgcttga

SEQ ID NO: 48883 - DNA, 3438 bp, Tepidiphilus thermophilus
atgcttgaagtgtcaacgctcgacctcgacttcgtgggcgacgacagccgcgtgggttttcggctgcagcggctggaggtgctgaactggggcaccttcgacaagcgggtgtggcgcctggagctcgacgggcgcaacggcctgctcaccggcgacatcggctcgggcaagtccacgctggtcgatgccatcaccaccttgctggtgccggcgcagcgcgtggcctacaacaaggcggccggggcggacgcacgcgagcgctcgctgcgctcctacgtgctgggccactacaagagcgagcgcaacgaggtcaccggcactgcccgccctgtggcgctgcgcgatgcgtcgagctactcggtcatcctcggcatgttccgcaacgagggctacgaccaggcagtgacgctcgcgcaggtgttctggctgaaggatccgcagggccagcctgcgcgcctgttcgtagccgcggagcgcgaacttaccctcgccgacgacttcagcggctttggcagtgacatcacggcgctgcgcaagaagctgcgcggtgcgggctgcgaactgttcgacagctttccgccctacggcgcctggttccgccgtcgattcggcatcgagcacgagcaggcgctggagctcttccaccagaccgtctcgatgaagtcggtgggcaacctcaccgacttcgtacgcagccacatgctggagcccttcgatgtgggcagccgcatcgaggcgttgatccgccacttcgatgacctggaccgggcgcatcaggcggtgctcaaggccaagcggcaggtggatttgctcacacccctggccgaggacggcaagcgtcaccagcggctttcggccgagatccagggctggcgggaggcgcgcgaccagcttcggccgtacttcgcccggcagaagggcgagctgctggaacgccgcctcggtctgctggcgcaggatgcagcccggctcgacgcgcagatcgagcgcctggacattcagcgcgaaaccgagcgcatcgagcttggccgcctggagcgggccctgcgcgacaacggcggcgaccgcctggaggagctggcggcggagatgcgccgtctggagcaggaaaagatccagcgccagcagaaatcggatcgctttcagacgctgctggcgcgcatcgacgaggcagcgccggccgatgaagccggctttctcgcccagcagcagaacatcgcccagcgcgccgaaggcttgcgcgagcgcattgccgacctggacaaccgcgagcgcgaggaggactttgctttccgcaagggtcgtgaagagcacgccgtcttgtccgatgagatcgacagtctgcagcggcgcaagagcaacatcagcgccgcccagattcgcatccgcgatgcgctgtgcgcgacgctgggcatcaccgaagacgaactgcctttcgcgggcgagctcatccaggtgcgcgaggacgaacgcgactgggaaggtgccgccgaacggctgctccatggcttcggcctttcgctcttggtgccggaggcgcactacaaggccgttgtggactgggtggaccgccagcatctgggtgcccggctggtgtacttccatgtgcgtccgcgaaaggcggcgccgggcgtggcgctgcatccgcagtcactggtgaagaagctcgccatcaagccggattcgccgcactccgagtggctgggacaggaactgcgccagcgcttcgacgtggcctgctgcgacaccggcgagcagtttcgccgcgaggcacgcgccatcacgcgtgcaggacaaatcaaggacccgagcgggcgccacgagaaggacgaccgcagcgccatctccgatcgcagccgctacgtgctcggctggagcaatgccgacaagctgcgcgccttgcacgaccggcggcagcgtctggaggagaagctcgccatgctcgggcagcgcatcggcgaaatccaagcggcgcgcaacgaactgcggggccggctggatgccctcagcaaactggaagaattcacgcgctttgccgacatcgactggatgagcctggttcggagaatcggcgatctcaccgaggaacgggcgaggctggaagccgcctccgacgcgctgcaagaattggcgcgccagctcgaggcggtgcaagggcggcttacggaggtagagcgccagcgcgacgcggcccgcgacaagcgctcggcggtcgccaccaggaaagaggcggcgcaaacactgtgtgatcaggcccgcaccatttgggctgacgcaccgctgaccgaaacgcagatcgcgcgtctggacgcctggcgtgcgcaggcgttgggcgagcatcaactcacggtcgaatcatgcgacaaccgcgagcaggagctgcgcgactggctgcaggctcgcatcgacatggaggacaagcgcctggcgcgccttaccgagcgcatcgtcaatgccatgcgcggtttcaaggaggagttcaaggccgagacggccgaaatggacgttgcactcgcggcattgccggagtatgaacgcctgctcgccagcttgcagagcgacgacctgccgcgcttcgaggcgcgcttcaaggagctcttgaacgtcaacaccatcaacgagatcgccaacttcaacgcccagctcgcccgcgaacgagagacgatcaaggagcgggtggacttcatcaaccagtcgctcgccgccatcgactacaaccccggccgcttcatcaagctcatcgcgcagcccagtccggacgccgaagtgcgcgactttcagcaggacttgcgcgcggccacctccggcgcgctcaccggctcggccgacgagcagtattcggaggccaaattcctgcaggtcaaggccatcatcgaccgcttccggggccgcgaaggcctgaccgacgccgaccggcgctggaccgccaaggtcaccgacgtgcgcaactggtttttgttttcggccagcgagcgctggcgcgccgacggtgccgagtacgagcactacaccgactcgggcggaaaatcgggcggacagaaagaaaagctcgcctacaccgtgctcgcggcaagcctggcctaccagttcgggttggaatggggggcggtgcgttcgcgcagtttccgcttcgtggtgatcgacgaggccttcgggcgcggctcggacgaatctgcgcagtacgggctgcgcctcttccagcagctcaacctgcaactgctgatcgtcacaccgctgcagaaaatccacatcatcgagcccttcgtggccagcgtcggcttcgtgcacaacgagggcgggcgcgactcacggctgcgttgcctgacgatcgaagagtaccgggcgcagaaggctggggggacggcagcagggacggcatcgggcgcagcggacgggatggccgccgcaggcgcggcagaaggcgacgcggcaccatga

SEQ ID NO: 48884 - DNA, 1233 bp, Tepidiphilus thermophilus
atgagctggaccacgccggcagacctacgcgcccaggtgcaacgcctgtgggaacggggcgagttgctgcgtgcgacggtcacggacgccatggcgtggcccttgcgtctgagtttgaagacgcccagcgcttcggacctctccgatcgcttcgatgccgtgcgcgactgggtgcgcgccattgccgagatcccacaggttcgaatcgaatggcgcgagcggaaccaccgtgtgcaaggaatgcagcgtctccctgccgccgtctggctcgataccgtgcagaatgctttggccttgattggcaaggcgcgtcaggcgcagcggttcgaggcgctctggcagcagacggctgccgcgcagcccatgcttctggcgtggctgtcccggcggccgatccaggcactggagctcgccgaccgttgggaacgccttctggcggtggtggcctggctgcaggcccatccgcgcccgggcgtgtatttgcgccaggtggacgcacctagggtggacagcaagttcatcgagacccaccgcggcgtgctcgccgagttgttggacctggccctgccacccgaggccatcgacgccgccgcgaccggcaccgcccggttcgcccgtcgattcggcttcctcgacaagccggtgcgaatccggtttcgtctgctcgacccggcgctgcccagcctgccaggctgtcaggacgtgccgcagcagctacccgacctcacgctcgacgccgctagtttttcggcgcttcacctgcccgtcgctcgcgtcttcatcaccgagaacgagaccaacttcctggcctttccgccggtgaccggagccatcgtgatcttcggcgccggctacggctgggacgcactggcgcgcaccgattggctgcaccgatgccagttgttctattggggcgacctcgacacccacggcttcgccatcctcgaccagttgcgcgcccacttcccgagcgcggcgtccttcctcatggaccgacagacgctgctcgcccaccgtatgcactggggcgaggaagccgacccggcacgccacgacttgccgcgtctcacgcccgacgaggcggccgtgtatgacgacctccgcttcgatcgccaccagccccggttgcggctggaacaggaacgcgtgggctttggctggctgtgcgatcgactggcgcgcattcccttgaccgcccttcccccggaacctcgtctgcccaggcagaaataa

SEQ ID NO: 48885 - DNA, 1362 bp, Clostridium sp. C105KSO15
atgatattaatgaatgagataccggaccggttttggggattgttccgttccattaaccggtccacctacatagaagctttgttaaagatcaatgaagaatatgaatacagcaattactttttaagccgagaagtctgtattcaggttttagaagaatattttacggcaaaacggctggtcatttggcaggatgagctggaagatgaggcggatgtcctagagccgaccgcagtcagggtcttaaactggctgttaagggcaggctggctccggaaggtggatgactacgcctccatgacggtcaatatcgtaattccagattatgctgccgtcatgattgaggcgttttttaagcttacaagcgatgaagaggatgagacccagatttatatccagaacgtttatgcaatcctcttctctttaaaaaatgatcccagggccggagtaagccttttgaatacggcttacatcaatacaaagaggctcaataagacgttgcaggacatgcttcacaacatggacaaattctttgcaagtcttttggagaaaaaagcatatggggatcttttgaaagaacatctggaaggatatgtggatgaaatcgtaaaaaagaagtaccatatgttgaaaacttctgataatttctatctttacaaaaacgatatcaagcggtggatcggctccatgcgggaagatacggaatggctggagcagatgagccaccgcagcggacagaaagtgacggcagcggatattgtggaaaagctggatcagattgaaagaggatttgacgatatcgaacaccgcattgccaatatggacaaggagcattcccggtatatccgcgctacggttacaaggcttaactatctgttaaatcaggaggacaacatgaaggggcttgttatcaggcttttaaatcatttgtctgaaacagaggatccggatgaagccataaaggatgtgggaggccttatgaatttatcccagctatccattctctctgaaaaatctctttataaaaagagaagggccaggacatgttttaaagagaatttgatgccggaggaagagtccgcagagcttaccatggaggaagtcctgaatttaaaccgcttaaaaagccgctacagccggaaggagatcgaaagctatatcgaagctcatctggaaaatggccgtatggaggtaaaggaagatacggttaattctcctgaggagtttgaaaagctaatcctggcctatgattactctaccagaaggaaaagcatgtaccaggtggaggagcaggagacggagctcattgacaacggcagataccgctatcccaagctggtatttgtaaggaggaaagaatcatga

SEQ ID NO: 48886 - DNA, 651 bp, Clostridium sp. C105KSO15
atgacctatgaagaaagtgctggcctcatcagccagattccatattttgacgttttgggacagggagaaaaggaagaggtaagagccggtttaaggcttcttcttcagcagacctttgttctggagcataagtatgataagcgtaccaaccggtttgcctataacccggaatttaaaatttgcaacaaacatctggaatttatccgggcctatctggcagtcagcggagtgtctgttctggaaaacagccagctgggcattatttatatccagggagagagcacggtgggagataagcttcccaaactggctaccctttatctgctgatcttaaaactgatctacgatgagcagatggcggcagtttccaccagtgtcaacatttacaccacattaagcgagatccatgaaaagctgggaaattaccgattatttaagaaacagccctcaccaacggaaatccgccgggcaattacattgttaaaaaagtatcagatcctggaaccccttgatattttagaggacttagatggggacagccgcatgatcatctatccctgtatcaatgtagtattgttcggagatgatgtgcgggccctgttagaagcacttggggaaggagacgaagacgatgacgaaccagaaatttga

SEQ ID NO: 48887 - DNA, 3381 bp, Clostridium sp. C105KSO15
atgacgaaccagaaatttgaagccctgtcccggatactccttaataactggcattacatcagccggaagaccttatcctttaaccaggagatcaacttctttaccggacattccggcagcggaaagtcaacggtcattgatgccatgcagattctcctttacgccaacaccgatggaaggggattctttaataaggcagcagctgacgattctgaccggagtctgatcgaatatttgcgggggatggtgaatatcagtgaaaacaatgaatttgcctatttgcggaaccagaatttctcctccaccattgtgctggaactgaaacggacggatacgggagaatgccagtgcgttggaattgtctttgacgtggatacgaccaccaatgagatatccagaaagttcttctggcacaaaggtcccctttgggaaaacggttaccgtaccggttccaggaccatgaccattcaggaagtaactgcttatttgcagaccttataccccaaagaagattattttgcaacctcccacaacgagcggttccgcaggcagttgtatgatgtatacttaggcggtcttgattcggaaaaattcccccttttgtttaagcgtgcgattccattccgcatgaacatcaagctggaggattttgtaaaggaatacatctgcatggagcaggacatccacattgaggacatgcaggaaagtgtcatgcagtacgggcggatgcgaaagaagattgaagacacagttgttgagatcggttatttaaatggaatgagggaaaagttctcagcagttcgtgaaaaagaaggggagattcgtaaaaatacatatttcttccgcaagatggaaattcttgattatcatgcaaggatccaggctttaacggataagtccaggcttgccagggaggatttagaccgtcaggaaggccagcggacagcgttagaaggacaaatggaagatttaaccagacagggaaatgaactgcttggaaggatttcttccaccggttatgaggatcttaagaatcagctggactcagctaaggaattatcaaaccatttaaataaaagttttaccaaatggtctcagacaggagaacggctgaaggaatggatagaggaagaggctacctccaaccagaccatatgggatatagaagaatttgaaaagaataccattgatgaagagaaattaaaccgcctgaaaaaatccattgccgaaatgaggaatgaaaccgaagaagctcaaaaagaggcagaaggaattcttcgggatattcggaaaaaagagcgccagacaagtgaagaactgattcagctaaaggccggaaataaagcataccccaaatatctggaacgtgcacggtccctgatccagcagcggcttttggaagaaaccggcaaggcggtggaggtccatgtacttgcagatcttcttgacatcagggatgagacctggagaaatgcggtggaaggctatctggggaataataagctgtccctggtagtggctccggcttatgcagaagcagctatggcggcctacggggaactggaccgggctgagtattttaatgtggcagttctggatacagaaaaggtagggcagaattcctatgaagtagtaaaaggcggtcttgctgaagaaattacagtgagagaggcttatttacagccatacattgacttacttttgggcaaggtcgtcaagtgcacgaacttggaagagctgcgccacagccgcataggagtgacccctgactgcatgctataccatacgttccgcctgcagcatatgaatcccgataattatacgaaatttgcttatatcggcaaggacagcgtcaggagaaggatccggcttctggaaaagaatctggtttccatggaagaggagaaaaagcctcaggaacaggttataaaggaatgcaaacgtatcttatccatggaagacttaggagaagacacgggcgtttacctggagtggcagcaggatatggaggcctttaaggaaaaagaaaaagagatcaggcggctggaacagaagtttgaaaagctgaaggcccaggatgtagaagcgtgggtgaaggaaagagaagccatcttacagctctgcgatagaaagagggcggagcagagtgcagtcgcagagttgatttttggtatcaacagcgagatcgaacgcttccgcagagaatccttgcagctgcaggaagaactggtcgcaaaagaacgggaatttgaaccggatgaggaactggaagccaaggttcatgaaattttggaaagcagagaaaattgccggtacgaccgtcttaagaatgaatttttcggagaatgcaggaggtcggaagaagcccgtgatcaggcgttccaggctcttgtaggctccagaggtgagtatgcaagaaaatatcccaatcggaatttttccctgacagcaaaggataatggggaatatgaccgacttcttgagaccatggagtgcggaaatctggaggaatataaaaagatggccgctgagcaggctaagtctgctgtccttcattttaaggatgactttatgttcaagatccgaagtgccataagggatgctcttttacgaaaagatgagcttaataagatcatcagcaaactggatttcggaaaggataagtatcagtttgtcattggaaggaataaagggccggatgggagatattttgacatgttcatggataattccctggaggtaaatcccgcctatcttacggataccctggataaccagatgaacttattcactatggagcatgagaaccagtacggagaaatcatcaatgacttaataaacatcttcatcccaccggaaaatgccacaacggaggagatggaagaggccaaacggaacatggataagtatgcggattaccggacgtatctatcctttgatatgcagcagatcattcagaacgaggacgaggtcattaagatccgtttaagcaagatgatcaagaaaaattccggaggcgagggacagaatccgctttacgtagctttattggccagctttgcccaggcataccggatcagtttatcacctaagatacagagaaatccaacccttcgcctggtggtgcttgatgaggcgttttccaagatggatgcggaaaaggtagctagttgtattgagctgatccgaggactgggcttccaggctatcatcagcgcaaccaatgacaagatccagaattatgtggaaaacgtggacaagacctttgtgtttgccaatcccaataaaaagtccatatccattcaggaatttgagcgggagagttttccggagctgatgcgggagcttgatgaagaggagaattatgctgacgttgattga

SEQ ID NO: 48888 - DNA, 1191 bp, Clostridium sp. C105KSO15
atgctgacgttgattgatataattattagtgaaatagaaagaagcactgtggcttggagagagggcgcaaaaggcaatagaaatattgaaattcagcaagaggatttagatgctatggggaaacaaaactttttaaaacaagctgcagaattagagagtcaagggcttgtgcggtgtaaatggattatcgacaggtcggatatttctcatgtgaattattcttacggcgatgtaagagggctatataaaaaggcaggtaagatccccaaatcagaccgtattagggaaatgaaggaagctgtggaagaacagataaaaaagattcataaaccatggatcctggcttattatgacggagttcttaaaagcttagaggctggcaaagaaccgaaggaactcaaccatgaaaacagggaactaaatttcaactgtttttttggaattgataggttagaaggatctgtatacaaaagagtgttcagtaaacaatttttgggaggctctaaggtctttgagaaaaagttacaaaagagtgtagcaacaattgccaaaaaatattatgatatcattgatgaaaatatgaccgagtcggagatcctggcccagatttatttggatcactatgcggatgaattatctttaaaaggagatctgcttatcaaaatcgatgataatgaaattgatttatcccttcttccctatggaacagttttaaatagtataactcttaaaaaggttatcatagttcctaaacaaaaaattaaaaaaattataactgtggaaaacaaagctaattatatgacatttccttatgaacaagggactcttgttttgttttctcatgggtatttctctcctagtgagagaaaggttcttggagagttggcttcgattcttccggaagataaggtggaattttatcataccggagatttggattatggtggaatccggatttttgaatttatcaggaaacaaatattccccaagctcaggcccttacacatggatatggagacttggagaaaacactcaaaatttggttatcagattgaagagtcaaaacgggataagttgaaagtgatgcttgatgaaaataagatacaggagccagatttacaaaaactggctgccgtaatctgcgagacaggaatcggtattgaacaggaaagttttctattcactgaataa

SEQ ID NO: 48889 - DNA, 1383 bp, Clostridium sp. C105KSO14
atgatactgatgaatgaaataccagaccggttctggagcctgttccgctctgttaaccggtctacttacatagaagcccttcttaaaatcaacgaggagtacgagtacagcaattacttcctcagcagggaagtctgcatccagcttttaagtgaatatttctcccggaaaaaatatgtcatatggcaggatgagaccgaggatgactgggatgaactggaaccgcctgccaccagggttcttaactggctgctgcggaccggctggctccgcaaggtggatgattacgccagcatgacggtcaacatcgtcatcccggattacgccgcggtgatgattgaggcattttcccgtttgtctaacgacgatgaggacgagacccaggtttatatccagaatgtctatgccattctattttctctgaaaaacgacccccgctccagcgtcagcctgttaaatacggctctggtaaacacgaaaaaactgaacaagtcccttcaggacatgcttcacaatatggataagttctttggcagcctgctggaacagaagaattacggtaccctgttaaaggagcacctggaaggatacgtgacggaaattgtcaataaaaaatatcatatattaaagacctcagacaatttttatctctacaagacagacattaaatcctggatagccgccatgcgggaggacagttcctggatcaataaaatgtgcgccaaaagcgcggcttcaaccagggggcagaagaagacgcccctgacagaatacgatattgtggagaagctggaccagctggagcgtgggtttgacgatatcgaacaccgcatctccaacatggacaaggagcacacccgttatgtcaaggcaacggtcacacgcctcaattacctgttaaaccaggaggacaacatgaaggggcttgtaatcaaacttctgaaccatatgtcggaatacggctgtccggaagaggaactgacagctgtaagcgccgggatgaacctgtcccagatgaccatactgtcagaaaaatccctgtacaaacgccgtaagaccaaggcggatttcacggaacagttaaaggatgaggaagaatccgaggaactgtccatggaggaagtcctgaacctgaacaaggtcaggaaccgttacagccagaaggagattgaagcatttatagaaggcagcatggcagacgggaaaatggtggtggacgaacaaaccatacattcagaccaggactttgaaaaactgatactggcctatgactattccaccaggagaaagagcccttataaggtggaagaggaagattcggaaatggtacacagcggcggctatacctatccgcggctggtatttgtcaggaggacaagatag

SEQ ID NO: 48890 - DNA, 750 bp, Clostridium sp. C105KSO14
gtggaaaacatggaattggaaaacagcgtggcagacatcgcgcccgcggccggatacaccggaaacagcatcccttactacgacaatctgatgcactcggagcagtcggaagtgacggaaatcatccgcctcctatggcgccagacgttcatactggaacataaatatgacaagcgtaccggaagattccagtacaacagagactaccgggtatgcagcaaacacctggaattcatcaagaattattttgccatcagcggagtggagctgcgtgaaaacagccagatgggcgtcatgtacatccagggtgaaaatgtggtgggtgacaagctgccccgtctcgccaccctgtacctgctggtgctgaagctgatatacgatgaacagatggaaagcgtttccaccagtgtcaacgtctatacatccctgcgtgaaatccacgaaaagctgggcaattacaggctgtttaagaagcagcccgccctcacggatatacgccgggcagttacccttctgaaaaaataccaggtcattgaacctttggatctgttagaggacttaaaaagtgaaagccgcatgataatatatccctgcatcaacgtggtgctcatgggagacgatgtgcgccagcttctttcctcctttgatgaggatacggatgacagcggagtccagctgaaggccgaactggaggaagaagacgcggatgatatgacagcggaggaaggagaaccatggaacagaaaatag

SEQ ID NO: 48891 - DNA, 3390 bp, Clostridium sp. C105KSO14
atggaacagaaaatagcaaatgatcgttttctcgccctttccaggatatgtttgaataactggcactatataacgaaaaggactctgtcctttaatgatgaaatcaactttttcaccggacattccggcagcggcaagtccactgtcatagacgccatgcagattgtgctctacgccaatacggacggccggggcttcttcaacaaggctgctgccgatgactctgaccgcagcctgattgaatacctaagaggtatggtaaatatcggcgacaacaacgaattttcctatctgcgcaaccagaacttctcctccaccattgtgttggagctgaaacgaagcgatacgggccagtgccagtgcgtgggaattgtctttgatgtggagaccgccaccaatgagatatcccgccgcttcttctggcacaaaggccccatgtgggacaatggctacaggggcgggaagcggaccatgtccatcgtggaaatagaggactatcttcaggccaattacaacagggaggagtatttcctgacctcccacaacgagcgtttccgccggatactctatgattcctacctgggcggcctggactccgaaaaattcccccttctcttcaagcgggccatcccgttcagaatgaacatcaagctggaggattttgttaaggaatacatctgcatggaacaggacatccatatcgaggacatgcaggaaagcgtcatgcagtacggccgcatgagaaagaaaattgaggatacatgtgcggaaatccaatccttaaaacagattgaggaccgattccaaagctatgctgacaaggaacagcagctcaaaaaatcttcctattttgtgcagaaactggagattctgcagcttcagtcagaggtccgcaccctggcccacaaggcaaagctggcgggagaggatctggaaaagcagatccaggccagaagctccgtggacgaacagattggagaactgacccggcagagcgacgagctgctgcgccgtattgcctccactgggtacgaggaacttaaaaaccagcttaagagcctgaatgaactgctggaacagctgggaaaaagcgaggccaggtggcagcaggccacagatgccttaaagcgctgggaagaagaggacatcacctccaaccagactctttgggatatagaggaatttgaaaaccgcaccattgatctggagacattggaacgcctgaaaaaatccatggcatccatgcgctcagacacggaaaagcagcatcaggaggcgtcttccgcactcagggagctcaaaaagcaggaaaagcagacaagggatgaactggaaaagcttcgttccggcagcaaagcctatcccaaatacctggagaatgcccggagctacatccagcgccgcctcctggaggaaacgggtaagagcgtggatgtgcatgtgctggccgatctgctggatgtaaagagagatgagtggcgcagcgcagtggagggctatctgggaaataacaaattaaatctggtggtagctccaaaatacgccaggaccgccctggaaatctacggggaactggataaaaaggaatacttcaacgtggctgtgctggacacggaaaaggcatcccagaaccagccccaggtacaaaaaggcgccctctcagaggaagtgactgtgagggaatcctacttaaggccctatatggacctgctccttggcagggtcatcaagtgcgataccatagatgaattaagggaatgccgtatcggcatcaccagcggctgcatgctctaccacaccttccgcctgcagcacatcaacccggataactatactaaattcgcctatatcggcaaggacagcgtccggagacgtatccgtcttttggagcaggagctggcggccctggatgaaaagaaaaatccattggaggagacggtcagggaagcccatagaatcctggcgcttccctggctcttagctgagcccccggaatacatggactggctgaaggacataaacagctataaggccaaggagcgtgaaaagaaaaagctgatacagaagctggagcttttaaaggagcaaaatgtagaccggttagaacgggaccgccaggcggtcatcacgctctgcgacggcaaaaagagggagagggacagcctgaatgtactcatccgcgataaagagcgggagatagaaggataccggaataagtccattgacagccagtccgttctcacgtcaaaggaacgggagttaacgcaaaatcctgactatgacaatgaactgacagcctatctgtcctccagggatacggtgcgctatgacagggaaaaggaaacctatactgtcaggtgcagcaagctgtctgaggccagggaagcagcctttcaggagcttctgacggtcaggaccagctatatccggacgtatcccaaccgcaatttcccggtaaacgccagagacaacgctgtctatgatcaccttttaagcgccctgaaatgcgacaatctggaagaatacaagcagaaagccacggaacaggccaaatccgcggtagagcatttccgggatgacttcatgtataaaatccgcagcgcaatccgggaggctcttatccgcaaggatgagctgaaccgcatcatcagccgcctggatttcggaaaggacaagtaccagtttattattggccgcaacaaaggacctgacggccgattctacgatatgtttatggatgattcactggatatcaatccggcggacctcaattattcctatgaaaaccagatggacctgtttaccattgagcatgaaaagcagtatggggatttgatgaatgaactcatcagcatttttatccccccggaaaacgccgccccggatcagatggacgaggccaggcggaacatggataagtattcagattaccgcacctacctgtcctttgacatgcagcagctcatacagaatcaggatgaggttatcaaaatccggctgagcaagatgattaagaagaattcaggcggagaaggccaaaacccgctgtatgtggcccttctggccagttttgcccaggcctaccgcatcaatcttccctctaaggtggagcgcaatccaaccatacggctggtagtactggacgaagcgttttccaagatggacggggagaaggtggccagctgtattgaattgatccgcggacttgggttccaggccatcatcagtgccaccaatgacaaaatccagaattacgtggaaaacgtggacaagacctttgtctttgcaaaccccaacaagaagtccatatccatccaggaatttgaacgggagcgctttgtggagctgatgcaggatgaagaagataggaatgagtttgcggatacatga

SEQ ID NO: 48892 - DNA, 342 bp, Clostridium sp. C105KSO14
atgaacgcaccgctggaatgtattatccgaaaatgcgagattcatctggaacgggttctgtccagcatccggacttcctgcgggacgacctatctccacaccggcgacttggattatggaggagtcaagatatttcaatatattaagaaacgcatcttcccaaatctgcagccgtatctcatggatacacaaacgcatgaacagtataaggcatacggtgaacccatagaaaccattaaactggaaaaattgcagcggaccaccgaaccgctccttcagcccctcatagacaaaatctgtgctgaaaaacaggtgatagagcaggaatctttcctgttttga

SEQ ID NO: 48893 - DNA, 1473 bp, Xanthomonas oryzae pv. oryzae; identical to SEQ ID NO: 41663

SEQ ID NO: 48894 - DNA, 699 bp, Xanthomonas oryzae pv. oryzae; identical to SEQ ID NO: 41664

SEQ ID NO: 48895 - DNA, 3432 bp, Xanthomonas oryzae pv. oryzae; identical to SEQ ID NO: 41665

SEQ ID NO: 48896 - DNA, 1182 bp, Xanthomonas oryzae pv. oryzae
atggcccccgccgcgcccatgatgttgcctgccgctgcgctgctggccttgcgcgggcagtggcagcgcgcacgcgggcagtggctgatcggcgagggcgcaccgcaggcgatcggattgcgggcgccgacccaggcacaggccatcgcgcggttcgatgccttcggtgcgtggttgcaggagtggagccgcacaggcctgccggggcgggtggagtatcgcgcggtgagctggacgcagctggggccgcagcgcctgccgcagacctgggtgctggacgatgcgggccaggccgccggcgcgcttggcgagggcgagcgctgggcgcgtgcccgccaacgcagcgctgccttgcaggcgcgctggccgcaggcggtcgcgctggcggcgcggctacgccgtcaattcgatctgctggccgactggccggaggtcgagttcgcacgcttggtggcggtggtggagtggctgcaccagcatcgcgacagtggactgttcctgcgccagcttcccatcgccggcatcgacagcaaatggatcgaaccgcatcgcggcgtcatcgccgactggcttgccggcctgcgcggcatcgccgagccgcgcagctttgccagcctgtccggcctgcgcaacgcgccggatcgggtgcgcttgcgattgctcgacccggccctgcgccaccacatcggcggcctggaggacatcaccgcaccgatcgcgcagatcgccgcgctgcgtctgcctgtgcgccgcgtgctgatcgtggaaaaccgcgaaaccggtctggcctgcgaatcgctgccgggcacgctggtgctgatggcgcgcgggtacgccgtcgaatacgtgagcaatatcgggtggctgcgcgaattgccgctgtactactggggcgacatcgacacccacggcctggcgatcctgcaccgcctgcgcacgcacgctccgcacaccaccgcggtgttgatgaatgaggccaccctgcaggccactccgcgcgcgttgtgggggcacgaacgcaggccgcaccgcgcccaacgcctggctgcgctcagcatccaggagcagcgcctgtatgcggacctgcgtggcggccggttcggtccgtcgccgcgcctggagcaggaacgtatcgcctgggactatgcctggccgcgcatccaggccgcattggcggactga

SEQ ID NO: 48897 - DNA, 1353 bp, Pseudomonas aeruginosa; identical to SEQ ID NO: 43741

SEQ ID NO: 48898 - DNA, 663 bp, Pseudomonas aeruginosa; identical to SEQ ID NO: 45502

SEQ ID NO: 48899 - DNA, 2940 bp, Pseudomonas aeruginosa
ctgggggccgtgctctggttcgaacgcacaagctcctcggcatcggatctgaaaaaactgtggctgttaagcgagtcccccgagcagactctggagcattggctcagccagcatcacgcaggcggtatgcgggctttgcgtcagatggagaaggatgggacgggtatctggccttatcccagcaagaaagctttcttggccaggctgagggattacttcgaggtcggtgaaaacgcattcaccttgctcaaccgcgctgccggcctgaagcagctcaatagcattgacgagatctttcgcgagttggtgctggatgaccgttccgccttcgagcgggccgccgaggtcgccggcagcttcgatgatctaaccgacattcaccgagaactggaaacggctagaaagcagcagcgctcattgcagccggtcgccgatggctgggagcgttaccaggtcttgcaagaacagctgcacgataagcaggctctcgaaggtatcctcccggtttggttcgccgagcaggggtatcgactgtggttggctgaaaccaacaggctcgagaaggagtacaaaaaggccgaactggatcaggagcaatgcaaaagtcagcttgaggcccagaaaggtgtggtcgatcaacatcgccagcgctacctgcgagtagggggcgcagggatagatcaattgcgcgagcgcatcgctgattgggtgagggagtgcgataagcgcagcctgaaagccgagcaataccaactcttggccaaaggccttggactagcggatgagttatcggccgctgctctcaaggagaatcagcagcatatcgcggcacgcctggaaatactggaccaacaaattactgacgcgcgccaaaaggcgttcgacgcaggcctcgtccagcaggaactcaatggtcgcctacagaccttacagcaggagggtgctgaggttgagaaacggccaggctcgaacctgcccgggcaatttcatgctttccgaagcgatctggcgcaggcgcttggtgtcaatgagtcggccctgcctttcgttgccgagctggtgcaggtcaagcccgaggagctggactggcgtggcgccatcgagcgggcaatcggtagccaccggctacgcatcctggtgccgcaggactcatcccaggccgcactgcgttgggtgaatcaacggcacaaccgcttgcatgtgcgcttgttggaggtacaggagccgacgtcgcgccccgtgttcttcgacgatggttttacccgcaagctgaccttcaaggagcatccgtaccgagaagccataaaggcactgctggcggacaatgaccgccactgcgtcgaaagcccggagcaattacgtcatacccctcatgccatgacggctcaggggctgatgtcgggcaaagaacgcttcttcgacaagcaggaccagaagcgtctggacgaagactggctgaccggcttcgataaccgtgaccgtctggccttcctggctgagcagattcgcgaggtcaatgagcggctcgagccagccaagctcgccttggatgctgcccagggcgacgttcgtcagttggagactcaagcttcgctgctgaatcgtgtcaaagaactgcagttcgaggatattgatctgccgggtgcccagagtcagctggagtcgctgcgtacgcaactggccaccctgacgcgccccgattctaaccttgccatgatcaaggtcgagctggatgcggccgaggccctgcaggagtctctggatcaacagctccgccaactgatcgaacagtacgttcagttaaaaactcagtttgaccaggccgcatccgctacccgtaaggcctataacagcgcggagaaagggctgaacgatacgcagcgtgaactggcgcaagcgcatttcccgactctgaccgcggatgacctcggcgatattgtcgagctggagcgcaagcatacgcgtgagcttcaagggcagctcaaagcgcttggcgagaaactgggcgatcagaaatcagagcttgccaaacgtatgtctgatgccctcaaggtagacaccggggcgcttgcagaggtcgggcgagagctggtggatgtccccaggtatctggagcgtctgcgtgtgctgaccgaggaagccttgccagagaaactcaagcgcttcctggaatacctcaatcgctcctcggatgacggcgtcacccaactgctcagctatatcgaccatgaagtctcgatgatcgaggaacgcctggatgacctgaatagtacgatgcagcgtgtcgactttcagcccggacgctatctgcgcctggttgcaggcaaggtcatccatgaaagcctgcgcaccctgcagcgcgcccagcgccaactgaactcggcgcgtttcatcgatgatgaaggcgagagccattacaaggcattgcaggatcttgtggggttgctcaaggacgcctgcgaacacagcaggaatcagggagccaaggcgcttctggatccgcgcttccgcctggagttcgcagtatcggtgatcgatcgagaaagcaggaatgtcatcgaaacccgaacaggttctcagggcggtagcggtggcgagaaggagatcattgcctcctacgtgctgaccgcttccctgagctatgcgctttgtcccgacggcagcagccggccgttgttcggcaccatcgttctcgacgaggcgttctcgcgcagctcccatgcggttgcaggtcggatcatcgctgcgttgagggaattcggcctgcacgctgtcttcatcacgcccaacaaggaaatgcgcctgttacgccaccacacgcgttcggcagtcgtcgttcatcggcgcggcctggagtccagtctggtttccctgagctgggaagctttggatgagcatcatcaacagcgcatcaaggccatgcatgaagtcgcccactga

SEQ ID NO: 48900 - DNA, 1182 bp, Pseudomonas aeruginosa; identical to SEQ ID NO: 44163

SEQ ID NO: 48901 - DNA, 1443 bp, Arthrobacter sp. ATCC 21022
atggactactacgcgatcaacgcgctgcgcgaaaagcatgcaggctgggcattgcttcgagcccaaaacgcgcccctcgccctgcacttcttcatgtccgccttcacggaccccaatcagcggaacgtcgggcgccaacagctgattgacgttctggacgatgtcttgttcggcgtacgggaaacctatggggaggagaagtttccccgcaacgcctcggagtacctggatgactgggccgcgtctgagcgcgcttggctgcgaaaatactacgtccaaggcgaagacgaaccgcattacgaccttactccggcggctgaagatgtggtgcgctgggttgagagcctcaaaggccgcgagtttgtggccacccaatcgaggctgacaagcatctttgccgtgttgaagaccctcgtacagcagtcagagacagacccggacgtgcgatgggctgaacttcaacagcaacggaaccagattgatgccgagatgcaccggattcgtgagggagacctcaaagtcatgactgcaccggaggccctggaccacttccaacagctcaccaccctggcaaaggacctgctctccgacttccgcgaagtcgagcagaacttccggaaactggacagacaggtccgtgagcagattgctacgtgggacggcagccaaggagaactcctggactcaatcttcgccaaccagcaagacatcggaagctcgctccaaggccgcactttccagggtttctgggactacctcatgtctccgcagctgaggagagaactcaacgacctcctccacagggctacccggatcgaagctttggcccggatggataacctccacaccatcaccaacctccaccaggattggctacccgcagtggagcaaacacaggccacggttagacagctctcacaacagatgagacgcctcctggacgacaaagtcttcctcgagaacaaacgcatcatgcaacttatccgaagcatcgaggcgaacgcgctggaccaacgggaccagccgccgtcgaactttgccatggagattgaagcgtcctccgtggacgtcgccttaccgttcgagcggcctctttacgagccgggcagccgcgtgatggtgatggatgatgttgttaccgcagatgatcaggatctggatgcgagcgcgctgttcagtcagtttcatgtggaccgtgagcgcctgaagtccaatatcgaaagtgtcctcgaggaggagaaccaggcgacgctggcggacatcacggcggcccatccgttgtcccaagggctcgcggagattgtggcgtactaccagctcgctgcggagtcggactgggccagcatcaaccccgaaactacgcagcgcctccattggactttggaggatggcagcgtccgggcagcagtcatcgatcagatcatttttgtgaggccggcatga

SEQ ID NO: 48902 - DNA, 591 bp, Arthrobacter sp. ATCC 21022
atgaatactgcaagcgaaacgtccagtccggaagagttgccgggaatcgtgaccaagctgttcaagggtgtggtctacgcggagactgacgagaaggtctggcaatcgttgctcgccttgacgtcccacgtgcgcgattatgtggcagtactggggctgaacctgattctggacgaatccgagggctacgcttttctgaggtcccgggaggatcccgaaggcacgctcccccggcttattccgcgcaggcagcttactttcgatgtgagcttgctgcttgttctactcaggaaacggttgttggagttcgataccaacagcagtgaactccggttgatcatgacggaggaggagctaaaggacatggtcgcagtgttcctgccggagtccagtaacgaggccaggattctggaccggctaagcaccaacatcaagaaggtggtggagctcggcttcttgaggaagctccgcggcgaaacggggacttacgaggtagcgcgtatcttgaaggcgtacgttgatgctcagtggctggaagagttcgacgcgcggctggccgactaccgtgaatcactcaccggaagcaaataa

SEQ ID NO: 48903 - DNA, 1257 bp, Arthrobacter sp. ATCC 21022
gtgccgggtaagtcagctgcttcccggtggacctcgttggctgacttgcgagcgctgtctgcaaccgcgtgggatcgggggcagctcctgcgggaagctattgatccaagcggggtttatccacgccgccgggtgttgaagcgcccatcggctaccgaactgcgcgatgactacgcggccgcccgcgactgggcagccaggctcttcgccgcagagggtccgttcagtttggaaaccgccgacgtcggccgcaccactatcggttcaaaccgccttcccgctgtggctgtgtttgcttctgtggaggacgagattgagttcgccggcaaacagcgggaaacgaagcagtttctgtccttggccgccgagctgggcggcttggacccggcgctccaggcctgggcggcgaaacgtccgaagcacttgctggttctaggtcaagacgctttgctcgctgcccgggtggcgctctggcttagggatcacccctccccctccgtttatgtgaggcagttgcgtctgcccggcgtgcacaccaaattcatcgaggcccaccgcaggacaattgacgagatggtggaggcgctgaggcccgtcctggcagaaacattgcctttggacggcgattcagatgcggcagacccgggccttgacgactctgtccttggcacgccgatagcccgcactcccgcagctcgtttcgcggagcgccacggcttcctccatcagcctgagcaggtgcgtttccggctattggacccgtccataccgctgctcggtgatgcgcgggacattacggtgacagcctcggcctttgaatcgctccggctcccggtcacccatgtgatcatcactgagaacctcgtaaacttccttgctttgcaagagcggcacgggacactcgccatcttcggtaagggctacggtttctcatcattgagggacgctgcctggttgcagtcctgtcaggttctctactggggtgacttggacactcacggcttccgcatcttggaccagctcagatccgtgcacccgcatgtggcgagcgtgctcatggacgaagcgactctcctggcgcaccgggacgcgtggagcatggaggcgtcgccttcgcgtgctgcgttgacacgcctgacccctgacgaagccctcgtgtatgaggcgctccaggccgggacttatggggacagggtccgcttggaacaggagctgattgcgtgggagtgggcgctgacgcggctcgagtctgactga

SEQ ID NO: 48904 - DNA, 1458 bp, Arthrobacter sp. ATCC 21022
ttgtcccgttcagccatgtcctccgccgacgccatcagtgcccggctgagggacctcgaacagctcaccaaagggccggcctggacgttgacgcgttcggcgccgtgggtcatcgcggtgctccaagcctccttcacccgcacccggccgcagcttccgctcgaagagttccatgccgacgtcgacgctttccttgagcagctccgccgccaggacccagcgctcggcgggcagctgaacggcaaagctttcggcgacgagtggacccgaaaacagttcctcacccgtcgtaaccagtccggccagatcgtctacgaagtcaccgaagccgcagcccgcgtgctcgccttcctcgacagcctgtccagtgaacgctcaacgctcaacggctcccggctgggcaccctgctcggcgatgtggagaaactcgccaacgagaccaacccggaccagagcgcccgccttgaagccctcgaggaggagatccaggagcgtcaacaactggtggaggacatcagttccggtgaattcgacgggctcctggacgatgaggaagcggtggaggccgccggcaacattctggacctcgcggccagcctgcccgccgactacaagaagatgcgtgaccgcattgaggaactagtgggtgaactccggaaccagatcattgaagagtcgctcagcaagggtgccaccatggcccaagtgctcgaagcggacaagcggctgaggcagagccccgagggtcgtaccttccgttcattcacggcgttcctcgaagacccgcagcagcaattgcgtttccgctcagccatcggcgaggtcctgagcaggcagttcgcagacgatctcacccacgaggaccgggaaaccctgaagaacctcgtcgccgagctccggacgcagcacagcgagatccagcggatctacggcaagctgtcggaaagcctcaacacgtatatccagagtgacgatgtccgccagtcggtcacgctccgcaaggtgctcgccgaggccgagcaggcaatccgttccatgccatacgagcgggaccgtccgggccttgtccccgggcccgtcctctacaacgcgggcttcgagtcgctggccatggtcaagctcttcgaccccgacgagttcgccacgccaccccgtctggcggaccccatcgctttcaccgactcggaccgcgtcaagtccgcccgcaccggaaaggcaaggcccgacgtcgtccgtgccgccatggcagggtccgcaaccctgggcgaggcgtgggaaaaccttcccgctgaggaacggcacatcaacaccgtccgttccctcctgtccatggccttgcagaccggcgccgcctttgaccgggccgcctgggagcacatcgacttcgaacaaatcgacggcagcatccgcacggcatatctgcccgtcgtcacgctgaatgaggattctgatgactga

SEQ ID NO: 48905 - DNA, 882 bp, Arthrobacter sp. ATCC 21022
atgactgaggaaatcacgacgacggaactcgccgcgacggataaccccaccatggatggtggccgggaagaggtggagacgcacaccgcggatccgttccgtgtgtccccgagggatacgttcgttgacggtgcagctctcttccccggggataccggcgtcctgcccatgaaagtccgccacgccctggtcaaactgctgaaagggccgtacatcgacggcggccgcgacgagaagctctggaccacgctcctggataaccaactgatccttcggagccggttgtcggaactcttcctgacgctccagctggaccacgaccgcaagatcgcggtcctgcgcccggtggatccggagatcatcggggcaagctcccggtccagcatcctccgccaacagcgcgccctcagccgggtggaaaccatcgtcctgctgcggcttcgcctgctcctggaccgccatgtcacggcccagacggatccgaccgtaacgcgcgaggagatctccgacctggtagcgaactacaccccggccggccagcaggatgccttgcgggactccgacgtcgtgaaccgcaccatcaccaaactcctggcccgccaactgctcctggccacccccctggacgacacctacaccatcagcaacgcactcccgctggccctccccttcgaaaacatcggcgacattccggcccacatcgaagccctggtggcagtagcagccgacgaatccggcaccgaaccgctgcttgacttggaccccgattcacatcaaaccagcccctcagatgacgacatggacgacgacacggatgacgacggacccgctgcggtgagttccgccgcggactcaaccgacgccgaagggaccacgaagtga

SEQ ID NO: 48906 - DNA, 3444 bp, Arthrobacter sp. ATCC 21022
gtgacgatcgcaagcatgctcccgttgggcgaacagacgaacccgggccagatgcgccttgccctcgtccaggtggtcaactggggcaccttccatggcgcccacaccatgcacgtggaccgcaacggcacgctcctcacgggtaattccggcgtcggcaaatcgacgctctttgacgcgatgctccgagtatttgatgcccgtccgcgttccaacgaggccgcggcccagcggtccggcggtgctgtggaggacaagaggaccaccttcacctacatgcgcggcaaggtcggtgataaggcggtcggcgacagctcggccagtgccttccagcggcctggtgccacctggtccgccgtcgcactcacgtttgataacgcagccggcaccaaggtgacgatttccgcactgttcgacctgcccaagaacggcaccgaatcgagcgtcggccggttctatgtgatcgacagcaagcctttggatcttgaagcgatcgaggggatcgcgcagaagcggttcaccaagggcgcgctggagtcgatcttccccgaggggcaggtcttcgacgtccataaggcttttgccgagcggttccgccggcttctgggcatcaattcggaccaggcgctgcccttgctccgcgtcatccaggcaggcaagggcctgggcggcagcgtcaacaccttcttccgcgaccaagtgctcgacgctcctgcgacgcttgccgccgcggacgatgtggttgaggaattcagcaacctgatgtccatccgccagcggttggaagacgtccggcagcagcgcgaccagttggcaccggttcccggcctcaacaaggaatacgcgcaggcgttgctggatgccaaccggctccgtgagctgacgggcgaggaatttgaggcgtacaaacagcagctcgcggtttccgtgcatgccaagaccttggccaggttcagggaattggcccagcagaaagcgcaggaactcgcggcggagcggaccatccgggacgcgctcgccaaggaactgcgggagctggagtccgactacaacaaccgcggcggcaacgcgatctctgccattgagcagtcgctggagaacgcccgcgtcggcctgaagctgcggcagcaggtggaggagtctgccaggaaggcgttgtccgatgccgggctgaacctggaatggtcggctgaaggttgggaccaggcccatgagcaggccgcagcgcggtcggcatccttgcaggacgactcggagtccctcaaggaactccgttttgaggcgttcgatgcccacgccaccaagaagcgcgagctcgcagcggcccagcaggagttgttgtcgctgcgttcgcgcaagtccctcctgccgccgtcgagcattgaaaaccgggctgcgatagctgcggccactggcgtacccgaggaacggatgccgttcgcgggcgagctcatcgatctcgcggagggccaggagcagtggcgtccagccgccgaacgcgcgctccgcaacctcgcaaccactctgctggtcccgggtgagtacttcgcggccgtaacccgctacctgaatgacaacaccatccgcggagcccttcgcgccgtggatgtttccaagccgcttgcaggcggcgcacttgctgtggaggacgtgtccgacggcgatctcttgactaagttgagcatcctcacgtcgggggccaatgcagaggcgggggagtgggtccgtgaacggatcgccgtggacttcgcctacccgtgtgtcgaggacccggacgagctggcttcgctggacaagggactgagcctgggcggcgtggtcaagcgcaaccggcacaccgtggagaaggacgatcgcttcacgagccgccaggactacgttctcggtttcgacaacgcgtccaagttggagctggtggcggcccgcgtcggtgagctcgagaacgagttggccaaagctgcggaactggcacagagccgggaagattcgcatcagggaatggcccgccagttggaagcccttcggcgggttgccgaggacgaacgtccttgggagcaggtttcggcagcagttgccggggaggaattggcgcggatcgagcagcgtcttgccgacgccttggccgcgcaggccgatctggagccgttgcgggcaaacatcgaggcggtgcgtgagaagcaccaatcctccacaggtgccgcggccgtcctgcagagcgaatacaaggcgctcgaccatcagatgaccacggctgacgggctgttggacgcggcgaggctgaagcttgagcaagcaccgccgtcgagctccaccgtcacggcgcttgagccgtattttgccggcgctgccgacgtcacccagctgtacgagctggataacctggccaacagcgtccgcaacaagctgcttgatgaattgcacgtagccgagtcccgggggcaagcaacggcggagcggttgacccggattttcgaggcgttcgtgcgtgaatggggcagtgccatcagcgccgatcatggcacgtcgatcggcgccgccggtgatttcgaagcccggtaccatgcgatcgtgagcgacggcttgcccgcacaggaagcggaattccgtttgttcttcaaccagcgcacgcatgaatcgttcagtacgctgctgcacctccttgatgaggaacgccgcagcatcaccagccgcatcctgccgctgaacgggatcctttcccaggtcaatttccacgaaggcagctacctggaactggacatcaagcagacacttcctgccactgccaagcagttcaaggacgcgatccagaacgcactcaaggccaagcacgcacgcccgtcccggggagccgcgccgtccgaggtggatgaggacgccgagctcactgcccgttacaagtcactggaaaccctggtgaagcggctcggctcgcagacccccgaggaccggcgctggcgttccgaggtcctcgatgttcgcgggcacctcttcatccagtgcaaggagcaccgcgaggtggccggagcgtcaggcaggaagaagacggaagtcttcatgcatgcggacaccggctccatgtccggcggcgagcgtcagcgattcaccgccttcatcatggcggctgccctgagttaccagctgggcatcgccgagcagggtttcacgacgtacggcaccgtgatgatggacgaggcgtttgtcctggcgtccgaggaattcgccggggcgggcatcaaggcgctccacgaatttgggttccagttgctgttggctgccccggagaacgtcatcgacctgtcacgccacctcggctccgtcacggaaatcctccgcgacaagcgcaccaaccgtagcggcgtgctgaccgcgcccgtcatttcgggacgtggcgagcccggagcgtggcgttcggaagccaaccctgtggacatcgtcctccgctga

SEQ ID NO: 48907 - DNA, 1461 bp, Burkholderia sp. BDU5
atgcccctcgactaccctaccctcgatgcgctacgcacgcggcaccccgcctggcgcctgttacgctccgatcatgcgccgctcgcggtcagtttcctgcatcgagtgttcgtcgcaccaaacgtacgcgtcgtggcggctcctgttcttgccgaagcactcgaggacgagctttatgggttgcgcgaactgctcggcgaaggcgctttcccgaagcccgcgctcgaatatctgaacgactgggctggccccgaaaagggatggttgcgcaagttctatcgcccaggttccgatgaaccgcagttcgacctgacccccgctgcggagaaagcgatcgcgtggctcggcacgctgacggaacgcagctttgtcggcacggaatcgcggctcctgacacttttcgagctgctgcggcagatgggcgaaggcagcgaggcggatccggaaaagcgtcttgccgagctccacgcgcggcgcggccagatcgacgaagaaatcgctcgtgtggaggcgggtgacgtccggctgctcgacgatgccgcgctcaaggatcgctttcagcaattcatgcagatggcgcgcgaactgctcactgacttccgcgaagtcgaacaaaattttcggctgctggaccggcatgtacgcgagcgaatcgcgctctgggaaggatcgaagggcgcgctcatcgaggaaatcatgggcgagcgcgacgcgatcgccgattcggatcagggcagcagcttccgggcgttttgggacttcctgatgtcgagccgccgtcaagaggaactctcggaacggctcgagcgcgtgctcgagttgcccgcgatcatggaaatgcggcccgacgcgcgcatgcggcgcgttcactatgactggctggaagcgggcgaacatacgcaacgcaccgttgctcagctctcgcagcagcttcgacgcttcctcgacgatcaagcgtggctagaaaaccgccgcatcatggacattctgcgtggtatcgaaacgaaagcgcttgcgctgcgcgaagcgcctccaccaggcgccgtcacggagatcgagaccgcatccgctgatatcgaactgccaatggagcgcccgctttacgtgccggcgctgcgccctctcatcaccaacgtcgcactcgagaccggcgagacggacctcgatccctctgcactctacacgcagatcgtcgtcgatcgcgcgcgcctcgcaggccacatccgccgatgcctccaagatcggccgcaagtgacgcttgccgaattggccgcgtcacagccgctcgcgcatgggctcgccgagctcgtcgcctatatgcaactgggcgccgaagcgggatcatttcgggcgactgtcgacgaaaccatctccgataccatcgaatggcaggcgaacgacgccaacggaacagtaatcgtcaagcgtgcgaccatgccgcgcgtgattttcacaaggtag

SEQ ID NO: 48908 - DNA, 654 bp, Burkholderia sp. BDU5
atgacggaagaacagcaagcctcgtcgcttggtcgaggtgatttgccggcggttgccatcgcgttgctcaagggcgtggtttatcgcgatggaaacgagcgcctctgggccgcgctgctcgaattgcagacacacgtgcgcgactacgtcgccgtgctcggcctcgaactggtcgtggacgaggcggaaggctacgccttcgtaaaaagccgcgccgagcacgacgccgaagccggcgtcgaccagaccaagctaccccggctcgttgtccggcgcccactctcgttccccgtgagcctgttgctcgcactgcttcgaaagaaactggcggaatgggatgccggcggcggcgacacacggctcgttcttgcacgcgaggacatcgtcgaactcgcacgcgtattccttcccgcgagtactaacgaggcacgcctggtcgatcagatcgatacacacgtgaacaagatcgtcgaactgggcttcctgcgccggatgaaggccacgagcgggccaccgacattcgaggtacggcgtattctcaaagcattcgtcgatgcgcaatggctgctcgatttcgacgcgcggctcgcgggctatcgggcgcaccttcaagattcgacggtttcggaccaacgggagagtcgcgatgaatga

SEQ ID NO: 48909 - DNA, 3372 bp, Burkholderia sp. BDU5
atgaatgaaccgcgcgcgctcagcttcgattttgccgccgacgacatcctgacgggctttcgcctcgagcggctcgaagttttcaactggggaactttcgacgagcgggtctgggtgctgcgggccgatggccgcaacggcctgctgacaggagacatcggttccggcaagtcgacgctcgtcgacgccgtcaccacgctcctcgtgcccgcgcagcgcatcgcctacaacaaggcggcgggcgcggacagcaaggaacgcacgctgcgctcgtatgtgctcggctactacaagtcggagcgcaacgaggtcactgggaccgccaagcccgtgagtctgcgagatcacaacaactattcggtgatcttgggggtatttcgtaacgccggatacgatgccacggtcacactcgcacaggtgttctggatgaaagacgcgcaggctcaacccgcgcgattcttcgtctgtgccgagcgcaatctctcgatcgcagccgacttctcgcgcttcggcaccgacatcgcacaactgcgcaaaaagctgcgaggattgggtgccgaaatcgaggacacgtttccgaaatacagtgcctggttccggcggcgcttcgggatcgaaagcgagcaggcgctcgagctctttcatcaaacggtatcgatgaaatcggtgggcaatctcaccgacttcgtacgcagccacatgctcgagccgttcgagatcgcaccgcgcgtcgacgcattgatcactcacttcgacgatctgaatcgcgcgcacgaggcggtactgaaagccaaacgccaagtggaactgctgacaccgctcgtagacgactgtgaccgccacagcgagcaaggacatgctctcgacggctggcgagcgtgccgtgaagcattgaagccctacttcgctggactcaagctcggcctcatcgagcgccgccttcaattgctcgatgaggatcatgcgcgggcgacctcgcgaaaggcccggcacgaagaagcgcgagaccagacgcgtcagcgcgtggacgatttgcgccgcgccgtggccgaacaaggaggcgatcgtatcgcacagctcaatgtcgaaatgcgcgagcaggagcgagaaagtgcgcggcgccgcgaacgcgcgcaacgctatgccgccatcgttacgttgctcggcgaaaccgaggccacggatgaggctgcattcgtttcccagcgccagcgtctggccgagcagcgcggctcgctcgtcgacgacgaagcgcaaaagcaaaatgcgattaccgaatggagcgtggcattccgcgaagggaaagcgcggcgtgatctgctagaggacgaaatagcgagcctgaaagcccgacgcaacaacatcccgaaggaacaagtcgcgatgcgatcgagcctatgctcggcgctcggtctggaggaagatgtcctgccgttcgcgggcgaactcattcaggtgcgtaaggacgcgcgcgattgggagggcgccgccgagcgcgtactacgcaacttcggcctgtcgctgctcgtgcccgacgaacattatgcgaacgtcgcggcgtgggtcgatcacactcatctccgggggcggctcgtctactttcgcgtgcgcgccgaacgcgccgcgcgcgtagtcgaggccatggagttacaccgcgactcgctcgcgcacaagctcgcgatcaagcccgattcgctgttctatagctggctcgagcgcgaaatcggccgccgtttcgactatgcatgctgcgatacgcaggaacagttccggcgcgagacgcgcgcgatcacgcacgctggccaagcgaaagcgccgggggagcgccacgaaaaagacgatcgccacgcgcttgacgatcgcagccgctacgtgctcggttggagcaacacggccaaaattgcggctctcgaagcacaacggcgagcgctcgaggttcggctcggcgagatcgggcaacgactgggagaggcccaaagcgagcacgccaaggtgcgagagcaactcgaagcactcgcgcgtgccggcgagttcgtcgagtttcgagaaatcgattggccgagttgcgccgctgcaatcgcgcgccttgcagacgaaaaagcgcgcctcgaatcggcaagcgacgccctcgcggagctaacggctcaattggactcggcgcaattggcgttgaagggaagtgaagcggcgatctcggaaaccgactcggaactgggcggcatactggccaagcgggaggcagcccaagcgttgctcagcgagacgcacgcgctcgttgagcaagtcaatgccgaacttgcagggcgaatcgaggccttgcgagcggagattctcggcgaacaccagctttccgtcgagtcgtgcgacaaccgcgagcgggacgtgcgcgaggcattgacaacccgcatcgacaacgaaacgaagtcgctcggccgccttgccgaacgaatcgtcaaggccatggcggccttcaaggatgcctacaagctcgaaactgccgacttcgatgcgagcctcgacgcgagctcagagtaccgtgacatgctcgcgcggctgcaagcggacgatctgccgcgcttcgaggcgcgtttcaaagagctgctcaacgtcaatacgatcaacgagatcgccaacttccacgcccagctcgcgcgcgaacgggagacgatcaaggcacgcatcgagcgcatcaacgaatcgttgcgacaaatcgactacaacgcgggccgatacatcgtcctcgagagtcagcccagccccgacgccgagatccgcgaattccagggcgacctgcgcgcttgcaccgagggcgaactcaccggctcggacgatagccaatactcggaagccaagttcctgcaagtcaaacggatcattgaccgcttccgcggccgcgaagggttgaccgagcaggaccggcgatggcgcgccaaagtgaccgacgtgcgcaactggtttctgttcgccgccagcgagcgttggcgcgaagacgacagcgaatacgagcactactcggactccggcggtaaatcgggtggccagaaggaaaagctcgcctatacgatccttgccgcgagcctcgcctatcagttcggcctcgaatggggcgccgtgcgttctcgatcgttccgcttcgtcgtcatcgacgaagcgtttggccgaggctccgacgaatcggcgcagtatggtctcacattgtttcagaagctgaacctgcaactgctgatcgtcacgccactgcagaagattcacatcatcgagccgttcgtttcgagcgtcggattcgttcagaacgagggcggacgcgcgtcgaggctgcgcaacctgtcgatcgaggagtaccgcgcgcgcaaggcggagttcgagcaatga

SEQ ID NO: 48910 - DNA, 1185 bp, Burkholderia sp. BDU5
atgaattggacaacggccgccgaactgcgcgtccgactccaacgcctgtgggagcgcggcgaatggctgcgaagcctcgtggacggcaccgaggggctatttccgctacgtctgccgataaaaggcccgagctcgtccgaattggccgaacgcttcgacgcggtacgcgcatggatcacggagattgccgcgacaccgcgcgtacgcatcgaatggcgagaaatcaatcatcgaattctcggcctgcagcgcgtgccacaagcagcttgggtcgacggtctggacgatgcgctcgctgtcgccggcaagcgccgcgacgcagcgcagttcgagcggctgctcgaaatcacacgctcccgccagccgaagctcaccacgtggcttgcgcagcgcccgttgcaagcgctcgaattcgccggcgattgggaacggctgctggcagtcgtcgattggctgcaagcccatccgcagccgggcgtctatcttcgccaagccgaaatcgccgacgtcgacacgaaattcatcgaggcgcggcgcggcgtcctcgcccaatggctcgatctcgtgctgccgtccgaggcaatcgacagcagccggacaggcgccgcccaattcgctgctcgctacgggttccgcgagaagccgcctcggattcgctttcgcgtgctcgatgagaggctcgccgttctgcccggcatgggccggcccgacatcgcactcgacgccgacagcttcgcgcgcctcgcgctgccgtgccgccatgtgttcattaccgaaaacgagataaattttttggcgtttcccgacgttccgcagtcgatcgtgcttttcggggcgggctacggttgggaagcgctagagtcggcgcgatggctcacggactgtgcgctccactactggggcgacatcgacacgcacggctttgccattctcgatcaattgcgccgccgattcaggcacgtcggctcgttcttgatggaccgcgcgacactgatggcgcatgaagcgttctggggagacgaaggcgatcaggtcatacgcgatctgccgcgactcacggcgcaagagcgcgaactctttgacgacctgcgtgacaaccggattcgtcatggattgcggctcgagcaagagcgcgtgggattcgggtgggtcagggcggcgctagaggaacgggcttgcgcttag

SEQ ID NO: 48911 - DNA, 1461 bp, Burkholderia ubonensis
atgttcctcgactaccctaccctcgatgcgctgcgcacgcgccatcccgcttggcgacttttgcgctccgaccacgcgccgctcgccgtcagcttcctgcaccgcgcgttcgtcgcgccgaacgtgcgcgaggtggcggctccgtttcttgccgaagcactcgaggacgagctttacgcgttgcgcgaacaactcggcgacggcgccttcccgaagcccgcgctcgactatctgaacgactgggctagccctgaaaagggatggttgcgcaagttctatcgccaaggctccgatgaaccgcaattcgacctgacacccgccgcgggaaaagcgatcgcgtggctcggcacgctgatggaacgaagctttgtcggcacggaatcccggctcctgacgcttttcgagttgctgcggcagatggccgaaggcagcgagacggacccggaaaggcgtcttgccgaactccacgcgcggcgcagccagatcgacgaagaaatcgctcgcgtggaagccggcgacgtccggctgctcgacgatgccgcgatcaaggaccgctttcagcaattcatgcagatggcgcgcgacctgctcacggatttccgtgaagtcgagcagaacttccgtctgctggaccggcatgtacgcgagcgaatcgcgctctgggaaggatcgaagggtgcgctcatcgaagaaatcatgggcgagcgcgacgcgatcgccgattcggaccagggcagcagctttcgggcgttctgggacttcctgatgtcgagccgccgtcaggaggaactctccgaacggctcgagcacgtgcttgcgctcccggcgatcacggaaatgaagccggacgcgcgcacgcggcgcgtccactatgactggctggaagccggcgagcacacgcaacgcacggtcgctcagctctcgcagcagcttcgacgtttcctcgacgatcaagcgtggctcgaaaaccgccgcatcatggacattctgcgcggtatcgaaacgaaagcgcttgtgctgcgtgaagcgcccccgccgggctccgtcatggagatcgagaccgcgtccgctgacatcgagctgccaattgaacgcccgctttacgcgccggcgctgcgccctctcatcgccaacgtcgcaatcgagaccggcgatgcggacctcgatgcgtcggcactctacacgcagatcgtcgtcgatcgcgcgcgcctcgcaagccatatccgccgctgccttcaagatcggcggcaagtgacacttgccgaactggccgcttcgcagccgctcttgcacgggctcgctgaactcgtcgcctatttgcaactcagcgccgaagccggatcatttcgtgcgaccgtcgatgagaccgtctccgatacgatcgagtggcaggcgaacgatgccaacggagcagcaatcgtcaagcgcgcaacgatgccgcgggtgattttcacaaggtag

SEQ ID NO: 48912 - DNA, 651 bp, Burkholderia ubonensis
atggaagaacagcaaaccccgtcgcttggtcgaggtgacttgtcgacggttgccatcgcgctgctcaagggcgtgatttatcgtgatggaaacgagcgcctctgggccgcactgctcgaattgcagacacacgtgcgcgactacgtcgccgtgcttggcctcgagctcgtcgtggacgaggcggaaggctacgccttcgtaaagagccgcaccgagcctgacgccgaagtcgacggagaccaggtcaagctgccccggctcgttgcacggcgtccactctcgttccccgtgagcctgctgctcgcgctgctgcgaaagaaactggcggaatgggatgccggcggcggcgacacgcggctcgtcctttcgcgcgaggacatcgtcgagctcgtacgcgtcttccttcccgcgagcacgaacgaggcgcgcctcgtcgatcagatcgacacgcacgtgaacaagatcgtcgacctcggtttcctgcgccggatgaagaccgcgagcggaccgcccacattcgaggtgcgacgcattctcaaggcgttcgtcgatgcgcaatggctgctcgatttcgacgcgcggctcgcaagctatcaggcgcaccttcgggatgcgacgaattcggaccaaacggagagtcgcgatgaatga

SEQ ID NO: 48913 - DNA, 3372 bp, Burkholderia ubonensis
atgaatgagccgcgcacgctcggcctcgattttgccgcggacgacacccggacgggctttcgcctcgagcggctcgaggttttcaactggggcaccttcgacgaccgggcttgggtgctgcgggtcgacggccgcaacggcctgctgacaggagacatcggttccggcaagtcgacgctcgtcgacgccatcaccaccctcctcgtgcccgcgcagcgcatcgcctacaacaaggcagcaggcgcggacagcaaggaacgtacgctgcgctcgtatgtgctcggctactacaagtcggagcgcaacgaggtcacgggaacggccaagcccgtgagcctgcgcgaccataacagctattcggtgattttgggcgtgtttcgcaacgccgggtacgacgccaccgtcacgctcgcgcaagtgttctggatgaaggacgcgcaggctcaacctgcgcgattcttcgtcagcaccgaacgagaactctcgatcgcgacggacttctcgcgcttcggcaccgacattgcgcagctgcgcaagaagctgcgcgggctgggcgccgaaatcgaggacacgtttccgaaatacagcgcctggttccggcggcgcttcggcatcgaaaacgagcaagcgctcgagctctttcatcaaacggtatcgatgaagtcggtgggcaatctcaccgacttcgtacgcagccacatgctcgagccgttcgacgtcgcaccgcgcgtcgacgccctgattgctcacttcgacgatctgaatcgcgcgcacgaggcagtactgaaaaccaagcgccaagtggaattgctgacaccgctcgtcgacgactgcgaccgccacagcgagcaaggccacgttctcgaaggctggcgcgcgtgccgtgaagcattgaggccctacttcgccgggctcaagctcggcctcgtcgaacgccgcctccaattgctcgaagaggatcatgcgcgcgcgacctcgcgaaaggcacggcacgaagaagcgcgcgaccaggcgcgccagcgcgtggacgatttgcgccgtgccgtggccgaacaaggcggcgatcgcatcgcgcagctcgatgtcgagatccgcgagcacgagcgagaaagcgtgcgtcgccgcgaacgggcgcaacgctatgccgccatcgttacgctgttcggcgaaaccgaggccgcggatgaggctgcattcgcctcccagcgccaacgcgtggccgagcagcgcagctcactcgttgacgacgaagcgcaacagcaaaatgcgataaccgaatggagcgtggcatttcgcgaaggaaaagcgcggcgtgatgtgctggaggacgaaatcgcgagcctgaaagctcgacgcaacaacatcccgaaggaacaggtcgcgatgcgggcgagcctttgctcggcgctcggcctggaggaagacgccctgccgttcgcgggcgaactcattcaggtgcgcgaggatgcgcgtgattgggagggcgccgccgagcgcgttctacgcaacttcggcctgtcgctgctcgtgcccgacgagcactatgcgagcgtcgcggcgtgggtcgatcgcactcatctccgggggaggctagtctactttcgcgtgcgctcggaacgcagcgcgcgtgcagccgaggccatcgagctgcaccgccactcgctcgcgcacaagctcgcgatcaagcccgactcgcagttctatggctggctcgagcgcgaaatcggccgccgtttcgactatgcctgctgcgatacgcaggagcagtttcggcgcgagacgcgcgcgatcacgcgtgcgggccaggcgaaagcgcctggggagcgccacgaaaaagacgaccgccacgcgctcgacgatcgcagccgctacgtgctcggttggagcaacacggcaaaaatatccgcccttgcagcacaacggcaagcgctcgaagctcgccttggcgagatcgggcaaaggctcggagaggcccaacacgagcacaccaaggtgcgtgagcaactcgaagcacttgcgcgtgccggcgagttcgccgagtttcgggaaatcgattggtcgagctgcgctgccgcgatcgcacgtcttgccgacgaaaaggcgcgactcgaatcggcaagcgacgccctcgcggagctaacggctcaattggactcggcgcaagcgtcgttgaaagagagtgaagcggcgatgtcggaaaccgactcggaactgggcggtatcctggccaagcgggaggcggcacaagcgttgcgcgaagagacgcacgcgctcgttgcagaagtggatgccgaacttgccgaacgaatcgaggccctgcgagcggagattctcggcgaacaccagctttccgtcgagtcatgcgacaaccgcgagcgggacgtgcgagaagcgttgacaacccgtatcgacaacgaaacgaagtcactcggccgcctggccgaaagaatcgtcaaggcaatggcggctttcaaggaagcctacaagctcgaaacggccgacttcgatgcgagcctcgacgcgaacccggagtaccgtgacatgctcgcgcggctgcaggcggacgatttgccgcgcttcgaaacgcgtttcaaggagctgctcaacgtcaatacgatcaacgagatcgccaactttcacgcccagctcgcgcgcgaacgggcgacgatcaaggaacgcatcgaacgcatcaacgaatcgttgcgacaaatcgactacaacgcgggccgatacatcatcctcgagagtcagcccagccccgacgcggaaatccgcgaattccagagcgacctgcgcgcttgcaccgagggcgaactcaccggctcggacgatagccaatactcggaggccaagttcctgcaagtcaaacgaatcatcgaccgcttccgcggccgcgaagggttgaccgagcaggaccggcgttggcgcgccaaggtgaccgacgtgcgcaactggtttctgttcgccgccagcgagcgttggcgcgaagacgacagcgaatacgaacactactcggactccggcggtaaatcgggcggccagaaggaaaagctcgcctacacgatccttgccgcgagcctcgcctaccagttcggcctcgaatggggcgccgtgcgttcccgatcgttccgcttcgtcgtcatcgacgaagcatttggccgaggctccgacgaatcggcgcagtacggtctcacgctgtttcagaaactgaacctgcaactgctgatcgtcacgccactgcagaagattcacatcatcgagccgttcgtttcgagtgtcggattcgttcagaacgacggtggacgcgcctccaagctgcgcaccctgtcgatcgaggagtaccgcgcgcacaaggcggagttcgagcaatga

SEQ ID NO: 48914 - DNA, 1185 bp, Burkholderia ubonensis
atgagctggacaactgccgtcgaactgcgtgcccgcctccagcacctatgggcacgcggcgaatggctgcgaagcttcgcagacggcaccgaggggctattcccgctacgtctggcgatcaaaggcccgagttcgtccgagctggctgaacgcttcgacgcggtacgcgcatggatcgcggaaattgccgcgacgccgcacatacgcatcgaatggcgagaaatcaatcatcgaattctcggcgtgcagcgtttgccacgagcggcctgggtcgacagtctggacgatgcgctcgcagtcgccggcaagcaccgcgacgcagcgcagttcgcgcggctgctcgaaatcactcgcgcccgccagccgaagctcgccgcgtggcttgcgcagcgcccgttgcaagccctcgaattcgccggcgattgggaacgactgctggcggtcgtcgattggctgcaagcacatccgcacccgggcgtctatcttcgccaagccgaaatcgccggcgtcgacacgaaattcatcgaggcaaggcgcggcgtcctctcccaatggctcgatctcgtgctgccgtccgaggcgatcgacagcagccggacaggcgtcgctcaattcgccgcgcgctacgggttccgcgagaagcaaccccgtattcgatttcgcgtgctcgatgagcggctcgccgtcctgcccggcatgggccgccccgacatcgcactcgacgccgacagcttcgcgcgcctcgcactgccgtgccgccatgttttcgttacggaaaacgaaacaaattttctggcgtttcccgacgttccgcaggcgatcgtgctcttcggagcgggctacggctgggaagctctggagccggcgcgatggctcgcggactgtgcgctccactactggggcgacatcgacacgcacggctttgccattctcgaccaattgcgttgccgattccctcacgtgaactccttcctgatggaccgcgcgacactgatggcgcatgaagcattctggggagacgaaggcgatcaggtcgtgcgtgatctgccgcgactcacggcgcaagagcgcgagctctttgacgacctgcgtgacaaccggattcgccgcggattgcggctcgaacaggagcgcgtcgggttcgggtgggtcagagcggcgctagaggaacggtctttcgtttag

SEQ ID NO: 48915 - DNA, 1461 bp, Burkholderia ubonensis
atgttcctcgactaccctaccctcgacgcgctgcgcacgcgccatcccgcttggcgacttttgcgctccgaccacgcgccgctcgccgtcagcttcctgcaccgcgcgttcgtcgcgccgaacgtgcgcgaggtggcggctccgtttcttgccgaagcactcgaggacgagctttacgcgttgcgcgaacaactcggcgacggcgccttcccgaagcccgcgctcgagtatctgaacgactgggcgagtcctgaaaagggatggttgcgcaaattctatcgccaaggctccgatgaaccgcatttcgacctgacacccgccgcaggaaaagcgatcgcgtggctcggcacgctgatggaacgaagctttgtcggcacggaatcccggctcctgacgcttttcgagttgctgcggcagatggccgaaggcagcgagacggacccggaaaggcgtcttgccgagctccacgcgcggcgcagccagctcgacgaagaaatcgctcgcgtggaggccggtgacgttcggctgctcgacgatgccgcgatcaaggaccgctttcagcaattcatgcagatggcgcgcgacctgctcacggatttccgtgaagtcgagcagaacttccgtctgctggaccggcatgtacgcgagcgaatcgcgctctgggaaggatcgaagggtgcgctcatcgaagaaatcatgggcgagcgcgacgcgatcgccgattcggaccagggcagcagctttcgggcgttctgggacttcctgatgtcgagccgccgccaggaggaactctccgaacggctcgagcacgtgcttgcgctcccggcgatcacggaaatgaagccggacgcgcgcacgcggcgcgtccactatgactggctggaagccggcgagcacacgcaacgcacggtcgctcagctctcgcagcagcttcgacgtttcctcgacgatcaagcgtggctcgaaaaccgccgcatcatggacattctgcgcggtatcgaaacgaaagcgcttgtgctgcgtgaagcgcccccgccgggctccgtcatggagatcgagaccgcgtccgctgacatcgagctgccaatcgaacgcccgctttacgcgccggcgctgcgccctctcatcgccaacgtcgcaatcgagaccggcgatgcggacctcgatgcgtcggcactctacacgcagatcgtcgtcgatcgcgcgcgcctcgcaagccatatccgccgctgccttcaagatcggcggcaagtgacacttgccgaactggccgcttcgcagccgctcttgcacgggctcgctgaactcgtcgcctatttgcaactcagcgccgaagccggatcatttcgtgcgaccgtcgatgagaccgtctccgatacgatcgagtggcaggcgaacgatgccaacggagcagcaatcgtcaagcgcgcaacgatgccgcgggtgattttcacaaggtag

SEQ ID NO: 48916 - DNA, 651 bp, Burkholderia ubonensis
atggaagaacagcaaaccccgtcgcttggtcgaggtgacttgtcgacggttgccatcgcgctgctcaagggcgtggtttatcgtgatgtaaacgagcgcctctgggccgcactgctcgaattgcagacacacgtgcgcgactacgtcgccgtgcttggcctcgagctcgtcgtggacgaggcggaaggctacgccttcgtaaagagccgcaccgagcctgacgccgaagtcgacggagaccaggtcaagctgccccggctcgttgcacggcgtccactctcgttccccgtgagcctgctgctcgcgctgctgcgaaagaaactggcggaatgggatgccggcggcggcgacacgcggctcgtcctttcgcgcgaggacatcgtcgagctcgtacgcgtcttccttcccgcgagcactaacgaggcgcgcctcgtcgatcagatcgacacgcacgtgaacaagatcgtcgacctcggtttcctgcgccggatgaagaccgcgagcggaccgcccacattcgaggtgcgacgcattctcaaggcgttcgtcgatgcgcaatggctgctcgatttcgacgcgcggctcgcaagctatcaggcgcaccttcgggatgcgacgaattcggaccaaacggagagtcgcgatgaatga

SEQ ID NO: 48917 - DNA, 3372 bp, Burkholderia ubonensis
atgaatgagccgcgcacgctcggcctcgattttgccgcggacgacacccggacgggctttcgcctcgagcggctcgaggttttcaactggggcaccttcgacgaacgggtctgggtgctgcgggtcgacggccgcaacggcctgctgacaggagacatcggttccggcaagtcgacgctcgtcgacgccattaccaccctcctcgtgcccgcgcagcgcatcgcctacaacaaggcggcaggcgcggacagcaaggaacgtacgctgcgctcgtatgtgctcggctactacaagtcggagcgcaacgaggtcacgggaacggccaagcccgtgagcctgcgcgaccataacagctattcggtgattttgggcgtgtttcgcaacgccgggtacgacgccaccgtcacgctcgcgcaagtgttctggatgaaggacgcgcaggctcaacctgcgcgattcttcgtcagcgccgaacgagatctctcgatcgcgacggacttctcgcgcttcggcaccgacattgcgcagctgcgcaagaagctgcgcgggctgggcgccgaaatcgaggacacgtttccgaaatacagcgcctggttccggcggcgcttcggaatcgaaaacgagcaagcgctcgagctctttcatcaaacggtatcgatgaagtcggtgggcaatctcaccgacttcgtacgcagccacatgctcgagccgttcgacgtcgcaccgcgcgtcgacgccctgattgctcacttcgacgatctgaatcgcgcgcacgaggcggtactgaaaaccaagcgccaagtggaattgctgacaccgctcgtcgacgactgcgaccgccacagcgagcaaggccacgttctcgaaggctggcgcgcgtgccgcgaagcattgaggccctacttcgccgggctcaagctcggcctcgtcgaacgccgcctccaattgctcgaggaggatcatgcgcgcgcgacctcgcgaaaggcgcggcacgaagaagcgcgcgaccaggcgcgccagcgcgtggacgatttgcgccgtgccgtggccgaacaaggcggcgatcgcatcgcgcagctcgatgtcgagattcgcgagcacgagcgagaaagcgtgcgtcgccgcgaacgcgcgcaacgctatgccgccatcgttacgctgttcggcgaaaccgaggccgcggatgaggctgcattcgcctcccagcgccaacgcctggccgagcagcgcagctcgctcgtcgacgacgaagcgcagcagcaaaatgcgataaccgaatggagcgtggcatttcgcgaaggaaaagcgcggcgtgatgtgctggaggacgaaatcgcgagcctgaaagcccgacgcaacaacatcccgaaggaacaggtcgcgatgcgggcgagcctgtgctcggcgctcggcctggaggaagacgccctgccgttcgcgggcgaactcattcaggtgcgcgaggatgcgcgtgattgggagggcgccgccgagcgcgtcctgcgcaacttcggcctgtcgctgctcgtgcccgacgagcactatgcgaacgtcgcggcgtgggtcgatcgcactcatcttcgggggcggctcgtctactttcgcgtgcgctccgaacgcaccgcgcgtgcagccgaggccatcgagctgcaccgccactcgctcgcgcacaagctcgcgatcaagcccgactcgcagttctatggctggctcgagcgcgaaatcggccgccgtttcgactatgcctgctgcgatacgcaggagcagtttcggcgcgagacgcgcgcgatcacgcgtgcgggccaggcgaaagcgcctggggagcgccacgaaaaagacgaccgccacgcgctcgacgatcgcagccgctacgtgctcggttggagcaacacggcaaaaatatccgcccttgcagcacaacggcaagcgctcgaagctcgccttggcgagatcgggcaaaggctcggagaggcccaacacgagcacaccaaggtgcgtgagcaactcgaagcacttgcgcgtgccggcgagttcgccgagtttcgggaaatcgattggtcgagctgcgctgccgcgatcgcacgtcttgcggacgaaaaggcgcgactcgaatcggcaagcgacgccctcgcagagctaacggctcaattggactcggcgcaagcgtcgttgaaagagagtgaagcggcgatgtcggaaaccgactcggaactgggcggcatcctggccaagcgggaggcggcacaagcgctgcgcgaagagacgcacgcgctcgttgcagaagtggatgccgaacttgccgaacgaatcgaggccctgcgagcggagattctcggcgaacaccagctttccgtcgagtcatgcgacaaccgcgagcgggacgtgcgagaagcgttgacaacccgtatcgacaacgaaacgaagtcactcggccgcctggccgaaagaatcgtcaaggcaatggcggccttcaaggaagcctacaagctcgaaacggccgacttcgatgcgagcctcgacgcgaacccggagtaccgtgacatgctcgcgcggctgcaggcggacgatttgccgcgcttcgaaacgcgtttcaaggagctgctcaacgtcaatacgatcaacgagatcgccaactttcacgcccagctcgcgcgcgaacgggcgacgatcaaggaacgcatcgaacgcatcaacgaatcgttgcgacaaatcgactacaacgcgggccgatacatcatcctcgagagtcagcccagccccgacgcggaaatccgcgatttccagagcgacctgcgcgcttgcaccgagggcgagctcaccggctcggacgatagccaatactcggaggccaagttcctgcaagtcaaacgaatcatcgaccgcttccgcggccgcgaagggttgaccgagcaggaccggcgttggcgcgccaaggtgaccgacgtgcgcaactggtttctgttcgccgccagcgagcgttggcgcgaagacgacagcgaatacgaacactactcggactccggcggtaaatcgggcggccagaaggaaaagctcgcctacacgatccttgccgcgagcctcgcctaccagttcggcctcgaatggggcgccgtgcgttcccgatcgttccgcttcgtcgtcatcgacgaagcatttggccgaggctccgacgaatcggcgcagtacggtctcacgctgtttcagaaactgaacctgcaactgctgatcgtcacgccgctgcagaagattcacatcatcgagccgttcgtttcgagtgtcggattcgttcagaacgacggtggacgcgcctccaagctgcgcaccctgtcgatcgacgagtaccgcgcgcacaaggcggagttcgagcaatga

SEQ ID NO: 48918 - DNA, 1185 bp, Burkholderia ubonensis
atgagctggacaactgccgtcgaactgcgtgcccgcctccagcacctatgggcacgcggcgaatggctgcgaagcctcgtagacggcaccgaggggctattcccgctacgtctggcgctcaaaggcccaagctcgtccgagttggctgaacgcttcgacacggtacgcgcatggattacggaaattgccgcgacgccgcgcatacgcatcgaatggcgagaaatcaatcatcgaattctcggcgtgcagcgtttgccacgagcagcttgggtcgacagtctggacgatgcactcactgtcgccggcaagcaccgcgacgcagcgcggttcgagcggctgcttgaaatcacacgctcgcgccagccgaagctcatcgcgtggcttgcgcagcgcccgatgcaggccctcgaattggccggcgattgggaacgactgctggcggtcgtcgattggctgcaagcacatccgcacccgggcgtctatcttcgccaagccgaaatcgccggcgtcgacacgaaattcatcgaggcaaggcgcggcgtcctctcccaatggctcgatctcgtgctgccgtccgaggcgatcgacagcagccggacaggcgtcgctcaattcgccgcgcgctacgggttccgcgagaagcaaccccgtattcgatttcgcgtgctcgatgagcggctcgccgtcctgcccggcatgggccgccccgacatcgcactcgacgccgacagcttcgcgcgcctcgcactgccgtgccgccatgttttcgttacggaaaacgaaacaaattttctggcgtttcccgacgttccgcatgcgatcgtgctcttcggagcgggctacggctgggaagctctggagccggcgcgatggctcgcggactgtgcgctccactactggggcgacatcgacacgcacggctttgccattctcgaccaattgcgttgccgattccctcacgtgaactccttcctgatggaccgcgcgacactgatggcgcatgaagcattctggggagacgaaggcgatcaggtcatgcgtgatctgccgcgactcacggcgcaagagcgcgagctctttgacgacctgcgtgacaaccggattcgccgcggattgcggctcgaacaggagcgcgtcgggttcgggtgggtcagagcggcgctagaggaacggtctttcgtttag

SEQ ID NO: 48919 - DNA, 1494 bp, Burkholderia cepacia
atggctgttcatgacctaaccgatcaaattcgccaagaaaaggtggccgaacgctatccgccgctcttcaaacgcctgcccgaccgccttttcgcgccgctggcctcagccaatcgcttccaatattggacactgctgtgcgtgctgcacgccaaacgcttcggacctgaggccccattgccgccgagcaccggcttcttgatgcgcgaaatcactgccgacatcgccgaggaactccagtaccaggattggactccggaaggcgatgacgtgacgccagccacaccgctggcgatccgagccatcatggtcttcaatcgcttgcgcgatgcggggtggattcgcgtggaccgagtgggcgtgcgcgagatggtgacgatggcacccgccgtcgcccagttcatgaaccgcctagtcgagttcgctcacaccggcccggaattcgtctctggcaaaatccgcagcatcgaagccaacctgaagctgcttctggacgagagtatagatggtgcctcgctacaggaggcagcccgccagtcgcgcgccctacttgaacacgtccgcattgcaggtacgaatgtgcgcgatctgatgttggagatcggtcgcgtcgacgccaccggggagttcgtgcgacgcttcttcgacgactacgtcgagcgcatgttcatcggcgactacaaggaactgcgcacacgcgagcatcccctggcccggcgccaagagatcctacgcatggtggcccatatccagcagacgcaagacctgcgcgctcggctaatccagtggtacctcgagaagcaggctggccgcgatcctacccgcgctgaagccatgttcgagcgcgacatccagaaggtagaggatctgcgccggatcgacgaatacctggatcggctggacgacgaaatccggcgcgccaacaagctggcgttggcctacctagactaccggcttcgggccgcccgccccctcgacgaattgatcaatcaagccatcgacaccgttgtcaagcagggcaccaaggcggcggcactagcaccgtttgctcccggagactgcatcggtggcgaacggctcgctttgccccgcgtcgagaccaagcgtccgccgcccggcggactacgcaaacaaacgatgtccccggagcaggaggccagggcccgcctggccctgatggctcgggaccggcgcactatgtcgctgccaaagctcgcggcgttcgtgcgccaacagctaggcgaggctgatgcggtgcccagcaccgtcctccaagtgaataacgttgagtcaatccgagcgctacaggtcttgtgcacgattgccacagcgaacgcgacgtccagcaaggtgctgcgcgccaacgcacgggcaatgagcagcggattcaccacggtccggatggaaggcgaagaggttcagagccagggcatctctcacctgcccttcacgatcgcaagaacaaccaagcctgccaatggaggaagccaatga

SEQ ID NO: 48920 - DNA, 663 bp, Burkholderia cepacia
atgagtttctggacggatgcggctacggccaccaagaacgtcgtcaccgaggatgatttcgaggcagcggcgaatcgactaatcaccgaacaggtcttgtacgccgcagatcgcgccagcaaggtggcctacgggctgatccgcgacttcgagcgtgagttcaagcgggctctggaacccctgggctacatcgtgcgtgtcaacagccaactgcgatatgcctgcgctatccccaaacacgccaaggcctcgccggtcaccgtggaccagacgctgctcgcactggtgctacgcaaaatcttcgacgaggagactcgatccgggcaccatgatgagaacggcgaggtggcctgtgatctggtcacgctggaggtcaagtacaagcaaatgaccgggggccgcgagttggccactggagggaagctcgccacgctgatccagtggatgcggcgctggggcctcgcccgggtgtcggacgaggacggcaaccagttcggtcacgatacggatcaaccatacgtggtcatcatccgccccggcatcgccgaggtcctaggagaggcggcgctggcacgcatcgccctgttcaccagccccgacgccgaggtggacggcgtggaccctgcggtcgcctccaccacggaagaaggcggtgccgtatga

SEQ ID NO: 48921 - DNA, 3444 bp, Burkholderia cepacia
atgaagaagctgatccggatccgagtagtccagtttttcttgtacgaaatgcgtgatgtcgaagtcggcacaaactgcggcatcttcggcgccaacggcagcggcaaatcctcgctcctggacgccgtgcaaatcgtgatgctaggtgccaacgagagccgcggtagcgccggcgtcgccttcaatgcacaagcggacgagtccaaccacaacagccgcaatatccgcagctattgcctaggccagtacggcgactcaccggatgcgcgcgttcgcgacagtgccaacacctacatcaccctagtctgggaagacacgacgactcaggaaattgtctcgaccggtgtaagcatctacgtgagcgccgaccgcgagaagtccgacgtgcaaggtcgctacattcttcccgcggacatcgcacttaccgaccatctggaactggtcgatggcgaatatcggccacggccatgggcgagcttcagacagatgctctcacaacgtgctcacggcgaggaagtgctcttccacgactccgagcgcttcgtcaacgcgatgctgttccggctaaggggcacacgtggtgcgccgcgcttggatgcctatcgccaagcgttccgtttcggcctgcgcatgaagttcgacaagagcgtcgacgacatcgtccgccagcaggtgctggagacccggccgaccaacatcaagcgattcaaggaagtgctgcacactttccaggagatggccgccctcgtgcgcaacgtgcaggccaagctcgacgaggccgaattgatcgagacggatttcgcagacgcacaccgacgcagcacccattcggtctcgctcgctgccttggcccaagctgccgagctcgaggttgccaacgaggcggtgaccgccgcagaggaggccgagggccgggcatcagcagcactggaagccgccaatgcgcgccgtgacgaagtcaactgtcaggtcgaagcggccgagcaacacgcacgcgatagcgcctctgcccgggacaagcacgcgtcccacgcggacgctgcgttgctgcgggaaagcctcgccaagatacaaaaccggctcactgaacaaaggaccggactgcatcgcagcatcaaagccatcggcagggctatcgacgcgcagatccctggcaagctcgtcgccaatagcgacgaggccacggcactggcgctcaaggacgtccacgcactgctagacggggataacatcagcagacgcgatgcagtagaggcgacagtccgcaaggcgctgcgcgcagccaagctattaagcaacgaggtgttcgaggagatgcagtccgttggtcgcgtgcagacggcaaccgaggccgagctcgccgccgtccaagataaccaggagcgtatcgccaagggcaagccccctctggaggggccggctgcggcgctcaaacgtgcgctagccaacgctggcgtggacgctactccggtgtgcgacctggtgcgtgtcgacgacccagactggcaacctgccatcgagtcctatctgggtacgtcaaacatgcaagccctgctagttgacgagaccgacgagcgcaaggcattccgggtgtcgcgtcaggctgcgatctacgatgcgaaggtcgtgatgcccagcaaattctccagtcgcagcagccccaggcgcggtgccgtggcagagctaatcagtggtaacagcgccgcagcggtcaactacctgcgatccaagttcggtgacacgcaacgggcggagactgaggacgaatgcttcgctcatcgcttcgcattgaccaaggacggcatgttgctggctgatggcgagatggtacgcaagaagccggggaatcccgccctcttcaagatcggcccgacctctgcagcgactcgcacttctatcgccgaacaagcccgtcagctccaagagaaaattgatgacctcaaggaaaggtacgccaagctcaagcagctcttgaataaccttggcccattcgtgggtggagagcaggagaagattcatgaggttctcgaaatcttcgatcgggtgatcaaagaggctgccgacgaggaggatctgacgcagcgtctgcaagccctcgatactgacgagtatcgccagttggtgcaggtagctgaagcagcagaggccaccctggccgatgtgcgaaaacaactgcttgctgctgccaaggcggtcggtgcagcagagacagcatgtcagcaaaagcgcgaagacaccaagacgaagcagacccgggccgttatccagaacggaatcgctgaagcagcacgtgcggttgacggctacgacgccgactacgcatcagaccaatgggaaaggctattgacacgccagggcctgtctttcaatgagatcgtcgccgattgcaaacaccgcggcaaccgcgctgagactgactcccgtcagaaatggtccagtgccatgcagaagctgtcggcgttccttgtcaggcataacgagttcatgcctgccgggacccaggacgactggcgcagcgcccgcgcttggctggacgcacgggtcatagtcctaaccgagacgggcctgcgcgaaaataaggctcggatggaagatgccctgagcgccgccaagagcaccttccgcaacgacgttgcggtggctctgcacgagcaccttgagtggttgagcgacaccgtcaaccgaatgaacgaggccctgcgcctggcgccgatgttcaccaacaacgaacgctaccagttccgctcacatgtgcgacctgctttcgccgtgctgctgaagttcatcaaggacctcgcccaatacggcccgaccgaggacttgctcggcggtaccggagagctgcccaaggagttcgaagagctgatgcgcgaaaagacggtcaccggggcggccgccatgaagtcccccctggacgactatcgcgagttcttcgacttcgacatcgaggtgctccgcgaagagacctccactggcacgaccaagcacatcggctggcttagcaaacgtgtcgggtccggctctggtggcgagcatcgcgctccgctgtatgtgatcgcgggtgccgcactttcgtcagcctatcggctggagcgcggcgacgatactggtatccggctgctggtgattgacgaggccttcatcaagatggacccgaggaatatcgtggccaccatgcgctatttcgaggagcttggcctgcaagtcttcatggccagcacaggtgacgccttaggtagcctgaccgccttccttgatcgctactacgacatcatgcgcgatgccgagagcaatgtggtagtactcgagggccacgacgtatcccccgagacgcgcgagatgttccgcgccgatctgcctgaattcaaccgggaactgatcgaagcggagatcagaaggcaatacctaccgcaggccgactcgacggaagatgccgcagcatga

SEQ ID NO: 48922 - DNA, 1188 bp, Burkholderia cepacia
atgagccgccaagaccagaccgagatggatccgctggccagaaaggcgttggagcgactactaaagtctgctgacaagcacacagccggcgcagccgtgcggcggcccgccctgacggactccgcgctgtccgagtaccacgagttgcgcggcctaaaggccaaagaggacttcgaggcggtgatggcctacgctcaggccgagggcgcaatcatggcactgcgccctcggggggatccccaggggctcattgaacgcgtcgaactgattgacgtcgacaaactggcttcgatcctgggcaaggtgccccatgcggtgcgagtccagtcggcaagacgggctctcgcctcgcacctcggcgagcacccgatcttgaacgacgtcttgtctagttgggagagactcaagaaggtccgtggcacggggcccgacgctgctgccaactgggtaatggcatgcgacgtcatcacatactgccaggctcaggtggcgctcggcgccacggaaacgccggtgagggacgccagcgcacgcctattcaagaatagcaagtgtatcgagtccctcgtgccttgcctcgatgcactgctggcgggcaacatcgacgacgacgcgcgcccggacgctgaagtgttgcaggagctcggcctctaccgcgagccgcagccagcgcgtctggccggcgacatcgtggtccgccgggagcgcggtgcgttcccgctggactgcccctactgcgccctgcctccgtcaaccgtcctggggctcggttcaatacccagcaaggtgctaaccatcgagaaccagacaacgttccacgtgtgggcgcgccagcactgtgactccgacgtactatgtctctacactgctggaatgccttcccccgcatggcgggcaatgtacctccggttgatctccgagctcccggtttcaactccagtgctgcattggggcgacgttgacgaaggcggttttcggatcgccgccgtcctgagtcgttgtgcagccgaggccggccataccctcctgccgtggaagatgagtccgttagaagttcctgagtcgttgcgccgggccgcaccgacacgcaccgtcgataggatggtcaagtatgctcgggagaccgggtgggacagtattgcgtatgagttggcaaaagcgaagcttgtcgccgagcaagagggctga

SEQ ID NO: 48923 - DNA, 1461 bp, Burkholderia sp. BDU6
atgcccctcgactaccctaccctcgatgcgctgcgcacgcggcaccccgcctggcgcctgttacgctccgatcatgcgccgctcgcggtcagtttcctgcatcgagtgttcgtcgcaccaaacgtacgcgtcgtggcggctcctgttcttgccgaagcactcgaggacgagctttatgggttgcgcgaactgctcggcgaaggcgctttcccgaagcccgcgctcgaatatctgaacgactgggctggccccgaaaagggatggttgcgcaagttctatcgcccaggttccgatgaaccgcagttcgacctgacccccgctgcggagaaagcgatcgcgtggctcggcacgctgacggaacgcagctttgtcggcacggaatcgcggctcctgacacttttcgagctgctgcggcagatgggcgaaggcagcgaggcggatccggaaaagcgtcttgccgagctccacgcgcggcgcggccagatcgacgaagaaatcgctcgtgtggaggcgggtgacgtccggctgctcgacgatgccgcgctcaaggatcgctttcagcaattcatgcagatggcgcgcgaactgctcacggacttccgcgaagtcgaacaaaattttcggctgctggaccggcatgtacgcgagcgaatcgcgctctgggaaggatcgaagggcgcgctcatcgaggaaatcatgggcgagcgcgacgcgatcgccgattcggatcagggcagcagcttccgggcgttttgggacttcctgatgtcgagccgccgtcaagaggaactctcggaacggctcgagcgcgtgctcgagttgcccgcgatcatggaaatgcggcccgacgcgcgcatgcggcgcgttcactatgactggctggaagcgggcgaacatacacaacgcaccgttgcgcagctctcgcagcagcttcgacgcttcctcgacgatcgagcgtggctagaaaaccgccgcatcatggacattctgcgtggtatcgaaacgaaagcgcttgcgctgcgcgaagcgcctccgccaggcgccgtcacggagatcgagaccgcatccgctgatatcgagctgccaatggagcgcccgctttacgtgccggcgctgcgccctctcatcaccaacgtcgcactcgagaccggcgagacggacctcgatccctctgcactctacacgcagatcgtcgtcgatcgcgcgcgcctcgcaggccacatccgccgatgcctccaagatcggccgcaagtgacgcttgccgaattggccgcgtcacagccgctcgcgcatgggctcgccgagctcgtcgcctatatgcaactgggcgccgaagcgggatcatttcgggcgactgtcgacgaaaccatctccgataccatcgaatggcaggcgaacgacgccaacggaacagtaatcgtcaagcgtgcgaccatgccgcgcgtgattttcacaaggtag

SEQ ID NO: 48924 - DNA, 654 bp, Burkholderia sp. BDU6; identical to SEQ ID NO: 48908

SEQ ID NO: 48925 - DNA, 3372 bp, Burkholderia sp. BDU6
atgaatgaaccgcgcgcgctcagcttcgattttgccgccgacgacatcctgacgggctttcgcctcgagcggctcgaagttttcaactggggaactttcgacgagcgggtctgggtgctgcgggccgatggccgcaacggcctgctgacaggagacatcggttccggcaagtcgacgctcgtcgacgccgtcaccacgctcctcgtgcccgcgcagcgcatcgcctacaacaaggcggcgggcgcggacagcaaggaacgcacgctgcgctcgtatgtgctcggctactacaagtcggagcgcaacgaggtcactgggaccgccaagcccgtgagtctgcgagatcacaacaactattcggtgatcttgggggtatttcgtaacgccggatacgatgccacggtcacactcgcacaggtgttctggatgaaagacgcgcaggctcaacccgcgcgattcttcgtctgtgccgagcgcaatctctcgatcgcagccgacttctcgcgcttcggcaccgacatcgcacaactgcgcaaaaagctgcgaggattgggtgccgaaatcgaggacacgtttccgaaatacagtgcctggttccggcggcgcttcgggatcgaaagcgagcaggcgctcgagctctttcatcaaacggtatcgatgaaatcggtgggcaatctcaccgacttcgtacgcagccacatgctcgagccgttcgagatcgcaccgcgcgtcgacgcattgatcactcacttcgacgatctgaatcgcgcgcacgaggcggtactgaaagccaaacgccaagtggaactgctgacaccgctcgtagacgactgtgaccgccacagcgagcaaggacatgctctcgacggctggcgagcgtgccgtgaagcattgaagccctacttcgctggactcaagctcggcctcatcgagcgccgccttcaattgctcgatgaggatcatgcgcgggcgacctcgcgaaaggcccggcacgaagaagcgcgagaccagacgcgtcagcgcgtggacgatttgcgccgcgccgtggccgaacaaggaggcgatcgtatcgcacagctcaatgtcgaaatgcgcgagcaggagcgagaaagtgcgcggcgccgcgaacgcgcgcaacgctatgccgccatcgttacgttgctcggcgaaaccgaggccacggatgaggctgcattcgtttcccagcgccagcgtctggccgagcagcgcggctcgctcgtcgacgacgaagcgcaaaagcaaaatgcgattaccgaatggagcgtggcattccgcgaagggaaagcgcggcgtgatctgctagaggacgaaatagcgagcctgaaagcccgacgcaacaacatcccgaaggaacaagtcgcgatgcgatcgagcctatgctcggcgctcggtctggaggaagatgccctgccgttcgcgggcgaactcattcaggtgcgtaaggacgcgcgcgattgggagggcgccgccgagcgcgtactacgcaacttcggcctgtcgctgctcgtgcccgacgaacattatgcgaacgtcgcggcgtgggtcgatcacactcatctccgggggcggctcgtctactttcgcgtgcgcgccgaacgcgccgcgcgcgtagtcgaggccatggagttacaccgcgactcgctcgcgcacaagctcgcgatcaagcccgattcgctgttctacagctggctcgagcgcgaaatcggccgccgtttcgactatgcatgctgcgatacgcaggagcagttccggcgcgagacgcgcgcgatcacgcatgctggccaagcgaaagcgccgggggaacgccacgaaaaagacgatcgccacgcgcttgacgatcgcagccgctacgtactcggttggagcaacacggccaaaattgcggctctcgaagcacaacggcgagcgctcgaggttcggctcggcgagatcgggcaacgactgggagaggcccaaagcgagcacgccaaggtgcgagagcaactcgaagcactcgcgcgtgccggcgagttcgtcgagtttcgagaaatcgattggccgagttgcgccgctgcaatcgcgcgccttgcagacgaaaaagcgcgcctcgaatcggcaagcgacgccctcgcggagctaacggctcaattggactcggcgcaattggcgttgaagggaagtgaagcggcgatctcggaaaccgactcggaactgggcggcatactggccaagcgggaggcagcccaagcgttgctcagcgagacgcacgcgctcgttgagcaagtcaatgccgaacttgcagggcgaatcgaggccttgcgagcggagattctcggcgaacaccagctttccgtcgagtcgtgcgacaaccgcgagcgggacgtgcgcgaggcattgacaacccgcatcgacaacgaaacgaagtcgctcggccgccttgccgaacgaatcgtcaaggccatggcggccttcaaggatgcctacaagctcgaaactgccgacttcgatgcgagcctcgacgcgagctcagagtaccgtgacatgctcgcgcggctgcaagcggacgatctgccgcgcttcgaggcgcgtttcaaagagctgctcaacgtcaatacgatcaacgagatcgccaacttccacgcccagctcgcgcgcgaacgggagacgatcaaggcacgcatcgagcgcatcaacgaatcgttgcgacaaatcgactacaacgcgggccgatacatcgtcctcgagagtcagcccagccccgacgccgagatccgcgaattccagggcgacctgcgcgcttgcaccgagggcgaactcaccggctcggacgatagccaatactcggaagccaagttcctgcaagtcaaacggatcattgaccgcttccgcggccgcgaagggttgaccgagcaggaccggcgatggcgcgccaaagtgaccgacgtgcgcaactggtttctgttcgccgccagcgagcgttggcgcgaagacgacagcgaatacgagcactactcggactccggcggtaaatcgggtggccagaaggaaaagctcgcctatacgatccttgccgcgagcctcgcctatcagttcggcctcgaatggggcgccgtgcgttctcgatcgttccgcttcgtcgtcatcgacgaagcgtttggccgaggctccgacgaatcggcgcagtatggtctcacattgtttcagaagctgaacctgcaactgctgatcgtcacgccactgcagaagattcacatcatcgagccgttcgtttcgagcgtcggattcgttcagaacgagggcggacgcgcgtcgaggctgcgcaacctgtcgatcgaggagtaccgcgcgcgcaaggcggagttcgagcaatga

SEQ ID NO: 48926 - DNA, 1185 bp, Burkholderia sp. BDU6
atgaattggacaacggccgccgaactgcgcgtccgcctccaacgcctgtgggagcgcggcgaatggctgcgaagcctcgtggacggcaccgaggggctatttccgctacgtctgccgataaaaggcccgagctcgtccgaattggccgaacgcttcgacgcggtacgcgcatggatcacggagattgccgcgacaccgcgcgtacgcatcgaatggcgagaaatcaatcatcgaattctcggcctgcagcgcgtgccacaagcagcttgggtcgacggtctggacgatgcgctcgctgtcgccggcaagcgccgcgacgcagcgcagttcgagcggctgctcgaaatcacacgctcccgccagccgaagctcaccacgtggcttgcgcagcgcccgttgcaagcgctcgaattcgccggcgattgggaacggctgctggcagtcgtcgattggctgcaagcccatccgcagccgggcgtctatcttcgccaagccgaaatcgccgacgtcgacacgaaattcatcgaggcgcggcgcggcgtcctcgcccaatggctcgatctcgtgctgccgtccgaggcaatcgacagcagccggacaggcgccgcccaattcgctgctcgctacgggttccgcgagaagccgcctcggattcgctttcgcgtgctcgatgagaggctcgccgttctgcccggcatgggccggcccgacatcgcactcgacgccgacagcttcgcgcgcctcgcgctgccgtgccgccatgtgttcattaccgaaaacgagataaattttttggcgtttcccgacgttccgcagtcgatcgtgcttttcggggcgggctacggttgggaagcgctagagtcggcgcgatggctcacggactgtgcgctccactactggggcgacatcgacacgcacggctttgccattctcgatcaattgcgccgccgattcaggcacgtcggctcgttcttgatggaccgcgcgacactgatggcgcatgaagcgttctggggagacgaaggcgatcaggtcatacgcgatctgccgcgactcacggcgcaagagcgcgaactctttgacgacctgcgtgacaaccggattcgtcatggattacggctcgagcaagagcgcgtgggattcgggtgggtcagggcggcgctagaggaacgggcttgcgcttag

SEQ ID NO: 48927 - DNA, 1461 bp, Burkholderia sp. ABCPW 14
atgcccctcgactaccctaccctcgatgcgctgcgcacgcggcaccccgcctggcgcctgttacgctccgatcatgcgccgctcgcggtcagtttcctgcatcgagtgttcgtcgcaccaaacgtacgcgtcgtggcggcccctgttcttgccgaagcactcgaggacgagctttatgggttgcgcgaactgctcggcgaaggcgctttcccgaagcccgcgctcgaatatctgaacgactgggctggccccgaaaagggatggttgcgcaagttctatcgcccaggttccgatgaaccgcagttcgacctaacccccgctgcggagaaagcgatcgcgtggctcggcacgctgacggaacgcagctttgtcggcacggaatcgcggctcctgacacttttcgagctgcttcggcagatgggcgaaggcagcgaggcggatccggaaaagcgtcttgccgagctccacgcgcggcgcggccagatcgacgaagaaatcgctcgtgtggaggcgggtgacgtccggctgctagacgatgccgcgctcaaggatcgctttcagcaattcatgcagatggcgcgcgaattgctcactgacttccgcgaagtcgaacaaaattttcggctgctggaccggcatgtacgcgagcgaatcgcgctctgggaaggatcgaagggcgcgctcatcgaggaaatcatgggcgagcgcgacgcgatcgccgattcggatcagggcagcagcttccgggcgttttgggacttcctgatgtcgagccgccgtcaagaggaactctcggaacggctcgagcgcgtgctcgagttgcccgcgatcatggaaatgcggcccgacgcgcgcatgcggcgcgttcactatgactggctggaagcgggcgaacatacgcaacgcaccgttgctcagctctcgcagcagcttcgacgcttcctcgacgatcaagcgtggctagaaaaccgccgcatcatggacattctgcgtggtatcgaaacgaaagcgcttgcgctgcgcgaagcgcctccgccaggcgccgtcacggagatcgagaccgcatccgctgatatcgaactgccaatggagcgcccgctttacgtgccggcgccgcgccctctcatcaccaacgtcgcactcgagaccggcgaggcggacctcgatccctctgcactctacacgcagatcgtcgctgatcgcgcgcgcctcgcaggccacatccgccgatgcctccaggatcggccgcaagtgacgcttgccgaattgaccgcttcacagccgctcacgcatgggctcgccgagctcgtcgcctatatgcaactgggcgccgaagcgggatcatttcgggcgactgtcgacgagaccatctccgataccatcgaatggcaggcgaacgacgccaacggaacagtaatcgtcaagcgtgcgaccatgccgcgcgtgattttcacaaggtag

SEQ ID NO: 48928 - DNA, 654 bp, Burkholderia sp. ABCPW 14
atgacggaagaacagcaagcctcgtcgcttggtcgaggtgatttgccggcggttgccatcgcgttgctcaagggcgtggtttatcgcgatggaaacgagcgcctctggaccgcgctgctcgaattgcagacacacgtgcgcgactacgtcgccgtgctcggcctcgaactgatcgtggacgaggcggaaggctacgccttcgtaaaaagccgcgccgagcacgacgccgaagccggcgtggaccagaccaagctaccccggctcgttgtccggcgcccactctcgttccccgtgagcctgttgctcgcactgcttcgaaagaaactggcggaatgggatgccggcggcggcgacacacggctcgttcttgcacgcgaggacatcgtcgaactcgcacgcgtattccttcccgcgagtactaacgaggcacgcctggtcgatcagatcgatacacacgtgaacaagatcgtcgaactgggcttcctgcgccggatgaaggccacgagcgggccaccgacattcgaggtgcggcgtattctcaaagcattcgtcgatgcgcaatggctgctcgatttcgacgcccggctcgcgggctatcgggcgcaccttcaagattcgacggtttcggaccaacgggagagtcgcgatgaatga

SEQ ID NO: 48929 - DNA, 3372 bp, Burkholderia sp. ABCPW 14
atgaatgaaccgcgcgcgctcggcttcgattttgccgccgacgacaccctgacgggctttcgcctcgagcggctcgaagttttcaactggggaaccttcgacgagcgggtctgggtgctgcgggccgatggccgcaacggcctgctgacaggagacatcggttccggcaagtcgacgctcgtcgacgccgtcaccacgctcctcgtgcccgcgcagcgcatcgcctacaacaaggcggcgggcgcggacagcaaggaacgcacgctgcgctcgtatgtgctcggctactacaagtcggagcgcaacgaggtcactgggaccgccaagcccgtgagtctgcgagatcacaacaactattcggtgatcttgggggtatttcgtaacgccgggtacgatgccacggtcacactcgcacaggtgttctggatgaaagacacgcaggctcaacccgcgcgattcttcgtctgtgccgagcgcaacctctcgatcgcagccgacttctcgcgcttcggcaccgacatcgcacaactgcgcaaaaagctgcgaggattgggtgccgaaatcgaggacacgtttccgaaatacagtgcctggttccggcggcgcttcgggatcgaaagcgagcaggcgctcgagctctttcatcaaacggtatcgatgaaatcggtgggcaatctcaccgacttcgtacgcagccacatgctcgagccgttcgagatcgcaccgcgcgtcgacgcattgatcactcacttcgacgatctgaatcgcgcacacgaggcggtactgaaagccaaacgccaagtggaactgctgacaccgctcgtagacgactgtgaccgccacagcgagcaaggacatgctctcgacggctggcgagcgtgccgtgaagcattgaagccctacttcgctggactcaagctcggcctcatcgagcgccgccttcaattgctcgatgaggatcatgcgcgggcgacctcgcgaaaggcccggcacgaagaagcgcgagaccaggcgcgtcagcgcgtggacgatttacgccgcgccgtggccgaacaaggaggcgatcgtatcgcacagctcaatgtcgaaatgcgcgagcaggagcgagaaagtgcgcggcgccgcgaacgcgcgcaacgctatgccgccatcgttacgttgctcggcgaaaccgaggctacggatgaggctgcattcgtttcccagcgccagcgtctggccgagcagcgcggctcgctcgtcgacgacgaagcgcaaaagcaaaatgcgattaccgaatggagcgtggcattccgcgaagggaaagcgcggcgtgatctgctagaggacgaaatagcgagcctgaaagcccgacgcaacaacatcccgaaggaacaagtcgcgatgcgatcgagcctatgctcggcgctcggtctggaggaagatgccctgccgttcgcgggcgaactcattcaggtgcgtaaggacgcgcgcgattgggagggcgccgccgagcgcgtactacgcaacttcggcctgtcgctgctcgtgcccgacgaacactatgcgaacgtcgcggcgtgggtcgatcacactcatctccgggggcggctcgtctactttcgcgtgcgcgccgaacgcgccgcgcgcgtagtcgaggccatggagttacaccgcgactcgctcgcgcacaagctcgcgatcaagcccgattcgctgttctacagctggctcgagcgcgaaatcggccgccgtttcgactatgcatgctgcgatacgcaggagcagttccggcgcgagacgcgcgcgatcacgcatgctggccaagcgaaagcgccgggggaacgccacgaaaaagacgatcgccacgcgcttgacgatcgcagccgctacgtgctcggctggagcaacacggccaaaattgcggctctcgaagcacaacggcgagcgctcgaggttcggctcggcgagatcgggcaacgactgggagaggcccaaagcgagcacgccaaggtgcgagagcaactcgaagcactcgcgcgtgccggcgagttcgtcgagtttcgagaaatcgattggccgagttgcgccgctgcaatcgcgcgccttgcagacgaaaaagcgcgcctcgaatcggcaagcgacgccctcgcggagctaacggcccaattggactcggcgcaattggcgttgaaggggagtgaagcggcgatctcggaaaccgactcggaactgggcggcatactggccaagcgggaggcagcccaagcgttgctcagcgagacgcacgcgctcgttgagcaagtcaatgccgaacttgcagagcgaatcgaggccctgcgagcggagattctcggcgaacaccagctttccgtcgagtcgtgcgacaaccgcgagcgggacgtgcgcgaggcattgacaacccgcatcgacaacgaaacgaagtcgctcggccgccttgccgaacgaatcgtcaaggccatggcggccttcaaggatgcctacaagctcgaaactgccgacttcgatgcgagcctcgacgcgagctcagagtaccgtgacatgctcgcgcggctgcaagcggacgatctgccgcgcttcgaggcgcgtttcaaagagctgctcaacgtcaatacgatcaacgagatcgccaacttccacgcccagctcgcgcgcgaacgggagacgatcaaggcacgcatcgagcgcatcaacgaatcgttgcgacaaatcgactacaacgcgggccgatacatcgtcctcgagagtcagcccagccccgacgccgagatccgcgaattccagggcgacctgcgcgcttgcaccgagggcgaactcaccggctcggacgatagccaatactcggaagccaagttcctgcaagtcaaacggatcattgaccgcttccgcggccgcgaagggttgaccgagcaggaccggcgatggcgcgccaaagtgaccgacgtgcgcaactggtttctgttcgccgccagcgagcgttggcgcgaagacgacagcgaatacgagcactactcggactccggcggtaaatcgggtggccagaaggaaaagcttgcctatacgatccttgccgcgagcctcgcctatcagttcggcctcgaatggggcgccgtgcgttctcgatcgttccgcttcgtcgtcatcgacgaagcgtttggccgaggctccgacgaatcggcgcagtatggtctcacattgtttcagaagctgaacctgcaactgctgatcgtcacgccgctacagaagattcacatcatcgagccgttcgtttcgagcgtcggattcgttcagaacgaaggcggacgcgcgtcgaagctgcgcaacctgtcgatcgaggagtaccgcgcgcgcaaggcggagttcgagcaatga

SEQ ID NO: 48930 - DNA, 1185 bp, Burkholderia sp. ABCPW 14
atgaattggacaacggccgccgaactgcgcgtccgcctccaacgcctgtgggagcgcggcgaatggctgcgaagcctcgtggacggcaccgaggggctatttccgctacgtctgccgataaaaggcccgagctcgtccgaattggccgaacgcttcgatgcggtacgcgcatggatcacggagattgccgcgacaccgcgcgtacgcatcgaatggcgagaaatcaatcatcgaattctcggcctgcagcgcgtgccacaagcagcttgggtcgacagtctggacgatgcgctcgctgtcgccggcaagcgccgcgacgcagcgcagttcgagcggctgctcgaaatcacacgctcccgccagccgaagctcaccacgtggcttgcgcagcgcccgttgcaagcgctcgaattcgccggcgattgggaacggctgctggcagtcgtcgattggctgcaagcccatccgcagccgggcgtctatcttcgccaagccgaaatcgccgacgtcgacacgaaattcatcgaggcgcggcgcggcgtcctcgcccaatggctcgatctcgtgctgccgtccgaggcaatcgacagcagccggacaggcgccgcccaattcgctgctcgctacgggttccgcgagaagccgcatcggattcgctttcgcgtgctcgatgagaggctcgccgttctgcccggcatgggccggcccgacatcgcactcgacgccgacagcttcgcgcgcctcgcgctgccgtgccgccaggtgttcattaccgaaaacgagataaattttttggcgtttcccgacgttccgcagtcgatcgtgcttttcggggcgggctacggttgggaagcgctagagtcggcgcgatggctcacggactgtgcgctccactactggggcgacatcgacacgcacggctttgccattctcgatcaattgcgccgccgattcaggcacgccggctcgttcttgatggaccgcgcgacactgatggcgcatgaagcgttctggggagacgaaggcgatcaggtcatacgcgatctgccgcgactcacggcgcaagagcgcgaactctttgacgaccttcgtgacaaccggattcgtcatggattgcggctcgagcaagagcgcgtgggattcgggtgggtcagggcggcgctagaggaacgggcttgcgcttag

SEQ ID NO: 48931 - DNA, 1494 bp, Burkholderia cepacia
atggctgttcatgacctaaccgatcaaattcgccaagagacggcggccgaacgctatccgccgctcttcaaacgcctgcccgaccgccttttcgcaccgctggcttcggccaatcgcttccaatattggacactgctgtgcgtgctgcatgccaagcgcttcggacctgaggccccattgccgccaagtaccggcttcttgatgcgcgaaatcaccgccgacatagccgaggaactccagtaccaggactggactccggaaggcgatgacgtgacgccagccacaccgctggcgatccgagccatcatggtcttcaatcgcttgcgcgacgcggggtggatccgagtggaccgagtgggcgtgcgcgagatggtgacgatggcacccaccgtcgcccagttcatgaaccgcctagtagagttcgctcacaccggcccggaattcgtctctggcaaaatccgcagcatcgaagccaacctgaagctgcttctggacgagagtacagatggtgcctcgctacaggaggcagcccgccagtcgcgcgccctacttgaacacgtccgcattgcaggtacgaatgtgcgcgatctgatgttggagatcggtcgcgtcgacgccaccggcgagttcgtgcgacgcttcttcgacgactacgtcgagcgcatgttcatcggcgactacaaggaactgcgcacacgcgagcatcccctggcccggcgccaagagatcctacgcatggtggcccatatccagcagacgcaagacctgcgcgctcggctaatccagtggtacctcgagaagcaggctggccgcgaccctacccgcgctgaagccatgttcgagcgcgacatccagaaggtagaggatctgcgccggatcgacgaatacctggatcggctggacgacgaaatccggcgcgccaacaagctggcgttggcctacctagactaccggcttcgggccgcccgccccctcgacgaattgatcaatcaagccatcgacaccgttgtcaagcagggcaccaaagcggcggcactggcaccgtttgctcccggagactgcatcggtggcgaacggctcgcttcgccccgcgtcgagaccaagcgtccgccgcccagcggactacgcaaacaaacgatgtccccggagcaggaggccagggcccgcctggccctgatggctcgggaccggcgcactatgtcgctgccaaagctcgcggcgttcgtgcgccaacagctaggcgaggctgatgcggtgcccagcaccgccctccaagtgaataacgttgagtcaatccgagcgctacaggtcttgtgcacgattgccacagcgaacgcgacgtccagcaaggtgctgcgcgccaacgcacgggcaatgagcagcggattcaccacggtccggatggaaggcgaagaggtgcagagccagggcatctctcacctgcccttcacgatcgcaagaacaaccaagcctgccaagggaggaagccaatga

SEQ ID NO: 48932 - DNA, 663 bp, Burkholderia cepacia
atgagtttctggacggacgcggctacggccaccaagaacgtcgtcaccgaggatgatttcgaggcagcggcgaatcgactaatcacggaacaggtcttgtacgccgcggatcgcgccagcaaggtggcctacgggctgatccgcgacttcgagcgtgagttcaagcgggctctggaacctttgggctacatcgtgcgtgtcaacagccaactgcgatatgcctgcgctatccccaaacacgcacgggcctcgccggtcaccgtggaccagacgctgctagcactggtgctacgcaagatcttcgacgaggagactcggtccgggcaccatgatgagaacggcgaggtagcctgtgatctggtcacgctggaggtcaagtacaagcaaatgaccggtggccgcgagttggccactggagggaagctcgccgcgctgatccagtggatgcggcgctggggcctcgctcgggtgtcggacgaggacggcaaccagttcggtcacgatacggatcaaccttacgtggtcatcatccgtcccggcatcgccgaggtcctaggagaggcggcgctggcacgcatcgccctgttcaccagccccgacgccgacgtggacggcgtggaccctgcggtcgcctccaccacggaagaaggcggtgccgtatga

SEQ ID NO: 48933 - DNA, 3444 bp, Burkholderia cepacia
atgaagaagctgatccggatccgagtagtccagttttttttgtacgaaatgcgtgatgtcgaagtcggcacaaactgcggcatcttcggcgccaacggcagcggcaaatcctcgctcctggacgccgtgcaaatcgtgatgctaggtgccaacgagagccgcggtagcgccggcgtcgccttcaatgcacaagcggacgagtccaaccacaacagccgcaatatccgcagctattgcctaggccagtacggcgactcaccggatgcgcgcgttcgcgacagtgcccacacctacatcaccctagtctgggaagacacgacgactcaggaaattgtctcgaccggtgtaagcatctacgtgagcgccgaccgcgaaaagtccgacgtgcaaggtcgctacattcttcccgcggacatcgcgcttaccgaccatctggaactggtcgatggcgaatatcggccacggccatgggcgagcttcagacagatgctctcacaacgtgctcacggcgaggaagtgctcttccacgactccgagcgcttcgtcaacgcgatgctgttccggctaaggggcacacgtggtgcgccgcgcttggatgcctatcgccaagcgttccgtttcggcctgcgcatgaagttcgacaagagcgtcgacgacatcgtccgccagcaggtgctggagacccggccgaccaacatcaagcgattcaaggaagtgctgcacactttccaggagatggccgccctcgtgcgcaacgtgcaggccaagctcgacgaggccgaattgatcgagacggatttcgccgacgcacaccgacgcagcacccattcggtctcgctcgctgccttggcccaagctgccgagctcgaggttgccaacgaggcggtgaccgccgcagaggaagccgagggccgggcatcagcagcactggaagccgccaatgcgcgccgtgacgaagtcaaccgtcaggtcgaagcggccgagcaacacgcacgcgatagcgcctctgcccgggacaagcacgcgtcccacgcggacgctgcgttgctgcgagaaagcctcgccaagatacaaaaccggctcactgaacaaaggaccggactgcatcgcagcatcaaagccatcggcagggctatcgacgcgcagatccctggcaagctcatcgccaacagcgacgaggccacggcactggcgctcaaggacgtccacgcactgctagacggggataacatcagcagacgcgatgcagtagaggcgacagtccgcaaggcgctgcgcgcagccaagctattaagcaacgaggtgttcgaggagatgcagtccgttggtcgcgcgcagacggcaatcgaggccgagctcgccgccgcccaagaaaaccaggagcgtatcgccaagggcaagccccctctggaggggccggctgcggcgctcaaacgcgcgctagccaacgctggcgtggacgctactccggtgtgcgacctggtgcgtgtcgacgacccagactggcaacctgccatcgagtcctatctgggtacgtcaaacatgcaagccctgctagttgacgagaccgacgagcgcaaggcattccgggtgtcgcgtcaggctgcgatctacgatgcgaaggtcgtgatgcccagcaaattctccagtcgcagcagccccaggcgcggtgccgtggcagagctaatcagtggtaacagcgccgcagcggtcaactacctgcgatccaagttcggtgacacgcaacgggcggagactgaggacgaatgcttcgctcatcgctttgcattgaccaaggacggcatgttgctggctgatggcgagatggtacgcaagaggccggtgaatccggccctcttcaagatcggtccgacctctgcggcgactcgcacttctatcgccgaacaagcccgtcagctccaagagaaaattgatggcctcaaggaaaggtacgccaagctcaagcacctcttgaataaccttggcccattcgtgggtggagagcaggagaagattcatgaggtcctcgaaatcttcgatcggatgatcaaagaggctgccgacgaggaggatctgacgcagcgtctgcaagccctcgatactgacgagtatcgccacttggtgcaggtagcccaagcagcagaggcgaccttgggcaatgtgcgaaaacagctgcttgctgctgccgaggcggtcggtgcagcagagacagcatgtcagcaaaagcgcgaagacaccaagacgaagcagtcccgggccgttacccagcagggaatcgctgaagcagcacgtgcggttgacggctacgacgccgactacgcatcagaccaatgggaaaggctattgacacgccaggggctgtctttcaatgagatcgtcgccgattgcaaacaccgcagcaaccgcgctgagacagactcccgtcagaaatggtccagcgccatgcaaaagctgtcggcgttccttgtcaggcataacgagttcatgcctgccgggacccaggacgactggcgcagcgcccgcacttggctggacgcacgggtcatagtcctaaccgagacgggcctgcgcgaaaataaagcccgaatggaagatgccctgagcgctgccaagagcaccttccgcaacgatgttgcggtggctctgcacgagcaccttgagtggttgagcgacaccgtcaaccgaatgaacgaggccctgcgcctggcgccgatgttcaccaacaacgaacgctaccagttccgctcacatgtgcgacctgctttcgccgtgctgctgaagttcatcaaggacgtcgcccaatacggcccgaccgaggacctgctcggcggagctggagagttgcccaaggagttcgaagagctgatgcgcgaaaagacggtcaccggggcggccgcgatgaagtcccccctggacgactatcgcgagttcttcgacttcgacatcgaggtgctccgcgaagagacctccactggcacgaccaagcacatcggctggcttagcaaacgtgtcgggtccggctctggtggcgagcatcgcgctccgctgtatgtgatcgcgggtgccgcactttcgtcagcctatcggctggagcgcggcgacgataccggtatccggctgctggtgattgacgaggccttcatcaagatggacccgaggaatatcgtggccaccatgcgctatttcgaggagctcggcctgcaggtcttcatggccagcacaggtgacgccttaggtagcctgaccgccttccttgatcgctactacgacatcatgcgcgatgccgagagcaatgtggtagtactcgagggccacgacatatcccccgagacacgcgagatgttccgcgccgacctgcctgaattcaacccggaactgatcgaagcggagatcagaaggcaatacctaccgcaggccgactcgacggaagatgccgcagcatga

SEQ ID NO: 48934 - DNA, 1188 bp, Burkholderia cepacia
atgagtcgccaagaccagaccgagatggatccgctggccagaaaggcgttggagcgactactaaagtctgctgacaagcacgcagccggcgcagccgtgcggcggcccgccctgacgggctccgcgctgtccgagtaccacgagttgcgcggcctaaaggccaaagaggacttcgaggcggtgatggcctacgctcaggccgagggcgcaatcatggcactgcgccctcggggggatccccaggggctcattgaacgcgtcgaactgattgacgtcgacaaactggcttcgatcctgggcaaggtgccccatgcggtgcgagtccagtcggcaagacaggctctcgcctcgcacctcggcgagcacccgatcttgaacgacgtcttgtctggttgggagagactcaagaaggtccgtggcacggggcccgacgctgctgccaactgggcaatggcatgcgacgtcatcacatactgccaggctcaagtggcgctcggcgccacggaaacgccggtgagggacgccagcgcacgcctgttcaagaatagcaagtgtatcgagtccctcgtgccttgcctcgatgcactgctggcgggcaacatcgacgacgacgcgcgcccggacgctgaggtgttgcaggagctcggcctataccgcgagccgcagccagcgcgtctggccggcaacatcgtggtccgccgggagcgcggtgcgttcccgctggactgcccctactgcgccctgcctccgtccacggtcctggggctcgggtcaatacccagcaagctgctgaccatcgagaatcagacaacgttccacgtgtgggcgcgccagcactgtgactcagatgtgctgtgcctctacacggctggaatgccctcccccgcatggcgggcaatgtacctccggttgctctccaagctcccggtttcaattccagtgctgcattggggcgacgttgacgaaggcggttttcgaatcgcagccgtcctgagccgatgcgcagctgaggccggccataccctcctgccgtggaagatgagtccgttagaagttcctgagtcgttgcgccgggctgcaccgatacgcaccgtcgacaggatggtcaaatacgctcaggagaccgggtgggaaagtattgcgtatgagttggcggaagcgaagcttgtcgccgagcaagagggctga

SEQ ID NO: 48935 - DNA, 1461 bp, Burkholderia ubonensis
atgttcctcgactaccctaccctcgacgcgctgcgcacgcgccatcccgcttggcgacttttgcgctccgaccacgcgccgctcgccgtcagcttcctgcaccgcgcgttcgtcgcgccgaacgtgcgcgaggtggcggctccgtttcttgccgaagcactcgaggacgagctttacgcgttgcgcgaacaactcggcgacggcgccttcccgaagcccgcgctcgactatctgaacgactgggcgagtcctgaaaagggatggttgcgcaagttctatcgccaaggctccgatgaaccgcatttcgacctgacacccgccgcaggaaaagcgatcgcgtggctcggcacgctgatggaacgaagctttgtcggcacggaatcccggctcctgacgcttttcgagttgctgcggcagatggccgaaggcagcgagacggacccggaaaggcgtcttgccgagctccacgcgcggcgcagccagatcgacgaagaaatcgctcgcgtggaggccggtgacgttcggctgctcgacgatgccgcgatcaaggaccgctttcagcaattcatgcagatggcgcgcgacctgctcacggatttccgtgaagtcgagcaaaacttccgtctgctggaccggcacgtacgcgagcgaatcgcgctctgggaaggatcgaagggtgcgctcatcgaagaaatcatgggcgagcgcgacgcgatcgccgattcggaccagggcagcagctttcgggcgttctgggatttcctgatgtcgagccgccgccaggaggaactctccgaacggctcgagcacgtgcttgcgctcccggcgatcacggaaatgaagccggacgcgcgcacgcggcgcgtccactacgactggctggaagccggcgagcacacgcaacgcacggtcgctcagctctcgcagcagcttcgacgtttcctcgacgatcaagcgtggctcgaaaaccgccgcatcatggacattctgcgcggtatcgaaacgaaagcgcttgtgctgcgtgaagcgcccccgccgggctccgtcatggagatcgagaccgcgtccgctgacatcgagctgccaattgaacgcccgctttacgcgccggcgctgcgccctctcatcgccaacgtcgcaatcgagaccggcgatgcggacctcgatgcgtcggcactctacacgcagatcgtcgtcgatcgcgcgcgcctcgcaagccacatccgccgctgccttcaagatcggcggcaagtgacacttgccgaactggccgcttcgcagccgctcctgcatgggctcgctgaactcgtcgcctatttgcaactgagcgccgaagccggaacatttcgcgcgaccgtcgatgagaccgtctccgatacgatcgagtggcaggcaaacgatgccaacggagcagcaatcgtcaagcgcgcaacgatgccgcgggtgattttcacaaggtag

SEQ ID NO: 48936 - DNA, 651 bp, Burkholderia ubonensis
atggaagaacagcaaaccccgtcgcttgatcgaggtgacttgtcgacggttgccatcgcgctgctcaagggcgtggtttatcgtgatggaaacgagcgcctctgggccgcactgctcgaattgcagacacacgtgcgcgactacgtcgccgtgcttggcctcgagctcgtcgtggacgaggcggaaggctacgccttcgtaaagagccgcaccgagcctgacgccgaagtcgacggagaccaggccaagctgccccggctcgttgcacggcgtccactctcgttccccgtgagcctgctgctcgcgctgctgcgaaagaaactggcggaatgggatgccggcggcggcgacacgcggctcgtcctttcgcgcgaggacatcgtcgagctcgtacgcgtcttccttcccgcgagcacgaacgaggcgcgcctggtcgatcagatcgatacgcacgtgaacaagatcgtcgacctcggtttcctgcgccggatgaagaccgcgagcggaccgcccacattcgaggtgcgacgcattctcaaggcgttcgtcgatgcgcaatggctgctcgatttcgacgcgcggctcgcaagctatcaggcgcaccttcgagattcgacgaattcggaccaaacggagagtcgcgatgaatga

SEQ ID NO: 48937 - DNA, 3372 bp, Burkholderia ubonensis
atgaatgagccgcgcacgctcggcctcgattttgccgcggacgacaccctgacgggctttcgcctcgagcggctcgaggttttcaactggggcaccttcgacgaccgggcttgggtgctgcgggtcgatggccgcaacggcctgctgacaggagacatcggttccggcaagtcgacgctcgtcgacgccattaccaccctcctcgtgcccgcgcagcgcatcgcctacaacaaggcggcaggcgcggacagcaaggaacgtacgctgcgctcgtatgtgctcggctactacaagtcggagcgcaacgaggtcacgggaacggccaagcccgtgagcctgcgcgaccataacagctattcggtgattttgggcgtgtttcgcaacgccgggtacgacgccaccgtcacgctcgcgcaggtgttctggatgaaggacgcgcaggctcaacctgcgcgattcttcgtcagtgccgaacgagatctctcgatcgcgaccgatttctcgcgcttcggcaccgatattgcacagctgcgcaagaagctgcgcgggctgggcgccgaaatcgaggacacgtttccgaaatacagcgcctggttccggcggcgcttcggaatcgaaaacgagcaagcgctcgagctctttcatcaaacggtatcgatgaagtcggtgggcaatctcaccgacttcgtacgcagccacatgctcgagccgttcgacgtcgcaccgcgcgtcgacgccctgattgctcacttcgacgatctgaaccgcgcgcacgaggcggtactgaaaaccaagcgccaagtggaactgctgacaccgctcgtcgacgactgcgaccgccacagcgcgcaaggccgcgttctcgaaggctggcgcgcgtgccgtgaagcattgaggccctacttcgccgggctcaagctcggcctcgtcgaacgccgcctccaattgctcgaagaggatcatgcgcgcgcgacctcgcgaaaggcgcgacacgaagaagcgcgcgaccaggcacgccagcgcgtggacgatttgcgccgtgccgtggccgaacaaggcggcgatcgcatcgcgcagctcgatgtcgagatccgcgagcacgagcgagaaagcgtgcgtcgccgcgaacgggcgcaacgctatgccgccatcgttacgctgttcggcgaaaccgaggccgcggatgaggctgcattcgcctcccagcgccaacgcctggctgagcagcgcagctcactcgttgacgacgaagcgcaacagcaaaatgcgataaccgaatggagcgtggcatttcgcgaaggcaaagcgcggcgtgatttgctggaggacgaaatcgcgagcctgaaagctcgacgcaacaacatcccgaaggaacaggtcgcgatgcgggcgagcctgtgctcggcgctcggcctggaggaagacgccctgccgttcgcgggcgaactcattcaggtgcgcgaggatgcgcgtgattgggagggcgccgccgagcgcgtcctgcgcaacttcggcctgtcgctgctcgtgcccgacgagcactatgcgaacgtcgcggcgtgggtcgatcgcactcatctccgggggaggctagtctactttcgcgtgcgctccgaacgcaccgcgcgtgcagccgaggccatcgagctgcaccgccactcgctcgcgcacaagctcgccatcaagcccgactcgcagttctatggctggctcgagcgcgaaatcgtccgccgtttcgactatgcctgctgcgatacgcaggagcagtttcggcgcgagacgcgcgcgatcacgcgtgcgggccaggcgaaagcgcctggggagcgccacgaaaaagacgaccgccacgcgctcgacgatcgcagccgctacgtgctcggttggagcaatacggcaaaaatatccgccctcgcagcacaacggcaagcgctcgaagctcgccttggcgagatcgggcaaaggctcggagaggctcaacacgagcacaccaaggtgcgtgagcaactcgaagcacttgcgcgtgccggcgagttcgccgagtttcgggaaatcgattggtcgagctgcgctgccgcgatcgcacgtcttgcggacgaaaaggcgcgactcgaatcggcaagcgacgccctcgcggagctaacggctcaattggactcggcgcaagcgtcgttgaaagagagtgaagcggcgatgtcggagaccgactcggaactgggcggcatcctggccaagcgggaggcggcacaagcgttgcgcgaagagacgcacgcgctcgttgcagaagtggatgccgaactcgccgaacgaatcgaggccctgcgagccgagattctcggcgaacaccagctttccgtcgagtcatgcgacaaccgcgagcgggacgtgcgagaggcgttgacaacccgtatcgacaacgaaacgaaatcactcggccgcctggccgaaagaatcgtcaaggcaatggcggctttcaaggaagcctacaagctcgaaacggccgacttcgatgcgagcctcgccgcgaactcagagtaccgtgacatgctcgcgcggctgcaggcggacgatttgccgcgcttcgaaacgcgtttcaaggagctgctcaacgtcaacacgatcaacgagatcgccaactttcacgcccagcttgcgcgcgaacgggcgacgatcaaggaacgcatcgaacgcatcaacgaatcgctgcgacaaatcgactacaacgcgggtcgttacatcgtcctcgagagtcagcccagccccgacgcggagatccgcgaattccagagcgacctgcgcgcttgcaccgagggcgaactcaccggctcggacgatagccaatactcggaggccaagttcctgcaagtcaaacggatcatcgaccgcttccgcggccgcgaagggttgaccgagcaggaccggcgctggcgagccaaagtgaccgacgtgcgcaactggtttctgttcgccgccagcgagcgttggcgcgaggacgacagcgaatacgagcactactcggactccggcggtaaatcgggcggccagaaggaaaagctcgcctatacgatccttgccgcgagcctcgcctatcagttcggcctcgaatggggcgccgtgcgttcccgatcgttccgcttcgtcgtcatcgacgaagcatttggccgaggctccgacgaatcggcgcagtacggtctcacgctgtttcagaaactgaacctgcaactgctgatcgtcacgccactgcagaagattcacatcatcgagccgttcgtttcgagcgtcggattcgttcagaacgacggtggacgcgcctccaagctgcgcaccctgtcgatcgaggagtaccgcgcgcacaaggcggagttcgagcaatga

SEQ ID NO: 48938 - DNA, 1185 bp, Burkholderia ubonensis
atgagttggacaactgccgtcgaactgcgtgcccgcctccagcgcctatgggaacgcggcgaatggctgcgaagcctcgtagacggtgccgaggggctattcccgctacgtctggcgatcaaaggcccaagctcgtccgagttggctgaacgcttcgacacggtacgcgcatggattacggaaattgccgcgacgccgcgcatacgcatcgaatggcgagaaatcaatcatcgaattctcggccagcagcgtttgccacgagcagcttgggtcgacagtctggacgatgcgctcactgtcgccggcaagcaacgcgacgcagcgcggttcgagcggctgcttgaaatcacacgctcgcgccagccgaagctcatcgcatggcttgcgcagcgcccgatgcaggccctcgaattggccggcgattgggaacgactgctggcagtcgtcgattggctgcaagcacatccgcagccgggcatctatcttcgccaagccgaaatcgccggagtcgacacgaaattcatcgaggcgcggcgcggcgtcctctcccaatggctcgatctcgtgctgccgtccgaggcgatcgacagcagtcggaccggcgccgcccaattcgccgctcgctacgggttccgcgataagccgcctcgtattcgatttcgcgtgctcgatgagcggctcgccgtcctgcccggcatgggccgacccgacatcacactcgacgccgacagcttcgcgcgcctcgcactgccgtgccgccatgttttcgttacggaaaacgaaacaaattttctggcgtttcccgacgttccgcaggcgatcgtgctcttcggagcgggctacggctgggaagctctggagccggcacaatggctcacggactgtgcgctccactactggggcgacatcgacacgcacggctttgccattctcgaccaattgcgttgccgattccctcacgcgggatccttcttgatggaccgcgcgacactgatagcgcatgaagcattctggggagacgaaggcgatcaggtcatgcgtgatctgccacgactcacggcgcaagagcgcgagctctttgacgacctgcgtgacaaccggattcgccgcggattacggctcgagcaggagcgcgtcgggttcgggtgggtcagagcggcgctagaggaacggtctttcgtttag

SEQ ID NO: 48939 - DNA, 1500 bp, Burkholderia anthina
atggatctggattggaaacagcgcacgcatcagtacgtccagtcgcggcgtcaacaccctgcctggcaattgctggcggcgcgtagcgcaccgctcgtgctgagttgcttacagacgttgtttgaaaagagtcacgacggtattgaggtcgacgtggccgaacaaatgctcgcagccgtgctggagcagcacgcgaattcagacgaatttggcgttgatcccgagggcgattgtgcggcactggcgcgcaaggagctgcggggatggattcggcgttcgttgctgattgaacgggctgggcgtctctatgccaccgatgcgctcgaggaagcgctgcgattcgtcgccgccctggacgggcgcttaatgacctcgacggcatcacggctatcgatcgtgcaacgcgagatcgaaaacctggaatccaaccttaatccggatcgtcgaagtagatcgcgctatttgcagcggaagatccaggagttggagcgggaactcgaagacgtcaagacgggtaacgtgcgtgcgatgacggaatcggaggctatcgagggtatccgggaaatctacaatctggctacgagtttgcgtgccgactttcgtcgggtcgaagactcttatcgtgaggccgatcaagcgttgcggcagtcgatcattagcgagcgcggtcatcggggcgcggtcgtggacaaactgttgaacagccatgacgaactgctcgaaaccgccgaaggaaaggtttttcgcggttttcagcagcagttgggacgctctgccgaactcgacgcgatgaagcatcggctgcgccagatcattcagcatcccgccacgcgctcggcactcaatcccagccagcaacatgaactgcgctggctcatcatccgcctgatcgacgaatcggcagcggtcatccgcgcgagagctcgaagtgaacgtgacgtcaaggggttcctccgtacgggacttgcggtcgaacatcatcgggttggcgaactgatccacgacgtgttgcagcaagcgctggcactcgactgggcgagcgcctcgacgcgcaacatggacggtccgttgccgcccgttgcaatttccgtggcgggtctaccgctcgtggaaagaatcaggttcaaggccatccaggacgatgcgcgactcgtgctcgaactgcaggcgcgaagcatggacccacgatccatcgacgacgagttttgggaggcgttcgatggtttggatcgacaggcgctgtgtgagagtacggtggcgttgctcgagcaacatggcacgcgcatggggatcgcagaactggcgcggcatctgccgccgacgcatgatctggagacaatcgcgctctggttgagcatggcgcgggaagcaggggtttcgatggacggggagcgggaaagcgtcgacgtaatggggcgtgatggcatgccgctgcgctttgacgttccggtcgtggcgctcggtttcgacgacgtgcgcggcttggatatggagctataa

SEQ ID NO: 48940 - DNA, 762 bp, Burkholderia anthina
atggtaagcatattcgatacgctgaccgcatcgaaggacgacggacgtgaggttgacaaggttgcgcagttgtcgggagctcatgacgaggccagcgaatttgacgccggtccgtcggcggaggcggcgagtttcacatctcgggacgtgaaggatgcatgccaggaactgctcaaattcggccttctcgaggttgctcgcaaacccaacctctaccggattaccgcgacgagtcgtgcagacatcgaccgcattctggagccgctggatttggtgctcaagattgatgacattcgtgggctggccttcgtcagtgtcgctcagtcgtactgccgtgaatccgaggacgacgaatggtctcatccgctggttcgccgacagcgcctgacgctagagcaatcgcttctggttgcgctactgcggcagcgctatctggctcatgagcaggaacggggtatcggcgtccccgatgcacctgcgttggtcgaagatgtcgctgctcagttgcaactctaccttggaggcttgggaagcgacacgcgggaactccagcgcgcgcgcaatctgctcgataagctcaagccgcatggggtcgtctcggaagtcgaccagcaggatcagtttatgattcgcccgattattgtccatcttgccaatcccgagaacttgttagggttgctccaggcgctcaagcaggcatcgccgggcatacagcgcacggatgattgtgcgccggtgggggacgacggggagattgcatga

SEQ ID NO: 48941 - DNA, 3330 bp, Burkholderia anthina
atgatctcggccaactcggaccatcgcgctatcgacgcgctgttgtcgacgccggcattcattctcacccgtctcgatctcttcaattgggggccgttcggcgggcgccatcaggcagccatcgatatcgaaggtacggcgatcattggccagacaggcagcggcaagaccacgctgattgacgccctgatgacgttgattgccgcgcagccgcgctacaacctcgcgtcgaccggagggcacgagagcgatcgcgacctcgtctcgtatgtgcgtggggtttccggcgcgggacgtgaaggtgatacagaccatatctccagaccgggaaagactgtgtcagcgattgccgctacctttggcaatggcagcgacacgctgacgattgccggaatattttcgctggagggaagcggctcctcggccactgaactcgatcggatctggatgatcgagcggggcgcggagtttggtcttgacgaattgctggaattgcataacgccgggggcaagcgggcgctcaggcaacatgagcgagcctcttcagggagcctgaaagtatacgacagcaagaaggcgtacatcctggaattgcgtcgcatcttcgaggtcggcgagaacgcgttcaccctgctcaatcgcgcggccggcctgaagcaactcaacagcattgacgacctcttccgggatctggtgctggacgatcgatcggcctttccgcgggcgctggaggtggcgtccgagttcgacaatctcgcggagattcgggaggaactggagacggcaagaaagcagcgggattcgctggtgccgatcgaaaaggggtgggcgcagcgtgcggagagactcgagcagcgggatcttcaggttcgtctcgtttcgcttttgcccatcgcggttgcgactcgcgagcatcaattgtgggtcgatcgggagcgcgaactgggacaggagaaagcgggctgtgaacgacggatcgaagaccacacccgtcgcacaaaggagctcgaatcagcggcacaaaggctgcgcgacatctatcttcgtgatggcgggagcggcatcgaggaactcgaaggcaagcttgaggctgaacgcaagcaccttgagacggttcggcgccacgcgaacgattatgtgttgttcgccaagaagcttcagttcagccaggcgcttaccctggagacgtttcggcagaatgaggccagcgcgcaggctttgctcgcttcgacggccgtcgcgatcgaggaagcggaacgcttggcatacgccaagggggccgcgctggcaggcactgaacagacgcttacagaacagcaggcggcccttgcaaatgcaaggtcacacccgggatccaacataccgtcgctgtatcaacagttcagacgcgatctggccggccaactgaacctgcacgatgaggatctgcccttcgttgcggaactggtcgaggtgcaaaaatcgcagtcggcatggcgcggcgcgatcgagcgcgcgatgggcggccatcggttgcgcatcatggttccggcatcacacatgaagcttgcactcgcatgggtgaatggccgcgacaaccggttgcatgttcgtcttgtggacgtgatggcgccggatcgcgccgtcgaattcctgaccgacggcttcacgcgaaaacttaacttcaaggaccatccgtatcgggaggctgttcgagggctacttgctcaaatcgatcgacattgcgtggcgtcccccgaggtgttgaaacatacgccgcatggtatgaccgcgcaggggctcatgtcgggcaagagcggtttcttcgaaaagcaggacaagaccccgttgagccagggatggctcaccggttttgacaacaaggaccttctcgccgagctcgagcgtcagtgtgacgagacggcacgggaactcgctgagcttacggcaaagtttgaggcggcgagggcgcaggttacagaggtacaggttcgccgaacaatgcttgaccgcgtgctgtcgattgattttgcggatatcgatgtgcgtcaggccgagcgtaacgtggcggattccacccgacggctctcggcgctgacggatccatcatcggataccgcgagggccaaacaggcttgggaggaggttcgcgcggaactcgagaagatcagccaggcgcgcgacgagagcctcatacagcagacgaagcttcaagagcagtatgacaccgccgtgaatgggcgagaacgcgcattcgcgacgatcggcgaaggactgaatgcgatcgagatggcgctggtcgagcaacactttgatttcgtcggtgtccagaccgtggatacactgatgcgacagcaggcgcaaatcgacgtccggttgcgagcacgcctcgaggaacttgctgcaaggatcaatgatcacgaacggcaactggtccgtggcatgggcgcggcgcgtgctgtcgatacgggtgccttggcggaggtcggcacggaagttgaagacgtaccacagtatctagagcgactgcgcgtgctcagggatgaggcgctacccgaaaagctggatcgttttcttgggtatctgaatcaatcctcggacgagggggtgacgcaattgctccgcagtatcgataacgaggtggagaccatcgtcgagcggatcgaggacttgaacgccacgatgcgccgcgtcgactttcagccggggcggtatttgcaactggagccgcgtcgggtcgtccatgagagtctgcgaacattggagcaggcgcaacgcactctgcgcgccgcgacactgcaagacgaccagggcgagagccagttcaacgcgttagccgaggtcgtcaggctcatgagggacgcgagcgagcgacgcacgaccgttggggcgaaggcgcttctggatcctcgctatcggctgcagtttgcggtgtccgtcatcgagcgcagttcgggggcagtctgtgaaacccggaagggatctcaaggcggcagcggcggagaaaaggagatcattgcaagctatattttgacggcttcgttgagctatgcgctgtgcccggatggcaaggaccgtccattgtttggcaccatcgtgctggacgaggcgttctcgaagagttcacaggcggtggcaggacgcattatttcagcactgcgagagtttggccttcatccgctctttgtgacgccgaacaaggaaatgcggctacttcgagcgcatacgcgctcggccattctgatccatcgaaaaggactgcaggcaacgatgacgtctttgagctgggaagagctggattccattgcacgagcccggcaaatgatcggacgagatgaaatcaccgaatga

SEQ ID NO: 48942 - DNA, 1146 bp, Burkholderia anthina
atgaaatcaccgaatgatatggctgcacgcctcgctcgatcatggcaatcggccgatgaacgcgaggcgcggctgctttaccccgatagctggccgctgcgattgcctatcggcagacccagtcccaaggcttttaccgaacagaccgaaagcgtcaaacggcattgcgatgcctggcgatcggtggagattggcatcgtgcattgggaaaccgtggcctatcgtgcggggggcagccccgtgcgactgccgcacctttgggaactgagaagcccgtcggactgggtgcgcgcgacccaggatgccgcgattgcggccgagtacgaacggctcggtgaggtggttcggcacatggacgcgcagttccacgcactggtggtacgtcagcgaaggttgatgatggagcgcccggtgcacgagatcatcaaggctggggaagtggccttggcgttatcgccgggatgtgcgcaagggcgtccactgcgggcgcttggtgtctgcaataccgatagcaagttcttcgagcggcaccgggcgttgctctgtcacatgctcaacgttcgctttggcggacaagtttccgaactggggctcgaggcgttcctcggcgcgcctgaggacgacgagcgttggttgctcgtcgtgccgctcgcggccgggatattgccgtttcgccagcagcgcatccgggccggtgaactcgttcagcttccgaagtgcgtcggccacatcatcattgtggaaaacgaacggtccgttcatcagttggcggagctacctgatgcggtggcgatcctcggtgcgggactgagtttggactggacgcatgatccgtggctcgcgagcaagcgtgtagcgtattggggggatatggatacctgggggctgaaaatgttggggaaagtgcgtcaagctattccgtccttgagcgcgctgctgatgaatcgggactgttttgaacgatacgcggcaaatctggccgtgcgtgaactcgtccccgtcgacgggcgccgtcctgacggactaaccgaggacgagggcgccttcttcgaatacctcctgacgcaggagcgcgggcgcttggaacaagaattcttgccgaaagacattgtgagagcggcgatgcatgcgtggtatgaggcgtaa

SEQ ID NO: 48943 - DNA, 1500 bp, Burkholderia anthina; identical to SEQ ID NO: 48939

SEQ ID NO: 48944 - DNA, 762 bp, Burkholderia anthina; identical to SEQ ID NO: 48940

SEQ ID NO: 48945 - DNA, 3330 bp, Burkholderia anthina; identical to SEQ ID NO: 48941

SEQ ID NO: 48946 - DNA, 1146 bp, Burkholderia anthina; identical to SEQ ID NO: 48942

SEQ ID NO: 48947 - DNA, 1461 bp, Burkholderia ubonensis
atgttcctcgactaccctaccctcgacgcgctgcgcacgcgccatcccgcttggcgacttttgcgctccgaccacgcgccgctcgccgtcagcttcctgcaccgcgcgttcgtcgcgccgaacgtgcgcgaggtggcggctccgtttcttgccgaagcactcgaggacgagctttacgcgttgcgcgaacaactcggcgacggcgccttcccgaagcccgcgctcgagtatctgaacgactgggcgagtcctgaaaagggatggttgcgcaaattctatcgccaaggctccgatgaaccgcatttcgacctgacacccgccgcaggaaaagcgatcgcgtggctcggcacgctgatggaacgaagctttgtcggcacggaatcccggctcctgacgcttttcgagttgctgcggcagatggccgaaggcagcgagacggacccggaaaggcgtcttgccgagctccacgcgcggcgcagccagctcgacgaagaaatcgctcgcgtggaggccggtgacgttcggctgctcgacgatgccgcgatcaaggaccgctttcagcaattcatgcagatggcgcgcgacctgctcacggatttccgtgaagtcgagcagaacttccgtctgctggaccggcatgtacgcgagcgaatcgcgctctgggaaggatcgaagggtgcgctcatcgaagaaatcatgggcgagcgcgacgcgatcgccgattcggaccagggcagcagctttcgggcgttctgggacttcctgatgtcgagccgccgccaggaggaactctccgaacggctcgagcacgtgcttgcgctcccggcgatcacggaaatgaagccggacgcgcgcacgcggcgcgtccactatgactggctggaagccggcgagcacacgcaacgcacggtcgctcagctctcgcagcagcttcgacgtttcctcgacgatcaagcgtggctcgaaaaccgccgcatcatggacattctgcgcggtatcgaaacgaaagcgcttgtgctgcgtgaagcgcccccgccgggctccgtcatggagatcgagaccgcgtccgctgacatcgagctgccaattgaacgcccgctttacgcgccggcgctgcgccctctcatcgccaacgtcgcaatcgagaccggcgatgcggacctcgatgcgtcggcactctacacgcagatcgtcgtcgatcgtgcgcgcctcgcaagccacatccgccgctgccttcaagatcggcggcaagtgacacttgccgaactggccgcttcgcagccgctcttgcatgggctcgctgaactcgtcgcctatttgcaactcagcgccgaagccggatcatttcgtgcgaccgtcgatgagaccgtctccgatacgatcgagtggcaggcgaacgatgccaacggagcagcaatcgtcaagcgcgcaacgatgccgcgtgtgattttcacaaggtag

SEQ ID NO: 48948 - DNA, 651 bp, Burkholderia ubonensis
atggaagaacagcaaacttcgtcgcttggtcgaggtgacttgtcgacggttgccatcgcgctgctcaagggcgtggtttatcgtgatgtaaacgagcgcctctgggccgcactgctcgaattgcagacacacgtgcgcgactacgtcgccgtgcttggcctcgagctcgtcgtggacgaggcggaaggctacgccttcgtaaagagccgcaccgagcccgacgccgaagtcgacggagaccaggtcaagctgccccggctcgttgcacggcgtccactctcgttccccgtgagcctgctgctcgcgctgctgcgaaaaaaactggcggaatgggatgccggcggcggcgacacgcggctcgtcctttcgcgcgaggacatcgtcgagctcgtacgcgtcttccttcccgcgagcactaacgaggcgcgcctggtcgatcagatcgacacgcacgtgaacaagatcgtcgacctcggtttcctgcgccggatgaagaccgcgagcggaccgcccacattcgaggtgcgacgcattctcaaggcgttcgtcgatgcgcaatggctgctcgatttcgacgcgcggctcgcaagctatcaggcgcaccttcgggatgcgacgaattcggaccaaacggagaggcgcgatgaatga

SEQ ID NO: 48949 - DNA, 3372 bp, Burkholderia ubonensis
atgaatgagccgcgcacgctcggcctcgattttgccgcggacgacacccggacgggctttcgcctcgagcggctcgaggttttcaactggggcaccttcgacgaacgggtctgggtgctgcgggtcgacggccgcaacggcctgctgacaggagacatcggttccggcaagtcgacgctcgtcgacgccattaccaccctcctcgtgcccgcgcagcgcatcgcctacaacaaggcggcaggcgcggacagcaaggaacgtacgctgcgctcgtatgtgctcggctactacaagtcggagcgcaacgaggtcacgggaacggccaagcccgtgagcctgcgcgaccataacagctattcggtgattttgggcgtgtttcgcaacgccgggtacgacgccaccgtcacgctcgcgcaagtgttctggatgaaggacgcgcaggctcaacctgcgcgattcttcgtcagcgccgaacgagatctctcgatcgcgacggacttctcgcgcttcggcaccgacattgcgcagctgcgcaagaagctgcgcgggctgggcgccgaaatcgaggacacgtttccgaaatacagcgcctggttccggcggcgcttcggaatcgaaaacgagcaagcgctcgagctctttcatcaaacggtatcgatgaagtcggtgggcaatctcaccgacttcgtacgcagccacatgctcgagccgttcgacgtcgcaccgcgcgtcgacgccctgattgctcacttcgacgatctgaatcgcgcgcacgaggcggtactgaaaaccaagcgccaagtggaattgctgacaccgctcgtcgacgactgcgaccgccacagcgagcaaggccacgttctcgaaggctggcgcgcgtgccgcgaagcattgaggccctacttcgccgggctcaagctcggcctcgtcgaacgccgcctccaattgctcgaggaggatcatgcgcgcgcgacctcgcgaaaggcgcggcacgaagaagcgcgcgaccaggcgcgccagcgcgtggacgatttgcgccgtgccgtggccgaacaaggcggcgatcgcatcgcgcagctcgatgtcgagattcgcgagcacgagcgagaaagcgtgcgtcgccgcgaacgcgcgcaacgctatgccgccatcgttacgctgttcggcgaaaccgaggccgcggatgaggctgcattcgcctcccagcgccaacgcctggccgagcagcgcagctcgctcgtcgacgacgaagcgcagcagcaaaatgcgataaccgaatggagcgtggcatttcgcgaaggaaaagcgcggcgtgatgtgctggaggacgaaatcgcgagcctgaaagcccgacgcaacaacatcccgaaggaacaggtcgcgatgcgggcgagcctgtgctcggcgctcggcctggaggaagacgccctgccgttcgcgggcgaactcattcaggtgcgcgaggatgcgcgtgattgggagggcgccgccgagcgcgtcctgcgcaacttcggcctgtcgctgctcgtgcccgacgagcactatgcgaacgtcgcggcgtgggtcgatcgcactcatcttcgggggcggctcgtctactttcgcgtgcgctccgaacgcaccgcgcgtgcagccgaggccatcgagctgcaccgccactcgctcgcgcacaagctcgcgatcaagcccgactcgcagttctatggctggctcgagcgcgaaatcggccgccgtttcgactatgcctgctgcgatacgcaggagcagtttcggcgcgagacgcgcgcgatcacgcgtgcgggccaggcgaaagcgcctggggagcgccacgaaaaagacgaccgccacgcgctcgacgatcgcagccgctacgtgctcggttggagcaacacggcaaaaatatccgcccttgcagcacaacggcaagcgctcgaagctcgccttggcgagatcgggcaaaggctcggagaggcccaacacgagcacaccaaggtgcgtgagcaactcgaagcacttgcgcgtgccggcgagttcgccgagtttcgggaaatcgattggtcgagctgcgctgccgcgatcgcacgtcttgcggacgaaaaggcgcgactcgaatcggcaagcgacgccctcgcagagctaacggctcaattggactcggcgcaagcgtcgttgaaagagagtgaagcggcgatgtcggaaaccgactcggaactgggcggcatcctggccaagcgggaggcggcacaagcgctgcgcgaagagacgcacgcgctcgttgcagaagtggatgccgaacttgccgaacgaatcgaggccctgcgagcggagattctcggcgaacaccagctttccgtcgagtcatgcgacaaccgcgagcgggacgtgcgagaagcgttgacaacccgtatcgacaacgaaacgaagtcactcggccgcctggccgaaagaatcgtcaaggcaatggcggccttcaaggaagcctacaagctcgaaacggccgacttcgatgcgagcctcgacgcgaacccggagtaccgtgacatgctcgcgcggctgcaggcggacgatttgccgcgcttcgaaacgcgtttcaaggagctgctcaacgtcaatacgatcaacgagatcgccaactttcacgcccagctcgcgcgcgaacgggcgacgatcaaggaacgcatcgaacgcatcaacgaatcgttgcgacaaatcgactacaacgcgggccgatacatcatcctcgagagtcagcccagccccgacgcggaaatccgcgatttccagagcgacctgcgcgcttgcaccgagggcgagctcaccggctcggacgatagccaatactcggaggccaagttcctgcaagtcaaacgaatcatcgaccgcttccgcggccgcgaagggttgaccgagcaggaccggcgttggcgcgccaaggtgaccgacgtgcgcaactggtttctgttcgccgccagcgagcgttggcgcgaagacgacagcgaatacgaacactactcggactccggcggtaaatcgggcggccagaaggaaaagctcgcctacacgatccttgccgcgagcctcgcctaccagttcggcctcgaatggggcgccgtgcgttcccgatcgttccgcttcgtcgtcatcgacgaagcatttggccgaggctccgacgaatcggcgcagtacggtctcacgctgtttcagaaactgaacctgcaactgctgatcgtcacgccactgcagaagattcacatcatcgagccgttcgtttcgagtgtcggattcgttcagaacgacggtggacgcgcctccaagctgcgcaccctgtcgatcgacgagtaccgcgcgcacaaggcggagttcgagcaatga

SEQ ID NO: 48950 - DNA, 1185 bp, Burkholderia ubonensis
atgagctggacaactgccgtcgaactgcgtgcccgcctccagcacctatgggcacgcggcgaatggctgcgaagcttcgtagacggcaccgaggggctattcccgctacgtctggcgatcaaaggcccgagttcgtccgagctggctgaacgcttcgacgcggtacgcgcatggatcgcggaaattgccgcgacgccgcacatacgcatcgaatggcgagaaatcaatcatcgaattctcggcatgcagcgtttgccacgagcagcttgggtcgacagtctggacgatgcactcactgtcgccggcaagcaccgcgacgcagcgcggttcgagcggctgcttgaaatcacacgctcgcgccagccgaagctcatcgcgtggcttgcgcagcgcccgatgcaggccctcgaattggccggcgattgggaacgactgctggcggtcgtcgattggctgcaagcacatccgcacccgggcgtctatcttcgccaagccgaaatcgccggcgtcgacacgaaattcatcgaggcaaggcgcggcgtcctctcccaatggctcgatctcgtgctgccgtccgaggcgatcgacagcagccggacaggcgtcgctcaattcgccgcgcgctacgggttccgcgagaagcaaccccgtattcgatttcgcgtgctcgatgagcggctcgccgtcctgcccagcatgggccgccccgacatcgcactcgacgccgacagcttcgcgcgcctcgcactgccgtgccgccatgttttcgttacggaaaacgaaacaaattttctggcgtttcccgacgttccgcaggcgatcgtgctcttcggagcgggctacggctgggaagctctggagccggcgcgatggctcgcggactgtgcgctccactactggggcgacatcgacacgcacggctttgccattctcgaccaattgcgttgccgattccctcacgtgaactccttcctgatggaccgcgcgacactgatggcgcatgaagcattctggggagacgaaggcgatcaggtcatgcgtgatctgccgcgactcacggcgcaagagcgcgagctctttgacgacctgcgtgacaaccggattcgccgcggattgcggctcgaacaggagcgcgtcgggttcgggtgggtcagagcggcgctagaggaacggtctttcgtttag

SEQ ID NO: 48951 - DNA, 1461 bp, Burkholderia ubonensis
atgttcctcgactaccctaccctcgacgcgctgcgcacgcgccatcccgcctggcgacttttgcgctccgaccacgcgccgctcgccgtcagcttcctgcaccgcgcgttcgtcgcgccgaacgtgcgcgaggtggcggctccgtttcttgccgaagcactcgaggacgagctttacgcgttgcgcgaacaactcggcgacggcgtcttcccgaagcccgcgctcgagtatctgaacgactgggctagccctgaaaagggatggttgcgcaagttctatcgccagggctccgatgaaccgcatttcgacctgacacccgccgcgggaaaagcgatagcgtggctcggcacgctgatggaacgaagctttgtcggcacggaatcccggctcctgacgcttttcgagttgctgcggcagatggccgaaggcagcgagacggacccggaaaggcgtcttgccgaactccacgcgcggcgcagccagatcgacgaagaaatcgctcgcgtggaagccggcgacgtccggctgctcgacgatgccgcgatcaaggaccgctttcagcaattcatgcagatggcgcgcgacctgctcacggatttccgtgaagtcgagcagaacttccgtctgctggaccggcatgtacgcgagcgaatcgcgctctgggaaggatcgaagggtgcgctcatcgaagaaatcatgggcgagcgcgacgcgatcgccgattcggaccagggcagcagctttcgggcgttctgggacttcctgatgtcgagccgccgccaggaggaactctccgaacggctcgagcacgtgcttgcgctcccggcgatcacggaaatgaagccggacgcgcgcacgcggcgcgtccactatgactggctggaagccggcgagcacacgcaacgcacggtcgctcagctctcgcagcagcttcgacgtttcctcgacgatcaagcgtggctcgaaaaccgccgcatcatggacattctgcgcggtatcgaaacgaaagcgcttgtgctgcgtgaagcgcccccgccgggctccgtcatggagatcgagaccgcgtccgctgacatcgagctgccaattgaacgtccgctttacgcgccggcgctgcgccctctcatcgccaacgtcgcaatcgagaccggcgatgcggacctcgatgcgtcggcactctacacgcagatcgtcgtcgatcgcgcgcgcctcgcaagccacatccgccgctgccttcaagatcggcagcaagtgacacttgccgaactggccgcttcgcagccgctcttacatgggctcgctgaactcgtcgcctatttgcaactcagcgccgaagccggaacatttcgcgcgaccgtcgatgagaccgtctccgatacgatcgagtggcaggcaaacgatgccaacggagcagcaatcgtcaagcgcgcaacgatgccgcgggtgattttcacaaggtag

SEQ ID NO: 48952 - DNA, 651 bp, Burkholderia ubonensis
atggaagaacagcaaacttcgtcgcttggtcgaggtgacttgtcgacggttgccgtcgcgctgctcaagggcgtggtttatcgtgatggaaacgagcgcctctgggccgcactgctcgaattgcagacacacgtgcgcgactacgtcgccgtgcttggcctcgagctcgtcgtggacgaggcggaaggctacgccttcgtaaagagccgcaccgagcctgacgccgaggtcgacggagaccaggtcaagctgccccggctcgttgcacggcgtccactctcgttccccgtgagcctgctgctcgcgctgctgcgaaagaaactggcggaatgggatgccggcggcggcgacacgcggctcgtcctttcgcgcgaggacatcgtcgagctcgtacgcgtcttccttcccgcgagcactaacgaggcgcgcctggtcgatcagatcgatacgcacgtgaacaagatcgtcgacctcggtttcctgcgccggatgaagaccgcgagcggaccgcccacattcgaggtgcgacgcattctcaaggcgtttgtcgatgcgcaatggctgctcgatttcgacgcgcggctcgcaagctatcaggcgcaccttcgagattcgacgaattcggaccaaacggagagtcgcgatgaatga

SEQ ID NO: 48953 - DNA, 3372 bp, Burkholderia ubonensis
atgaatgagccgcgcacgctcggcctcgattttgccgcggacgacaccctgacgggctttcgcctcgagcggctcgaggttttcaactggggcaccttcgacgaacgggtctgggtgctgcgggtcgacggccgcaacggcctgctgacgggagacatcggttccggcaagtcgacgctcgtcgacgccattaccaccctcctcgtgcccgcgcagcgcatcgcctacaacaaggcggcaggcgcggacagcaaggaacgtacgctgcgctcgtatgtgctcggctactacaagtcggagcgcaacgaggtcacgggaacggcaaagcccgtgagcctgcgcgaccataacagctattcggtgattttgggcgtgtttcgcaacgccgggtacgacgccaccgtcacgctcgcgcaagtgttctggatgaaggacgcgcaggctcaacctgcgcgattcttcgtcagtgccgaacgagatctctcgatcgcgaccgacttctcgcgcttcggcaccgacattgcgcagctgcgcaagaagctgcgcgggctgggcgccgaaatcgaggacacgtttccgaaatacagcgcctggttccggcggcgcttcggaatcgaaaacgagcaagcgctcgagctctttcatcaaacggtatcgatgaagtcggtgggcaatctcaccgacttcgtacgcagccacatgctcgagccgttcgacgtcgcaccgcgcgtcgacgccctgattgctcacttcgacgatctgaatcgcgcgcacgaggcggtactgaaaaccaagcgccaagtggaattgctgacaccgcttgtcgacgactgcgaccgccacagcgagcaaggccacgttctcgaaggctggcgcgcgtgccgcgaagcattgaggccctacttcgccgggctcaagctcggcctcgtcgaacgccgcctccaattgctcgaagaggatcatgcgcgcgcgacctcgcgaaaggcgcgacacgaagaagcgcgcgaccaggcgcgccagcgcgtggacgatttgcgccgtgccgtggccgaacaaggcggcgatcgcatcgcgcagctcgatgtcgagatccgcgagcacgagcgagaaagcgtgcgtcgccgcgaacgcgcgcaacgctatgccgccatcgttacgctgttcggcgaaaccgaggccgcggatgaggctgcattcgcctcccagcgccaacgcctggctgagcagcgcagctcactcgttgacgacgaagcgcaacagcaaaatgcgataaccgaatggagcgtggcatttcgcgaaggcaaagcgcggcgtgatttgctggaggacgaaatcgcgagcctgaaagctcgacgcaacaacatcccgaaggaacaggtcgcgatgcgggcgagcctgtgctcggcgctcggcctggaggaagacgccctgccgttcgcgggcgaactcattcaggtgcgcgaggatgcgcgtgattgggagggcgccgccgagcgcgtcctgcgcaacttcggcctgtcgctgctcgtgcccgacgagcactatgcgaacgtcgcggcgtgggtcgatcgcactcatctccgggggaggctagtctactttcgcgtgcgctccgaacgcaccgcgcgtgcagccgaggccatcgagctgcaccgccactcgctcgcgcacaagctcgccatcaagcccgactcgcagttctatggctggctcgagcgcgaaatcggccgccgtttcgactatgcctgctgcgatacgcaggagcagtttcggcgcgagacgcgcgcgatcacgcgtgcgggccaggcgaaagcgcctggggagcgccacgaaaaagacgaccgccacgcgctcgacgatcgcagccgctacgtgctcggttggagcaatacggcaaaaatatccgccctcgcagcacaacggcaagcgctcgaagctcgccttggcgagatcgggcaaaggctcggagaggcccaacacgagcacaccaaggtgcgtgagcaactcgaagcacttgcgcgtgccggcgagttcgccgagtttcgggaaatcgattggtcaagctgcgctgccgcgatcgcacgtcttgccgacgaaaaagcgcgactcgaatcggcaagcgacgccctcgcggagctaacggctcaattggactcggcgcaagcgtcgttgaaagagagtgaagcggcgatgtcggaaaccgattcggaactgggcggcatcctggccaagcgggaggcggcacaagcgttgcgcgaagagacgcacgcgctcgttgcagaagtggatgccgaactcgccgaacgaatcgaggccctgcgagccgagattctcggcgaacaccagctttccgtcgagtcatgcgacaaccgcgagcgggacgtgcgagaggcgttgacaacccgtatcgacaacgaaacgaaatcactcggccgcctggccgaaagaatcgtcaaggcaatggcggctttcaaggaagcctacaagctcgaaacggccgacttcgatgcgagcctcgccgcgaactcagagtaccgtgacatgctcgcgcggctgcaggcggacgatttgccgcgcttcgaaacgcgtttcaaggagctgctcaacgtcaacacgatcaacgagatcgccaactttcacgcccagcttgcgcgcgaacgggcgacgatcaaggaacgcatcgaacgcatcaacgaatcgctgcgacaaatcgactacaacgcgggtcgttacatcgtcctcgagagtcagcccagccccgacgcggagatccgcgaattccagagcgacctgcgcgcttgcaccgagggcgaactcaccggctcggacgatagccaatactcggaggccaagttcctgcaagtcaaacggatcatcgaccgcttccgcggccgcgaagggttgaccgagcaggaccggcgctggcgagccaaagtgaccgacgtgcgcaactggtttctgttcgccgccagcgagcgttggcgcgaggacgacagcgaatacgagcactactcggactccggcggtaaatcgggcggccagaaggaaaagctcgcctatacgatccttgccgcgagcctcgcctatcagttcggcctcgaatggggcgccgtgcgttcccgatcgttccgcttcgtcgtcatcgacgaagcatttggccgaggctccgacgaatcggcgcagtacggtctcacgctgtttcagaaactgaacctgcaactgctgatcgtcacgccactgcagaagattcacatcatcgagccgttcgtttcgagcgtcggattcgttcagaacgacggtggacgcgcctccaagctgcgcaccctgtcgatcgaggagtaccgcgcgcacaaggcggagttcgagcaatga

SEQ ID NO: 48954 - DNA, 1185 bp, Burkholderia ubonensis
atgagttggacaactgccgtcgaactgcgtgcccgcctccagcgcctatgggaacgcggcgaatggctgcgaagcctcgtagacggtgccgaggggctattcccgctacgtctggcgatcaaaggcccaagctcgtccgagttggctgaacgcttcgacacggtacgcgcatggattacggaaattgccgcgacgccgcgcatacgcatcgaatggcgagaaatcaatcatcgaattctcggccagcagcgtttgccacgagcagcttgggtcgacagtctggacgatgcgctcactgtcgccggcaagcaccgcgacgcagcgcggttcgagcggctgcttgaaatcacacgctcgcgccagccgaagctcatcgcatggcttgcgcagcgcccgatgcaggccctcgaattggccggcgattgggaacgactgctggcagtcgtcgattggctgcaagcacatccgcagccgggcatctatcttcgccaagccgaaatcgccggcgtcgacacgaaattcatcgaggcgcggcgcggcgtcctctcccaatggctcgatctcgtgctgccgtccgaggcaatcgacagcagccggaccggcgccgcccaattcgccgctcgctacgggttccgcgataagccgcctcgtattcgatttcgcgtgctcgatgagcggctcgccgtcctgcccggcatgggccgccccgacatcgcactcgacgccgacagcttcgcgcgcctcgcactgccgtgccgccatgttttcgttacggaaaacgaaacaaattttctgacgtttcccgacgttccgcaggcgatcgtgctcttcggagcgggctacggctgggaagctctggagccggcgcgatggctcgcggactgtgcgctccactactggggcgacatcgacacgcacggctttgccattctcgaccaattgcgttgccgattccctcacgcgggatccttcttgatggaccgcgcgacactgatggcgcatgaagcattctggggagacgaagccgatcaggtcatgcgtgatctgccgcgactcacggcgcaagagcgcgagctctttgacgacctgcgtgacaaccggattcgccgcggattgcggctcgagcaggagcgcatcgggttcggatgggtcagagcggcgctagaggaacgagcgctcgtttag

SEQ ID NO: 48955 - DNA, 1461 bp, Burkholderia ubonensis
atgttcctcgactaccctaccctcgacgcgctgcgcacgcgccatcccgcttggcgacttttgcgctccgaccacgcgccgctcgccgtcagcttcctgcaccgcgcgttcgtcgcgccaaacgtgcgcgaggtggcggctccgtttcttgccgaagcactcgaggacgagctttacgcgttgcgcgaacaactcggcgacggcgccttcccgaagcccgcgctcgagtatctgaacgactgggcgagtcctgaaaagggatggttgcgcaaattctatcgccaaggctccgatgaaccgcatttcgacctgacacccgccgcaggaaaagcgatcgcgtggctcggcacgctgatggaacgaagctttgtcggcacggaatcccggctcctgacgcttttcgagttgctgcggcagatggccgaaggcagcgagacggacccggaaaggcgtcttgccgagctccacgcgcggcgcagccagctcgacgaagaaatcgctcgcgtggaggccggtgacgttcggctgctcgacgatgccgcgatcaaggaccgctttcagcaattcatgcagatggcgcgcgacctgctcacggatttccgtgaagtcgagcagaacttccgtctgctggaccggcatgtacgcgagcgaatcgcgctctgggaaggatcgaagggtgcgctcatcgaagaaatcatgggcgagcgcgacgcgatcgccgattcggaccagggcagcagctttcgggcgttctgggacttcctgatgtcgagccgccgccaggaggaactctccgaacggatcgagcacgtgcttgcgctcccggcgatcacggaaatgaagccggacgcgcgcacgcggcgcgtccactatgactggctggaagccggcgagcacacgcaacgcacggtcgctcagctctcgcagcagcttcgacgtttcctcgacgatcaagcgtggctcgaaaaccgccgcatcatggacattctgcgcggtatcgaaacgaaagcgcttgtgctgcgtgaagcgcccccgccgggctccgtcatggagatcgagaccgcgtccgctgacatcgagctgccaattgaacgcccgctttacgcgccggcgctgcgccctctcatcgccaacgtcgcaatcgagaccggcgatgcggacctcgatgcgtcggcactctacacgcagatcgtcgtcgatcgtgcgcgcctcgcaagccacatccgccgctgccttcaagatcggcggcaagtgacacttgccgaactggccgcttcgcagccgctcttgcatgggctcgctgaactcgtcgcctatttgcaactcagcgccgaagccggatcatttcgtgcgaccgtcgatgagaccgtctccgatacgatcgagtggcaggcgaacgatgccaacggagcagcaatcgtcaagcgcgcaacgatgccgcgtgtgattttcacaaggtag

SEQ ID NO: 48956 - DNA, 651 bp, Burkholderia ubonensis
atggaagaacagcaaacttcgtcgcttggtcgaggtgacttgtcgacggttgccatcgcgctgctcaagggcgtggtttatcgtgatgtaaacgagcgcctctgggccgcactgctcgaattgcagacacacgtgcgcgactacgtcgccgtgcttggcctcgagctcgtcgtggacgaggcggaaggctacgccttcgtaaagagccgcaccgagcccgacgccgaagtcgacggagaccaggtcaagctgccccggctcgttgcacggcgtccactctcgttccccgtgagcctgctgctcgcgctgctgcgaaaaaaactggcggaatgggatgccggcggcggcgacacgcggctcgtcctttcgcgcgaggacatcgtcgagctcgtacgcgtcttccttcccgcgagcactaacgaggcgcgcctcgtcgatcagatcgacacgcacgtgaacaagatcgtcgacctcggtttcctgcgccggatgaagaccgcgagcggaccgcccacattcgaggtgcgacgcattctcaaggcgttcgtcgatgcgcaatggctgctcgatttcgacgcgcggctcgcaagctatcaggcgcaccttcgggatgcgacaaattcggaccaaacggagagtcgcgatgaatga

SEQ ID NO: 48957 - DNA, 3372 bp, Burkholderia ubonensis
atgaatgagccgcgcacgctcggcctcgattttgccgcggacgacacccggacgggctttcgcctcgagcggatcgaggttttcaactggggcaccttcgacgaacgggtctgggtgctgcgggtcgacggccgcaacggcctgctgacaggagacatcggttccggcaagtcgacgctcgtcgacgccattaccaccctcctcgtgcccgcgcagcgcatcgcctacaacaaggcggcaggcgcggacagcaaggaacgtacgctgcgctcgtatgtgctcggctactacaagtcggagcgcaacgaggtcacgggaacggccaagcccgtgagcctgcgcgaccataacagctattcggtgattttgggcgtgtttcgcaacgccgggtacgacgccaccgtcacgctcgcgcaagtgttctggatgaaggacgcgcaggctcaacctgcgcgattcttcgtcagcgccgaacgagatctctcgatcgcgacggacttctcgcgcttcggcaccgacattgcgcagctgcgcaagaagctgcgcgggctgggcgccgaaatcgaggacgcgtttccgaaatacagcgcctggttccggcggcgcttcggcatcgaaaacgagcaagcgctcgagctctttcatcaaacggtatcgatgaagtcggtgggcaatctcaccgacttcgtacgcagccacatgctcgagccgttcgacgtcgcaccgcgcgtcgacgccctgattgctcacttcgacgatctgaatcgcgcgcacgaggcagtactgaaaaccaagcgccaagtggaattgctgacaccgctcgtcgacgactgcgaccgccacagcgagcaaggacacgttctcgaaggctggcgcgcgtgccgtgaagcattgaggccctacttcgccgggctcaagctcggcctcgtcgaacgccgcctccaattgctcgaggaggatcatgcgcgcgcgacctcgcgaaaggcgcggcacgaagaagcgcgcgaccaggcgcgccagcgcgtggacgatttgcgccgtgccgtggccgaacaaggcggcgatcgcatcgcgcagctcgatgtcgagatccgcgagcacgagcgagaaagcgtgcgtcgccgcgaacgggcgcaacgctatgccgccatcgttacgctgttcggcgaaaccgaggccgcggatgaggctgcattcgcctcccagcgccaacgcctggccgagcagcgcagctcgctcgttgacgacgaagcgcaacagcaaaatgcgataaccgaatggagcgtggcatttcgcgaaggcaaagcgcggcgtgatgtgctggaggacgaaatcgcgagcctgaaagctcgacgcaacaacatcccgaaggaacaggtcgcgatgcgggcgagcctgtgctcggcgctcggcctggaggaagacgccctgccgttcgcgggcgaactcattcaggtgcgcgaggatgcgcgtgattgggagggcgccgccgagcgcgttctacgcaacttcggcctgtcgctgctcgtgcccgacgagcactatgcgagcgtcgcggcgtgggtcgatcgcactcatctccgggggcggctcgtctactttcgcgtgcgctcggaacgcagcgcgcgtgcagccgaggccatcgagctgcaccgccactcgctcgcgcacaaactcgcgatcaagcccgactcgctgttctatggctggctcgagcgcgaaatcggccgccgtttcgactatgcctgctgcgatacgcaggagcagtttcggcgcgagacgcgcgcgatcacgcgtgcgggccaggcgaaagcgcctggggagcgccacgaaaaagacgaccgccacgcgctcgacgatcgcagccgctacgtgctcggttggagcaacacggcaaaaatatccgcccttgcagcacaacggcaagcgctcgaagctcgccttggcgagatcgggcaaaggctcggagaggcccaacacgagcacaccaaggtgcgtgagcaactcgaagcacttgcgcgtgccggcgagttcgccgagtttcgggaaatcgattggtcgagctgcgctgccgcgatcgcacgtcttgcggacgaaaaggcgcgactcgaatcggcaagcgacgccctcgcggagctaacggctcaattggactcggcgcaagcgtcgttgaaagagagtgaagcggcgatgtcggaaaccgactcggaactgggcggcatcctggccaagcgggaggcggcacaagcgctgcgcgaagagacgcacgcgctcgttgcagaagtggatgccgaacttgccgaacgaatcgaggccctgcgagcggagattctcggcgaacaccagctttccgtcgagtcatgcgacaaccgcgagcgggacgtgcgagaagcgttgacaacccgtatcgacaacgaaacgaagtcactcggccgcctggccgaaagaatcgtcaaggcaatggcggccttcaaggaagcctacaagctagaaacggccgacttcgatgcgagcctcgacgcgaacccggagtaccgtgacatgctcgcgcggctgcaagcggacgatttgccgcgcttcgaaacgcgtttcaaggagctgctcaacgtcaatacgatcaacgagatcgccaactttcacgcccagctcgcgcgcgaacgggcgacgatcaaggaacgcatcgaacgcatcaacgaatcgttgcgacaaatcgactacaacgcgggccgatacatcatcctcgagagtcagcccagccccgacgcggaaatccgcgatttccagagcgacctgcgcgcttgcaccgagggcgagctcaccggctcggacgatagccaatactcggaggccaagttcctgcaagtcaaacgaatcatcgaccgcttccgcggccgcgaagggttgaccgagcaggaccggcgttggcgcgccaaggtgaccgacgtgcgcaactggtttttgttcgccgccagcgagcgttggcgcgaagacgacagcgaatacgaacactactcggactccggcggtaaatcgggcggccagaaggaaaagcttgcctacacgatccttgccgcgagcctcgcctaccagttcggcctcgaatggggcgccgtgcgttcccgatcgttccgcttcgtcgtcatcgacgaagcatttggccgaggctccgacgaatcggcgcagtacggtctcacgctgtttcagaaactgaacctgcaactgctgatcgtcacgccactgcagaagattcatatcatcgagccgttcgtttcaagtgtcggattcgttcagaacgacggtggacgcgcctccaagctgcgcaccctgtcgatcgaggagtaccgcgcgcacaaggcggagttcgagcaatga

SEQ ID NO: 48958 - DNA, 1185 bp, Burkholderia ubonensis
atgagctggacaactgccgtcgaactgcgtgcccgcctccagcacctatgggcacgcggcgaatggctgcgaagcttcgtagacggcaccgaggggctattcccgctacgtctggcgatcaaaggcccgagttcgtccgagctggctgaacgcttcgacgcggtacgcgcatggatcgcggaaattgccgcgacgccgcacatacgcatcgaatggcgagaaatcaatcatcgaattctcggcgtgcagcgtttgccacgagcggcctgggtcgacagtctggacgatgcgctcgcagtcgccggcaagcaccgcgacgcagcgcagttcgcgcggctgctcgaaatcactcgcgcccgccagccgaagctcgccgcgtggcttgcgcagcgcccgttgcaagccctcgaattcgccggcgattgggaacgactgctggcagtcgtcgattggctgcaagcacatccgcacccgggcgtctatcttcgccaagccgaaatcgccggcgtcgacacgaaattcatcgaggcaaggcgcggcgtcctctcccaatggctcgatctcgtgctgccgtccgaggcgatcgacagcagccggacaggcgtcgctcaattcgccgcgcgctacgggttccgcgagaagcaaccccgtattcgatttcgcgtgctcgatgagcggctcgccgtcctgcccagcatgggccgccccgacatcgcactcgacgccgacagcttcgcgcgcctcgcactgccgtgccgccatgttttcgttacggaaaacgaaacaaattttctggcgtttcccgacgttccgcaggcgatcgtgctcttcggagcgggctacggctgggaagctctgaagccggcgcgatggctcgcggactgtgcgctccactactggggcgacatcgacacgcacggctttgccattctcgaccaattgcgttgccgattccctcacgtgaactccttcctgatggaccgcgcgacactgatggcgcatgaagcattctggggagacgaaggcgatcaggtcatgcgtgatctgccgcgactcacggcgcaagagcgcgagctctttgacgacctgcgtgacaaccggattcgccgcggattgcggctcgaacaggagcgcgtcgggttcgggtgggtcagagcggcgctagaggaacggtctttcgtttag

SEQ ID NO: 48959 - DNA, 1461 bp, Burkholderia ubonensis; identical to SEQ ID NO: 48955

SEQ ID NO: 48960 - DNA, 651 bp, Burkholderia ubonensis; identical to SEQ ID NO: 48956

SEQ ID NO: 48961 - DNA, 3372 bp, Burkholderia ubonensis; identical to SEQ ID NO: 48957

SEQ ID NO: 48962 - DNA, 1185 bp, Burkholderia ubonensis; identical to SEQ ID NO: 48958

SEQ ID NO: 48963 - DNA, 1461 bp, Burkholderia ubonensis; identical to SEQ ID NO: 48951

SEQ ID NO: 48964 - DNA, 651 bp, Burkholderia ubonensis; identical to SEQ ID NO: 48952

SEQ ID NO: 48965 - DNA, 3372 bp, Burkholderia ubonensis; identical to SEQ ID NO: 48953

SEQ ID NO: 48966 - DNA, 1185 bp, Burkholderia ubonensis; identical to SEQ ID NO: 48954

SEQ ID NO: 48967 - DNA, 1461 bp, Burkholderia ubonensis
atgttcctcgactaccctaccctcgacgcgctgcgcacgcgccatcccgcttggcgacttttgcgctccgaccacgcgccgctcgccgtcagcttcctgcaccgcgcgttcgtcgcgccgaacgtgcgcgaggtggcggctccgtttcttgccgaagcactcgaggacgagctttacgcgttgcgcgaacaactcggcgacggcgccttcccgaagcccgcgctcgactatctgaacgactgggcgagtcctgaaaagggatggttgcgcaagttctatcgccaaggctccgatgaaccgcatttcgacctgacacccgccgcaggaaaagcgatcgcgtggctcggcacgctgatggaacgaagctttgtcggcacggaatcccggctcctgacgcttttcgagttgctgcggcagatggccgaaggcagcgagacggacccggaaaggcgtcttgccgagctccacgcgcggcgcagccagattgacgaagaaatcgctcgcgtggaggccggtgacgttcggctgctcgacgatgccgcgatcaaggaccgctttcagcaattcatgcagatggcgcgcgacctgctcacggatttccgtgaagtcgagcaaaacttccgtctgctggaccggcatgtacgcgagcgaatcgcgctctgggaaggatcgaagggtgcgctcatcgaagaaatcatgggcgaacgcgacgcgatcgccgattcggaccagggcagcagctttcgggcgttctgggacttcctgatgtcgagccgccgtcaggaggaactctccgaacggctcgagcacgtgcttgcgctcccggcgatcacggaaatgaagccggacgcgcgcacgcggcgcgtccactacgactggctggaagccggcgagcacacgcaacgcacggtcgctcagctctcgcagcagcttcgacgtttcctcgacgatcaagcgtggctcgaaaaccgccgcatcatggacattctgcgcggtatcgaaacgaaagcgcttgtgctgcgtgaagcgcccccgccgggctccgtcatggagatcgagaccgcgtccgctgacatcgagctgccaattgaacgcccgctttacgcccctgcgctgcgccctctcatcgccaacgtcgcaatcgagaccggcgatgcggacctcgatgcgtcggcactctacacgcagatcgtcgtcgatcgcgcgcgcctcgcaagccacatccgccgctgccttcaagatcggcggcaagtgacacttgccgagctggccgcttcgcagccgctcctgcatgggctcgctgaactcgtcgcctatttgcaactgagcgccgaagccggaacatttcgcgcgaccgtcgatgagaccgtctccgatacgatcgagtggcaggcaaacgatgccaacggagcagcaatcgtcaagcgcgcaacgatgccgcgggtgattttcacaaggtag

SEQ ID NO: 48968 - DNA, 651 bp, Burkholderia ubonensis
atggaagaacagcaaaccccgtcgcttgatcgaggtgacttgtcgacggttgccatcgcgctgctcaagggcgtggtttatcgtgatggaaacgagcgcctctgggccgcactgctcgaattgcagacacacgtgcgcgactacgtcgccgtgcttggcctcgagctcgtcgtggacgaggcggaaggctacgccttcgtaaagagccgcaccgagcctgacgccgaagtcgacggagaccaggccaagctgccccggctcgttgcacggcgtccactctcgttccccgtgagcctgctgctcgcgctgctgcgaaagaaactggcggaatgggatgccggcggcggcgacacgcggctcgtcctttcgcgcgaggacatcgtcgagctcgtacgcgtcttccttcccgcgagcactaacgaggcgcgcctggtcgatcagatcgatacgcacgtgaacaagatcgtcgacctcggtttcctgcgccggatgaagaccgcgagcggaccgcccacattcgaggtgcgacgcattctcaaggcgttcgtcgatgcgcaatggctgctcgatttcgacgcgcggctcgcaagctatcaggcgcaccttcgagattcgacgaattcggaccaaacggagagtcgcgatgaatga

SEQ ID NO: 48969 - DNA, 3372 bp, Burkholderia ubonensis
atgaatgagccgcgcacgctcggcctcgattttgccgcggacgacaccctgacgggctttcgcctcgagcggctcgaggttttcaactggggaaccttcgacgaccgggcttgggtgctgcgggtcgacggccgcaacggcctgctgacaggagacatcggttccggcaagtcgacgcttgtcgacgccattaccaccctcctcgtgcccgcgcagcgcatcgcctacaacaaggcggcaggcgcggacagcaaggaacgtacgctgcgctcgtatgtgctcggctactacaagtcggagcgcaacgaggtcacgggaacggccaagcccgtgagcctgcgcgaccacaacagctattcggtgattttgggcgtgtttcgcaacgccgggtacgacgccaccgtcacgctcgcgcaagtgttctggatgaaggacgcgcaggctcaacctgcgcgattcttcgtcagtgccgaacgagatctctcgatcgcgaccgacttctcgcgcttcggcaccgacattgcgcagctgcgcaagaagctgcgcgggctgggcgccgaaatcgaggacacgtttccgaaatacagcgcctggttccggcggcgcttcggaatcgaaaacgagcaagcgctcgagctctttcatcaaacggtatcgatgaagtcggtgggcaatctcaccgacttcgtacgcagccacatgctcgagccgttcgacgtcgcaccgcgcgtcgacgccctgattgctcacttcgacgatctgaatcgcgcgcacgaggcggtactgaaaaccaagcgccaagtggaactgctgacaccgctcgtcgacgactgcgaccgccacagcgagcaaggccacgttctcgaaggctggcgcgcgtgccgtgaagcattgaggccctacttcgccgggctcaagctcggcctcgtcgaacgccgcctccaattgctcgaagaggatcatgcgcgcgcgacctcgcgaaaggcgcggcacgaagaagcgcgcgaccaggcgcgccagcgcgtggacgatttgcgccgtgccgtggccgaacaaggcggcgatcgcatcgcgcagctcgatgtcgagatccgcgagcacgagcgagaaagcgtgcgtcgccgcgaacgcgcgcaacgctatgccgccatcgttacgctgttcggcgaaaccgaggccgcggatgaggctgcattcgcctcccagcgccaacgcctggccgagcagcgcagctcgctcgtcgacgacgaagcgcaacagcaaaatgcgataaccgaatggagcgtggcatttcgcgaaggcaaagcgcggcgtgatttgctggaggacgaaatcgcgagcctgaaagctcgacgcaacaacatcccgaaggaacaggtcgcgatgcgggcgagcctgtgctcggcgctcggcctggaggaagacgccctgccgttcgcgggcgaactcattcaggtgcgcgaggatgcgcgtgattgggagggcgccgccgagcgcgtcctgcgcaacttcggcctgtcgctgctcgtgcccgacgagcactatgcgaacgtcgcggcgtgggtcgatcgcactcatctccgggggaggctagtctactttcgcgtgcgctccgaacgcaccgcgcgtgcagccgaggccatcgagctgcaccgccactcgctcgcgcacaagctcgccatcaagcccgactcgcagttctatggctggctcgagcgcgaaatcggccgccgtttcgactatgcctgctgcgatacgcaggagcagtttcggcgcgagacgcgcgcgatcacgcgtgcgggccaggcgaaagcgcctggggagcgccacgaaaaagacgaccgccacgcgctcgacgatcgcagccgctacgtgctcggttggagcaatacggcaaaaatatccgccctcgcagcacaacggcaagcgctcgaagctcgccttggcgagatcgggcaaaggctcggagaggcccaacacgagcacaccaaggtgcgtgagcaactcgaagcacttgcgcgtgccggcgagttcgccgagtttcgggaaatcgattggtcgagctgcgctgccgcgatcgcacgtcttgccgacgaaaaggcgcgactcgaatcggcaagcgacgccctcgcggagctaacggctcaattggactcggcgcaagcgtcgttgaaagagagtgaagcggcgatgtcggaaaccgactcggaactgggcggcatcctggccaagcgggaggcggcacaagcgttgcgcgaagagacgcacgcgctcgttgcagaagtggatgccgaactcgccgaacgaatcgaggccctgcgagccgagattctcggcgaacaccagctttccgtcgagtcatgcgacaaccgcgagcgggacgtgcgagaggcgttgacaacccgtatcgacaacgaaacgaaatcactcggccgcctggccgaaagaatcgtcaaggcaatggcggctttcaaggaagcctacaagctcgaaacggccgacttcgatgcgagcctcgccgcgaactcagagtaccgtgacatgctcgcgcggctgcaggcggacgatttgccgcgcttcgaaacgcgtttcaaggagctgctcaacgtcaacacgatcaacgagatcgccaactttcacgcccagcttgcgcgcgaacgggcgacgatcaaggaacgcatcgaacgcatcaacgaatcgctgcgacaaatcgactacaacgcgggtcgttacatcgtcctcgagagtcagcccagccccgacgcggagatccgcgaattccagagcgacctgcgcgcttgcaccgagggcgaactcaccggctcggacgatagccaatactcggaggccaagttcctgcaagtcaaacggatcatcgaccgcttccgcggccgcgaagggttgaccgagcaggaccggcgctggcgagccaaagtgaccgacgtgcgcaactggtttctgttcgccgccagcgagcgttggcgcgaggacgacagcgaatacgagcactactcggactccggcggtaaatcgggcggccagaaggaaaagctcgcctatacgatccttgccgcgagcctcgcctatcagttcggcctcgaatggggcgccgtgcgttcccgatcgttccgcttcgtcgtcatcgacgaagcatttggccgaggctccgacgaatcggcgcagtacggtctcacgctgtttcagaaactgaacctgcaactgctgatcgtcacgccactgcagaagattcacatcatcgagccgttcgtttcgagcgtcggattcgttcagaacgacggtggacgcgcctccaagctgcgcaccctgtcgatcgaggagtaccgcgcgcacaaggcggagttcgagcaatga

SEQ ID NO: 48970 - DNA, 1185 bp, Burkholderia ubonensis
atgagttggacaactgccgtcgaactgcgtgcccgcctccagcgcctatgggaacgcggcgaatggctgcgaagcctcgtagacggtgccgaggggctattcccgctacgtctggcgatcaaaggcccaagctcgtccgagttggctgaacgcttcgacacggtacgcgcatggattacggaaattgccgcgacgccgcgcatacgcatcgaatggcgagaaatcaatcatcgaattctcggccagcagcgtttgccacgagcagcttgggtcgacagtctggacgatgcgctcactgtcgccggcaagcaacgcgacgtagcgcggttcgagcggctgcttgaaatcacacgctcgcgccagccgaagctcatcgcatggcttgcgcagcgcccgatgcaggccctcgaattggccggcgattgggaacgactgctggcagtcgtcgattggctgcaagcacatccgcagccgggcatctatcttcgccaagccgaaatcgccggagtcgacacgaaattcatcgaggcgcggcgcggcgtcctctcccaatggctcgatctcgtgctgccgtccgaggcgatcgacagcagtcggaccggcgccgcccaattcgccgctcgctacgggttccgcgataagccgcctcgtattcgatttcgcgtgctcgatgagcggctcgccgtcctgcccggcatgggccgacccgacatcacactcgacgccgacagcttcgcgcgcctcgcactgccgtgccgccatgttttcgttacggaaaacgaaacaaattttctggcgtttcccgacgttccgcaggcgatcgtgctcttcggagcgggctacggctgggaagctctggagccggcacaatggctcgcggactgtgcgctccactactggggcgacatcgacacgcacggctttgccattctcgaccaattgcgttgccgattccctcacgcgggatccttcttgatggaccgcgcgacactgatggcgcatgaagcattctggggagacgaaggcgatcaggtcatgcgtgatctgccgcgactcacggcgcaagagcgcgagctctttgacgacctgcgtgacaaccggattcgccgcggattacggctcgagcaggagcgcgtcgggttcgggtgggtcagagcggcgctagaggaacggtctttcgtttag

SEQ ID NO: 48971 - DNA, 1461 bp, Burkholderia ubonensis
atgttcctcgactaccctaccctcgacgcgctgcgcacgcgccatcccgcttggcgacttttgcgctccgaccacgcgccgctcgccgtcagcttcctgcaccgcgcgttcgtcgcgccgaacgtgcgcgaggtggcggctccgtttcttgccgaagcactggaggacgagctttacgcgttgcgcgaacaactcggcgacggcgccttcccgaagcccgcgctcgactatctgaacgactgggcgagtcctgaaaagggatggttgcgcaagttctatcgccaaggctccgatgaaccgcatttcgacctgacacccgccgcaggaaaagcgatcgcgtggctcggcacgctgatggaacgaagctttgtcggcacggaatcccggctcctgacgcttttcgagttgctgcggcagatggccgaaggcagcgagacggacccggaaaggcgtcttgccgagctccacgcgcggcgcagccagatcgacgaagaaatcgctcgcgtggaggccggtgacgttcggctgctcgacgatgccgcgatcaaggaccgctttcagcaattcatgcagatggcgcgcgacctgctcacggatttccgtgaagtcgagcaaaacttccgtctgctggaccggcacgtacgcgagcgaatcgcgctctgggaaggatcgaagggtgcgctcatcgaagaaatcatgggcgagcgcgacgcgatcgccgattcggaccagggcagcagctttcgggcgttctgggatttcctgatgtcgagccgccgccaggaggaactctccgaacggctcgagcacgtgcttgcgctcccggcgatcacggaaatgaagccggacgcgcgcacgcggcgcgtccactacgactggctggaagccggcgagcacacgcaacgcacggtcgctcagctctcgcagcagcttcgacgtttcctcgacgatcaagcgtggctcgaaaaccgccgcatcatggacattctgcgcggtatcgaaacgaaagcgcttgtgctgcgtgaagcgcccccgccgggctccgtcatggagatcgagaccgcgtccgctgacatcgagctgccaattgaacgcccgctttacgcgccggcgctgcgccctctcatcgccaacgtcgcaatcgagaccggcgatgcggacctcgatgcgtcggcactctacacgcagatcgtcgtcgatcgcgcgcgcctcgcaagccacatccgccgctgccttcaagatcggcggcaagtgacacttgccgaactggccgcttcgcagccgctcctgcatgggctcgctgaactcgtcgcctatttgcaactgagcgccgaagccggaacatttcgcgcgaccgtcgatgagaccgtctccgatacgatcgagtggcaggcaaacgatgccaacggagcagcaatcgtcaagcgcgcaacgatgccgcgggtgattttcacaaggtag

SEQ ID NO: 48972 - DNA, 651 bp, Burkholderia ubonensis; identical to SEQ ID NO: 48936

SEQ ID NO: 48973 - DNA, 3372 bp, Burkholderia ubonensis
atgaatgagccgcgcacgctcggcctcgattttgccgcggacgacaccctgacgggctttcgcctcgagcggctcgaggttttcaactggggaaccttcgacgaccgggcttgggtgctgcgggtcgacggccgcaacggcctgctgacaggagacatcggttccggcaagtcgacgctcgtcgacgccattaccaccctcctcgtgcccgcgcagcgcatcgcctacaacaaggcggcaggcgcggacagcaaggaacgtacgctgcgctcgtatgtgctcggctactacaagtcggagcgcaacgaggtcacgggaacggccaagcccgtgagcctgcgcgaccataacagctattcggtgattttgggcgtgtttcgcaacgccgggtacgacgccaccgtcacgctcgcgcaagtgttctggatgaaggacgcgcaggctcaacctgcgcgattcttcgtcagtgccgaacgagatctctcgatcgcgaccgacttctcgcgcttcggcaccgacattgcgcaactgcgcaagaagctgcgcgggctgggcgccgaaatcgaggacacgtttccgaaatacagcgcctggttccggcggcgcttcggaatcgaaaacgagcaagcgctcgagctctttcatcaaacggtatcgatgaagtcggtgggcaatctcaccgacttcgtacgcagccacatgctcgagccgttcgacgtcgcaccgcgcgtcgacgccctgattgctcacttcgacgatctgaatcgcgcgcacgaggcggtactgaaaaccaagcgccaagtggaactgctgacaccgctcgtcgacgactgcgaccgccacagcgagcaagcacacgttctcgaaggctggcgcgcgtgccgtgaagcattgaggccctacttcgccgggctcaagctcggcctcgtcgaacgccgcctccaattgctcgaagaggatcatgcgcgcgcgacctcgcgaagggcgcggcacgaagaagcgcgcgaccaggcgcgccagcgcgtggacgatttacgccgtgccgtggccgaacaaggcggcgatcgcatcgcgcagctcgatgtcgagatccgcgagcacgagcgagaaagcgtgcgtcgccgcgaacgggcgcaacgctatgccgccatcgttacgctgttcggcgaaaccgaggccgcggatgaggctgcattcgcctcccagcgccaacgcctggctgagcagcgcagctcactcgttgacgacgaagcgcaacagcaaaatgcgataaccgaatggagcgtggcatttcgcgaaggcaaagcgcggcgtgatttgctggaggacgaaatcgcgagcctgaaagctcgacgcaacaacatcccgaaggaacaggtcgcgatgcgggcgagcctgtgctcagcgctcggcctggaggaagacgccctgccgttcgcgggcgaactcattcaggtgcgcgaggatgcgcgtgattgggagggcgccgccgagcgcgtcctgcgcaacttcggcctgtcgctgctcgtgcccgacgagcactatgcgaacgtcgcggcgtgggtcgatcgcactcatcttcgggggcggctcgtctactttcgcgtgcgctccgaacgcaccgcgcgtgtagccgaggccatcgagctgcaccgccactcgctcgcgcacaagctcgccatcaagcccgactcgcagttctatggctggctcgagcgcgaaatcggccgccgtttcgactatgcctgctgcgatacgcaggagcagtttcggcgcgagacgcgcgcgatcacgcgtgcgggccaggcgaaagcgcctggggagcgccacgaaaaagacgaccgccacgcgctcgacgatcgcagccgctacgtgctcggttggagcaacacggcaaaaatatccgccctcgcagcacaacggcaagcgctcgaagctcgccttggcgagatcggacaaaggctcggagaggtccaacatgagcacaccaaggtgcgtgagcaactcgaagcacttgcgcgtgccggcgagttcgccgagtttcgggaaatcgattggtcgagctgcgctgccgcgatcgcacgtcttgccgacgaaaaagcgcgactcgaatcggcaagcgacgccctcgcggagctaacggctcaattggactcggcgcaagcgtcgttgaaagagagtgaagcggcgatgtcggaaaccgactcggaactgggcggcatcctggccaagcgggaggcggcacaagcgttgcgcgaagagacgcacgcgctcgttgcagaagtggatgccgaactcgccgaacgaatcgaggccctgcgagccgagattctcggcgaacaccagctttccgtcgagtcatgcgacaaccgcgagcgggacgtgcgagaggcgttgacaacccgtattgacaacgaaacgaaatcactcggccgcctggccgaaagaatcgtcaaggcaatggcggctttcaaggaagcctacaagctcgaaacggccgacttcgatgcgagcctcgccgcgaactcagagtaccgtgacatgctcgcgcggctgcaggcggacgatttgccgcgcttcgaaacgcgtttcaaggagctgctcaacgtcaacacgatcaacgagatcgccaactttcacgcccagcttgcgcgcgaacgggcgacgatcaaggaacgcatcgaacgcatcaacgaatcgctgcgacaaatcgactacaacgcgggtcgttacatcgtcctcgagagtcagcccagccccgacgcggagatccgcgaattccagagcgacctgcgcgcttgcaccgagggcgaactcaccggctcggacgatagccaatactcggaggccaagttcctgcaagtcaaacggatcatcgaccgcttccgcggccgcgaagggttgaccgagcaggaccggcgttggcgcgccaaggtgaccgacgtgcgcaactggtttctgttcgccgccagcgagcgttggcgcgaggacgacagcgaatacgagcactactcggactccggcggtaaatcgggcggccagaaggaaaagcttgcctatacgatccttgccgcgagcctcgcctatcagttcggcctcgaatggggcgccgtgcgttcccgatcgttccgcttcgtcgtcatcgacgaagcatttggccgaggctccgacgaatcggcgcagtacggtctcacgctgtttcagaaactgaacctgcaactgctgatcgtcacgccactgcaaaagattcacatcatcgagccgttcgtttcgagtgtcggattcgttcagaacgacggtggacgcgcctccaagctgcgcaccctgtcgatcgaggagtaccgcgcgcacaaggcggagttcgagcaatga

SEQ ID NO: 48974 - DNA, 1200 bp, Burkholderia ubonensis
atgagctggacaactgccgtcgaactgcgtgcccgcctccagcacctatgggcacgcggcgaatggctgcgaagcttcgtagacggcaccgaggggctattcccgctacgtctggcgatcaaaggcccgagttcgtccgagctggctgaacgcttcgacgcggtacgcgcatggatcgcggaaattgccgcgacgccgcacatacgcatcgaatggcgagaaatcaatcatcgaattctcggcgtgcagcgtttgccacgagcggcctgggtcgacagtctggacgatgcgctcgcagtcgccggcaggcaccgcgacgcagcgcagttcgcgcggctgctcgaaatcactcgcgcccgccagccgaagctcgccgcgtggcttgcgcagcgcccgttgcaagccctcgaattcgccggcgattgggaacgactgctggcggtcgtcgattggctgcaagcacatccgcacccgggcgtctatcttcgccaagccgaaatcgccggcgtcgacacgaaattcatcgaggcaaggcgcggcgtcctctcccaatggctcgatctcgtgctgccgtccgaggcgatcgacagcagccggacaggcgtcgctcaattcgccgcgcgctacgggttccgcgagaagcaaccccgtattcgatttcgcgtgctcgatgagcggctcgccgttctgcccggcatgggccgccccgacatcgcactcgacgccgacagcttcgcgcgcctcgcactgccgtgccgtcatgttttcgttacggaaaacgaaacaaattttctggcgtttcccgacgttccgcaggcgatcgtgctcttcggagcgggctacggctgggaagctctggagccggcgcgatggctcgcggactgtgcgctccactactggggcgacatcgacacgcacggctttgccattctcgaccaattgcgttgccgattccctcacgtgaactccttcctgatggaccgcgcgacactgatggcgcatgaagcattctggggagacgaaggcgatcaggtcatgcgtgatctgccgcgactcacggcgcaagagcgcgagctctttgacgacctgcgtgacaaccggattcgccacggattgcggctcgaacaggagcgcgtcgggttcgggtgggtcagagcggcgctagagcctgttatgaacctatatgaattaagtcgatga

SEQ ID NO: 48975 - DNA, 1461 bp, Burkholderia ubonensis; identical to SEQ ID NO: 48967

SEQ ID NO: 48976 - DNA, 651 bp, Burkholderia ubonensis; identical to SEQ ID NO: 48968

SEQ ID NO: 48977 - DNA, 3372 bp, Burkholderia ubonensis; identical to SEQ ID NO: 48969

SEQ ID NO: 48978 - DNA, 1185 bp, Burkholderia ubonensis; identical to SEQ ID NO: 48970

SEQ ID NO: 48979 - DNA, 1461 bp, Burkholderia ubonensis
atgttcctcgactaccctaccctcgacgcgctgcgcacgcgccatcccgcttggcgacttttgcgctccgaccacgcgccgctcgccgtcagcttcctgcaccgcgcgttcgtcgcgccgaacgtgcgcgaggtggcggctccgtttcttgccgaagcactcgaggacgagctttacgcgttgcgcgaacaactcggcgacggcgccttcccgaagcccgcgctcgactatctgaacgactgggcgagtcctgaaaagggatggttgcgcaagttctatcgccaaggctccgatgaaccgcatttcgacctgacacccgccgcaggaaaagcgatcgcgtggctcggcacgctgatggaacgaagctttgtcggcacggaatcccggctcctgacgcttttcgagttgctgcggcagatggccgaaggcagcgagacggacccggaaaggcgtcttgccgagctccacgcgcggcgcagccagatcgacgaagaaatcgctcgcgtggaggccggtgacgtccggctgctcgacgatgccgcgatcaaggaccgctttcagcaattcatgcagatggcgcgcgacctgctcacggatttccgtgaagtcgagcaaaacttccgtctgctggaccggcatgtacgcgagcgaatcgcgctctgggaaggatcgaagggtgcgctcatcgaagaaatcatgggcgagcgcgacgcgatcgccgattcggaccagggcagcagctttcgggcgttctgggatttcctgatgtcgagccgccgtcaggaggaactctccgaacggctcgagcacgtgcttgcgctcccggcgatcacggaaatgaagccggacgcgcgcacgcggcgcgtccactacgactggctggaagccggcgagcacacgcaacgcacggtcgctcagctctcgcagcagcttcgacgtttcctcgacgatcaagcgtggctcgaaaaccgccgcatcatggacattctgcgcggtatcgaaacgaaagcgcttgtgctgcgtgaagcgcccccgccgggctccgtcatggagatcgagaccgcgtccgctgacatcgagctgccaattgaacgcccgctttacgcccctgcgctgcgccctctcatcgccaacgtcgcaatcgagaccggcgatgcggacctcgatgcgtcggcactctacacgcagatcgtcgtcgatcgcgcgcgcctcgcaagccacatccgccgctgccttcaagatcggcggcaagtgacacttgccgaactggccgcttcgcagccgctcctgcatgggctcgctgaactcgtcgcctatttgcaactgagcgccgaagccggaacatttcgcgcgaccgtcgatgagaccgtctccgatacgatcgagtggcaggcaaacgatgccaacggagcagcaatcgtcaagcgcgcaacgatgccgcgggtgattttcacaaggtag

SEQ ID NO: 48980 - DNA, 651 bp, Burkholderia ubonensis
atggaagaacagcaaaccccgtcgcttggtcgaggtgacttgtcgacggttgccgtcgcgctgctcaagggcgtgatttatcgtgatggaaacgagcgcctctgggccgcactgctcgaattgcagacacacgtgcgcgactacgtcgccgtgcttggcctcgagctcgtcgtggacgaggcggaaggctacgccttcgtaaagagccgcaccgagcctgacgccgaagtcgacggagaccaggccaagctgccccggctcgttgcacggcgtccactctcgttccccgtgagcctgctgctcgcgctgctgcgaaagaaactggcggaatgggatgccggcggcggcgacacgcggctcgtcctttcgcgcgaggacatcgtcgagctcgtacgcgtgttccttcccgcgagcactaacgaggcgcgcctggtcgatcagatcgatacgcacgtgaacaagatcgtcgacctcggtttcctgcgccggatgaagaccgcgagcggaccgcccacattcgaggtgcgacgcattctcaaggcgttcgtcgatgcgcaatggctgctcgatttcgacgcgcggctcgcaagctatcaggcgcaccttcgagattcgacgaattcggaccaaacggagagtcgcgatgaatga

SEQ ID NO: 48981 - DNA, 3372 bp, Burkholderia ubonensis
atgaatgagccgcgcacgctcggcctcgattttgccgcggacgacaccctgacgggctttcgcctcgagcggctcgaggttttcaactggggcaccttcgacgaacgggtctgggtgctgcgggtcgacggccgcaacggcctgctgacaggagacatcggttccggcaagtcgacgctcgtcgacgccatcaccaccctcctcgtgcccgcgcagcgcatcgcctacaacaaggcggcaggcgcggacagcaaggaacgtacgctgcgctcgtatgtgctcggctactacaagtcggagcgcaacgaggtcacgggagcggccaagcccgtgagcctgcgcgaccataacagctattcggtgattttgggcgtgtttcgcaacgccgggtacgacgccaccgtcacgctcgcgcaggtgttctggatgaaggacgcgcaggctcaacctgcgcgattcttcgtcagtgccgaacgagatctctcgatcgcgaccgacttctcgcgcttcggcaccgacattgcgcagctgcgcaagaagctgcgcgggctgggcgccgaaatcgaggacacgtttccgaaatacagcgcctggttccggcggcgcttcggaatcgaaaacgagcaagcgctcgagctctttcatcaaacggtatcgatgaagtcggtgggcaatctcaccgacttcgtacgcagccacatgctcgagccgttcgacgtcgcaccgcgcgtcgacgccctgattgctcacttcgacgatctgaatcgcgcgcacgaggcggtactgaaaaccaagcgccaagtggaactgctgacaccgctcgtcgacgactgcgaccgccacagcgagcaagcacacgttctcgaaggctggcgcgcgtgccgtgaagcattgaggccctacttcgccgggctcaagctcggcctcgtcgaacgccgcctccaattgctcgaagaggatcatgcgcgcgcgacctcgcgaagggcgcggcacgaagaagcgcgcgaccaggcgcgccagcgcgtggacgatttacgccgtgccgtggccgaacaaggcggcgatcgcatcgcgcagctcgatgtcgagatccgcgagcacgagcgagaaagcgtgcgtcgccgcgaacgggcgcaacgctatgccgccatcgttacgctgttcggcgaaaccgaggccgcggatgaggctgcattcgcctcccagcgccaacgcctggccgagcagcgcagctcactcgttgacgacgaagcgcaacagcaaaatgcgataaccgaatggagcgtggcatttcgcgaaggcaaagcgcggcgtgatttgctggaggacgaaatcgcgagcctgaaagcccgacgcaacaacatcccgaaggaacaggtcgcgatgcgggcgagcctgtgctcggcgctcggcctggaggaagacgccctgccgttcgcgggcgaactcattcaggtgcgcgaggatgcgcgtgattgggagggcgccgccgagcgcgtcctgcgcaacttcggcctgtcgctgctcgtgcccgacgagcactatgcaaacgtcgcggcgtgggtcgatcgcactcatcttcgggggcggctcgtctactttcgcgtgcgctccgaacgcaccgcgcgtgcagccgaggccatcgagctgcaccgccactcgctcgcgcacaagctcgccatcaagcccgactcgcagttctatggctggctcgagcgcgaaatcggccgccgtttcgactatgcctgctgcgatacgcaggagcagtttcggcgcgagacgcgcgcgatcacgcgtgcgggccaggcgaaagcgcctggggagcgccacgaaaaagacgaccgccacgcgctcgacgatcgcagccgctacgtgctcggttggagcaatacggcaaaaatatccgccctcgcagcacaacggcaagcgctcgaagctcgccttggcgagatcgggcaaaggctcggagaggcccaacacgagcacaccaaggtgcgtgagcaactcgaagcacttgcgcgtgccggcgagttcgccgagtttcgggaaatcgattggtcgagctgcgctgccgcgatcgcacgtcttgcggacgaaaaggcgcgactcgaatcggcaagcgacgccctcgcggagctaacggctcaattggactcggcgcaagcgtcgttgaaagagcgtgaagcggcgatgtcggaaaccgactcggaactgggcggcatcctggccaagcgggaggcggcacaagcgttgcgcgaagagacgcacgcgctcgttgcagaagtggatgccgaactcgccgaacgaatcgaggccctgcgagccgagattctcggcgaacaccagctttccgtcgagtcatgcgacaaccgcgagcgggacgtgcgagaggcgttgacaacccgtatcgacaacgaaacgaaatcactcggccgcctggccgaaagaatcgtcaaggcaatggcggctttcaaggaagcctacaagctcgaaacggccgacttcgatgcgagcctcgccgcgaactcagagtaccgtgacatgctcgcgcggctgcaggcggacgatttgccgcgcttcgaaacgcgtttcaaggagctgctcaacgtcaacacgatcaacgagatcgccaactttcacgcccagcttgcgcgcgaacgggcgacgatcaaggaacgcatcgaacgcatcaacgaatcgctgcgacaaatcgactacaacgcgggtcgttacatcgtcctcgagagtcagcccagccccgacgcggagatccgcgaattccagagcgacctgcgcgcttgcaccgagggcgaactcaccggctcggacgatagccaatactcggaggccaagttcctgcaagtcaaacggatcatcgaccgcttccgcggccgcgaagggttgaccgagcaggaccggcgctggcgagccaaagtgaccgacgtgcgcaactggtttctgttcgccgccagcgagcgttggcgcgaggacgacagcgaatacgagcactactcggactccggcggtaaatcgggcggccagaaggaaaagctcgcctatacgatccttgccgcgagcctcgcctatcagttcggcctcgaatggggcgccgtgcgttcccgatcgttccgcttcgtcgtcatcgacgaagcatttggccgaggctccgacgaatcggcgcagtacggtctcacgctgtttcagaaactgaacctgcaactgctgatcgtcacgccactgcagaagattcacatcatcgagccgttcgtttcgagcgtcggattcgttcagaacgacggtggacgcgcctccaagctgcgcaccctgtcgatcgaggagtaccgcgcgcacaaggcggagttcgagcaatga

SEQ ID NO: 48982 - DNA, 1185 bp, Burkholderia ubonensis; identical to SEQ ID NO: 48938

SEQ ID NO: 48983 - DNA, 1461 bp, Burkholderia ubonensis
atgttcctcgactaccctaccctcgacgcgctgcgcacgcgccatcccgcttggcgacttttgcgctccgaccacgcgccgctcgccgtcagcttcctgcaccgcgcgttcgtcgcgccgaacgtgcgcgaggtggcggctccgtttctttccgaagcactcgaggacgagctttacgcgttgcgcgaacaactcggcgacggcgccttcccgaagcccgcgctcgactatctgaacgactgggcgagtcctgaaaagggatggttgcgcaagttctatcgccaaggctccgatgaaccgcatttcgacctgacacccgccgcaggaaaagcgatcgcgtggctcggcacgctgatggaacgaagctttgtcggcacggaatcccggctcctgacgcttttcgagttgctgcggcagatggccgaaggcagcgagacggacccggaaaggcgtcttgccgagctccacgcgcggcgcagccagatcgacgaagaaatcgctcgcgtggaggccggtgacgtccggctgctcgacgatgccgcgatcaaggaccgctttcagcaattcatgcagatggcgcgcgacctgctcacggatttccgtgaagtcgagcagaacttccgtctgctggaccggcatgtacgcgagcgaatcgcgctctgggaaggatcgaagggtgcgctcatcgaagaaatcatgggcgagcgcgacgcgatcgccgattcggaccagggcagcagctttcgggcgttctgggacttcctgatgtcgagccgccgccaggaggaactctccgaacggctcgagcacgtgcttgcgctcccggcgatcacggaaatgaagccggacgcgcgcacgcggcgcgtccactatgactggctggaagccggcgagcacacgcaacgcacggtcgctcagctctcgcagcagcttcgacgtttcctcgacgatcaagcgtggctcgaaaaccgccgcatcatggacattctgcgcggtatcgaaacgaaagcgcttgtgctgcgtgaagcgcccccgccgggctccgtcatggagatcgagaccgcgtccgctgacatcgagctgccaattgaacgcccgctttacgcccctgcgctgcgccctctcatcgccaacgtcgcaatcgagaccggcgatgcggacctcgatgcgtcggcactctacacgcagatcgtcgtcgatcgcgcgcgcctcgcaagccacatccgccgctgccttcaagatcggcggcaagtgacacttgccgaactggccgcttcgcagccgctcctgcatgggctcgctgaactcgtcgcctatttgcaactgagcgccgaagccggaacatttcgcgcgaccgtcgatgagaccgtctccgatacgatcgagtggcaggcaaacgatgccaacggagcagcaatcgtcaagcgcgcaacgatgccgcgggtgattttcacaaggtag

SEQ ID NO: 48984 - DNA, 651 bp, Burkholderia ubonensis
atggaagaacagcaaaccccgtcgcttgatcgaggtgacttgtcgacggttgccatcgcgctgctcaagggggtggtttatcgtgatggaaacgagcgcctctgggccgcactgctcgaattgcagacacacgtgcgcgactacgtcgccgtgcttggcctcgagctcgtcgtggacgaggcggaaggctacgccttcgtaaagagccgcaccgagcctgacgccgaagtcgacggagaccaggccaagctgccccgtctcgttgcacggcgtccactctcgttccccgtgagcctgctgctcgcgctgctgcgaaagaaactggcggaatgggatgccggcggcggcgacacgcggctcgtcctttcgcgcgaggacatcgtcgagctcgtacgcgtcttccttcccgcgagcactaacgaggcgcgcctggtcgatcagatcgatacgcacgtgaacaagatcgtcgacctcggtttcctgcgccggatgaagaccgcgagcggaccgcccacattcgaggtgcgacgcattctcaaggcgttcgtcgatgcgcaatggctgctcgatttcgacgcgcggctcgcaagctatcaggcgcaccttcgagattcgacgaattcggaccaaacggagagtcgcgatgaatga

SEQ ID NO: 48985 - DNA, 3372 bp, Burkholderia ubonensis
atgaatgagccgcgcacgctcggcctcgattttgccgcggacgacaccctgacgggctttcgcctcgagcggctcgaggttttcaactggggcaccttcgacgaccgggcttgggtgctgcgggtcgatggccgcaacggcctgctgacaggagacatcggttccggcaagtcgacgctcgtcgacgccattaccaccctcctcgtgcccgcgcagcgcatcgcctacaacaaggcggcaggcgcggacagcaaggaacgtacgctgcgctcgtatgtgctcggctactacaagtcggagcgcaacgaggtcacgggaacggccaagcccgtgagcctgcgcgaccataacagctattcggtgattttgggcgtgtttcgcaacgccgggtacgacgccaccgtcacgctcgcgcaggtgttctggatgaaggacgcgcaggctcaacctgcgcgattcttcgtcagtgccgaacgagatctctcgatcgcgaccgatttctcgcgcttcggcaccgatattgcacagctgcgcaagaagctgcgcgggctgggcgccgaaatcgaggacacgtttccgaaatacagcgcctggttccggcggcgcttcggaatcgaaaacgagcaagcgctcgagctatttcatcaaacggtatcgatgaagtcggtgggcaatctcaccgacttcgtacgcagccacatgctcgagccgttcgacgtcgcaccgcgcgtcgacgccctgattgctcacttcgacgatctgaaccgcgcgcacgaggcggtactgaaaaccaagcgccaagtggaactgctgacaccgctcgtcgacgactgcgaccgccacagcgagcaaggccacgttctcgaaggctggcgcgcgtgccgtgaagcattgaggccctacttcgccgggctcaagctcggcctcgtcgaacgccgcctccaattgctcgaagaggatcatgcgcgcgcgacctcgcgaaaggcgcgacacgaagaagcgcgcgaccaggcgcgccagcgcgtggacgatttgcgccgtgccgtggccgaacaaggcggcgatcgcatcgcgcagctcgatgtcgagatccgcgagcacgagcgagaaagcgtgcgtcgccgcgaacgcgcgcaacgctatgccgccatcgttacgctgttcggcgaaaccgaggctgcggatgaggctgcattcgcctcccagcgccaacgcctggccgagcagcgcagctcgctcgtcgacgacgaagcgcaacagcaaaatgcgataaccgaatggagcgtggcatttcgcgaaggcaaagcgcggcgtgatttgctggaggacgaaatcgcgagcctgaaagctcgacgcaacaacatcccgaaggaacaggtcgcgatgcgggcgagcctgtgctcggcgctcggcctggaggaagacgccctgccgttcgcgggcgaactcattcaggtgcgcgaggatgcgcgtgattgggagggcgccgccgagcgcgtcctgcgcaacttcggcctgtcgctgctcgtgcccgacgagcactatgcgaacgtcgcggcgtgggtcgatcgcactcatcttcgggggcggctcgtctactttcgcgtgcgctccgaacgcaccgcgcgtgtagccgaggccatcgagctgcaccgccactcgctcgcgcacaagctcgccatcaagcccgactcgcagttctatggctggctcgagcgcgaaatcggccgccgtttcgactatgcctgctgcgatacgcaggagcagtttcggcgcgagacgcgcgcgatcacgcgtgcgggccaggcgaaagcgcctggggagcgccacgaaaaagacgaccgccacgcgctcgacgatcgcagccgctacgtgctcggttggagcaatacggcaaaaatatccgccctcgcagcacaacggcaagcgctcgaagctcgccttggcgagatcgggcaaaggctcggagaggcccaacacgagcacaccaaggtgcgtgagcaactcgaagcacttgcgcgtgccggcgagttcgccgagtttcgggaaatcgattggtcgagctgcgctgccgcgatcgcacgtcttgcggacgaaaaggcgcgactcgaatcggcaagcgacgccctcgcggagctaacggctcaattggactcggcgcaagcgtcgttgaaagagagtgaagcggcgatgtcggagaccgactcggaactgggcggcatcctggccaagcgggaggcggcacaagcgttgcgcgaagagacgcacgcgctcgttgcagaagtggatgccgaactcgccgaacgaatcgaggccctgcgagccgagattctcggcgaacaccagctttccgtcgagtcatgcgacaaccgcgagcgggacgtgcgagaggcgttgacaacccgtatcgacaacgaaacgaaatcactcggccgcctggccgaaagaatcgtcaaggcaatggcggctttcaaggaagcctacaagctcgaaacggccgacttcgatgcgagcctcgccgcgaactcagagtaccgtgacatgctcgcgcggctgcaggcggacgatttgccgcgcttcgaaacgcgtttcaaggagctgctcaacgtcaacacgatcaacgagatcgccaactttcacgcccagcttgcgcgcgaacgggcgacgatcaaggaacgcatcgaacgcatcaacgaatcgctgcgacaaatcgactacaacgcgggtcgttacatcgtcctcgagagtcagcccagccccgacgcggagatccgcgaattccagagcgacctgcgcgcttgcaccgagggcgaactcaccggctcggacgatagccaatactcggaggccaagttcctgcaagtcaaacggatcatcgaccgcttccgcggccgcgaagggttgaccgagcaggaccggcgctggcgagccaaagtgaccgacgtgcgcaactggtttctgttcgccgccagcgagcgttggcgcgaggacgacagcgaatacgagcactactcggactccggcggtaaatcgggcggccagaaggaaaagctcgcctatacgatccttgccgcgagcctcgcctatcagttcggcctcgaatggggcgccgtgcgttcccgatcgttccgcttcgtcgtcatcgacgaagcatttggccgaggctccgacgaatcggcgcagtacggtctcacgctgtttcagaaactgaacctgcaactgctgatcgtcacgccactgcagaagattcacatcatcgagccgttcgtttcgagcgtcggattcgttcagaacgacggtggacgcgcctccaagctgcgcaccctgtcgatcgaggagtaccgcgcgcacaaggcggagttcgagcaatga

SEQ ID NO: 48986 - DNA, 1185 bp, Burkholderia ubonensis; identical to SEQ ID NO: 48938

SEQ ID NO: 48987 - DNA, 1461 bp, Burkholderia ubonensis; identical to SEQ ID NO: 48947

SEQ ID NO: 48988 - DNA, 651 bp, Burkholderia ubonensis; identical to SEQ ID NO: 48948

SEQ ID NO: 48989 - DNA, 3372 bp, Burkholderia ubonensis; identical to SEQ ID NO: 48949

SEQ ID NO: 48990 - DNA, 1185 bp, Burkholderia ubonensis; identical to SEQ ID NO: 48950

SEQ ID NO: 48991 - DNA, 1461 bp, Burkholderia ubonensis; identical to SEQ ID NO: 48955

SEQ ID NO: 48992 - DNA, 651 bp, Burkholderia ubonensis; identical to SEQ ID NO: 48956

SEQ ID NO: 48993 - DNA, 3372 bp, Burkholderia ubonensis; identical to SEQ ID NO: 48957

SEQ ID NO: 48994 - DNA, 1185 bp, Burkholderia ubonensis; identical to SEQ ID NO: 48958

SEQ ID NO: 48995 - DNA, 1461 bp, Burkholderia ubonensis
atgttcctcgactaccctaccctcgacgcgctgcgcacgcgccatcccgcttggcgacttttgcgctccgaccacgcgccgctcgccgtcagcttcctgcaccgcgcgttcgtcgcgccgaacgtgcgcgaggtggcggctccgtttcttgccgaagcactggaggacgagctttacgcgttgcgcgaacaactcggcgacggcgccttcccgaagcccgcgctcgactatctgaacgactgggcgagccctgaaaagggatggttgcgcaagttctatcgccaaggctccgatgaaccgcatttcgacctgacacccgccgcaggaaaagcgatcgcgtggctcggcacgctgatggaacgaagctttgtcggcacggaatcccggctcctgacgcttttcgagttgctgcggcagatggccgaaggcagcgagacggacccggaaaggcgtcttgccgagctccacgcgcggcgcagccagattgacgaagaaatcgctcgcgtggaggccggtgacgttcggctgctcgacgatgccgcgatcaaggaccgctttcagcaattcatgcagatggcgcgcgacctgctcacggatttccgtgaagtcgagcaaaacttccgtctgctggaccggcacgtacgcgagcgaatcgcgctctgggaaggatcgaagggtgcgctcatcgaagaaatcatgggcgagcgcgacgcgatcgccgattcggaccagggcagcagctttcgggcgttctgggatttcctgatgtcgagccgccgccaggaggaactctccgaacggctcgagcacgtgcttgcgctcccggcgatcacggaaatgaagccggacgcgcgcacgcggcgcgtccactacgactggctggaagccggcgagcacacgcaacgcacggtcgctcagctctcgcagcagcttcgacgtttcctcgacgatcaagcgtggctcgaaaaccgccgcatcatggacattctgcgcggtatcgaaacgaaagcgcttgtgctgcgtgaagcgcccccgccgggctccgtcatggagatcgagaccgcgtccgctgacatcgagctgccaattgaacgcccgctttacgcgccggcgctgcgccctctcatcgccaacgtcgcaatcgagaccggcgatgcggacctcgatgcgtcggcactctacacgcagatcgtcgtcgatcgcgcgcgcctcgcaagccacatccgccgctgccttcaagatcggcggcaagtgacacttgccgaactggccgcttcgcagccgctcctgcatgggctcgctgaactcgtcgcctatttgcaactgagcgccgaagccggaacatttcgcgcgaccgtcgatgagaccgtctccgatacgatcgagtggcaggcaaacgatgccaacggagcagcaatcgtcaagcgcgcaacgatgccgcgggtgattttcacaaggtag

SEQ ID NO: 48996 - DNA, 651 bp, Burkholderia ubonensis; identical to SEQ ID NO: 48968

SEQ ID NO: 48997 - DNA, 3372 bp, Burkholderia ubonensis
atgaatgagccgcgcacgctcggcctcgattttgccgcggacgacaccctgacgggctttcgcctcgagcggctcgaggttttcaactggggcaccttcgacgaccgggcttgggtgctgcgggtcgatggccgcaacggcctgctgacaggagacatcggttccggcaagtcgacgctcgtcgacgccattaccaccctcctcgtgcccgcgcagcgcatcgcctacaacaaggcggcaggcgcggacagcaaggaacgtacgctgcgctcgtatgtgctcggctactacaagtcggagcgcaacgaggtcacgggaacggccaagcccgtgagcctgcgcgaccataacagctattcggtgattttgggcgtgtttcgcaacgccgggtacgacgccaccgtcacgctcgcgcaggtgttctggatgaaggacgcgcaggctcaacctgcgcgattcttcgtcagtgccgaacgagatctctcgatcgcgaccgatttctcgcgcttcggcaccgatattgcacagctgcgcaagaagctgcgcgggctgggcgccgaaatcgaggacacgtttccgaaatacagcgcctggttccggcggcgcttcggaatcgaaaacgagcaagcgctcgagctctttcatcaaacggtatcgatgaagtcggtgggcaatctcaccgacttcgtacgcagccacatgctcgagccgttcgacgtcgcaccgcgcgtcgacgccctgattgctcacttcgacgatctgaaccgcgcgcacgaggcggtactgaaaaccaagcgccaagtggaactgctgacaccgctcgtcgacgactgcgaccgccacagcgagcaaggccacgttctcgaaggctggcgcgcgtgccgtgaagcattgaggccctacttcgccgggctcaagctcggcctcgtcgaacgccgcctccaattgctcgaagaggatcatgcgcgcgcgacctcgcgaaaggcgcggcacgaagaagcgcgcgaccaggcgcgccagcgcgtggacgatttgcgccgtgccgtggccgaacaaggcggcgatcgcatcgcgcagctcgatgtcgagatccgcgagcacgagcgagaaagcgtgcgtcgccgcgaacgcgcgcaacgctatgccgccatcgttacgctgttcggcgaaaccgaggctgcggatgaggctgcattcgcctcccagcgccaacgcctggccgagcagcgcagctcgctcgtcgacgacgaagcgcaacagcaaaatgcgataaccgaatggagcgtggcatttcgcgaaggcaaagcgcggcgtgatttgctggaggacgaaatcgcgagcctgaaagctcgacgcaacaacatcccgaaggaacaggtcgcgatgcgggcgagcctgtgctcggcgctcggcctggaggaagacgccctgccgttcgcgggcgaactcattcaggtgcgcgaggatgcgcgtgattgggagggcgccgccgagcgcgtcctgcgcaacttcggcctgtcgctgctcgtgcccgacgagcactatgcgaacgtcgcggcgtgggtcgatcgcactcatctccgggggaggctagtctactttcgcgtgcgctccgaacgcaccgcgcgtgcagccgaggccatcgagctgcaccgccactcgctcgcgcacaagctcgccatcaagcccgactcgcagttctatggctggctcgagcgcgaaatcggccgccgtttcgactatgcctgctgcgatacgcaggagcagtttcggcgcgagacgcgcgcgatcacgcgtgcgggccaggcgaaagcgcctggggagcgccacgaaaaagacgaccgccacgcgctcgacgatcgcagccgctacgtgctcggttggagcaatacggcaaaaatatccgccctcgcagcacaacggcaagcgctcgaagctcgccttggcgagatcgggcaaaggctcggagaggcccaacacgagcacaccaaggtgcgtgagcaactcgaagcacttgcgcgtgccggcgagttcgccgagtttcgggaaatcgattggtcgagctgcgctgccgcgatcgcacgtcttgcggacgaaaaggcgcgactcgaatcggcaagcgacgccctcgcggagctaacggctcaattggactcggcgcaagcgtcgttgaaagagagtgaagcggcgatgtcggaaaccgactcggaactgggcggcatcctggccaagcgggaggcggcacaagcgttgcgcgaagagacgcacgcgctcgttgcagaagtggatgccgaactcgccgaacgaatcgaggccctgcgagcagagattctcggcgaacaccagctttccgtcgagtcatgcgacaaccgcgagcgggacgtgcgagaggcgttgacaacccgtatcgacaacgaaacgaagtcactcggccgcctggccgaaagaatcgtcaaggcaatggcggctttcaaggaagcctacaagctcgaaacggccgacttcgatgcgagcctcgacgcgaactcagagtaccgtgacatgctcgcgcggctgcaggcggacgatttgccgcgcttcgaaacgcgtttcaaggagctgctcaacgtcaacacgatcaacgagatcgccaacttccacgcccagcttgcgcgcgaacgggcgacgatcaaggaacgcatcgaacgcatcaacgaatcgctgcgacaaatcgactacaacgcgggtcgatacatcatcctcgagagtcagcccagccccgacgcggaaatccgcgaattccagagcgacctgcgcgcttgcaccgagggcgaactcaccggctcggacgatagccaatactcggaggccaagttcctgcaagtcaaacggatcatcgaccgcttccgcggccgcgaagggttgaccgagcaggaccggcgctggcgagccaaagtgaccgacgtgcgcaactggtttctgttcgccgccagcgagcgttggcgcgaggacgacagcgaatacgagcactactcggactccggcggtaaatcgggcggccagaaggaaaagctcgcctatacgatccttgccgcgagcctcgcctatcagttcggcctcgaatggggcgccgtgcgttcccggtcgttccgcttcgtcgtcatcgacgaagcatttggccgaggctccgacgaatcggcgcagtacggtctcacgctgtttcagaaactgaacctgcaactgctgatcgtcacgccactgcagaagattcacatcatcgagccgttcgtttcgagcgtcggattcgttcagaacgacggtggacgcgcctccaagctgcgcaccctgtcgatcgaggagtaccgcgcgcacaaggcggagttcgagcaatga

SEQ ID NO: 48998 - DNA, 1185 bp, Burkholderia ubonensis
atgagttggacaactgccgtcgaactgcgtgcccgcctccagcgcctatgggaacgcggcgaatggctgcgaagcctcgtagacggtgccgaggggctattcccgctacgtctggcgatcaaaggcccaagctcgtccgagttggctgaacgcttcgacacggtacgcgcatggattacggaaattgccgcgacgccgcgcatacgcatcgaatggcgagaaatcaatcatcgaattctcggccagcagcgtttgccacgagcagcttgggtcgacagtctggacgatgcgctcactgtcgccggcaagcaacgcgacgcagcgcggttcgagcggctgcttgaaatcacacgctcgcgccagccgaagctcatcgcatggcttgcgcagcgcccgatgcaggccctcgaattggccggcgattgggaccgactgctggcagtcgtcgattggctgcaagcacatccgcagccgggcatctatcttcgccaagccgaaatcgccggcgtcgacacgaaattcatcgaggcgcggcgcggcgtcctctcccaatggctcgatctcgtgctgccgtccgaggcgatcgacagcagccggaccggcgccgcccaattcgccgctcgctacgggttccgcgataagccgcctcgtattcgatttcgcgtgctcgatgagcggctcgccgtcctgcccggcatgggccgacccgacatcacactcgacgccgacagcttcgcgcgcctcgcactgccgtgccgccatgttttcgttacggaaaacgaaacaaattttctggcgtttcccgacgttccgcaggcgatcgtgctcttcggagcgggctacggctgggaagctctggagccggcacaatggctcacggactgtgcgctccactactggggcgacatcgacacgcacggctttgccattctcgaccaattgcgttgccgattccctcacgcgggatccttcttgatggaccgcgcgacactgatagcgcatgaagcattctggggagacgaaggcgatcaggtcatgcgtgatctgccgcgactcacggcgcaagagcgcgagctctttgacgacctgcgtgacaaccggattcgccgcggattacggctcgagcaggagcgcgtcgggttcgggtgggtcagagcggcgctagaggaacggtctttcgtttag

SEQ ID NO: 48999 - DNA, 1461 bp, Burkholderia ubonensis; identical to SEQ ID NO: 48995

SEQ ID NO: 49000 - DNA, 651 bp, Burkholderia ubonensis; identical to SEQ ID NO: 48968

SEQ ID NO: 49001 - DNA, 3372 bp, Burkholderia ubonensis; identical to SEQ ID NO: 48997

SEQ ID NO: 49002 - DNA, 1185 bp, Burkholderia ubonensis; identical to SEQ ID NO: 48998

SEQ ID NO: 49003 - DNA, 1461 bp, Burkholderia ubonensis; identical to SEQ ID NO: 48947

SEQ ID NO: 49004 - DNA, 651 bp, Burkholderia ubonensis; identical to SEQ ID NO: 48948

SEQ ID NO: 49005 - DNA, 3372 bp, Burkholderia ubonensis; identical to SEQ ID NO: 48949

SEQ ID NO: 49006 - DNA, 1185 bp, Burkholderia ubonensis; identical to SEQ ID NO: 48950

SEQ ID NO: 49007 - DNA, 1461 bp, Burkholderia ubonensis; identical to SEQ ID NO: 48947

SEQ ID NO: 49008 - DNA, 651 bp, Burkholderia ubonensis; identical to SEQ ID NO: 48948

SEQ ID NO: 49009 - DNA, 3372 bp, Burkholderia ubonensis; identical to SEQ ID NO: 48949

SEQ ID NO: 49010 - DNA, 1185 bp, Burkholderia ubonensis; identical to SEQ ID NO: 48950

SEQ ID NO: 49011 - DNA, 1461 bp, Burkholderia ubonensis; identical to SEQ ID NO: 48995

SEQ ID NO: 49012 - DNA, 651 bp, Burkholderia ubonensis; identical to SEQ ID NO: 48968

SEQ ID NO: 49013 - DNA, 3372 bp, Burkholderia ubonensis; identical to SEQ ID NO: 48997

SEQ ID NO: 49014 - DNA, 1185 bp, Burkholderia ubonensis; identical to SEQ ID NO: 48998

SEQ ID NO: 49015 - DNA, 1461 bp, Burkholderia ubonensis
atgttcctcgactaccctaccctcgacgcgctgcgcacgcgccatcccgcttggcgactgttacgctccgaccacgcgccgctcgctgtcggcttcctgcaccgcgtgttcgtcgcaccgaacgtgcgggaggtagcggctccgtttcttgccgaagcactcgaggatgagctttacgcgttgcgcgaacaactcggtgacgacgccttcccgaagcccgcgctcgactatctgaacgactgggcgagtcccgaaaagggctggttgcgcaagttctatcgccgaggctccgatgaaccgcagttcgacctgacacccgccgcgggaaaagcgatagcgtggctcggcacgctgatggaacgaagctttgtcggcacggaatcccggctcctgacgcttttcgagttgctgcggcagatggccgaaggcagcgagacggacccggaaaggcgtcttgccgaactccacgcgcggcgcagccagatcgacgaagaaatcgctcgcgtggaagccggcgacctccggctgctcgacgatgccgcgatcaaggaccgctttcagcaattcatgcagatggcgcgcgacctgctcacggatttccgtgaagtcgagcaaaacttccgtctgctggaccggcatgtacgcgagcgaatcgcgctctgggaaggatcgaagggtgcgctcatcgaagaaatcatgggcgagcgcgatgcgatcgccgattcggaccagggcagcagctttcgggcgttctgggacttcctgatgtcgagccgccgccaggaggaactctctgaacggctcgagcacgtgcttgcgctcccggcgatcacggaaatgaaacccgacgcgcgcacgcggcgcgtccactatgactggctggaagccggcgagcacacgcaacgcacggtcgctcagctctcgcagcagcttcgacgtttcctcgacgatcaagcgtggctcgaaaaccgccgcatcatggacattctgcgcggtatcgaaacgaaagcgcttgtgctgcgtgaagcgcccccgccgggctccgtcatggagatcgagaccgcgtccgctgacatcgagctgccaattgaacgcccgctttacgcgccggcgctgcgccctctcatcgccaacgtcgcaatcgagaccggcgatgcggacctcgatgcgtcggcactctacacgcagatcgtcgtcgatcgcgcgcgcctcgcaagccacatccgccgctgccttcaagatcggcggcaagtgacacttgccgaactggccgcttcgcagccgctcttgcatgggctcgctgaactcgtcgcctatttgcaactgagcgccgaagccggatcatttcgcgcgaccgtcgatgagaccgtctccgatacgatcgagtggcaggcgaacgatgccaacggagcaacaatcgtcaagcgcgcaacgatgccgcgggtgattttcacaaggtag

SEQ ID NO: 49016 - DNA, 651 bp, Burkholderia ubonensis
atggaagaacagcaaacttcgtcgcttggtcgaggtgacttgtcgacggttgccgtcgcgctgctcaagggcgtggtttatcgtgatggaaacgagcgcctctgggccgcactgctcgaattgcagacacacgtgcgcgactacgtcgccgtgcttggcctcgagctcgtcgtggacgaggcggaaggctacgccttcgtaaagagccgcaccgagcctgacgccggagtcgacggagaccaggccaagctgccccggctcgttgcacggcgtccactctcgttccccgtgagcctgctgctcgcgctgctgcgaaagaaactggcggaatgggatgccggcggcggcgacacgcggctcgtcctttcgcgcgaggacatcgtcgagctcgtacgcgtcttccttcccgcgagcactaacgaggcgcgcctggtcgatcagatcgatacgcacgtgaacaagatcgtcgacctcggtttcctgcgccggatgaagaccgcgagcggaccgcccacattcgaggtgcgacgcattctcaaggcgttcgtcgatgcgcaatggctgctcgatttcgacgcgcggctcgcaagctatcaggcgcaccttcgggattcgacgaattcggaccaaacggagagtcgcgatgaatga

SEQ ID NO: 49017 - DNA, 3372 bp, Burkholderia ubonensis
atgaatgagccgcgcacgctcggcctcgattttgccgcggacgacacccggacgggctttcgcctcgagcggctcgaggttttcaactggggcaccttcgacgaacgggtctgggtgctgcgggtcgatggccgcaacggcctgctgacaggagacatcggttccggcaagtcgacgctcgtcgacgccattaccaccctcctcgtgcccgcgcagcgcatcgcctacaacaaggcggcaggcgcggacagcaaggaacgtacgctgcgctcgtatgtgctcggctactacaagtcggagcgcaacgaggtcacgggagcagccaagcccgtgagcctgcgcgaccacaatcattattcggtgatattgggcgtgtttcgcaacgccgggtacgacgccaccgtcacgctcgcgcaagtgttctggatgaaagacgcgcaggctcaacctgcgcgattcttcgtcagtgccgaacgagatctctcgatcgcgaccgacttctcgcgcttcggcaccgacattgcacagctgcgcaagaagctgcgcgggctgggcgccgaaatcgaggacacgtttccgaaatacagcgcctggttccggcggcgcttcggaatcgaaaacgagcaagcgctcgagctctttcatcaaacggtatcgatgaagtcggtgggcaatctcaccgacttcgtacgcagccacatgctcgagccgttcgacgtcgcaccgcgcgtcgacgccctgattgctcacttcgacgatctgaatcgcgcgcacgaggcggtactgaaaaccaagcgccaagtggaattgctgacaccgctcgtcgacgactgcgaccgccacagcgagcaaggacacgttctcgaaggctggcgcgcgtgccgtgaagcattgaggccctacttcgccgggctcaagctcggcctcgtcgaacgccgcctccaattgctcgaagaggatcatgcgcgcgcgacctcgcgaaaggcgcggcacgaagaagcgcgcgaccaggcgcgccagcgcgtggacgatttgcgccgtgccgtggccgaacaaggcggcgatcgcatcgcgcagctcgatgtcgagatccgcgagcacgagcgagaaagcgtgcgtcgccgcgaacgggcgcaacgctatgccgccatcgttacgctgttcggcgaaaccgaggccgcggatgaggctgcattcgcctcccagcgccaacgcctggccgagcagcgcagctcgctcgttgacgacgaagcgcaacagcaaaatgcgataaccgaatggagcgtggcatttcgcgaaggaaaagcgcggcgtgatttgctggaggacgaaatcgcgagcctgaaagcccgacgcaacaacatcccgaaggaacaggtcgcgatgcgggcgagcctgtgctcagcgctcggcctggaggaagacgccctgccgttcgcgggcgaactcattcaggtgcgcgaggatgcgcgtgattgggagggcgccgccgagcgcgttctacgcaacttcggcctgtcgctgctcgtgcccgacgagcactatgcgagcgtcgcggcgtgggtcgatcgcactcatctccgggggaggctagtctactttcgcgtgcgctcggaacgcagcgcgcgtgcagccgaggccatcgagctacaccgccactcgctcgcgcacaaactcgcgatcaagcccgactcgctgttctatggctggctcgagcgcgaaatcggccgccgtttcgactatgcctgctgcgatacgcaggagcagtttcggcgcgagacgcgcgcgatcacgcgtgcgggccaggcgaaagcgcctggggagcgccacgaaaaagacgatcgccacgcgctcgacgatcgcagccgctacgtgctcggttggagcaacacggcaaaaatatccgccctcgcagcacaacggcaagcgctcgaagctcgccttggcgagatcgggcaaaggctcggagaggcccaacatgagcacgccaaggtgcgtgagcaactcgaagcacttgcgcgtgccggcgagttcgccgagtttcgggaaatcgattggtcgagctgcgctgccgcgatcgcacgtcttgcggacgaaaaggcgcgactcgaatcggcaagcgacgccctcgcagagctaacggctcaattggactcggcgcaagcgtcgttgaaagagagtgaagcggcgatgtcggaaaccgactcggaactgggcggcatcctggccaagcgggaggcggcacaagcgttgcgcgaagagacgcacgcgctcattgcagaagtggatgccgaacttgccgaacgaatcgaggccctgcgagcggagattctcggcgaacaccagctttccgtcgagtcatgcgacaaccgcgagcgggacgtgcgagaggcgttgacaacccgtatcgacaacgaaacgaagtcactcggccgcctggccgaaagaatcgtcaaggcaatggcggccttcaaggaagcctacaagctcgaaaccgccgacttcgatgcgagcctcgacgcgaactcagagtaccgtgacatgctcgcgcggctgcaagcggacgatctgccgcgcttcgaaacgcgtttcaaggagctgctcaacgtcaatacgatcaacgagatcgccaactttcacgcccagctcgcgcgcgaacgggcgacgatcaaggaacgcatcgaacgcatcaacgaatcgttgcgacaaatcgactacaacgcgggccgatacatcatcctcgagagtcagcccagccccgacgcggaaatccgcgaattccagagcgacctgcgcgcttgcaccgagggcgagctcaccggctcggacgatagccaatactcggaggccaagttcctgcaagtcaaacgaatcattgaccgcttccgcggccgcgaagggttgaccgagcaggaccggcgttggcgcgccaaggtgaccgacgtgcgcaactggtttctgttcgccgccagcgagcgttggcgcgaggacgacagcgaatacgagcactactcggactccggcggtaaatcgggcggccagaaggaaaagcttgcctacacgatccttgccgcgagcctcgcctatcagttcggcctcgaatggggcgccgtgcgttcccgatcgttccgcttcgtcgtcatcgacgaagcatttggccgaggctccgacgaatcggcgcagtacggtctcacgctgtttcagaaactgaacctgcaactgctgatcgtcacgccactgcagaagattcacatcatcgagccgttcgtttcgagtgtcggattcgttcagaacgacggtggacgcgcctccaagctgcgcaccctgtcgatcgaggagtaccgcgcgcacaaggcggagttcgagcaatga

SEQ ID NO: 49018 - DNA, 1185 bp, Burkholderia ubonensis
atgagctggacaagtgccgtcgaactgcgtgcccgcctccagcacctatgggcacgcggcgaatggctgcgaagcttcgtagacggcaccgaggggctattcccgctacgtctggcgatcaaaggcccgagttcgtccgagctggctgaacgcttcgacgcggtacgcgcatggatcgcggaaattgccgcgacgccgcacatacgcatcgaatggcgagaaatcaatcatcgaattctcggcgtgcagcgtttgccacgagcggcctgggtcgacagtctggacgatgcgctcgcagtcgccggcaagcaccgcgacgcagcgcagttcgcgcggctgctcgaaatcactcgcgcccgccagccgaagctcgccgcgtggcttgcgcagcgcccgttgcaagccctcgaattcgccggcgattgggaacgactgctggcggtcgtcgattggctgcaagcacatccgcacccgggcgtctatcttcgccaagccgaaatcgccggcgtcgacacgaaattcatcgaggcaaggcgcggcgtcctctcccaatggctcgatctcgtgctgccgtccgaggcgatcgacagcagccggacaggcgtcgctcaattcgccgcgcgctacgggttccgcgagaagcaaccccgtattcgatttcgcgtgctcgatgagcggctcgccgttctgcccggcatgggccgccccgacatcgcactcgacgccgacagcttcgcgcgcctcgcactgccgtgccgccatgttttcgttacggaaaacgaaacaaattttctggcgtttcccgacgttccgcaggcgatcgtgctcttcggagcgggctacggctgggaagctctggagccggcgcgatggctcgcggactgtgcgctccactactggggcgacatcgacacgcacggctttgccattctcgaccaattgcgttgccgattccctcacgtgaactccttcctgatggaccgcgcgacactgatggcgcatgaagcattctggggagacgaaggcgatcaggtcatgcgtgatctgccgcgactcacggcgcaagagcgcgagctctttgacgacctgcgtgacaaccggattcgccacggattgcggctcgaacaggagcgcgtcgggttcgggtgggtcagagcggcgctagaggaacggtcttgcgtttag

SEQ ID NO: 49019 - DNA, 783 bp, Burkholderia stagnalis
gtgatcgcagagagcgacgaaggccgatcctttctcgcattctggcgtctgttgacggatccgtcacagcttgagagcttgcaggcagcgttggaggcattggaaactcgaccattcgtgcgcctgctgagtttcgaggagcgtaggaggctgtttcgagtgacagaaatgcttctggttgagggcacgatggtgcaagacgtgatgacgacccttgggcggagtcttcgaacctttgtgcagagtcgggagtttcaggagcagcgcaggattcaaattctgatacgtcaggcgatcacgaaatcactggaactgaaagacacactgacgaacggtcgaacgctcgacttcaccctgacgctgtcgacgagtagtttgagatcagtcgcgcagcttacgttgaccgatccacaggaacgtcctggcgagactacagtcgatgatgcaccggcacctgaaatcgacttggatgcaatgcgagagatgatcgacaacgcggatatcgatatgcccttgcttaaggccaatattcgttccgcactgaccgagcgagatcatgtgagcgttcgtgaattgacgctcatgttcgaggtgacccagggactcgcgtccgttgtcggctacatgtctcttggtcagcggttcggaattgtctttgaaaaccaagagcgagaattccatcccaccgagctcatatcttggaaagggcaagacggcatcgtgcgacaggctcggatcgcacaggtactcttcactagggattgcttgaatgacctcgattaa

SEQ ID NO: 49020 - DNA, 381 bp, Burkholderia stagnalis
atggaactggtgttggccgaagccgaggggcgacgtgcaacggtgtcccgaggcaacatggtcgatcacatgaaagcttacgaggctagcgacaacgttgaccgggcgcgttttaacaggcaagtcgacggcgcgatcgagaaagccaaaaagtacaacttcctccgtttgatccggaatagtggtgatcgattcgaagtgtcgccagcgctgaagctggtgttttcccatgaccaggtgcaagcgttgttgctgacctacgagcgtatccggaccccgttggagggccactcgccaggtggcgatgacattcaattgaacccgccagagccagacgcattggacggtttggatgacgagcgcgagagtgacgaggactaa

SEQ ID NO: 49021 - DNA, 3195 bp, Burkholderia stagnalis
atggcgccgccaaattcggaattcaacgcggcggcccgaggccacgacaaggtggcccgcgaccggtccatggtgacgtacatccggggtgcgtgggccacacaggagtcggacgagggggttatcgctgcacagtatcttcgcccggatacgacattgagcgcagtcgctgaggtctatgccaacgcgttagggcagactctcacgctggttggcatgtggtggataaagggaaaatcgacacttgccaaggacgttcgacattgcttcttcctgatcgagcgcgcattgagcctcaaggaactgtcgttcttcatgcagactgactacaatctgcgctcatttcagaagcacctcccagaggtgaagccgtttgagacccattcgtcattccgggagcgtttcaaggcgcgactcggcattgatcatgatcttgctctgcgcctgctgcatcgaactcagtcgtcgaagaacctgggcgacatcaacgctttcatgcgcgacaacatgctggacgaaccgaagacgttcggtatcgccaaagcactctgtgaggatttcaatacgctggctgcagcgcaccgtgatgtcgtggaggcgcgcaaacagcgagatcttttggtccatgcggagtcttatcacgagcggtatcagaaacatcacgccgatgtcgttcgggtcgaggcgctacttgcgcagttggatcaccacagaaagtatctgcagtattcattgtgcaagcagcgaaccaacgaactgacgatcgagcttgagcggctgcatcagagcattgtggcacttagccggaaggcgaatagtgagcagaccgaactcgagaggctcatcacgctgcgtggcggcatgaacgacggcaatgtggctgggctgacggcgcagttggagaccacgggcacgcgactgaatcaagtacagcgcgaacgcaatcgtgtcgccgggtggcttaatacactcggctggcaggagccgcgggatgcggcccacttcggggagtacctcggtaatgccactctccttcgagaatgtggtatcgggactgacatcgaagcgacggaagatgcgttacgtaacgatttgagcgccgcgcagacgcagctccaagaattgctgcaagagatcaaatcgatggagctgcgcaagtccaatctgccgcggcaactcgttgatgtgcgcgaccaaattgcgtccgccctcaggctggactccagcacattcccgtttggaggtgaactgctggatgtgccgaaggaattcgagcgatggcagggagcgcttgagcgtctgcttgcgccactgacacgatcgtttctggtgccggaagaacactaccggggcgtcgtcgattggctggaggcaaaccatacgggacaacatgttctgtacttgcgcatgcgtacacatcaacgacgcgttgagaccggaccgaaatcaccgggccgtatgctggacacggagactgacgattacggtgactggttgcgcgacgagatttcccagcattatggggacttcgtgtgtgccgaaacaagcgatgagttccgcgaatcctctcgcgcgatcagtctccagggccaaatcaagcgcggcggtactcgccatgagaagaacgatcgtattcgcctagacaaccgcaaagaatggatgattggattttcgaacgagcagaagaaacgcgatctgctcgccgaatttgatgctcaacggacacgggcggatgagtccaagaaggcgcttgatgaactggtcgcggcgcgcagacgagaggagcagcgactcattgcggcgcgggacttgtcgcaggtgatgtgggaggatattgacactgcgtccgtggctttcgaattgcagcgcttgcagactcagttggaggaggcccagcagtcccatccggaaattcggaagctggacgatcaaatcagcgcgcagcgtgatattgccagcgtcgcacagaaagcgcgtacgacagaagaaaatcggcgtgatggtacggctcaggagatggcaaagctgatccgagagcgtgatgcaacacctcaggagttccatgtgccgccgccggatggtgaagagttgcagcccctgttcggcaacatcggcgaactcacgctgctgaatctggagtcgcgatgggagcgtgcgcgaagtaatttgcgagatgatcgaaacgaagccgacaaagggaaatcaggcgcccgaaaagatcttgaggaagtcttgcgaacattccagcgcgagcacagggtagccgccgcagacatgggtgcaaccctagatgactggtctgagtacgaacgcgtgctatttcggctcgagcaagacgatctacctcgttttgaagaacgatttttccgactgctcaatgaacagagcgaccgtcacatcgccaagttgaggcagcgtctcatcacggagaaagacgagatccgtagtcgcatgagtatcgtcaatgacgcgttgtcgcaatccgagttcaacccgaaaacctatcttcggttggagaatcgaccgcgaacgctgccggatgtcgtgagcttcctggctgaactgaaggcctgccttgagcgtaacgtaagaccgagtgcgacacgggaagagcgcgaggagcagtttagtgcgctcaatacgatcgtccagcgcttgcacagtgacaaacccgaggatgaacgttggaaggcgctcgtgctggatgtgcgacagcacgtcgagttcctcgcaaaagagttcgatgcgcaaggcaacgtgcgcgacattttccagtcgggtgcgggcaagtcaggcggtcaacgccagaaactcgctgccacgtgtttggcggccgccttgcggtatcagcttgcgggaacggaccgaccattgccacagttctgcacggtgctgatggatgaagcctttgacaaggctgatagcgaatttaccgcgatgaccctgaacattttccatacgttcgggtttcagatgctgttggcgacgccaatgaaggcggtccggacgttggagccgttcattggcggggcgcacgtgttcagtaacaaggcgcgcgacagttccggcgcggtatcgattgaatatgacatggcgaaccatcgactgaaaggtcttggcgtcccacggccagaggatggcgatcgcgcggccaatgacgattccgacgaaggaggggcgcatgccgctgaatga

SEQ ID NO: 49022 - DNA, 534 bp, Burkholderia stagnalis
atgaggctccttgggcctgagctccgggagcaactgctcggcatggatgacctccagatgcctgtcgatcagtggaattcagtctggcgtcgtccgccttcaagattactggtcgttgagaatctggacaccgggctggctatgccggacctcgacgacaccgctgtagttatggccctgggaaatagtgtcacgatcttgcagcgactcgagtgggtacgtgccgccgagattctctactggggggacatcgacacatggggcttacacattctgtcacgcttgcgcggcatatttccgcatgtgaattccatcctgatgacgcaggcagtgctggagtcgcatcagcacctctggactgaggaggggacgcaggaaatgcgaccggccgagcacctaacacctgaagagtcacatctccttcgcgatttgcaacagcagcgttggcgccggccgattcggctggaacaggagcggcttcactggccgagtgtcgtggaggtactgactcgtctatggggaggtttcgcgtaa

SEQ ID NO: 49023 - DNA, 1500 bp, Burkholderia anthina; identical to SEQ ID NO: 48939

SEQ ID NO: 49024 - DNA, 762 bp, Burkholderia anthina; identical to SEQ ID NO: 48940

SEQ ID NO: 49025 - DNA, 3330 bp, Burkholderia anthina; identical to SEQ ID NO: 48941

SEQ ID NO: 49026 - DNA, 1146 bp, Burkholderia anthina; identical to SEQ ID NO: 48942

SEQ ID NO: 49027 - DNA, 1500 bp, Burkholderia anthina; identical to SEQ ID NO: 48939

SEQ ID NO: 49028 - DNA, 762 bp, Burkholderia anthina; identical to SEQ ID NO: 48940

SEQ ID NO: 49029 - DNA, 3330 bp, Burkholderia anthina; identical to SEQ ID NO: 48941

SEQ ID NO: 49030 - DNA, 1146 bp, Burkholderia anthina; identical to SEQ ID NO: 48942

SEQ ID NO: 49031 - DNA, 1467 bp, Burkholderia stagnalis
atgcccctcgactacccgaccctcgattcgctgcgcacgcgccatcccgcctggcgcctgttacgctcggatcacgcgccacttattgtcagcttcctgcaccgcgtgttcgtcgcaccgaacatgcgcgtggtagcggcgccgcttcttgccgaagcactcgacgacgaactttacgcgttacgcgaacaactcggcgacggggccttcccgaagcctgcgctcgagtatctgaacgattgggccggccctgaaaagggatggttgcgcaagttctatcgccaagattctgatgaaccgcagttcgacctgacacccgccgcggagaaagcgatcgcctggctcggcacactgacggaacgcagctttgtcggcacggagtcgcggctcctgacacttttcgagctgctgcggcagatgggcgaaggtagcgaggcaaacccggaaaagcgtctcgccgagctccacgcgcggcgcagccagatcgacgcagaaatcgcgcgcgtcgaggccggtgacgttcggctgctcgacgatgccgcgctcaaggaccgctttcagcaattcatgcagatggcgcgcgacctgctcgcggatttccgtgaagtcgagcaaaactttcggctgctggaccggcacgtacgcgagcggatcgcgctttgggaaggatcgaagggcgcactcatcgaggaaatcatgggcgagcgcgacgcgatcgccgattcggaccagggcagcagcttcagggctttttgggacttcctgatgtcgagccgccgtcaagaggaactctcggaacggctcgagcgcgtcctggcgctgccggcgatcaccgaaatgaggcccgacgcgcgcatgcggcgtgttcattacgactggctggaagcgggcgagcatacgcaacgcacgatcgctcagctttcgcagcagcttcgacggttcctcgacgatcaagcgtggctagaaaaccgccgtatcatggacatcctgcacggcatcgaaacaaaggcgcttgcgctgcgcgaagcgcccccgccaagcgccgtcatggagatcgagaccgcgtccgctgacaccgagctgccgatggaacgcccgctttacgtgccggcgctgcgccctgtcatcgccaacgtcgccatcgagaccggcgaggcggacctcgatgcctcgccgctctacacgcagatcgtcgtcgatcgcgcgcgcctcgcaggccacatccgccgatgcctccaggatcgaccgcaagtgacgcttgtcgaactggcggcctcgcagccgctcacgcatgggctcgccgagctcgtcgcctatttgcagttgagcgccgaagccggatcatttcgcgcgaccgtcgatgagaccatcaccgacacgatcgcgtggcagacgaacgacgccgacggaaccacgagtgccaaacgcgcgacgatgccacgcgtgattttcacaaggcaaagatga

SEQ ID NO: 49032 - DNA, 654 bp, Burkholderia stagnalis
atgacgcaagaacagcaagcctcgtcgcttggtcgaggtaatttgtcgacggttgccatcgcgctgctcaagggcgtgatctatcgcgatgaaaacgagcgcctctgggccgcattgctcgaattgcagacgcatgtacgcgactacgtctccgtgctcggcctcgagctcgtcgtggacgaggcggaaggctacgcctttgcgaagagccgcgccgagcatgacactgaactcgatgcggaccaggctaagctacctcggctcgtcgcccggcggccactctcgttccccgtgagcctgctgctcgcgctgctgcgaaagaagctggcggaatgggatgctggcggcggcgacacgcggctcgtcctttcgcgacaggaaatcgtcgagctcgtacgcgtattccttcccgcgagcactaacgaggcgcgcttggtcgatcagatcgatacacacgtgaacaagatcgtcgagctcggcttcctacgccggatgaagaccacgagcgggccgcccacattcgaggtgcggcgtattctcaaggcgttcgtcgatgcacaatggctgctcgatttcgacgcgcggctggcgagctatcggatgcaccttcaagatccgacggtttcgaaccgacaggagaatcgcgatgaatga

SEQ ID NO: 49033 - DNA, 3372 bp, Burkholderia stagnalis
atgaatgagccgcgcacgctcggcctcgattttgccgccgacgataccctgaccggctttcgcctcgagcggctcgaggtcttcaactgggggaccttcgacgaacgggtctgggtgctgcgggtcgatggccgcaacggcctgctgacgggagacatcggttccggcaagtcgacgctcgtcgacgccatcacgaccctcctcgtgcctgcgcagcgcatcgcctacaacaaggcggcaggcgcggacagcaaggaacggacgctacgttcgtatgtgctcggctactacaagtcggagcgcaacgaggtcacggggacggccaggcctgtgagcttgcgcggccataacagctattcagtgattttgggggtgtttcgtaacgccgggtacgatgccactgtcacactcgcgcaagtgttctggatgaaggacgcgcaggctcaacccgcacgcttcttcgtcaatgccgaacgcgatctctcgatcgcagccgacttttcgcgcttcggcacagacatcgcgcagctacgcaaaaagctgcgtgggctgggtgccgaaatcgaagatacgtttccaaaatacagcgcctggttccggcgacgcttcgggatcgaaaacgagcaagcgctcgaactctttcatcaaacggtatcgatgaaatcggtgggcaatcttaccgacttcgtacgcagccacatgctcgagccgttcgacatcgcaccgcgcgtagacgcgctgatcacgcacttcgacgatctcaatcgtgctcacgaggctgtactgaaagccaagcgccaggtggaactgctgacaccgctcgtcgatgactgcaatcgccacagcgaacaaggacacgttctcgaaggctggcgagcgtgccgtgaagcactgaagccctacttcgccgggctcaagctcagcctcatcgagcgccgcgtccaattgctcgatgaagatcatgcgcgtacgacctcgcgaaaggcgcggcacgaagaagcgcgcgatcaggcgcgccagcgcgtggacgacttgcgccgcgccgtggccgaacaaggcggcgatcgcatcgcacagctcgaggtggaaatccgcgagcacgagcgagaaagcgcgcgtcgccgcgaacgcacgcaacgctatgtcgccatcgttacactgctcggtgaaaccgaggccacggatgaggccgcattcgtttcccagcgccaacgtctggccgcccggcgcagttcgctcgtcgacgacgaagcgcaacagcaaaacgagattaccgaatggagcatggcttttcgcgaagggaaagcgcggcgcgatctgctggaggacgaaattgcgagtctgaaggctcgacgcaacaacatcccgaaggatcaagtcgcgatgcgcttgaacctttgctcggcgctcgatctggaggaggacgccctgccgtttgcgggcgaactcattcaggtgcgcgagactgcgcgcgattgggaaggcgccgccgagcgcgtcctgcgcaacttcggcctgtcgctgctcgtgcccgacgagcactatgcgaacgtcgcggcgtgggtggatcgcactcatctccgcgggcggctcgtctactttcgcgtgcgttctgaacgcgccgcgcgagcagccgagaccatcgagctacaccgccactctttcgcacacaagctcgcgatcaaatccgattcgctgttctatggctggctcgagcgcgaaatcggccgccgtttcgactatgcttgctgcgatacgcaggaacagttccggcgcgagacgcgcgcgatcacgcgcgcgggccaagcgaaagcgcctggagagcgtcacgaaaaagacgaccgccacgcgcttgacgatcgcagccgctacgtgctcggttggagcaacacggccaaaattgccgccctcgaagcacaacggcgagcgctcgaagttcgactgggtgagatcgggcaaaggctcggagaagcccaaaacgagcacgccaaggtgcgacagcaacttgaagcactcgcgcgtgccggcgagttcgtcgattttcgcgaaatcgattggtccaactgcgcagccgcgatcgctcgtcttgcggacgaaaaggcacgactcgaatcggcaagcgacgctctcgcggagctaaccgctcaattggactcggcgcacgcgacgttgaaagagcgcgaagcagcgatctcggaaaccgactcggaactaggcggcatcctggccaagcgggaggcagcgcaagcgttgcgcgacgagacgcacgcgctcgttgcggaagttcatgccgaacttgccgaacggatcgaggccctgcgagcggagatcctcggcgaacatcagctttccgtcgagtcgtgcgacaaccgcgagcgggacgtgcgcgaggcgttgacaacccgtatcgacaacgaaacgaagtcgctcggccgccttgccgagcgagtcgtcaaggccatggccgccttcaaggatgcctacaaactcgaaactgccgacttcgatgcaagcctcgacgcgagctcggaataccgtgacatgctcgcgcggctgcaagcggacgacttgccgcgcttcgaagcgcgtttcaaggagttgctcaatgtcaatacgatcaacgagattgccaacttccacgcccagctcgcgcgcgaacgggagacgatcaaggagcgcatcgaacgcatcaacgaatcgttgcgacaaatcgactataacccgggccgatacatcgtccttgaaagtcagcccagccccgacgcggagatccgcgaattccagagcgacttgcgcgtctgtaccgagggcgaactcacggggtcggacgatagccaatactcggaagccaagttcctgcaagtcaaacgcatcatcgatcgcttccgcggccgcgaagggttgaccgagcaggatcggcgctggcgcgccaaagtgaccgacgtgcgcagctggtttctgttcgccgccagcgagcgttggcgcgaggacgacagtgaatacgagcactactccgactccggcggtaaatccggtggccaaaaggagaagctcgcctatacgatccttgccgcgagcctcgcttatcagttcggcctcgaatggggtgccgcgcgttctcgatcgttccgcttcgtcgtcatcgacgaagcgtttggccgaggctccgacgagtcggcgcagtacggtctcacattgtttcaaaaactgaacctgcaactgctgatcgtcacgccgctgcagaagattcacatcatcgagccgttcgtttcgagcgtcggattcgttcagaacgacgggggacgcgcctcgaagctgcgcaatctgtcgatcgaggagtaccacgcgcgcaaggcggagttcgggcaatga

SEQ ID NO: 49034 - DNA, 1185 bp, Burkholderia stagnalis
atgaattggacaacgaccgccgagctgtgcgtccgcctccagcgccaatgggagcgcggcgaatggctgcgaagcctcgtagatgacaccgatgggctgttcccgctacgtctgtcgataaagggcccgagttcgtccgaattggccgagcgcttcgacgcagtgcgcgcatggatcgcggaaattgccgcgacaccgcgcgtacgcatcgaatggagagaaatcaatcatcgaattctcggcctgcagcgtttaccgcaagcagtctggatcgacagcctggacgatgcgctcgctgtcgccggcaagcgccgcgacgccgcgcggttcgagcggctgctcgaaatcacgcgctcgcgccagccgaagctcaccacgtggcttgcgcagcgcccgttgcaagcgctcgaattcgccgacgattgggaacgaatgctggcagtcgtcgattggctgcaagcccatccgcagccgggcgtatatctgcggcaggccgaaatcgccagtgtcgacacgaaattcatcgaagcgcggcgcggcgtcctcgcccaatggctcgatctcgtgctgccgtccgaggcaatcgacagcagccggacaggcgccgtccagttcgctgctcgctacgggttccgagagaagccgcctcggattcgatttcgcgtgctcgatgagaggctcgccgttctgcccggtttgggtcggccggacatcgcactcgatgccgacagcttcgcgcgcctcacattgccgtgccgccacgtgttcattaccgaaaacgagataaatttcttggcatttcccgacgttccgcagtcgatcgtgctcttcggcgcgggctacggttgggacgctctggagccggcgcgatggctgacagactgtgcgctccactactggggcgacatcgacacgcacggctttgccattctcgatcaattgcgttgccgattccggcacgtcggctctttcttgatggaccgcgcaacactgatggcgcatgaagcattctggggagacgaaggcgatcaagtcatacgcgatctgccgcgactcacagcacaagagcgcgaactctttgacgacttgcgtgacaaccggattcgccatggattgcggctcgaacaggagcgcatcgggttcggatgggtcagagctgcgttggaggagcggactttcgtttag

SEQ ID NO: 49035 - DNA, 1461 bp, Burkholderia ubonensis
atgttcctcgactaccctaccctcgacgcgctgcgcacgcgccatcccgcttggcgacttttgcgctccgaccacgcgccgctcgccgtcagcttcctgcaccgcgcgttcgtcgcgccgaacgtgcgcgaggtggcggctccgtttcttgccgaagcactcgaggacgagctttacgcgttgcgcgaacaactcggcgacggcgccttcccgaagcccgcgctcgagtatctgaacgactgggcgagtcctgaaaagggatggttgcgcaagttctatcgccagggctccgatgaaccgcatttcgacctgacacccgccgcaggaaaagcgatagcgtggctcggcacgctgatggaacgaagctttgtcggcacggaatcccggctcctgacgcttttcgagttgctgcggcagatggccgaaggcagcgagacggacccggaaaggcgtcttgccgagctccacgcgcggcgcagccagatcgacgaagaaatcgctcgcgtggaggccggcgacgtccggctgctcgacgatgccgcgatcaaggaccgctttcagcaattcatgcagatggcgcgcgacctgctcacggatttccgtgaagtcgagcaaaacttccgtctgctggaccggcatgtacgcgagcgaatcgcgcgctgggaaggatcgaagggtgcgctcatcgaagaaatcatgggcgagcgcgacgcgatcgccgattcggaccagggcagcagctttcgggcgttctgggacttcctgatgtcgagccgccgccaggaggaactctccgaacggctcgagcacgtgcttgcgctcccggcgatcacggaaatgaagccggacgcgcgcacgcggcgcgtccactatgactggctggaagccggcgagcacacgcaacgcacggtcgctcagctctcgcagcagcttcgacgtttcctcgacgatcaagcgtggctcgaaaaccgccgcatcatggacattctgcgcggtatcgaaacgaaagcgcttgtgctgcgtgaagcgcccccgccgggctccgtcatggagatcgagaccgcgtccgctgacatcgagctgccaattgaacgtccgctttacgcgccggcgctgcgccctctcatcgccaacgtcgcaatcgagaccggcgatgcggacctcgatgcgtcggcactctacacgcagatcgtcgtcgatcgtgcgcgcctcgcaagcaacatccgccgctgccttcaagatcggcggcaagtgacacttgccgaactggccgcttcgcagccgctcctgcatgggctcgctgaactcgtcgcctatttgcaactgagcgccgaagccggaacatttcgcgcgaccgtcgatgagaccgtctccgatacgatcgagtggcaggcaaacgatgccaacggagcagcaatcgtcaagcgcgcaacgatgccgcgggtgattttcacaaggtag

SEQ ID NO: 49036 - DNA, 651 bp, Burkholderia ubonensis
atggaagaacagcaaaccccgtcgcttggtcgaggtgacttgtcgacggttgccatcgcgctgctcaagggcgtgatttatcgtgatggaaacgagcgcctctgggccgcactgctcgaattgcagacacacgtgcgcgactacgtctccgtgcttggcctcgagctcgtcgtggacgaggcggaaggctacgccttcgtaaagagccgcaccgagcctgacgccgaagtcgacggagaccaggccaagctgccccggctcgttgcacggcgtccactctcgttccccgtgagcctgctgctcgcgctgctgcgaaagaaactggcggaatgggatgccggcggcggcgacacgcggctcgtcctttcgcgcgaggacatcgtcgagctcgtacgcgtcttccttcccgcgagcactaacgaggcgcgcctggtcgatcagatcgatacgcacgtgaacaagatcgtcgacctcggtttcctgcgccggatgaagaccgcgagcggaccgcccacattcgaggtgcgacgcattctcaaggcgttcgtcgatgcgcaatggctgctcgatttcgacgcgcggctcgcaagctatcaggcgcaccttcgagattcgacgaattcggaccaaacggagagtcgcgatgaatga

SEQ ID NO: 49037 - DNA, 3372 bp, Burkholderia ubonensis
atgaatgagccgcgcacgctcggcctcgattttgccgcggacgacaccctgacgggctttcgcctcgagcggctcgaggttttcaactggggcaccttcgacgaacgggtctgggtgctgcgggtcgacggccgcaacggcctgctgacgggagacatcggttccggcaagtcgacgctcgtcgacgccattaccaccctcctcgtgcccgcgcagcgcatcgcctacaacaaggcggcaggcgcggacagcaaggaacgtacgctgcgctcgtatgtgctcggctactacaagtcggagcgcaacgaggtcacgggagcggccaagcccgtgagcctgcgcgaccataacagctattcggtgattttgggcgtgtttcgcaatgccgggtacgacgccaccgtcacgctcgcgcaagtgttctggatgaaggacgcgcaggctcaacctgcgcgattcttcgtcagtgccgaacgagatctctcgatcgcgacggacttctcgcgcttcggcaccgacattgcgcagctgcgcaagaagctgcgcgggctgggcgccgaaatcgaggacacgtttccgaaatacagcgcctggttccggcggcgcttcggaatcgaaaacgagcaagcgctcgagctctttcatcaaacggtatcgatgaagtcggtgggcaatctcaccgacttcgtacgcagccacatgctcgagccgttcgacgtcgcaccgcgcgtcgacgccctgattgctcacttcgacgatctgaatcgcgcgcacgaggcggtactgaaaaccaagcgccaagtggaattgctgacaccgcttgtcgacgactgcgaccgccacagcgagcaaggccacgttctcgaaggctggcgcgcgtgccgcgaagcattgaggccctacttcgccgggctcaagctcggcctcgtcgaacgccgcctccaattgctcgaagaggatcatgcgcgcgcgacctcgcgaaaggcgcggcacgaagaagcgcgcgaccaggcacgccagcgcgtggacgatttgcgccgtgccgtggccgaacaaggcggcgatcgcatcgcgcagctcgatgtcgagatccgcgagcacgagcgagaaagcgtgcgtcgtcgcgaacgcgcgcaacgctatgccgccatcgttacgctgttcggcgaaaccgaggctgcggatgaggctgcattcgcctcccagcgccaacgcctggccgagcagcgcagctcgctcgttgacgacgaagcgcaacagcaaaatgcgataaccgaatggagcgtggcatttcgcgaaggaaaagcgcggcgtgatgtgctggaggacgaaatcgcgagcctgaaagcccgacgcaacaacatcccgaaggaacaggtcgcgatgcgggcgagcctgtgctcggcgctcggcctggaggaagacgccctgccgttcgcgggcgaactcattcaggtgcgcgaggatgcgcgtgattgggagggcgccgccgagcgcgtcctgcgcaacttcggcctgtcgctgctcgtgcccgacgagcactatgcgaacgtcgcggcgtgggtcgatcgcactcatcttcgggggcggctcgtctactttcgcgtgcgctccgaacgcaccgcgcgtgtagccgaggccatcgagctgcaccgccactcgctcgcgcacaagctcgccatcaagcccgactcgcagttctacggctggctcgagcgcgaaatcggccgccgtttcgactatgcctgctgcgatacgcaggagcagtttcggcgcgagacgcgcgcgatcacgcgtgcgggccaggcgaaagcgcctggggagcgccacgaaaaagacgaccgccacgcgctcgacgatcgcagccgctacgtgctcggttggagcaacacggcaaaaatatccgctctcgcagcacaacggcaagcgctcgaagctcgccttggcgagatcgggcaaaagctcggagaggcccaacacgagcacgccaaggtgcgtgagcaactcgaagcacttgcgcgtgccggcgagttcgccgagtttcgggaaatcgattggtcgagctgcgctgccgcgatcgcacgtcttgccgacgaaaaagcgcgactcgaatcggcaagcgacgccctcgcggagctaacggctcaattggactcggcgcaagcgtcgttgaaagagagtgaagcggcgatgtcggaaaccgattcggaactgggcggcatcctggccaagcgggaggcggcacaagcgctgcgcgaagagacgcacgcgctcattgcagaagtggatgccgaacttgccgaacgaatcgaggccctgcgagcggagattctcggcgaacaccagctttccgtcgagtcatgcgacaaccgcgagcgggacgtgcgagaggcgttgacaacccgtatcgacaacgaaacgaaatcactcggccgcctggccgaaagaatcgtcaaggcaatggcggctttcaaggaagcctacaagctcgaaacggccgacttcgatgcgagcctcgacgcgaactcggagtaccgtgacatgctcgcgcggctgcaggcggacgatttgccgcgcttcgaaacgcgtttcaaggagctgctcaacgtcaatacgatcaacgagatcgccaactttcacgcccagctcgcgcgcgaacgggcgacgatcaaggaacgcatcgaacgcatcaacgaatcgctgcgacaaatcgactacaacgcgggtcgatacatcatcctcgagagtcagcccagccccgacgcggaaatccgcgaattccagagcgacctgcgcgcttgcaccgagggcgaactcaccggctcggacgatagccaatactcggaggccaagttcctgcaagtcaaacggatcatcgaccgcttccgcggccgcgaagggttgaccgagcaggaccggcgttggcgcgccaaggtgaccgacgtgcgcaactggtttctgttcgccgccagcgagcgttggcgcgaggacgacagcgaatacgagcactactcggactccggcggtaaatcgggcggccagaaggaaaagctcgcctatacgatccttgccgcgagcctcgcctatcagttcggcctcgaatggggcgccgtgcgttcccggtcgttccgcttcgtcgtcatcgacgaagcatttggccgaggctccgacgaatcggcgcagtatggtctcactctgtttcagaaactgaaccttcaactgctgatcgtcacgccactgcagaagattcacatcatcgagccgttcgtttcgagtgtcggattcgttcagaacgacggtggacgcgcctccaagctgcgcaccctgtcgatcgaggagtaccgcgcgcacaaggcggagttcgagcaatga

SEQ ID NO: 49038 - DNA, 1185 bp, Burkholderia ubonensis
atgagctggacaactgccgtcgaactgcgtatccgcctccagcgcctatgggaacgcggcgaatggctgcgaagcctcgtagacggcaccgaggggctattcccgctacgtctggcgctcaaaggcccaagctcgtccgagttggctgaacgcttcgacacggtacgcgcatggattacggaaattgccgcgacgccgcgcatacgcatcgaatggcgagaaatcaatcatcgaattctcggcgtgcagcgtttgccacgagcagcttgggtcgacagtctggacgatgcactcactgtcgccggcaagcaccgcgacgcagcgcggttcgagcggctgcttgaaatcacacgctcgcgccagccgaagctcatcgcgtggcttgcgcagcgcccgatgcaggccctcgaattggccggcgattgggaacgactgctggcagtcgtcgattggctgcaagcacatccgcagccgggcatctatcttcgccaagccgaaatcgccggcgtcgacacgaaattcatcgaggcgcggcgcggcgtcctctcccaatggctcgatctcgtgctgccgtccgaggcgatcgacagcagccggacaggcgtcgctcaattcgccgcgcgctacgggttccgcgagaagcaaccccgaattcgatttcgtgtgctcgatgagcggctcgccgttctgcccggcatgggccgccccgacatcgcactcgacgccgacagcttcgcgcgcctcgcactgccgtgccgccatgttttcgttacggaaaacgaaacaaattttctggcgtttcccgacgttccgcaggcgatcgtgctcttcggagcgggctacggctgggaagctctggagccggcgcgatggctcgcggactgtgcgctcgactactggggcgacatcgacacgcacggctttgccattctcgaccaattgcgttgccgattccctcacgcgaactccttcctgatggaccgcgcgacactgatggcgcatgaagcattctggggagacgaaggcgatcaggtcatgcgtgatctgccgcgactcacggcgcaagagcgcgagctctttgacgacctgcgtgacaaccggattcgccacggattgcggctcgaacaggagcgcgtcgggttcggatgggtcagagcggcgctagaggaacgggcgctcgtttag

SEQ ID NO: 49039 - DNA, 1461 bp, Burkholderia ubonensis
atgttcctcgactaccctaccctcgacgcgctgcgcacgcgccatcccgcttggcgacttttgcgctccgaccacgcgccgctcgccgtcagcttcctgcaccgcgcgttcgtcgcgccgaacgtgcgcgaggtggcggctccgtttcttgccgaagcactcgaggacgagctttacgcgttgcgcgaacaactcggcgacggcgccttcccgaagcccgcgctcgactatctgaacgactgggcgagtcctgaaaagggatggttgcgcaagttctatcgccaaggctccgatgaaccgcatttcgacctgacacccgccgcaggaaaagcgatcgcgtggctcggcacgctgatggaacgaagctttgtcggcacggaatcccggctcctgacgcttttcgagttgctgcggcagatggccgaaggcagcgagacggacccggaaaggcgtcttgccgagctccacgcgcggcgcagccagatcgacgaagaaatcgctcgcgtggaggccggtgacgtccggctgctcgacgatgccgcgatcaaggaccgctttcagcaattcatgcagatggcgagcgacctgctcacggatttccgtgaagtcgagcaaaacttccgtctgctggaccggcatgtacgcgagcgaatcgcgctctgggaaggatcgaagggtgcgctcatcgaagaaatcatgggcgagcgcgacgcgatcgccgattcggaccagggcagcagctttcgggcgttctgggacttcctgatgtcgagccgccgccaggaggaactctccgaacggctcgagcacgtgcttgcgctcccggcgatcacggaaatgaagccggacgcgcgcacgcggcgcgtccactatgactggctggaagccggcgagcacacgcaacgcacggtcgctcagctctcgcagcagcttcgacgtttcctcgacgatcaagcgtggctcgaaaaccgccgcatcatggacattctgcgcggtatcgaaacgaaagcgcttgtgctgcgtgaagcgcccccgccgggctccgtcatggagatcgagaccgcgtccgctgacatcgagctgccaattgaacgcccgctttacgcccctgcgctgcgccctctcatcgccaacgtcgcaatcgagaccggcgatgcggacctcgatgcgtcggcactctacacgcagatcgtcgtcgatcgcgcgcgcctcgcaagccacatccgccgctgccttcaagatcggctgcaagtgacacttgccgaactggccgcttcgcagccgctcctgcatgggctcgctgaactcgtcgcctatttgcaactgagcgccgaagccggaacatttcgcgcgaccgtcgatgagaccgtctccgatacgatcgagtggcaggcaaacgatgccaacggagcagcaatcgtcaagcgcgcaacgatgccgcgggtgattttcacaaggtag

SEQ ID NO: 49040 - DNA, 651 bp, Burkholderia ubonensis
atggaagaacagcaaaccccgtcgcttgatcgaggtgacttgtcgacggttgccatcgcgctgctcaagggcgtggtttatcgtgatggaaacgagcgcctctgggccgcactgctcgaattgcagacacacgtgcgcgactacgtcgccgtgcttggcctcgagctcgtcgtggacgaggcggaaggctacgccttcgtaaagagccgcaccgagcctgacgccgaagtcgacggagaccaggccaagctgccccggctcgttgcacggcgtccactctcgttccccgtgagcctgctgctcgcgctgctgcgaaagaaactggcggaatgggatgccggcggcggcgacacgcggctcgtcctttcgcgcgaggacatcgtcgagctcgtacgcgtcttccttcccccgagcacgaacgaggcgcgcctggtcgatcagatcgatacgcacgtgaacaagatcgtcgacctcggtttcctgcgccggatgaagaccgcgagcggaccgcccacattcgaggtgcgacgcattctcaaggcgttcgtcgatgcgcaatggctgctcgatttcgacgcgcggctcgcaagctatcaggcgcaccttcgagattcgacgaattcggaccaaacggagagtcgcgatgaatga

SEQ ID NO: 49041 - DNA, 3372 bp, Burkholderia ubonensis
atgaatgagccgcgcacgctcggcctcgattttgccgcggacgacaccctgacgggctttcgcctcgagcggctcgaggttttcaactggggaaccttcgacgaccgggcttgggtgctgcgggtcgacggccgcaacggcctgctgacaggagacatcggttccggcaagtcgacgctcgtcgacgccatcaccaccctcctcgtgcccgcgcagcgcatcgcctacaacaaggcggcaggcgcggacagcaaggaacgtacgctgcgctcgtatgtgctcggctactacaagtcggagcgcaacgaggtcacgggagcggccaagcccgtgagcctgcgcgaccacaacagctattcggtgattttgggcgtgtttcgcaacgccgggtacgacgccaccgtcacgctcgcgcaagtgttctggatgaaggacgcgcaggctcaacctgcgcgattcttcgtcagtgccgaacgagatctctcgatcgcgaccgacttctcgcgcttcggcaccgacattgcgcagctgcgcaagaagctgcgcgggctgggcgccgaaatcgaggacacgtttccgaaatacagcgcctggttccggcggcgcttcggaatcgaaaacgagcaagcgctcgagctctttcatcaaacggtatcgatgaagtcggtgggcaatctcaccgacttcgtacgcagccacatgctcgagccgttcgacgtcgcaccgcgcgtcgacgccctgattgctcacttcgacgatctgaatcgcgcgcacgaggcggtactgaaaaccaagcgccaagtggaattgctgacaccgctcgtcgacgactgcgaccgccacagcgcgcaaggccgcgttctcgaaggctggcgtgcgtgccgtgaagcattgaggccctacttcgccgggctcaagctcggcctcgtcgaacgccgcctccaattgctcgaagaggatcatgcgcgcgcgacctcgcgaaaggcgcgacacgaagaagcgcgcgaccaggcacgccagcgcgtggacgatttgcgccgtgccgtggccgaacaaggcggcgatcgcatcgcgcagctcgatgtcgagattcgcgagcacgagcgagaaagcgtgcgtcgccgcgaacgcgcgcaacgctatgccgccatcgttacgctgttcggcgaaaccgaggccgcggatgaggctgcattcgcctcccagcgccaacgcctggccgagcagcgcagctcactcgtcgacgacgaagcgcaacagcaaaatgcgataaccgaatggagcgtggcatttcgcgaaggcaaagcgcggcgtgatttgctggaggacgaaatcgcgagcctgaaagcccgacgcaacaacatcccgaaggaacaggtcgcgatgcgggcgagcctgtgctcggcgctcggcctggaggaagacgccctgccgttcgcgggcgaactcattcaggtgcgcgaggatgcgcgtgattgggagggcgccgccgagcgcgtcctgcgcaacttcggcctgtcgctgctcgtgcccgacgagcactatgcgaacgtcgtggcgtgggtcgatcgcactcatcttcgggggcggctcgtctactttcgcgtgcgctcggaacgcagcgcgcgtgcagccgaggccatcgagctgcaccgccactcgctcgcgcacaagctcgcgatcaagcccgactcgctgttctatggctggctcgagcgcgaaatcggccgccgtttcgactatgcctgctgcgatacgcaggagcagtttcggcgcgagacgcgcgcgatcacgcgtgcgggccaggcgaaagcgcctggggagcgccacgaaaaagacgaccgtcacgcgctcgacgatcgcagccgctacgtgctcggctggagcaacacggcaaagatatccgctctcgaagcacaacggcaagcgctcgaagctcgccttggcgagatcgggcaaaggctcggagaggcccaacacgagcacaccaaggtgcgtgagcaactcgaagcacttgcgcgtgccggcgagttcgccgagtttcgggaaatcgattggtcgagctgcgctgccgcgatcgcacgtcttgccgacgaaaaagcgcgactcgaatcggcaagcgacgccctcgcggagctaacggctcaattggactcggcgcaagcgtcgttgaaagagagtgaagcggcgatgtcggaaaccgactcggaactgggcggcatcctggccaagcgggaggcggcacaagcgctgcgcgaagagacgcacgcgctcgttgcagaagtggatgccgaacttgccgaacgaatcgaggccctgcgagccgagattctcggcgaacaccagctttccgtcgagtcatgcgacaaccgcgagcgggacgtgcgagaggcgttgacaacccgtatcgacaacgaaacgaaatcactcggccgcctggccgaaagaatcgtcaaggcaatggcggctttcaaggaagcctacaagctcgaaacggccgacttcgatgcgagcctcgccgcgaactcggagtaccgtgacatgctcgcgcggctgcaggcggacgatttgccgcgcttcgaaacgcgtttcaaggagctgctcaacgtcaacacgatcaacgagatcgccaacttccacgcccagctcgcgcgcgaacgggcgacgatcaaggaacgcatcgaacgcatcaacgaatcgctgcgacaaatcgactacaacgcgggccgttacatcgtcctcgagagtcagcccagccccgacgcggagatccgcgaattccagagcgacctgcgcgcttgcaccgagggcgaactcaccggctcggacgatagccaatactcggaggccaagttcctgcaagtcaaacggatcatcgaccgcttccgcggccgcgaagggttgaccgagcaggaccggcgctggcgagccaaagtgaccgacgtgcgcaactggtttctgttcgccgccagcgagcgttggcgcgaggacgacagcgaatacgagcactactcggactccggcggtaaatcgggcggccagaaggaaaagctcgcctatacgatccttgccgcgagcctcgcctatcagttcggcctcgaatggggcgccgtgcgttcccgatcgttccgcttcgtcgtcatcgacgaagcatttggccgaggctccgacgaatcggcgcagtacggtctcacgctgtttcagaaactgaacctgcaactgctgatcgtcacgccactgcagaagattcacatcatcgagccgttcgtttcgagcgtcggattcgttcagaacgacggtggacgcgcctccaagctgcgcaccctgtcgatcgaggagtaccgcgcgcacaaggcggagttcgagcaatga

SEQ ID NO: 49042 - DNA, 1185 bp, Burkholderia ubonensis
atgagttggacaactgccgtcgaactgcgtgcccgcctccagcgcctatgggaacgcggcgaatggctgcgaagcctcgtagacggtgccgaggggctattcccgctacgtctggcgatcaaaggcccaagctcgtccgagttggctgaacgcttcgacacggtacgcgcatggattacggaaattgccgcgacgccgcacatacgcatcgaatggcgagaaatcaatcatcgaattctcggcgtgcagcgtttgccacgagcagcctgggtcgacagtctggacgatgcgctcactgtcgccggcaagcaacgcgacgcagcgcggttcgagcggctgcttgaaatcacacgctcgcgccagccgaagctcatcgcatggcttgcgcagcgcccgatgcaggccctcgaattggccggcgattgggaacgactgctggcagtcgtcgattggctgcaagcacatccgcagccgggcatctatcttcgccaagccgaaatcgccggcgtcgacacgaaattcatcgaggcgcggcgcggcgtcctctcccaatggctcgatctcgtgctgccgtccgaggcgatcgacagcagccggaccggcgccgcccaattcgccgctcgctacgggttccgcgataagccgcctcgtattcgatttcgcgtgctcgatgagcggctcgccgtcctgcccggcatgggccgacccgacatcacactcgacgccgacagcttcgcgcgcctcgcactgccgtgccgccatgttttcgttacggaaaacgaaacaaattttctggcgtttcccgacgttccgcaggcgatcgtgctcttcggagcgggctacggctgggaagctctggagccggcgcgatggctcgcggactgtgcgctccactactggggcgacatcgacacgcacggctttgccattctcgaccaattgcgttgccgattccctcacgcgggatccttcttgatggaccgcgcgacactgatagcgcatgaagcattctggggagacgaaggcgatcaggtcatgcgtgatctgccgcgactcacggcgcaagagcgcgagctctttgacgacctgcgtgacaaccggattcgccgcggattacggctcgagcaggagcgcgtcgggttcgggtgggtcagagcggcgctagaggaacggtctttcgtttag

SEQ ID NO: 49043 - DNA, 1461 bp, Burkholderia ubonensis
atgttcctcgactaccctaccctcgatgcgctgcgcacgcgccatcccgcttggcgacttttgcgctccgaccacgcgccgctcgccgtcagcttcctgcaccgcgcgttcgtcgcgccgaacgtgcgcgaggtggcggctccgtttcttgccgaagcactcgaggacgagctttacgcgttgcgcgaacaactcggcgacggcgccttcccgaagcccgcgctcgagtatctgaacgactgggcgagtcctgaaaagggatggttgcgcaagttctatcgccaaggctccgatgaaccgcatttcgacctgacacccgccgcgggaaaagcgatagcgtggctcggcacgctgatggaacgaagctttgtcggcacggaatcccggctcctgacgcttttcgagttgctgcggcagatggccgaaggcagcgagacggacccggaaaggcgtcttgccgagctccacgcgcggcgcagccagatcgacgaagaaatcgctcgcgtggaagccggcgacgtccggctgctcgacgatgccgcgatcaaggaccgctttcagcaattcatgcagatggcgcgcgacctgctcacggatttccgtgaagtcgagcagaacttccgtctgctggaccggcatgtacgcgagcgaatcgcgctctgggaaggatcgaagggtgcgctcatcgaagaaatcatgggcgagcgcgacgcgatcgccgattcggaccagggcagcagctttcgggcgttctgggatttcctgatgtcgagccgccgccaggaggaactctccgaacggctcgagcacgtgcttgcgctcccggcgatcacggaaatgaagccggacgcgcgcacgcggcgcgtccactacgactggctggaagccggcgagcacacgcaacgcacggtcgctcagctctcgcagcagcttcgacgtttcctcgacgatcaagcgtggctcgaaaaccgccgcatcatggacattctgcgcggtatcgaaacgaaagcgcttgtgctgcgtgaagcgcccccgccgggctccgtcatggagatcgagaccgcgtccgctgacatcgagctgccaattgaacgcccgctttacgcgccggcgctgcgccctctcatcgccaacgtcgcaatcgagaccggcgatgcggacctcgatgcgtcggcactctacacgcagatcgtcgtcgatcgcgcgcgcctcgcaagccacatccgccgctgccttcaagatcggcggcaagtgacacttgccgaactggccgcttcgcagccgctcctgcatgggctcgctgaactcgtcgcctatttgcaactgagcgccgaagccggaacatttcgcgcgaccgtcgatgagaccgtctccgatacgatcgagtggcaggcaaacgatgccaacggagcagcaatcgtcaagcgcgcaacgatgacgcgggtgattttcacaaggtag

SEQ ID NO: 49044 - DNA, 651 bp, Burkholderia ubonensis
atggaagaacagcaaacctcgtcgcttgatcgaggtgacttgtcgacggttgccatcgcgctgctcaagggcgtggtttatcgtgatggaaacgagcgcctctgggccgcactgctcgaattgcagacacacgtgcgcgactacgtcgccgtgcttggcctcgagctcgtcgtggacgaggcggaaggctacgccttcgtaaagagccgcaccgagcctgacgccgaagtcgacggagaccaggccaagctgccccggctcgttgcacggcgtccactctcgttccccgtgagcctgctgctcgcgctgctgcgaaagaaactggcggaatgggatgccggcggcggcgacacgcggctcgtcctttcgcgcgaggacatcgtcgagctcgtacgcgtcttccttcccgcgagcacgaacgaggcgcgcctggtcgatcagatcgatacgcacgtgaacaagatcgtcgacctcggtttcctgcgccggatgaagaccgcgagcggaccgcccacattcgaggtgcgacgcattctcaaggcgttcgtcgatgcgcaatggctgctcgatttcgacgcgcggctcgcaagctatcaggcgcaccttcgagattcgacgaattcggaccaaacggagagtcgcgatgaatga

SEQ ID NO: 49045 - DNA, 3372 bp, Burkholderia ubonensis
atgaatgagccgcgcacgctcggcctcgattttgccgcggacgacaccctgacgggctttcgcctcgagcggctcgaggttttcaactggggcaccttcgacgaccgggcttgggtgctgcgggtcgacggccgcaacggcctgctgacaggagacatcggttccggcaagtcgacgctcgtcgacgccatcaccaccctcctcgtgcccgcgcagcgcatcgcctacaacaaggcggcaggcgcggacagcaaggaacgtacgctgcgctcgtatgtgctcggctactacaagtcggagcgcaacgaggtcacgggagcggccaagcccgtgagcctgcgcgaccacaacagctattcggtgattttgggcgtgtttcgcaacgccgggtacgacgccaccgtcacgctcgcgcaagtgttctggatgaaggacgcgcaggctcaacctgcgcgattcttcgtcagtgccgaacgagatctctcgatcgcgaccgacttctcgcgcttcggcaccgacattgcgcagctgcgcaagaagctgcgcgggctgggcgccgaaatcgaggacacgtttccgaaatacagcgcctggttccggcggcgcttcggaatcgaaaacgagcaagcgctcgagctctttcatcaaacggtatcgatgaagtcggtgggcaatctcaccgacttcgtacgcagccacatgctcgagccgttcgacgtcgcaccgcgcgtcgacgccctgattgctcacttcgacgatctgaatcgcgcgcacgaggcggtactgaaaaccaagcgccaagtggaactgctgacaccgctcgtcgacgactgcgaccgccacagcgagcaaggccacgttctcgaaggctggcgcgcgtgccgtgaagcattgaggccctacttcgccgggctcaagctcggcctcgtcgaacgccgcctccaattgctcgaagaggatcatgcgcgcgcgacctcgcgaaaggcgcgacacgaagaagcgcgcgaccaggcgcgccagcgcgtggacgatttgcgccgtgccgtggccgaacaaggcggcgatcgcatcgcgcagctcgatgtcgagatccgcgagcacgagcgagaaagcgtgcgtcgccgcgaacgcgcgcaacgctatgccgccatcgttacgctgttcggcgaaaccgaggctgcggatgaggctgcattcgcctcccagcgccaacgcctggccgagcagcgcagctcgctcgtcgacgacgaagcgcaacagcaaaatgcgataaccgaatggagcgtggcatttcgcgaaggaaaagcgcggcgtgatttgctggaggacgaaatcgcgagcctgaaagcccgacgcaacaacatcccgaaggaacaggtcgcgatgcgggcgagcctgtgctcggcgctcggcctggaggaagacgccctgccgttcgcgggcgaactcattcaggtgcgcgaggatgcgcgtgattgggagggcgccgccgagcgcgtcctgcgcaacttcggcctgtcgctgctcgtgcccgacgagcactatgcgaacgtcgcggcgtgggtcgatcgcactcatcttcgggggcggctcgtctactttcgcgtgcgctccgaacgcagcgcgcgtgtagccgaggccatcgagctgcaccgccactcgctcgcgcacaagctcgccatcaagcccgactcgcagttctatggctggctcgagcgcgaaatcggccgccgtttcgactatgcctgctgcgatacgcaggagcagtttcggcgcgagacgcgcgcgatcacgcgtgcgggccaggcgaaagcgcctggggagcgccacgaaaaagacgaccgccacgcgctcgacgatcgcagccgctacgtgctcggttggagcaatacggcaaaaatatccgccctcgcagcacaacggcaagcgctcgaagctcgccttggcgagatcgggcaaaggctcggagaggcccaacacgagcacaccaaggtgcgtgagcaactcgaagcacttgcgcgtgccggcgagttcgccgagtttcgggaaatcgattggtcgagctgcgctgccgcgatcgcacgtcttgccgacgaaaaagcgcgactcgaatcggcaagcgacgccctcgcggagctaacggctcaattggactcggcgcaagcgtcgttgaaagagagtgaagcggcgatgtcggaaaccgactcggaactgggcggcatcctggccaagcgggaggcggcacaagcgttgcgcgaagagacgcacgcgctcgttgcagaagtggatgccgaactcgccgaacgaatcgaggccctgcgagcggagattctcggcgaacaccagctttccgtcgagtcatgcgacaaccgcgagcgggacgtgcgagaggcgttgacaacccgtatcgacaacgaaacgaaatcactcggccgcctggccgaaagaatcgtcaaggcaatggcggctttcaaggaagcctacaagctcgaaacggccgacttcgatgcgagcctcgccgcgaactcagagtaccgtgacatgctcgcgcggctgcaggcggacgatttgccgcgcttcgaaacgcgtttcaaggagctgctcaacgtcaacacgatcaacgagatcgccaactttcacgcccagcttgcgcgcgaacgggcgacgatcaaggaacgcatcgaacgcatcaacgaatcgctgcgacaaatcgactacaacgcgggtcgttacatcgtcctcgagagtcagcccagccccgacgcggagatccgcgaattccagagcgacctgcgcgcttgcaccgagggcgaactcaccggctcggacgatagccaatactcggaggccaagttcctgcaagtcaaacggatcatcgaccgcttccgcggccgcgaagggttgaccgagcaggaccggcgctggcgagccaaagtgaccgacgtgcgcaactggtttctgttcgccgccagcgagcgttggcgcgaggacgacagcgaatacgagcactactcggactccggcggtaaatcgggcggccagaaggaaaagctcgcctatacgatccttgccgcgagcctcgcctatcagttcggcctcgaatggggcgccgtgcgttcccgatcgttccgcttcgtcgtcatcgacgaagcatttggccgaggctccgacgaatcggcgcagtacggtctcacgctgtttcagaaactgaacctgcaactgctgatcgtcacgccactgcagaagattcacatcatcgagccgttcgtttcgagcgtcggattcgttcagaacgacggtggacgcgcctccaagctgcgcaccctgtcgatcgaggagtaccgcgcgcacaaggcggagttcgagcaatga

SEQ ID NO: 49046 - DNA, 1185 bp, Burkholderia ubonensis
atgagttggacaactgccgtcgaactgcgtgcccgcctccagcgcctatgggaacgcggcgaatggctgcgaagcctcgtagacggtgccgaggggctattcccgctacgtctggcgatcaaaggcccaagctcgtccgagttggctgaacgcttcgacacggtacgcgcatggattacggaaattgccgcgacgccgcgcatacgcatcgaatggcgagaaatcaatcatcgaattctcggccagcagcgtttgccacgagcagcttgggtcgacagtctggacgatgcgctcactgtcgccggcaagcaacgcgacgcagcgcggttcgagcggctgcttgaaatcacacgctcgcgccagccgaagctcatcgcatggcttgcgcagcgcccgatgcaggccctcgaattggccggcgattgggaacgactgctggcagtcgtcgattggctgcaagcacatccgcagccgggcatctatcttcgccaagccgaaatcgccggcgtcgacacgaaattcatcgaggcgcggcgcggcgtcctctcccaatggctcgatctcgtgctgccgtccgaggcgatcgacagcagccggaccggcgccgcccaattcgccgctcgctacgggttccgcgataagccgcctcgtattcgatttcgcgtgctcgatgagcggctcgccgtcctgcccggcatgggccgacccgacatcacactcgacgccgacagcttcgcgcgcctcgcactgccgtgccgccatgttttcgttacggaaaacgaaacaaattttctggcgtttcccgacgttccgcaggcgatcgtgctcttcggagcgggctacggctgggaagctctggagccggcgcgatggctcgcggactgtgcgctccactactggggcgacatcgacacgcacggctttgccattctcgaccaattgcgttgccgattccctcacgcgggatccttcttgatggaccgcgcgacactgatagcgcatgaagcattctggggagacgaaggcgatcaggtcatgcgtgatctgccgcgactcacggcgcaagagcgcgagctctttgacgacctgcgtgacaaccggattcgccgcggattacggctcgagcaggagcgcgtcgggttcgggtgggtcagagcggcgctagaggaacggtctttcgtttag

SEQ ID NO: 49047 - DNA, 1461 bp, Burkholderia ubonensis
atgttcctcgactaccctaccctcgacgcgctgcgcacgcgccatcccgcttggcgacttttgcgctccgaccacgcgccgctcgccgtcagcttcctgcaccgcgcgttcgtcgcgccgaacgtgcgcgaggtggcggctccgtttcttgccgaagcactcgaggacgagctttacgcgttgcgcgaacaactcggcgacggcgccttcccgaagcccgcgctcgactatctgaacgactgggcgagtcctgaaaagggatggttgcgcaagttctatcgccaaggctccgatgaaccgcatttcgacctgacacccgccgcaggaaaagcgatcgcgtggctcggcacgctgatggaacgaagctttgtcggcacggaatcccggctcctgacgcttttcgagttgctgcggcagatggccgaaggcagcgagacggacccggaaaggcgtcttgccgagctccacgcgcggcgcagccagattgacgaagaaatcgctcgcgtggaggccggtgacgttcggctgctcgacgatgccgcgatcaaggaccgctttcagcaattcatgcagatggcgcgcgacctgctcacggatttccgtgaagtcgagcaaaacttccgtctgctggaccggcatgtacgcgagcgaatcgcgctctgggaaggatcgaagggtgcgctcatcgaagaaatcatgggcgaacgcgacgcgatcgccgattcggaccagggcagcagctttcgggcgttctgggatttcctgatgtcgagccgccgccaggaggaactctccgaacggctcgagcacgtgcttgcgctcccggcgatcacggaaatgaagccggacgcgcgcacgcggcgcgtccactatgactggctggaagccggcgagcacacgcaacgcacggtcgctcagctctcgcagcagcttcgacgtttcctcgacgatcaagcgtggctcgaaaaccgccgcatcatggacattctgcgcggtatcgaaacgaaagcgcttgtgctgcgtgaagcgcccccgccgggctccgtcatggagatcgagaccgcgtccgctgacatcgagctgccaattgaacgcccgctttacgcccctgcgctgcgccctctcatcgccaacgtcgcaatcgagaccggcgatgcggacctcgatgcgtcggcactctacacgcagctcgtcgtcgatcgcgcgcgcctcgcaagccacatccgccgctgccttcaagatcggctgcaagtgacacttgccgaactggccgcttcgcagccgctcctgcatgggctcgctgaactcgtcgcctatttgcaactgagcgccgaagccggaacatttcgcgcgaccgtcgatgagaccgtctccgatacgatcgagtggcaggcaaacgatgccaacggagcagcaatcgtcaagcgcgcaacgatgccgcgggtgattttcacaaggtag

SEQ ID NO: 49048 - DNA, 651 bp, Burkholderia ubonensis
atggaagaacagcaaaccccgtcgcttgatcgaggtgacttgtcgacggttgccgtcgcgctgctcaagggcgtggtttatcgtgatggaaacgagcgcctctgggccgcactgctcgaattgcagacacacgtgcgcgactacgtcgccgtgcttggcctcgagctcgtcgtggacgaggcggaaggctacgccttcgtaaagagccgcaccgagcctgacgccgaagtcgacggagaccaggccaagctgccccggctcgttgcacggcgtccactctcgttccccgtgagcctgctgctcgcgctgctgcgaaagaaactggcggaatgggatgccggcggcggcgacacgcggctcgtcctttcgcgcgaggacatcgtcgagctcgtacgcgtcttccttcccgcgagcacgaacgaggcgcgcctggtcgatcagatcgatacgcacgtgaacaagatcgtcgacctcggtttcctgcgccggatgaagaccgcgagcggaccgcccacattcgaggtgcgacgcattctcaaggcgttcgtcgatgcgcaatggctgctcgatttcgacgcgcggctcgcaagctatcaggcgcaccttcgagattcgacgaattcggaccaaacggagagtcgcgatgaatga

SEQ ID NO: 49049 - DNA, 3372 bp, Burkholderia ubonensis
atgaatgagccgcgcacgctcggcctcgattttgccgcggacgacaccctgacgggctttcgcctcgagcggctcgaggttttcaactggggcaccttcgacgaacgggtctgggtgctgcgggtcgacggccgcaacggcctgctgacaggagacatcggttccggcaagtcgacgctcgtcgacgccatcaccaccctcctcgtgcccgcgcagcgcatcgcctacaacaaggcggcaggcgcggacagcaaggaacgtacgctgcgctcgtatgtgctcggctactacaagtcggagcgcaacgaggtcacgggagcggccaagcccgtgagcctgcgcgaccacaacagctattcggtgattttgggcgtgtttcgcaacgccgggtacgacgccaccgtcacgctcgcgcaagtgttctggatgaaggacgcgcaggctcaacctgcgcgattcttcgtcagtgccgaacgagatctctcgatcgcgaccgacttctcgcgcttcggcaccgacattgcgcagctgcgcaagaagctgcgcgggctgggcgccgaaatcgaggacacgtttccgaaatacagcgcctggttccggcggcgcttcggaatcgaaaacgagcaagcgctcgagctctttcatcaaacggtatcgatgaagtcggtgggcaatctcaccgacttcgtacgcagccacatgctcgagccgttcgacgtcgcaccgcgcgtcgacgccctgattgctcacttcgacgatctgaatcgcgcgcacgaggcggtactgaaaaccaagcgccaagtggaactgctgacaccgctcgtcgacgactgcgaccgccacagcgagcaaggccacgttctcgaaggctggcgcgcgtgccgtgaagcattgaggccctacttcgccgggctcaagctcggcctcgtcgaacgccgcctccaattgctcgaagaggatcatgcgcgcacgacctcgcgaaaggcgcgacacgaagaagcgcgcgaccaggcgcgccagcgcgtggacgatttgcgccgtgccgtggccgaacaaggcggcgatcgcatcgcgcagctcgatgtcgagatccgcgagcacgagcgagaaagcgtgcgtcgccgcgaacgggcgcaacgctatgccgccatcgttacgctgttcggcgaaaccgaggccgcggatgaggctgcattcgcctcccagcgccaacgcctggccgagcagcgcagctcactcgttgacgacgaagcgcaacagcaaaatgcgataaccgaatggagcgtggcatttcgcgaaggcaaagcgcggcgtgatttgctggaggacgaaatcgcgagcctgaaagctcgacgcaacaacatcccgaaggaacaggtcgcgatgcgggcgagcctgtgctcagcgctcggcctggaggaagacgccctgccgttcgcgggcgaactcattcaggtgcgcgaggatgcgcgtgattgggagggcgccgccgagcgcgtcctgcgcaacttcggcctgtcgctgctcgtgcccgacgagcactatgcgaacgtcgcggcgtgggtcgatcgcactcatcttcgggggcggctcgtctactttcgcgtgcgctccgaacgcaccgcgcgtgtagccgaggccatcgagctgcaccgccactcgctcgcgcacaagctcgccatcaagcccgactcgcagttctatggctggctcgagcgcgaaatcggccgccgtttcgactatgcctgctgcgatacgcaggagcagtttcggcgcgagacgcgcgcgatcacgcgtgcgggccaggcgaaagcgcctggggagcgccacgaaaaagacgaccgccacgcgctcgacgatcgcagccgctacgtgctcggttggagcaatacggcaaaaatatccgccctcgcagcacaacggcaagcgctcgaagctcgccttggcgagatcgggcaaaggctcggagaggcccaacacgagcacaccaaggtgcgtgagcaactcgaagcacttgcgcgtgccggcgagttcgccgagtttcgggaaatcgattggtcgagctgcgctgccgcgatcgcacgtcttgcggacgaaaaggcgcgactcgaatcggcaagcgacgccctcgcggagctaacggctcaattggactcggcgcaagcgtcgttgaaagagcgtgaagcggcgatgtcggaaaccgactcggaactgggcggcatcctggccaagcgggaggcggcacaagcgttgcgcgaagagacgcacgcgctcgttgcagaagtggatgccgaactcgccgaacgaatcgaggccctgcgagccgagattctcggcgaacaccagctttccgtcgagtcatgcgacaaccgcgagcgggacgtgcgagaggcgttgacaacccgtatcgacaacgaaacgaaatcactcggccgcctggccgaaagaatcgtcaaggcaatggcggctttcaaggaagcctacaagctcgaaacggccgacttcgatgcgagcctcgccgcgaactcagagtaccgtgacatgctcgcgcggctgcaggcggacgatttgccgcgcttcgaaacgcgtttcaaggagctgctcaacgtcaacacgatcaacgagatcgccaactttcacgcccagcttgcgcgcgaacgggcgacgatcaaggaacgcatcgaacgcatcaacgaatcgctgcgacaaatcgactacaacgcgggtcgttacatcgtcctcgagagtcagcccagccccgacgcggagatccgcgaattccagagcgacctgcgcgcttgcaccgagggcgaactcaccggctcggacgatagccaatactcggaggccaagttcctgcaagtcaaacggatcatcgaccgcttccgcggccgcgaagggttgaccgagcaggaccggcgctggcgagccaaagtgaccgacgtgcgcaactggtttctgttcgccgccagcgagcgttggcgcgaggacgacagcgaatacgagcactactcggactccggcggtaaatcgggcggccagaaggaaaagctcgcctatacgatccttgccgcgagcctcgcctatcagttcggcctcgaatggggcgccgtgcgttcccgatcgttccgcttcgtcgtcatcgacgaagcatttggccgaggctccgacgaatcggcgcagtacggtctcacgctgtttcagaaactgaacctgcaactgctgatcgtcacgccactgcagaagattcacatcatcgagccgttcgtttcgagcgtcggattcgttcagaacgacggtggacgcgcctccaagctgcgcaccctgtcgatcgaggagtaccgcgcgcacaaggcggagttcgagcaatga

SEQ ID NO: 49050 - DNA, 1185 bp, Burkholderia ubonensis
atgagttggacaactgccgtcgaactgcgtgcccgcctccagcgcctatgggaacgcggcgaatggctgcgaagcctcgtagacggtgccgaggggctattcccgctacgtctggcgatcaaaggcccaagctcgtccgagttggctgaacgcttcgacacggtacgcgcatggattacggaaattgccgcgacgccgcgcatacgcatcgaatggcgagaaatcaatcatcgaattctcggccagcagcgtttgccacgagcagcttgggtcgacagtctggacgatgcgctcactgtcgccggcaagcaacgcgacgcagcgcggttcgagcggctgcttgaaatcacacgctcgcgccagccgaagctcatcgcatggcttgcgcagcgcccgatgcaggccctcgaattggccggcgattgggaacgactgctggcagtcgtcgattggctgcaagcacatccgcagccgggcatctatcttcgccaagccgaaatcgccggagtcgacacgaaattcatcgaggcgcggcgcggcgtcctctcccaatggctcgatctcgtgctgccgtccgaggcgatcgacagcagtcggaccggcgccgcccaattcgccgctcgctacgggttccgcgataagccgcctcgtattcgatttcgcgtgctcgatgagcggctcgccgtcctgcccggcatgggccgacccgacatcacactcgacgccgacagcttcgcgcgcctcgcactgccgtgccgccatgttttcgttacggaaaacgaaacaaattttctggcgtttcccgacgttccgcaggcgatcgtgctcttcggagcgggctacggctgggaagctctggagccggcacaatggctcacggactgtgcgctccactactggggcgacatcgacacgcacggctttgccattctcgaccaattgcgttgccgattccctcacgcgggatccttcttgatggaccgcgcgacactgatagcacatgaagcattctggggagacgaaggcgatcaggtcatgcgtgatctgccgcgactcacggcgcaagagcgcgagctctttgacgacctgcgtgacaaccggattcgccgcggattacggctcgagcaggagcgcgtcgggttcgggtgggtcagagcggcgctagaggaacggtctttcgtttag

SEQ ID NO: 49051 - DNA, 1461 bp, Burkholderia ubonensis; identical to SEQ ID NO: 48983

SEQ ID NO: 49052 - DNA, 651 bp, Burkholderia ubonensis; identical to SEQ ID NO: 48984

SEQ ID NO: 49053 - DNA, 3372 bp, Burkholderia ubonensis; identical to SEQ ID NO: 48985

SEQ ID NO: 49054 - DNA, 1185 bp, Burkholderia ubonensis; identical to SEQ ID NO: 48938

SEQ ID NO: 49055 - DNA, 1461 bp, Burkholderia ubonensis; identical to SEQ ID NO: 49043

SEQ ID NO: 49056 - DNA, 651 bp, Burkholderia ubonensis; identical to SEQ ID NO: 49044

SEQ ID NO: 49057 - DNA, 3372 bp, Burkholderia ubonensis
atgaatgagccgcgcacgctcggcctcgattttgccgcggacgacaccctgacgggctttcgcctcgagcggctcgaggttttcaactggggcaccttcgacgaccgggcttgggtgctgcgggtcgacggccgcaacggcctgctgacaggagacatcggttccggcaagtcgacgctcgtcgacgccatcaccaccctcctcgtgcccgcgcagcgcatcgcctacaacaaggcggcaggcgcggacagcaaggaacgtacgctgcgctcgtatgtgctcggctactacaagtcggagcgcaacgaggtcacgggagcggccaagcccgtgagcctgcgcgaccacaacagctattcggtgattttgggcgtgtttcgcaacgccgggtacgacgccaccgtcacgctcgcgcaagtgttctggatgaaggacgcgcaggctcaacctgcgcgattcttcgtcagtgccgaacgagatctctcgatcgcgaccgacttctcgcgcttcggcaccgacattgcgcagctgcgcaagaagctgcgcgggctgggcgccgaaatcgaggacacgtttccgaaatacagcgcctggttccggcggcgcttcggaatcgaaaacgagcaagcgctcgagctctttcatcaaacggtatcgatgaagtcggtgggcaatctcaccgacttcgtacgcagccacatgctcgagccgttcgacgtcgcaccgcgcgtcgacgccctgattgctcacttcgacgatctgaatcgcgcgcacgaggcggtactgaaaaccaagcgccaagtggaactgctgacaccgctcgtcgacgactgcgaccgccacagcgagcaaggccacgttctcgaaggctggcgcgcgtgccgtgaagcattgaggccctacttcgccgggctcaagctcggcctcgtcgaacgccgcctccaattgctcgaagaggatcatgcgcgcacgacctcgcgaaaggcgcgacacgaagaagcgcgcgaccaggcgcgccagcgcgtggacgatttgcgccgtgccgtggccgaacaaggcggcgatcgcatcgcgcagctcgatgtcgagatccgcgagcacgagcgagaaagcgtgcgtcgccgcgaacgcgcgcaacgctatgccgccatcgttacgctgttcggcgaaaccgaggctgcggatgaggctgcattcgcctcccagcgccaacgcctggccgagcagcgcagctcactcgttgacgacgaagcgcaacagcaaaatgcgataaccgaatggagcgtggcatttcgcgaaggcaaagcgcggcgtgatttgctggaggacgaaatcgcgagcctgaaagcccgacgcaacaacatcccgaaggaacaggtcgcgatgcgggcgagcctgtgctcggcgctcggcctggaggaagacgccctgccgttcgcgggcgaactcattcaggtgcgcgaggatgcgcgtgattgggagggcgccgccgagcgcgtcctgcgcaacttcggcctgtcgctgctcgtgcccgacgagcactatgcgaacgtcgcggcgtgggtcgatcgcactcatcttcgggggcggctcgtctactttcgcgtgcgctccgaacgcaccgcgcgtgtagccgaggccatcgagctgcaccgccactcgctcgcgcacaagctcgccatcaagcccgactcgcagttctatggctggctcgagcgcgaaatcggccgccgtttcgactatgcctgctgcgatacgcaggagcagtttcggcgcgagacgcgcgcgatcacgcgtgcgggccaggcgaaagcgcctggggagcgccacgaaaaagacgaccgccacgcgctcgacgatcgcagccgctacgtgctcggttggagcaatacggcaaaaatatccgccctcgcagcacaacggcaagcgctcgaagctcgccttggcgagatcgggcaaaggctcggagaggcccaacacgagcacaccaaggtgcgtgagcaactcgaagcacttgcgcgtgccggcgagttcgccgagtttcgggaaatcgattggtcgagctgcgctgccgcgatcgcacgtcttgccgacgaaaaagcgcgactcgaatcggcaagcgacgccctcgcggagctaacggctcaattggactcggcgcaagcgtcgttgaaagagagtgaagcggcgatgtcggagaccgactcggaactgggcggcatcctggccaagcgggaggcggcacaagcgttgcgcgaagagacgcacgcgctcgttgcagaagtggatgccgaactcgccgaacgaatcgaggccctgcgagccgagattctcggcgaacaccagctttccgtcgagtcatgcgacaaccgcgagcgggacgtgcgagaggcgttgacaacccgtatcgacaacgaaacgaaatcactcggccgcctggccgaaagaatcgtcaaggcaatggcggctttcaaggaagcctacaagctcgaaacggccgacttcgatgcgagcctcgccgcgaactcagagtaccgtgacatgctcgcgcggctgcaggcggacgatttgccgcgcttcgaaacgcgtttcaaggagctgctcaacgtcaacacgatcaacgagatcgccaactttcacgcccagcttgcgcgcgaacgggcgacgatcaaggaacgcatcgaacgcatcaacgaatcgctgcgacaaatcgactacaacgcgggtcgttacatcgtcctcgagagtcagcccagccccgacgcggagatccgcgaattccagagcgacctgcgcgcttgcaccgagggcgaactcaccggctcggacgatagccaatactcggaggccaagttcctgcaagtcaaacggatcatcgaccgcttccgcggccgcgaagggttgaccgagcaggaccggcgctggcgagccaaagtgaccgacgtgcgcaactggtttctgttcgccgccagcgagcgttggcgcgaggacgacagcgaatacgagcactactcggactccggcggtaaatcgggcggccagaaggaaaagctcgcctatacgatccttgccgcgagcctcgcctatcagttcggcctcgaatggggcgccgtgcgttcccgatcgttccgcttcgtcgtcatcgacgaagcatttggccgaggctccgacgaatcggcgcagtacggtctcacgctgtttcagaaactgaacctgcaactgctgatcgtcacgccactgcagaagattcacatcatcgagccgttcgtttcgagcgtcggattcgttcagaacgacggtggacgcgcctccaagctgcgcaccctgtcgatcgaggagtaccgcgcgcacaaggcggagttcgagcaatga

SEQ ID NO: 49058 - DNA, 1185 bp, Burkholderia ubonensis
atgagttggacaactgccgtcgaactgcgtgcccgcctccagcgcctttgggaacgcggcgaatggctgcgaagcctcgtagacggtgccgaggggctattcccgctacgtctggcgatcaaaggcccaagctcgtccgagttggctgaacgcttcgacacggtacgcgcatggattacggaaattgccgcgacgccgcgcatacgcatcgaatggcgagaaatcaatcatcgaattctcggccagcagcgtttgccacgagcagcttgggtcgacagtctggacgatgcgctcactgtcgccggcaagcaacgcgacgcagcgcggttcgagcggctgcttgaaatcacacgctcgcgccagccgaagctcatcgcatggcttgcgcagcgcccgatgcaggccctcgaattggccggcgattgggaacgactgctggcagtcgtcgattggctgcaagcacatccgcagccgggcatctatcttcgccaagccgaaatcgccggcgtcgacacgaaattcatcgaggcgcggcgcggcgtcctctcccaatggctcgatctcgtgctgccgtccgaggcgatcgacagcagccggaccggcgccgcccaattcgccgctcgctacgggttccgcgataagccgcctcgtattcgatttcgcgtgctcgatgagcggctcgccgtcctgcccggcatgggccgacccgacatcacactcgacgccgacagcttcgcgcgcctcgcactgccgtgccgccatgttttcgttacggaaaacgaaacaaattttctggcgtttcccgacgttccgcaggcgatcgtgctcttcggagcgggctacggctgggaagctctggagccggcacaatggctcgcggactgtgcgctccactactggggcgacatcgacacgcacggctttgccattctcgaccaattgcgttgccgattccctcacgcgggatccttcttgatggaccgcgcgacactgatggcgcatgaagcattctggggagacgaaggcgatcaggtcatgcgtgatctgccgcgactcacggcgcaagagcgcgagctctttgacgacctgcgtgacaaccggattcgccgaggattacggctcgagcaggagcgcgtcgggttcgggtgggtcagagcggcgctagaggaacggtctttcgtttag

SEQ ID NO: 49059 - DNA, 1461 bp, Burkholderia ubonensis
atgttcctcgactaccctaccctcgacgcgctgcgcacgcgccatcccgcttggcgacttttgcgctccgaccacgcgccgctcgccgtcagcttcctgcaccgcgcgttcgtcgcgccgaacgtgcgcgaggtggcggctccgtttcttgccgaagcactcgaggacgagctttacgcgttgcgcgaacaactcggcgacggcgccttcccgaagcccgcgctcgactatctgaacgactgggcgagtcctgaaaagggatggttgcgcaagttctatcgccaaggctccgatgaaccgcatttcgacctgacacccgccgcaggaaaagcgatcgcgtggctcggcacgctgatggaacgaagctttgtcggcacggaatcccggctcctgacgcttttcgagttgctgcggcagatggccgaaggcagcgagacggacccggaaaggcgtcttgccgagctccacgcgcggcgcagccagattgacgaagaaatcgctcgcgtggaggccggtgacgttcggctgctcgacgatgccgcgatcaaggaccgctttcagcaattcatgcagatggcgcgcgacctgctcacggatttccgtgaagtcgagcaaaacttccgtctgctggaccggcacgtacgcgagcgaatcgcgctctgggaaggatcgaagggtgcgctcatcgaagaaatcatgggcgagcgcgacgcgatcgccgattcggaccagggcagcagctttcgggcgttctgggatttcctgatgtcgagccgccgccaggaggaactctccgaacggctcgagcacgtgcttgcgctcccggcgatcacggaaatgaagccggacgcgcgcacgcggcgcgtccactacgactggctggaagccggcgagcacacgcaacgcacggtcgctcagctctcgcagcagcttcgacgtttcctcgacgatcaagcgtggctcgaaaaccgccgcatcatggacattctgcgcggtatcgaaacgaaagcgcttgtgctgcgtgaagcgcccccgccgggctccgtcatggagatcgagaccgcgtccgctgacatcgagctgccaattgaacgcccgctttacgcgccggcgctgcgccctctcatcgccaacgtcgcaatcgagaccggcgatgcggacctcgatgcgtcggcactctacacgcagatcgtcgtcgatcgcgcgcgcctcgcaagccacatccgccgctgccttcaagatcggcggcaagtgacacttgccgaactggccgcttcgcagccgctcctgcatgggctcgctgaactcgtcgcctatttgcaactgagcgccgaagccggaacatttcgcgcgaccgtcgatgagaccgtctccgatacgatcgagtggcaggcaaacgatgccaacggagcagcaatcgtcaagcgcgcaacgatgccgcgggtgattttcacaaggtag

SEQ ID NO: 49060 - DNA, 651 bp, Burkholderia ubonensis; identical to SEQ ID NO: 48968

SEQ ID NO: 49061 - DNA, 3372 bp, Burkholderia ubonensis
atgaatgagccgcgcacgctcggcctcgattttgccgcggacgacaccctgacgggctttcgcctcgagcggctcgaggttttcaactggggcaccttcgacgaccgggcttgggtgctgcgggtcgatggccgcaacggcctgctgacaggagacatcggttccggcaagtcgacgctcgtcgacgccattaccaccctcctcgtgcccgcgcagcgcatcgcctacaacaaggcggcaggcgcggacagcaaggaacgtacgctgcgctcgtatgtgctcggctactacaagtcggagcgcaacgaggtcacgggaacggccaagcccgtgagcctgcgcgaccataacagctattcggtgattttgggcgtgtttcgcaacgccgggtacgacgccaccgtcacgctcgcgcaggtgttctggatgaaggacgcgcaggctcaacctgcgcgattcttcgtcagtgccgaacgagatctctcgatcgcgaccgatttctcgcgcttcggcaccgatattgcacagctgcgcaagaagctgcgcgggctgggcgccgaaatcgaggacacgtttccgaaatacagcgcctggttccggcggcgcttcggaatcgaaaacgagcaagcgctcgagctctttcatcaaacggtatcgatgaagtcggtgggcaatctcaccgacttcgtacgcagccacatgctcgagccgttcgacgtcgcaccgcgcgtcgacgccctgattgctcacttcgacgatctgaaccgcgcgcacgaggcggtactgaaaaccaagcgccaagtggaactgctgacaccgctcgtcgacgactgcgaccgccacagcgcgcaaggccgcgttctcgaaggctggcgcgcgtgccgtgaagcattgaggccctacttcgccgggctcaagctcggcctcgtcgaacgccgcctccaattgctcgaagaggatcatgcgcgcgcgacctcgcgaaaggcgcgacacgaagaagcgcgcgaccaggcacgccagcgcgtggacgatttgcgccgtgccgtggccgaacaaggcggcgatcgcatcgcgcagctcgatgtcgagatccgcgagcacgagcgagaaagcgtgcgtcgccgcgaacgggcgcaacgctatgccgccatcgttacgctgttcggcgaaaccgaggccgcggatgaggctgcattcgcctcccagcgccaacgcctggctgagcagcgcagctcactcgttgacgacgaagcgcaacagcaaaatgcgataaccgaatggagcgtggcatttcgcgaaggcaaagcgcggcgtgatttgctggaggacgaaatcgcgagcctgaaagctcgacgcaacaacatcccgaaggaacaggtcgcgatgcgggcgagcctgtgctcggcgctcggcctggaggaagacgccctgccgttcgcgggcgaactcattcaggtgcgcgaggatgcgcgtgattgggagggcgccgccgagcgcgtcctgcgcaacttcggcctgtcgctgctcgtgcccgacgagcactatgcgaacgtcgcggcgtgggtcgatcgcactcatctccgggggaggctagtctactttcgcgtgcgctccgaacgcaccgcgcgtgcagccgaggccatcgagctgcaccgccactcgctcgcgcacaagctcgccatcaagcccgactcgcagttctatggctggctcgagcgcgaaatcgtccgccgtttcgactatgcctgctgcgatacgcaggagcagtttcggcgcgagacgcgcgcgatcacgcgtgcgggccaggcgaaagcgcctggggagcgccacgaaaaagacgaccgccacgcgctcgacgatcgcagccgctacgtgctcggttggagcaatacggcaaaaatatccgccctcgcagcacaacggcaagcgctcgaagctcgccttggcgagatcgggcaaaggctcggagaggcccaacacgagcacaccaaggtgcgtgagcaactcgaagcacttgcgcgtgccggcgagttcgccgagtttcgggaaatcgattggtcgagctgcgctgccgcgatcgcacgtcttgcggacgaaaaggcgcgactcgaatcggcaagcgacgccctcgcggagctaacggctcaattggactcggcgcaagcgtcgttgaaagagagtgaagcggcgatgtcggagaccgactcggaactgggcggcatcctggccaagcgggaggcggcacaagcgttgcgcgaagagacgcacgcgctcgttgcagaagtggatgccgaactcgccgaacgaatcgaggccctgcgagccgagattctcggcgaacaccagctttccgtcgagtcatgcgacaaccgcgagcgggacgtgcgagaggcgttgacaacccgtatcgacaacgaaacgaaatcactcggccgcctggccgaaagaatcgtcaaggcaatggcggctttcaaggaagcctacaagctcgaaacggccgacttcgatgcgagcctcgccgcgaactcagagtaccgtgacatgctcgcgcggctgcaggcggacgatttgccgcgcttcgaaacgcgtttcaaggagctgctcaacgtcaacacgatcaacgagatcgccaactttcacgcccagcttgcgcgcgaacgggcgacgatcaaggaacgcatcgaacgcatcaacgaatcgctgcgacaaatcgactacaacgcgggtcgttacatcgtcctcgagagtcagcccagccccgacgcggagatccgcgaattccagagcgacctgcgcgcttgcaccgagggcgaactcaccggctcggacgatagccaatactcggaggccaagttcctgcaagtcaaacggatcatcgaccgcttccgcggccgcgaagggttgaccgagcaggaccggcgctggcgcgccaaggtgaccgacgtgcgcaactggtttctgttcgccgccagcgagcgttggcgcgaggacgacagcgaatacgagcactactcggactccggcggtaaatcgggcggccagaaggaaaagctcgcctatacgatccttgccgcgagcctcgcctatcagttcggcctcgaatggggcgccgtgcgttcccggtcgttccgcttcgtcgtcatcgacgaagcatttggccgaggctccgacgaatcggcgcagtacggtctcactctgtttcagaaactgaacctgcaactgctgatcgtcacgccactgcagaagattcacatcatcgagccgttcgtttcgagcgtcggattcgttcagaacgacggtggacgcgcctccaagctgcgcaccctgtcgatcgaggagtaccgcgcgcacaaggcggagttcgagcaatga

SEQ ID NO: 49062 - DNA, 1185 bp, Burkholderia ubonensis
atgagttggacaactgccgtcgaactgcgtgcccgcctccagcgcctatgggaacgcggcgaatggctgcgaagcctcgtagacggtgccgaggggctattcccgctacgtctggcgatcaaaggcccaagctcgtccgagttggctgaacgcttcgacacggtacgcgcatggattacggaaattgccgcgacgccgcgcatacgcatcgaatggcgagaaatcaatcatcgaattctcggccagcagcgtttgccacgagcagcttgggtcgacagtctggacgatgcgctcactgtcgccggcaagcaacgcgacgcagcgcggttcgagcggctgcttgaaatcacacgctcgcgccagccgaagctcatcgcatggcttgcgcagcgcccgatgcaggccctcgaattggccggcgattgggaacgactgctggcagtcgtcgattggctgcaagcacatccgcagccgggcatctatcttcgccaagccgaaatcgccggagtcgacacgaaattcatcgaggcgcggcgcggcgtcctctcccaatggctcgatctcgtgctgccgtccgaggcgatcgacagcagccggaccggcgccgcccaattcgccgctcgctacgggttccgcgataagccgcctcgtattcgatttcgcgtgctcgatgagcggctcgccgtcctgcccggcatgggccgacccgacatcacactcgacgccgacagcttcgcgcgcctcgcactgccgtgccgccatgttttcgttacggaaaacgaaacaaattttctggcgtttcccgacgttccgcaggcgatcgtgctcttcggagcgggctacggctgggaagctctggagccggcacaatggctcacggactgtgcgctccactactggggcgacatcgacacgcacggctttgccattctcgaccaattgcgttgccgattccctcacgcgggatccttcttgatggaccgcgcgacactgatagcgcatgaagcattctggggagacgaaggcgatcaggtcatgcgtgatctgccgcgactcacggcgcaagagcgcgagctctttgacgacctgcgtgacaaccggattcgccgcggattacggctcgagcaggagcgcgtcgggttcgggtgggtcagagcggcgctagaggaacggtctttcgtttag

SEQ ID NO: 49063 - DNA, 1461 bp, Burkholderia ubonensis
atgttccttgactaccctaccctcgatgcgctgcgcacgcgccatcccgcttggcgacttttgcgctccgaccacgcgccgctcgccgtcagcttcctgcaccgcgcgttcgtcgccccgaacgtgcgcgaggtggcggctccgtttcttgccgaagcactcgaggacgagctttacgcgttgcgcgaacaactcggcgacggcgccttcccgaagcccgcgctcgagtatctgaacgactgggcgagtcctgaaaagggatggttgcgcaagttctatcgccagggctccgatgaaccgcatttcgacctgacacccgccgcgggaaaagcgatcgcgtggctcggcacgctgatggaacgaagctttgtcggcacggaatcccggctcctgacgcttttcgagttgctgcggcagatggccgaaggcagcgagacggacccggaaaggcgtcttgccgagctccacgcgcggcgcagccagatcgacgaagaaatcgctcgcgtggaggccggtgacgttcggctgctcgacgatgccgcgatcaaggaccgctttcagcaattcatgcagatggcgcgcgacctgctcacggatttccgtgaagtcgagcaaaacttccgtctgctggaccggcatgtacgcgagcgaatcgcgctctgggaaggatcgaagggtgcgctcatcgaagaaatcatgggcgagcgcgacgcgatcgccgattcggaccagggcagcagctttcgggcgttctgggacttcctgatgtcgagccgccgtcaggaggaactctccgaacggctcgagcacgtgcttgcgctcccggcgatcacggaaatgaagccggacgcgcgcacgcggcgcgtccactatgactggctggaagccggcgagcacacgcaacgcacggtcgctcagctctcgcagcagcttcgacgtttcctcgacgatcaagcgtggctcgaaaaccgccgcatcatggacattctgcgcggtatcgaaacgaaagcgcttgtgctgcgtgaagcgcccccgccgggctccgtcatggagatcgagaccgcgtccgctgacatcgagctgccaattgaacgcccgctttacgcccctgcgctgcgccctctcatcgccaacgtcgcaatcgagaccggcgatgcggacctcgatgcgtcggcactctacacgcagatcgtcgtcgatcgtgcgcgcctcgcaagcaacatccgccgctgccttcaagatcggcggcaagtgacacttgccgaactggccgcttcgcagccgctcctgcatggactcgctgaactcgtcgcctatttgcaactgagcgccgaagccggaacatttcgcgcgaccgtcgatgagaccgtctccgatacgatcgagtggcaggcaaacgatgccaacggagcagcaatcgtcaagcgcgcaacgatgccgcgggtgattttcacaaggtag

SEQ ID NO: 49064 - DNA, 651 bp, Burkholderia ubonensis
atggaagaacagcaaaccccgtcgcttggtcgaggtgacttgtcgacggttgccgtcgcgctgctcaagggcgtgatttatcgtgatggaaacgagcgcctctgggccgcactgctcgaattgcagacacacgtgcgcgactacgtcgccgtgcttggcctcgagctcgtcgtggacgaggcggaaggctacgccttcgtaaagagccgcaccgagcctgacgccgaactcgacggagaccaggccaagctgccccggctcgttgcacggcgtccactctcgttccccgtgagcctgctgctcgcgctgctgcgaaagaaactggcggaatgggatgccggcggcggcgacacgcggctcgtcctttcgcgcgaggacatcgtcgagctcgtacgcgtgttccttcccgcgagcactaacgaggcgcgcctggtcgatcagatcgatacgcacgtgaacaagatcgtcgacctcggtttcctgcgccggatgaagaccgcgagcggaccgcccacattcgaggtgcgacgcattctcaaggcgttcgtcgatgcgcaatggctgctcgatttcgacgcgcggctcgcaagctatcaggcgcaccttcgagattcgacgaattcggaccaaacggagagtcgcgatgaatga

SEQ ID NO: 49065 - DNA, 3372 bp, Burkholderia ubonensis
atgaatgagccgcgcacgctcggcctcgattttgccgcggacgacaccctgacgggctttcgcctcgagcggctcgaggttttcaactggggcaccttcgacgaacgggtctgggtgctgcgggtcgacggccgcaacggcctgctgacgggagacatcggttccggcaagtcgacgctcgtcgacgccattaccaccctcctcgtgcccgcgcagcgcatcgcctacaacaaggcggcaggcgcggacagcaaggaacgtacgctgcgctcgtatgtgctcggctactacaagtcggagcgcaacgaggtcacgggagcggccaagcccgtgagcctgcgcgaccataacagctattcggtgattttgggcgtgtttcgcaatgccgggtacgacgccaccgtcacgctcgcgcaagtgttctggatgaaggacgcgcaggctcaacctgcgcgattcttcgtcagtgccgaacgagatctctcgatcgcgacggacttctcgcgcttcggcaccgacattgcgcagctgcgcaagaagctgcgcgggctgggcgccgaaatcgaggacacgtttccgaaatacagcgcctggttccggcggcgcttcggaatcgaaaacgagcaagcgctcgagctctttcatcaaacggtatcgatgaagtcggtgggcaatctcaccgacttcgtacgcagccacatgctcgagccgttcgacgtcgcaccgcgcgtcgacgccctgattgctcacttcgacgatctgaatcgcgcgcacgaggcggtactgaaaaccaagcgccaagtggaattgctgacaccccttgtcgacgactgcgaccgccacagcgagcaaggccacgttctcgaaggctggcgcgcgtgccgtgaagcattgaggccctacttcgccgggctcaagctcggcctcgtcgaacgccgcctccaattgctcgaagaggatcatgcgcgcgcgacctcgcgaaaggcgcggcacgaagaagcgcgcgaccaggcacgccagcgcgtggacgatttgcgccgtgccgtggccgaacaaggcggcgatcgcatcgcgcagctcgatgtcgagatccgcgagcacgagcgagaaagcgtgcgtcgtcgcgaacgcgcgcaacgctatgccgccatcgttacgctgttcggcgaaaccgaggctgcggatgaggctgcattcgcctcccagcgccaacgcctggccgagcagcgcagctcgctcgttgacgacgaagcgcaacagcaaaatgcgataaccgaatggagcgtggcatttcgcgaaggaaaagcgcggcgtgatgtgctggaggacgaaatcgcgagcctgaaagcccgacgcaacaacatcccgaaggaacaggtcgcgatgcgggcgagcctgtgctcggcgctcggcctggaggaagacgccctgccgttcgcgggcgaactcattcaggtgcgcgaggatgcgcgtgattgggagggcgccgccgagcgcgtcctgcgcaacttcggcctgtcgctgctcgtgcccgacgagcactatgcgaacgtcgcggcgtgggtcgatcgcactcatcttcgggggcggctcgtctactttcgcgtgcgctccgaacgcaccgcgcgtgtagccgaggccattgagctgcaccgccactcgctcgcgcacaagctcgccatcaagcccgactcgcagttctacggctggctcgagcgcgaaatcggccgccgtttcgactatgcctgctgcgatacgcaggagcagtttcggcgcgagacgcgcgcgatcacacgtgcgggccaggcgaaagcgcctggggagcgccacgaaaaagacgaccgccacgcgctcgacgatcgcagccgctacgtgctcggttggagcaacacggcaaaaatatccgctctcgcagcacaacggcaagcgctcgaagctcgccttggcgagatcgggcaaaggctcggagaggcccaacacgagcacaccaaggtgcgtgagcaactcgaagcacttgcacgcgccggcgagttcgccgagtttcgggaaatcgattggtcgagctgcgctgccgcgatcgcacgtcttgcggacgaaaaggcgcgactcgaatcggcaagcgacgccctcgcagagctaacggctcaattggactcggcgcaagcgtcgttgaaagagagtgaaacggcgatgtcggaaaccgactcggaactgggcggcatcctggccaagcgggaggcggcacaagcgctgcgcgaagagacgcacgcgctcgttgcagaagtggatgccgaacttgccgaacgaatcgaggccctgcgagcggagattctcggcgaacaccagctttccgtcgagtcatgcgacaaccgcgagcgggacgtgcgagaggcgttgacaacccgtatcgacaacgaaacgaagtcactcggccgcctggccgaaagaatcgtcaaggcaatggcggccttcaaggaagcctacaagctcgaaacggccgacttcgatgcgagcctcgacgcgaactcagagtaccgtgacatgctcgcgcggctgcaagcggacgatttgccgcgcttcgaaacgcgtttcaaggagctgctcaacgtcaacacgatcaacgagatcgccaactttcacgcccagctcgcgcgcgaacgggcgacgatcaaggaacgcatcgaacgcatcaacgaatcgctgcgacaaatcgactacaacgcgggtcgatacatcatcctcgagagtcagcccagccccgacgcggaaatccgcgaattccagagcgacctgcgcgcttgcaccgagggcgaactcaccggctcggacgatagccaatactcggaggccaagttcctgcaagtcaaacggatcatcgaccgcttccgcggccgcgaagggttgaccgagcaggaccggcgttggcgcgccaaggtgaccgacgtgcgcaactggtttctgttcgccgccagcgagcgttggcgcgaggacgacagcgaatacgagcactactcggactccggcggtaaatcgggcggccagaaggaaaagctcgcctatacgatccttgccgcgagcctcgcctatcagttcggcctcgaatggggcgccgtgcgttcccggtcgttccgcttcgtcgtcatcgacgaagcatttggccgaggctccgacgaatcggcgcagtatggtctcactctgtttcagaaactgaaccttcaactgctgatcgtcacgccactgcagaagattcacatcatcgagccgttcgtttcgagtgtcggattcgttcagaacgacggtggacgcgcctccaagctgcgcaccctgtcgatcgaggagtaccgcgcgcacaaggcggagttcgagcaatga

SEQ ID NO: 49066 - DNA, 1185 bp, Burkholderia ubonensis
atgagctggacaactgccgtcgaactgcgtatccgcctccagcgcctatgggaacgcggcgaatggctgcgaagcctcgtagacggcaccgaggggctattcccgctacgtctggcgctcaaaggcccaagctcgtccgagttggctgaacgcttcgacacggtacgcgcatggattacggaaattgccgcgacgccgcgcatacgcatcgaatggcgagaaatcaatcatcgaattctcggcgtgcagcgtttgccacgagcagcttgggtcgacagtctggacgatgcactcactgtcgccggcaagcaccgcgacgcagcgcggttcgagcggctgcttgaaatcacacgctcgcgccagccgaagctcatcgcgtggcttgcgcagcgcccgatgcaggccctcgaattggccggcgattgggaacgactgctggcagtcgtcgattggctgcaagcacatccgcagccgggcatatatcttcgccaagccgaaatcgccggcgtcgacacgaaattcatcgaggcgcggcgcggcgtcctctcccaatggctcgatctcgtgctgccgtccgaggcgatcgacagcagccggacaggcgtcgctcaattcgccgcgcgctacgggttccgcgagaagcaaccccgaattcgatttcgcgtgctcgatgagcggctcgccgttctgcccggcatgggccgccccgacatcgcactcgacgccgacagcttcgcgcgcctcgcactgccgtgccgccatgttttcgttacggaaaacgaaacaaattttctggcgtttcccgacgttccgcaggcgatcgtgctcttcggagcgggctacggctgggaagctctggagccggcgcgatggctcgcggactgtgcgctccactactggggcgacatcgacacgcacggctttgccattctcgaccaattgcgttgccgattccctcacgcgggatccttcttgatggaccgcgcgacactgatggcgcatgaagcattctggggagacgaagccgatcaggtcatgcgtgatctgccgcgactcacggcgcaagagcgcgagctctttgacgacctgcgtgacaaccggattcgccgcggattgcggctcgagcaggagcgcatcgggttcggatgggtcagagcggcgctagaggaacgagcgctcgtttag

SEQ ID NO: 49067 - DNA, 1461 bp, Burkholderia ubonensis
atgttcctcgactaccctaccctcgatgcgctgcgcacgcgccatcccgcttggcgacttttgcgctccgaccacgcgccgctcgccgtcagcttcctgcaccgcgcgttcgtcgcgccgaacgtgcgcgaggtggcggctccgtttcttgccgaagcactcgaggacgagctttacgcgttgcgcgaacaactcggcgacggcgccttcccgaagcccgcgctcgagtatctgaacgactgggcgagtcctgaaaagggatggttgcgcaaattctatcgccagggctccgatgaaccgcatttcgacctgacacccgccgcaggaaaagcgatagcgtggctcggcacgctgatggaacgaagctttgtcggcacggaatcccggctcctgacgcttttcgagttgctgcggcagatggccgaaggcagcgagacggacccggaaaggcgtcttgccgaactccacgcgcggcgcagccagatcgacgaagaaatcgctcgcgtggaggccggcgacgtccggctgctcgacgatgccgcgatcaaggaccgctttcagcaattcatgcagatggcgcgcgacctgctcacggatttccgtgaagtcgagcagaacttccgtctgctggaccggcatgtacgcgagcgaatcgcgctctgggaaggatcgaagggtgcgctcatcgaagaaatcatgggcgagcgcgacgcgatcgccgattcggaccagggcagcagctttcgggcgttctgggacttcctgatgtcgagccgccgccaggaggaactctccgaacggcttgagcacgtgcttgcgctcccggcgatcacggaaatgaagccggacgcgcgcacgcggcgcgtccactatgactggctggaagccggcgagcacacgcaacgcacggtcgctcagctctcgcagcagcttcgacgtttcctcgacgatcaagcgtggctcgaaaaccgccgcatcatggacattctgcgcggtatcgaaacgaaagcgcttgtgctgcgtgaagcgcccccgccgggctccgtcatggagatcgagaccgcgtccgctgacatcgagctgccaattgaacgcccgctttacgcccctgcgctgcgccctctcatcgccaacgtcgcaatcgagaccggcgatgcggacctcgatgcgtcggcactctacacgcagatcgtcgtcgatcgtgcgcgcctcgcaagccacatccgccgctgccttcaagatcggcggcaagtgacacttgccgaactggccgcttcgcagccgctcctgcatgggctcgctgaactcgtcgcctatttgcaactgagcgccgaagccggaacatttcgcgcgaccgtcgatgagaccgtctccgatacgatcgagtggcaggcgaacgatgccaacggagcagcaatcgtcaagcgcgcaacgatgccgcgggtgattttcacaaggtag

SEQ ID NO: 49068 - DNA, 651 bp, Burkholderia ubonensis
atggaagaacagcaaaccccgtcgcttggtcgaggtgacttgtcgacggttgccgtcgcgctgctcaagggcgtgatttatcgtgatggaaacgagcgcctctgggccgcactgctcgaattgcagacacacgtgcgcgactacgtcgccgtgcttggcctcgagctcgtcgtggacgaggcggaaggctacgccttcgtaaagagccgcaccgagcctgacgccgaagtcgacggagaccaggccaagctgccccggctcgttgcacggcgtccgctctcgttccccgtgagcctgctgctcgcgctgctgcgaaagaaactggcggaatgggatgccggcggcggcgacacgcggctcgtcctttcgcgcgaggacatcgtcgagctcgtacgcgtcttccttcccgcgagcactaacgaggcgcgcctggtcgatcagatcgatacgcacgtgaacaagatcgtcgacctcggtttcctgcgccggatgaagaccgcgagcggaccgcccacattcgaggtgcgacgcattctcaaggcgttcgtcgatgcgcaatggctgctcgatttcgacgcgcggctcgcaagctatcaggcgcaccttcgagattcgacgaattcagaccaaacggagagtcgcgatgaatga

SEQ ID NO: 49069 - DNA, 3372 bp, Burkholderia ubonensis
atgaatgagccgcgcacgctcggcctcgattttgccgcggacgacaccctgacgggctttcgcctcgagcggctcgaggttttcaactggggcaccttcgacgaacgggtctgggtgctgcgggtcgacggccgcaacggcctgctgacaggagacatcggttccggcaagtcgacgctcgtcgacgccattaccaccctcctcgtgcccgcgcagcgcatcgcctacaacaaggcggcaggcgcggacagcaaggaacgtacgctgcgctcgtatgtgctcggctactacaagtcggagcgcaacgaggtcacgggaacggccaagcccgtgagcctgcgcgaccataacagctattcggtgattttgggcgtgtttcgcaacgccgggtacgacgccaccgtcacgctcgcgcaagtgttctggatgaaggacgcgcaggctcaacctgcgcgattcttcgtcagtgccgaacgagatctctcgatcgcgaccgacttctcgcgcttcggcaccgacattgcgcagctgcgcaagaagctgcgcgggctgggcgccgaaatcgaggacacgtttccgaaatacagcgcctggttccggcggcgcttcggaatcgaaaacgagcaagcgctcgagctctttcatcaaacggtatcgatgaagtcggtgggcaatctcaccgacttcgtacgcagccacatgctcgagccgttcgacgtcgcaccgcgcgtcgacgccctgattgctcacttcgacgatctgaatcgcgcgcacgaggcggtactgaaaaccaagcgccaagtggaattgctgacaccgcttgtcgacgactgcgaccgccacagcgagcaaggccacgttctcgaaggctggcgcgcgtgccgcgaagcattgaggccctacttcgccgggctcaagctcggcctcgtcgaacgccgcctccaattgctcgaagaggatcatgcgcgcgcgacctcgcgaaaggcgcgacacgaagaagcgcgcgaccaggcgcgccagcgcgtggacgatttgcgccgtgccgtggccgaacaaggcggcgatcgcatcgcgcagctcgatgtcgagatccgcgagcacgagcgagaaagcgtgcgtcgccgcgaacgcgcgcaacgctatgccgccatcgttacgctgttcggcgaaaccgaggccgtggatgaggctgcattcgcctcccagcgccaacgcctggccgagcagcgcagctcgctcgtcgacgacgaagcgcaacagcaaaatgcgataaccgaatggagcgtggcatttcgcgaaggaaaagcgcggcgtgatgtgctggaggacgaaatcgcgagcctgaaagcccgacgcaacaacatcccgaaggaacaggtcgcgatgcgggcgagcctgtgctcggcgctcggcctagaagaagacgccctgccgttcgcgggcgaactcattcaggtgcgcgaggatgcgcgtgattgggagggcgccgccgagcgcgtcctgcgcaacttcggcctgtcgctgctcgtgcccgacgagcactatgcgaacgtcgcggcgtgggtcgatcgcactcatcttcgggggcggctcgtctactttcgcgtgcgctccgaacgcaccgcgcgtgtagccgaggccatcgagctgcaccgccactcgctcgcgcacaagctcgccatcaagcccgactcgcagttctatggctggctcgagcgcgaaatcggccgccgtttcgactatgcctgctgcgatacgcaggagcagtttcggcgcgagacgcgcgcgatcacgcgtgcgggccaggcgaaagcgcctggggagcgccacgaaaaagacgaccgccacgcgctcgacgatcgcagccgctacgtgctcggttggagcaacacggcaaaaatatccgctctcgcagcacaacggcaagcgctcgaagctcgccttggcgagatcgggcaaaagctcggagaggcccaacacgagcacaccaaggtgcgtgagcaactcgaagcacttgcgcgtgccggcgagttcgccgagtttcgggaaatcgattggtcaagctgcgctgccgcgatcgcacgtcttgccgacgaaaaagcgcgactcgaatcggcaagcgacgccctcgcggagctaacggctcaattggactcggcgcaagcgtcgttgaaagagagtgaagcggcgatgtcggaaaccgactcggaactgggcggcatcctggccaagcgggaggcggcacaagcgctgcgcgaagagacgcacgcgctcgttgcagaagtggatgccgaacttgccgaacgaatcgaggccctgcgagcggagattctcggcgaacaccagctttccgtcgagtcatgcgacaaccgcgagcgggacgtgcgagaagcgttgacaacccgtatcgacaacgaaacgaagtcactcggccgcctggccgaaagaatcgtcaaggcaatggcggctttcaaggaagcctacaagctcgaaacggccgacttcgatgcgagcctcgacgcgaactcagagtaccgtgacatgctcgcgcggctgcaggcggacgatttgccgcgcttcgaaacgcgtttcaaggagctgctcaacgtcaacacgatcaacgagatcgccaacttccacgcccagcttgcgcgcgaacgggcgacgatcaaggaacgcatcgaacgcatcaacgaatcgctgcgacaaatcgactacaacgcgggtcgatacatcatcctcgagagtcagcccagccccgacgcggaaatccgcgaattccagagcgacctgcgcgcttgcaccgagggcgaactcaccggctcggacgatagccaatactcggaggccaagttcctgcaagtcaaacggatcatcgaccgcttccgcggccgcgaagggttgaccgagcaggaccggcgttggcgcgccaaggtgaccgacgtgcgcaactggtttctgttcgccgccagcgagcgttggcgcgaggacgacagcgaatacgagcactactcggactccggcggtaaatcgggcggccagaaggaaaagctcgcctatacgatccttgccgcgagcctcgcctatcagttcggcctcgaatggggcgccgtgcgttcccggtcgttccgcttcgtcgtcatcgacgaagcatttggccgaggctccgacgaatcggcgcagtatggtctcactctgtttcagaaactgaaccttcaactgctgatcgtcacgccactgcagaagattcacatcatcgagccgttcgtttcaagtgtcggattcgttcagaacgacggtggacgcgcctccaagctgcgcaccctgtcgatcgaggagtaccgcgcgcacaaggcggagttcgagcaatga

SEQ ID NO: 49070 - DNA, 1185 bp, Burkholderia ubonensis
atgagctggacaactgccgtcgaactgcgtatccgcctccagtgcctatgggaacgcggcgaatggctgcgaagcctcgtagacggtgccgaggggctattcccgctacgtctggcgatcaaaggcccaagctcgtccgagttggctgaacgcttcgacgcggtacgcgcatggattacggaaattgccgcgacgccgcgcatacgcatcgaatggcgagaaatcaatcatcgaattctcggccagcagcgtttgccacgagcagcctgggtcgacagtctggacgatgcgctcaccgtcgccggcaagcaccgcgacgcagcgcggttcgagcggctgcttgaaatcacacgctcgcgccagccgaagctcatcgcgtggcttgcgcagcgcccgatgcaggccctcgaattggccggcgattgggaacgactgctggcggtcgtcgattggctgcaagcacatccgcagccgggcatctatcttcgccaagccgaaatcgccggcgtcgacacgaaattcatcgaggcaaggcgcggcgtcctctcccaatggctcgatctcgtgctgccgtccgacgcaatcgacagcagccggaccggcgccgcccaattcgccgctcgctacgggttccgcgataagccgcttcgtattcgatttcgcgtgctcgatgagcggctcgccgtcctgcccggcatgggccgacccgacatcacactcgacgccgacagcttcgcgcgcctcgcactgccgtgccgccatgttttcgttacggaaaacgaaacaaattttctggcgtttcccgacgttccgcaggcgatcgtgctcttcggagcgggctacggctgggaagctctggagccggcgcgatggctcgcggactgtgcgctccactactggggcgacatcgacacgcacggctttgccattctcgaccaattgcgttgccgattcccgcacgcgggatccttcttgatggaccgcgcgacactgatggcgcatgaagcattctggggagacgaaggcgatcaggtcatgcgtgatctgccgcgactcacggcgcaagagcgcgagctctttgacgacctgcgtgacaaccggattcgccacggattgcggctcgagcaggagcgcgtcgggttcggatgggtcagagcggcgctagaggaacgggcgctcgtttag

SEQ ID NO: 49071 - DNA, 1461 bp, Burkholderia ubonensis
atgttcctcgactaccctaccctcgacgcgctgcgcacgcgccatcccgcttggcgacttttgcgctccgaccacgcgccgctcgccgtcagcttcctgcaccgcgcgttcgtcgcgccgaacgtgcgcgaggtggcggctccgtttcttgccgaagcactcgaggacgagctttacgcgttgcgcgaacaactcggcgacggcgccttcccgaagcccgcgctcgagtatctgaacgactgggcgagtcctgaaaagggatggttgcgcaaattctatcgccaaggctccgatgaaccgcatttcgacctgacacccgccgcaggaaaagcgatcgcgtggctcggcacgctgatggaacgaagctttgtcggcacggaatcccggctcctgacgcttttcgagttgctgcggcagatggccgaaggcagcgagacggacccggaaaggcgtcttgccgagctccacgcgcggcgcagccagctcgacgaagaaatcgctcgcgtggaagccggcgacgtccggctgctcgacgatgccgcgatcaaggaccgctttcagcaattcatgcagatggcgcgcgacctgctcacggatttccgtgaagtcgagcaaaacttccgtctgctggaccggcatgtacgtgagcgaatcgcgctctgggaaggatcgaagggtgcgctcatcgaagaaatcatgggcgagcgcgacgcgatcgccgattcggaccagggcagcagctttcgggcgttctgggacttcctgatgtcgagccgccgccaggaggaactctccgaacggctcgagcacgtgcttgcgctcccggcgatcacggaaatgaagccggacgcgcgcacgcggcgcgtccactatgactggctggaagccggcgagcacacgcaacgcacggtcgctcagctctcgcagcagcttcgacgtttcctcgacgatcaagcgtggctcgaaaaccgccgcatcatggacattctgcgcggtatcgaaacgaaagcgcttgtgctgcgtgaagcgcccccgccgggctccgtcatggagatcgagaccgcgtccgctgacatcgagctgccaatcgaacgcccgctttacgcgccggcgctgcgccctctcatcgccaacgtcgcaatcgagaccggcgatgcggacctcgatgcgtcggcactctacacgcagatcgtcgtcgatcgcgcgcgcctcgcaagccatatccgccgctgccttcaagatcggcggcaagtgacacttgccgaactggccgcttcgcagccgctcttgcacgggctcgctgaactcgtcgcctatttgcaactgagcgccgaagtcggaacatttcgcgcgaccgtcgatgagaccgtctccgatacgatcgagtggcaggcgaacgatgccaacggagcagcaatcgtcaagcgcgcaacgatgccgcgggtgattttcacaaggtag

SEQ ID NO: 49072 - DNA, 651 bp, Burkholderia ubonensis
atggaagaacagcaaaccccgtcgcttggtcgaggtgacttgtcgacggtcgccatcgcgctgctcaagggcgtgatttatcgtgatggaaacgagcgcctctgggccgcactgctcgaattgcagacacacgtgcgcgactacgtcgccgtgcttggcctcgagctcgtcgtggacgaggcggaaggctacgccttcgtaaagagccgcaccgagcctgacgccgaagtcgacggagaccaggccaagctgccccggctcgttgcacggcgtccactctcgttccccgtgagcctgctgctcgcgctgctgcgaaagaaactggcggaatgggatgccggcggcggcgacacgcggctcgtcctttcgcgcgaggacatcgtcgagctcgtacgcgtcttccttcccgcaagcactaacgaggcgcgcctcgtcgatcagatcgatacgcacgtgaacaagatcgtcgacctcggtttcctgcgccggatgaagaccgcgagcggaccgcccacattcgaggtgcgacgcattctcaaggcgttcgtcgatgcgcaatggctgctcgatttcgacgcgcggctcgcaagctatcaggcgcaccttcgagattcgacgaattcagaccaaacggagagtcgcgatgaatga

SEQ ID NO: 49073 - DNA, 3372 bp, Burkholderia ubonensis
atgaatgagccgcgcacgctcggcctcgattttgccgcggacgacaccctgacgggctttcgcctcgagcggctcgaggttttcaactggggcaccttcgacgaccgggtctgggtgctgcgggtcgacggccgcaacggcctgctgacaggagacatcggttccggcaagtcgacgctcgtcgacgccattaccaccctcctcgtgcccgcgcagcgcatcgcctacaacaaggcggcaggcgcggacagcaaggaacgtacgctgcgctcgtatgtgctcggctactacaagtcggagcgcaacgaggtcacgggaacggccaagcccgtgagcctgcgcgaccataacagctattcggtgattttgggcgtgtttcgcaacgccgggtacgacgccaccgtcacgctcgcgcaagtgttctggatgaaggacgcgcaggctcaacctgcgcgattcttcgtcagcgccgagcgagatctctcgatcgcgacggacttctcgcgcttcggcaccgacattgcgcagctgcgcaagaagctgcgcgggctgggcgccgaaatcgaggacacgtttccgaaatacagcgcctggttccggcggcgcttcggaatcgaaaacgagcaagcgctcgagctctttcatcaaacggtatcgatgaagtcggtgggcaatctcaccgacttcgtacgcagccacatgctcgagccgttcgacgtcgcaccgcgcgtcgacgccctgattgctcacttcgacgatctgaatcgcgcgcacgaggcggtactgaaaaccaagcgccaagtggaactgctgacaccgctcgtcgacgactgcgaccgccacagcgagcaagcacacgttctcgaaggctggcgcgcgtgccgtgaagcactgaggccctacttcgccgggctcaagctcggcctcgtcgaacgccgcctccaattgctcgacgaggatcatgcgcgcgcgacctcgcgaaaggcgcggcacgaagaagcgcgcgaccaggcgcgccagcgcgtggacgatttacgccgtgccgtggccgaacaaggcggcgatcgcatcgcgcagctcgatgccgagatccgcgagcacgagcgagaaagcgtgcgtcgccgcgaacgggcgcaacgctatgccgccatcgttacgctgttcggcgaaaccgaggccgcggatgaggctgcattcgcctcccagcgccaacgcctggccgagcagcgcagctcactcgtcgacgacgaagcgcaacagcaaaatgcgataaccgaatggagcgtggcatttcgcgaaggcaaagcgcggcgtgatttgctggaagacgaaatcgcgagcctgaaagctcgacgcaacaacatcccgaaggaacaggtcgcgatgcgagcgagcctgtgctcggcgctcgacctggaggaagacgccgtgccgttcgcgggcgagctcattcaggtgcgcgaggatgcgcgtgattgggagggcgccgccgagcgcgtcctgcgcaacttcggcctgtcgctgctcgtgcccgacgagcactatgcgaacgtcgcggcgtgggtcgatcgcactcatcttcgggggcggctcgtctactttcgcgtgcgctccgaacgcaccgcgcgtgcagccgaggccatcgagctgcaccgccactcgctcgcgcacaagctcgcgatcaagcccgactcgcagttctatggctggctcgagcgcgaaatcggccgccgtttcgactatgcctgctgcgatacgcaggagcagtttcggcgcgagacgcgcgcgatcacgcgtgcgggccaggcgaaagcgcctggggagcgccacgaaaaagacgaccgccacgcgctcgacgatcgcagccgctacgtgctcggttggagcaacacggcaaaaatatccgcccttgcagcacaacggcaagcgctcgaagctcgccttggcgagatcgggcaaaggctcggagaggcccaacacgagcacaccaaggtgcgtgagcaactcgaagcacttgcgcgtgccggcgagttcgccgagtttcgggaaatcgattggtcgagctgcgctgccgcgatcgcacgtcttgcggacgaaaaggcgcgactcgaatcggcaagcgacgccctcgcagagctaacggctcaattggactcggcgcaagcgtcgttgaaagagagtgaagcggcgatgtcggaaaccgactcggaactgggcggcatcctggccaagcgggaggcggcacaagcgctgcgcgaagagacgcacgcgctcgttgcagaagtggatgccgaacttgccgaacgaatcgaggccctgcgagcggagattctcggcgaacaccagctttccgtcgagtcatgcgacaaccgcgagcgggacgtgcgagaagcgttgacaacccgtatcgacaacgaaacgaagtcactcggccgcctggccgaaagaatcgtcaaggcaatggcggccttcaaggaagcctacaagctcgaaacggccgacttcgatgcgagcctcgacgcgaacccggagtaccgtgacatgctcgcgcggctgcaggcggacgatttgccgcgcttcgaaacgcgtttcaaggagctgctcaacgtcaatacgatcaacgagatcgccaactttcacgcccagctcgcgcgcgaacgggcgacgatcaaggaacgcatcgaacgcatcaacgaatcgttgcgacaaatcgactacaacgcgggccgatacatcatcctcgagagtcagcccagccccgacgcggaaatccgcgatttccagagcgacctgcgcgcttgcaccgagggcgaactcaccggctcggacgatagccaatactcggaggccaagttcctgcaagtcaaacgaatcatcgaccgcttccgcggccgcgaagggttgaccgagcaggaccggcgttggcgcgccaaagtgaccgacgtgcgcaactggtttctgttcgccgccagcgagcgttggcgcgaagacgacagcgaatacgaacactactcggactccggcggtaaatcgggcggccagaaggaaaagcttgcctacacgatccttgccgcgagcctcgcctaccagttcggcctcgaatggggcgccgtgcgttcccgatcgttccgcttcgtcgtcatcgacgaagcatttggccgaggctccgacgaatcggcgcagtacggtctcacgctgtttcagaaactgaacctgcaactgctgatcgtcacgccgctgcagaagattcatatcatcgagccgttcgtttcaagtgtcggattcgttcagaacgacggtggacgcgcctccaagctgcgcaccctgtcgatcgaggagtaccgcgcgcacaaggcggagttcgagcaatga

SEQ ID NO: 49074 - DNA, 1185 bp, Burkholderia ubonensis
atgagctggacaactgccgtcgaactgcgtgcccgcctccagcacctatgggcacgcggcgaatggctgcgaagcttcgtagacggcaccgaggggctattcccgctacgtctggcgatcaaaggcccgagttcgtccgagctggctgaacgcttcgacgcggtacgcgcatggatcgcggaaattgccgcgacgccgcacatacgcatcgaatggcgagaaatcaatcatcgaattctcggcgtgcagcgtttgccacgagcggcctgggtcgacagtctggacgatgcgctcgcagtcgccggcaagcaccgcgacgcagcgcagttcgcgcggctgctcgaaatcactcgcgcccgccagccgaagctcgccgcgtggcttgcgcagcgcccgttgcaagccctcgaattcgccggcgattgggaacgactgctggcagtcgtcgattggctgcaagcacatccgcacccgggcgtctatcttcgccaagccgaaatcgccggcgtcgacacgaaattcatcgaggcaaggcgcggcgtcctctcccaatggctcgatctcgtgctgccgtccgaggcgatcgacagcagccggacaggcgtcgctcaattcgccgcgcgctatgggttccgcgagaagcaaccccgtattcgatttcgcgtgctcgatgagcggctcgccgttctgcccggcatgggccgccccgacatcgcactcgacgccgacagcttcgcgcgcctcgcactgccgtgccgccatgttttcgttacggaaaacgaaacaaattttctggcgtttcccgacgttccgcaggcgatcgtgctcttcggagcgggctacggctgggaagctctggagccggcgcgatggctcgcggactgtgcgctccactactggggcgacatcgacacgcacggctttgccattctcgaccaattgcgttgccgattccctcacgtgaactccttcctgatggaccgcgcgacactgatggcgcatgaagcattctggggagacgaaggcgatcaggtcgtgcgtgatctgccgcgactcacggcgcaagagcgcgagctctttgacgacctgcgtgacaaccggattcgccgcggattgcggctcgaacaggagcgcgtcgggttcgggtgggtcagagcggcgctagaggaacggtctttcgtttag

SEQ ID NO: 49075 - DNA, 1461 bp, Burkholderia ubonensis
atgttcctcgactaccctaccctcgacgcgctgcgcacgcgccatcccgcttggcgacttttgcgctccgaccacgcgccgctcgccgtcagcttcctgcaccgcgcgttcgtcgcgccgaacgtgcgcgaggtggcggctccgtttcttgccgaagcactcgaggacgagctttacgcgttgcgcgaacaactcggcgacggcgccttcccgaagcccgcgctcgagtatctgaacgactgggcgagtcctgaaaagggatggttgcgcaagttctatcgccaaggctccgatgaaccgcatttcgacctgacacccgccgcgggaaaagcgatcgcgtggctcggcacgctgatggaacgaagctttgtcggcacggaatcccggctcctgacgcttttcgagctgctgcggcagatggccgaaggcagcgagacggacccggaaaggcgtcttgccgagctccacgcgcggcgcagccagatcgacgaagaaatcgctcgcgtggaggccggtgacgttcggctgctcgacgatgccgcgatcaaggaccgctttcagcaattcatgcagatggcgcgcgacctgctcacggatttccgtgaagtcgagcaaaacttccgtctgctggaccggcatgtacgcgagcgaatcgcgctctgggaaggatcgaagggtgcgctcatcgaagaaatcatgggcgagcgcgacgcgatcgccgattcggaccagggcagcagctttcgggcgttctgggacttcctgatgtcgagccgccgtcaggaggaactctccgaacggctcgagcacgtgcttgcgctcccggcgatcacggaaatgaagccggacgcgcgcacgcggcgcgtccactatgactggctggaagccggcgagcacacgcaacgcacggtcgctcagctctcgcagcagcttcgacgtttcctcgacgatcaagcgtggctcgaaaaccgccgcatcatggacattctgcgcggtatcgaaacgaaagcgcttgtgctgcgtgaagcgcccccgccgggctccgtcatggagatcgagaccgcgtccgctgacatcgagctgccaattgaacgcccgctttacgcccctgcgctgcgccctctcatcgccaacgtcgcaatcgagaccggcgatgcggacctcgatgcgtcggcactctacacgcagatcgtcgtcgatcgcgcgcgcctcgcaagccacatccgccgctgccttcaagatcggctgcaagtgacgcttgccgaactggccgcttcgcagccgctcgtgcatgggctcgctgaactcgtcgcctatttgcaactgagcgccgaagccggaacatttcgcgcgaccgtcgatgagaccgtctccgatacgatcgagtggcaggcaaacgatgccaatggagcagcaatcgtcaagcgcgcaacgatgccgcgggtgattttcacaaggtag

SEQ ID NO: 49076 - DNA, 651 bp, Burkholderia ubonensis
atggaagaacagcaaaccccgtcgcttggtcgaggtgacttgtcgacggttgccatcgcgctgctcaagggcgtgatttatcgtgatggaaacgagcgcctctgggccgcactgctcgaattgcagacacacgtgcgcgactacgtcgccgtgcttggcctcgagctcgtcgtggacgaggcggaaggctacgccttcgtaaagagccgcaccgagcctgacgccgaagtcgacggagaccaggccaagctgccccggctcgttgcacggcgtccactctcgttccccgtgagcctgctgctcgcgctgctgcgaaagaaactggcggaatgggatgccggcggcggcgacacgcggctcgtcctttcgcgcgaggacatcgtcgagctcgtacgcgtcttccttcccgcgagcactaacgaggcgcgcctggtcgatcagatcgacacgcacgtgaacaagatcgtcgacctcggtttcctgcgccggatgaagaccgcgagcggaccgcccacattcgaggtgcgacgcattctcaaggcgttcgtcgatgcgcaatggctgctcgatttcgatgcgcggctcgcaagctatcaggcgcaccttcgagattcgacgaattcggaccaaacggagagtcgcgatgaatga

SEQ ID NO: 49077 - DNA, 3372 bp, Burkholderia ubonensis
atgaatgagccgcgcacgctcggcctcgattttgccgcggacgacgcccggacgggctttcgcctcgagcggctcgaggttttcaactggggaaccttcgacgaccgggcttgggtgctgcgggtcgacggccgcaacggcctgctgacaggagacatcggttccggcaagtcgacgctcgtcgacgccattaccactctcctcgtgcccgcgcagcgcatcgcctacaacaaggcggcaggcgcggacagcaaggaacgtacgctgcgctcgtatgtgctcggctactacaagtcggagcgcaacgaggtcacgggaacggccaagcccgtgagcctgcgcgaccataacagctattcggtgattttgggcgtgtttcgcaacgccgggtacgacgccaccgtcacgctcgcgcaagtgttctggatgaaggacgcgcaggctcaacctgcgcgattcttcgtcagtgccgaacgagatctctcgatcgcgaccgacttctcgcgcttcggcaccgacattgcacagctgcgcaagaagctgcgcgggctgggcgccgaaatcgaggacacgtatccgaaatacagcgcctggttccggcggcgcttcggaatcgaaaacgagcaagcgctcgagctctttcatcaaacggtatcgatgaagtcggtgggcaatctcaccgacttcgtacgcagccacatgctcgagccgttcgacgtcgcaccgcgcgtcgacgccctgattgctcacttcgacgatctgaatcgcgcgcacgaggcggtgctgaaaaccaagcgccaagtggaattgctgacaccgctcgtcgacgactgcgaccgccacagcgagcaaggcaacgttctcgaaggctggcgcgcgtgccgcgaagcattgaggccctacttcgccgggctcaagctcggcctcgtcgaacgccgcctccaattgctcgaagaggatcatgcgcgcgcgacctcgcgaaaggcgcggcacgaagaagcgcgcgaccaggcgcgccagcgcgtggacgatttgcgccgtgccgtggccgaacaaggcggcgatcgcatcgcgcagctcgatgtcgagatccgcgagcacgagcgagaaagcgtgcgtcgccgcgaacgcgcgcaacgctatgccgccatcgttacgctgttcggcgaaaccgcggcggcggatgaggctgcattcgcctcccagcgccaacgcctggccgagcagcgcagctcactcgtcgacgacgaagcgcaacagcaaaatgcgataaccgaatggagcgtggcatttcgcgaaggaaaagcgcggcgtgatttgctggaggacgaaatcgcgagcctgaaagcccgacgcaacaacatcccgaaggaacaggtcgcgatgcgggcgagcctgtgttcggcgctcggcctggaggaagacgccctgccgttcgcgggcgaactcattcaggtgcgcgaggatgcgcgtgattgggagggcgccgccgagcgcgtcctgcgcaacttcggcctgtcgctgctcgtgcccgacgtgcactatgcgaacgtcgtggcgtgggtcgatcgcactcatcttcgggggcggctcgtctactttcgcgtgcgctccgaacgcaccgcgcgtgtagccgaggccatcgagctgcaccgccactcgctcgcgcacaagctcgccatcaagcccgactcgcagttctatggctggctcgagcgcgaaatcggccgccgtttcgactatgcctgctgcgatacgcaggagcagtttcggcgcgagacgcgcgcgatcacgcgtgcgggccaggcgaaagcgcctggggagcgccacgaaaaagacgaccgccacgcgctcgacgatcgcagccgctacgtgctcggttggagcaatacggcaaaaatatccgctctcgcagcacaacggcaagcgctcgaagctcgccttggcgagatcgggcaaaggctcggagaggcccagcacgagcacaccaaggtgcgtaagcaactcgaagcacttgcgcgtgccggcgagttcgccgagtttcgggaaatcgattggtcgagctgcgctgccgcggtcgcacgtcttgccgacgaaaaagcgcgactcgaatcggcaagcgacgccctcgcggagctaacggctcaattggactcggcgcaagcgtcgttgaaagagagtgaagcggcgatgtcggaaaccgactcggaactcggcggcatcctggccaagcgggaggcggcacaagcgctgcgcgaagagacgcacgcgcttgttgcagatgtggatgccgaactcgccgaacgaatcgaggccctgcgagccgagattctcggcgaacaccagctttccgtcgagtcatgcgacaaccgcgagcgggacgtgcgagaggcgttgacaacccgtatcgacaacgaaacgaagtcactcggccgcctggccgaaagaatcgtcaaggcaatggcggctttcaaggaagcctacaagctcgaaacggccgacttcgatgcgagcctcgccgcgaacccggagtaccgtgacatgctcgcgcggctgcaggcggacgatttgccgcgcttcgaaacgcgtttcaaggagctgctcaacgtcaacacgatcaacgagatcgccaacttccacgcccagcttgcgcgcgaacgggcgacgatcaaggaacgcatcgaacgcatcaacgaatcgctgcgacaaatcgactacaacgcgggccgttacatcgtcctcgagagtcagcccagccccgacgcggagatccgcgaattccagagcgacctgcgcgcttgcaccgagggcgaactcaccggctcggacgatagccaatactcggaggccaagttcctgcaagtcaaacggatcatcgaccgcttccgcggccgcgaagggttgaccgagcaggaccggcgctggcgagccaaagtgaccgacgtgcgcaactggtttctgttcgccgccagcgagcgttggcgcgaggacgacagcgaatacgagcactactcggactccggcggtaaatcgggcggccagaaggaaaagctcgcctatacgatccttgccgcgagcctcgcctatcagttcggcctcgaatggggtgccgtgcgttcccgatcgttccgcttcgtcgtcatcgacgaggcgtttggccgaggctccgacgaatcggcacagtacggtctcactttgtttcaaaaactgaacctgcaactgctgatcgtcacgccactgcagaagattcacatcatcgagccgttcgtttcgagcgtcggattcgttcagaacgacggtggacgcgcctccaagctgcgcaccctgtcgatcgaggagtaccgcgcgcacaaggcggagttcgagcaatga

SEQ ID NO: 49078 - DNA, 1185 bp, Burkholderia ubonensis
atgagctggacaactgccgtcgaactgcgcgcccgcgtccagcacctatgggcacgcggcgaatggctgcgaagcttcgtagacggcaccgaggggctattcccgctacgtctggcgatcaaaggcccgagttcgtccgagcttgctgaacgcttcgacgcagtacgcgcatggatcgcggaaattgccgcgacgccgcacatacgcatcgaatggcgagaaatcaatcatcgaattctcggcgtgcagcgtttgccacgagcggcctgggtcgacagtctggacgatgcgctcaccgtcgccggcaagcaccgcgacgcagcgcagttcgcgcggctgcttgaaatcacacgctcgcgccagccgaagctcgtcgcgtggcttgcgcagcgcccgatgcaagccctcgaattggccggcgattgggaacggctgctggcagtcgtcgattggctgcaagcacatccgcagccgggcatctatcttcgccaagccgaaatcgccggagtcgacacgaaattcatcgaggcgcggcgcggcgtcctctcccaatggctcgatctcgtgctgccgtccgaggcgatcgacagcagccggaccggcgtcactcaattcgccgcgcgctacgggttccgcgagaagcaaccccgtattcgatttcgcgtgctcgatgagcgcctcgccgtcctgcccggcatgggccgacccgacatcgcactcgacgccgacagcttcgcgcgcctcgcactgccgtgccgccatgttttcgttacggaaaacgaaacaaattttctggcgtttcccgacgttccgcaggcgatcgtgctcttcggagcgggctacggctgggaagctctggagccggcgcgatggctcacggactgtgcgctccactactggggcgacatcgacacgcacggctttgccattctcgaccaattgcgttgccgattccctcacgcgggatccttcttgatggaccgcgcgacactgatggcgcatgaagcattctggggagacgaaggcgatcaggtcatgcgtgatctgccgcgactcacggcgcaagagcgcgagctctttgacgacctgcgtgacaaccggattcgccacggattgcggctcgaacaggagcgcgtcgggttcgggtgggtcagagcggcgctagaggaacggtctttcgtttag

SEQ ID NO: 49079 - DNA, 1461 bp, Burkholderia ubonensis
atgttcctcgactaccctaccctcgacgcgctgcgcacgcgccatcccgcttggcgacttttgcgctccgaccacgcgccgctcgccgtcagcttcctgcaccgcgcgttcgtcgcgccgaacgtgcgggaggtggcggctccgtttcttgccgaagcactcgaggacgagctttacgcgttgcgcgaacaactcggcgacggcgccttcccgaagcccgcgctcgagtatctgaacgactgggctagccctgaaaagggatggttgcgcaagttctatcgccaaggctccgatgaaccgcatttcgacctgacacccgccgcgggaaaagcgatcgcgtggctcggcacgctgatggaacgaagctttgtcggcacggaatcccggctcctgacgcttttcgagttgctgcggcagatggccgaaggcagcgagacggacccggaaaggcgtcttgccgagctccacgcgcggcgcagccagatcgacgaagaaatcgctcgcgtggaggccggcgacgttcggctgctcgacgatgccgcgatcaaggaccgctttcagcaattcatgcagatggcgcgcgacctgctcacggatttccgtgaagtcgagcagaacttccgtctgctggaccggcatgtacgcgagcgaatcgcgctctgggaaggatcgaagggtgcgctcatcgaagaaatcatgggcgagcgcgacgcgatcgccgattcggaccagggcagcagctttcgggcgttctgggacttcctgatgtcgagccgccgccaggaggaactctccgaacggctcgagcacgtgcttgcgctcccggcgatcacggaaatgaagccggacgcgcgcacgcggcgcgtccactatgactggctggaagccggcgagcacacgcaacgcacggtcgctcagctctcgcagcagcttcgacgtttcctcgacgatcaagcgtggctcgaaaaccgccgcatcatggacattctgcgcggtatcgaaacgaaagcgcttgtgctgcgtgaagcgcccccgccgggctccgtcatggagatcgagaccgcgtccgctgacatcgagctgccaattgaacgcccgctttacgcgccggcgctgcgccctctcatcgccaacgtcgcaatcgagaccggcgatgcggacctcgatgcgtcggcactctacacgcagatcgtcgtcgatcgcgcgcgcctcgcaagccacatccgccgctgccttcaagatcggcggcaagtgacacttgccgaactggccgcttcgcagccgctcctgcatgggctcgctgaactcgtcgcctatttgcaactcagcgccgaagccggatcatttcgtgcgaccgtcgatgagaccgtctccgatacgatcgagtggcaggcaaacgatgccaacggagcagcaatcgtcaagcgcgcaacgatgccgcgggtgattttcacaaggtag

SEQ ID NO: 49080 - DNA, 651 bp, Burkholderia ubonensis
atggaagaacagcaaaccccgtcgcttggtcgaggtgacttgtcgacggttgccatcgcgctgctcaagggcgtggtttatcgtgatgtaaacgagcgcctctgggccgcactgctcgaattgcagacacacgtgcgcgactacgtcgccgtgcttggcctcgagctcgtcgtggacgaggcggaaggctacgccttcgtaaagagccgcaccgagcctgacgccgaagtcgacggagaccaggtcaagctgccccggctcgttgcacggcgtccactctcgttccccgtgagcctgctgctcgcgctgctgcgaaagaaactggcggaatgggatgccggcggcggcgacacgcggctcgtcctttcgcgcgaggacatcgtcgagctcgtacgcgtcttccttcccgcgagcactaacgaggcgcgcctcgtcgatcagatcgacacgcacgtgaacaagatcgtcgacctcggtttcctgcgccggatgaagaccgcgagcggaccgcccacattcgaggtgcgacgcattctcaaggcgttcgtcgatgcgcaatggctgctcgatttcgacgcgcggctcgcaagctatcaggcgcaccttcgggattcgacgaattcagaccaaacggagagtcgcgatgaatga

SEQ ID NO: 49081 - DNA, 3372 bp, Burkholderia ubonensis
atgaatgagccgcgcacgctcggcctcgattttgccgcggacgacacccggacgggctttcgtctcgaacggctcgaggttttcaactggggcaccttcgacgaccgggcttgggtgctgcgggtcgacggccgcaacggcctgctgacaggagacatcggttccggcaagtcgacgctcgtcgacgccattaccaccctcctcgtgcccgcgcagcgcatcgcctacaacaaggcggcaggcgcggacagcaaggaacgtacgctgcgctcgtatgtgctcggctactacaagtcggagcgcaacgaggtcacgggaacggccaagcccgtgagcctgcgcgaccataacagctattcggtgattttgggcgtgtttcgcaacgccgggtacgacgccaccgtcacgctcgcgcaagtgttctggatgaaggacgcgcaggctcaacctgcgcgattcttcgtcagcgccgaacgagatctctcgatcgcgacggacttctcgcgcttcggcaccgacattgcgcagctgcgcaagaagctgcgcgggctgggcgccgaaatcgaggacgcgtttccgaaatacagcgcctggttccggcggcgcttcggcatcgaaaatgagcaagcgctcgagctctttcatcaaacggtatcgatgaagtcggtgggcaatctcaccgacttcgtacgcagccacatgctcgagccgttcgacgtcgcaccgcgcgtcgacgccctgattgctcacttcgacgatctgaatcgcgcgcacgaggcagtactgaaaaccaagcgccaagtggaattgctgacaccgctcgtcgacgactgcgaccgccacagcgagcaaggccacgttctcgaaggctggcgcgcgtgccgtgaagcattgaggccctacttcgccgggctcaagctcggcctcgtcgaacgccgcctccaattgctcgaagaggatcatgcgcgcgcgacctcgcgaaaggcgcgtcacgaagaagcgcgcgaccaggcgcgccagcgcgtggacgatttgcgccgtgccgtggccgaacaaggcggcgatcgcatcgcgcagctcgatgtcgagatccgcgagcacgagcgagaaagcgtgcgtcgccgcgaacgggcgcaacgctatgccgccatcgttacgctgttcggcgaaaccgaggccgcggatgaggctgcattcgcctcccagcgccaacgcctggccgagcagcgcagctcgctcgttgacgacgaagcgcagcagcaaaatgcgataaccgaatggagcgtggcgtttcgcgaaggaaaagcgcggcgtgatgtgctggaggacgaaatcgcgagcctgaaagctcgacgcaacaacatcccgaaggaacaggtcgcgatgcgggcgagcctgtgctcagcgctcggcctggaggaagacgccctgccgttcgcgggcgaactcattcaggtgcgcgaggatgcgcgtgattgggagggcgccgccgagcgcgtcctgcgcaacttcggcctgtcgctgctcgtgcccgacgagcactatgcgaacgtcgcggcgtgggtcgatcgcactcatcttcgggggcggctcgtctactttcgcgtgcgctccgaacgcaccgcgcgtgcagccgaggccatcgagctgcaccgccactcgctcgcgcacaagctcgcgatcaagcccgactcgcagttctatggctggctcgagcgcgaaatcggccgccgtttcgactatgcctgctgcgatacgcaggagcagtttcggcgcgagacgcgcgcgatcacgcgtgcgggccaggcgaaagcgcctggggagcgccacgaaaaagacgaccgccacgcgctcgacgatcgcagccgctacgtgctcggttggagcaatacggcaaaaatatccgcccttgcagcacaacggcaagcgctcgaagctcgccttggcgagatcgggcaaaggctcggagaggctcaacacgagcacaccaaggtgcgtgagcaactcgaagcacttgcgcgtgccggcgagttcgccgagtttcgggaaatcgattggtcgagctgcgctgccgcgatcgcacgtcttgcggacgaaaaggcgcgactcgaatcggcaagcgacgccctcgcggagctaacggctcaattggactcggcgcaagcgtcgttgaaagagagtgaagcggcgatgtcggaaaccgactcggaactgggcggcatcctggccaagcgggaggcggcacaagcgttgcgcgaagagacgcacgcgctcgttgcagaagtggatgccgaactcgccgaacgaatcgaggccctgcgagcggagattctcggcgaacaccagctttccgtcgagtcatgcgacaaccgcgagcgggacgtgcgagaagcgttgacaacccgtatcgacaacgaaacgaagtcactcggccgcctggccgaaagaatcgtcaaggcaatggcggccttcaaggaagcctacaagctcgaaacggccgacttcgatgcgagcctcgacgcgaacccggagtaccgtgacatgctcgcgcggctgcaggcggacgatttgccgcgcttcgaaacgcgtttcaaggagctgctcaacgtcaatacgatcaacgagatcgccaactttcacgcccagctcgcgcgcgaacgggcgacgatcaaggaacgcatcgaacgcatcaacgaatcgttgcgacaaatcgactacaacgcgggccgatacatcatcctcgagagtcagcccagccccgacgcggaaatccgcgatttccagagcgacctgcgcgcttgcaccgagggcgaactcaccggctcggacgatagccaatactcggaggccaagttcctgcaagtcaaacgaatcatcgaccgcttccgcggccgcgaagggttgaccgagcaggaccggcgttggcgcgccaaggtgaccgacgtgcgcaactggtttctgttcgccgccagcgagcgctggcgcgaagacgacagcgaatacgaacactactcggactccggcggtaaatcgggcggccagaaggaaaagctcgcctacacgatccttgccgcgagcctcgcctaccagttcggcctcgaatggggcgccgtgcgttcccgatcgttccgcttcgtcgtcatcgacgaagcatttggccgaggctccgacgaatcggcgcagtacggtctcacgctgtttcagaaactgaacctgcaactgctgatcgtcacgccgctgcagaagattcacatcatcgagccgttcgtttcgagtgtcggattcgttcagaacgacggtggacgcgcctccaagctgcgcaccctgtcgatcgaggagtaccgcgcgcacaaggcggagttcgagcaatga

SEQ ID NO: 49082 - DNA, 1185 bp, Burkholderia ubonensis
atgagctggacaactgccgtcgaactgcgtgcccgcctccagcacctatgggcacgcggcgaatggctgcgaagcttcgtagacggcaccgaggggctattcccgctacgtctggcgatcaaaggcccgagttcgtccgagctggctgaacgcttcgacgcggtacgcgcatggatcgcggaaattgccgcgacgccgcacatacgcatcgaatggcgagaaatcaatcatcgaattctcggcgtgcagcgtttgccacgagcggcctgggtcgacagtctggacgatgcgctcgcagtcgccggcaagcaccgcgacgcagcgcagttcgcgcggctgctcgaaatcactcgcgcccgccagccgaagctcgccgcgtggcttgcgcagcgcccgttgcaagccctcgaattcgccggcgattgggaacgactgctggcagtcgtcgattggctgcaagcacatccgcacccgggcgtctatcttcgccaagccgaaatcgccggcgtcgacacgaaattcatcgaggcaaggcgcggcgtcctctcccaatggctcgatctcgtgctgccgtccgaggcgatcgacagcagccggacaggcgccgctcaattcgccgcgcgctacgggttccgcgagaagcaaccccgtattcgatttcgcgtgctcgatgagcggctcgccgttctgcccggcatgggccgccccgacatcgcactcgacgccgacagcttcgcgcgcctcgcactgccgtgccgccatgttttcgttacggaaaacgaaacaaattttctggcgtttcccgacgttccgcaggcgatcgtgctcttcggagcgggctacggctgggaagctctggagccggcgcgatggctcgcggactgtgcgctccactactggggcgacatcgacacgcacggctttgccattctcgaccaattgcgttgccgattccctcacgtgaactccttcctgatggaccgcgcgacactgatggcgcatgaagcattctggggagacgaaggcgatcaggtcgtgcgtgatctgccgcgactcacggcgcaagagcgcgagctctttgacgacctgcgcgacaaccggattcgccgcggattgcggctcgaacaggagcgcgtcgggttcgggtgggtcagagcggcgctagaggaacggtctttcgtttag

SEQ ID NO: 49083 - DNA, 1461 bp, Burkholderia ubonensis; identical to SEQ ID NO: 48971

SEQ ID NO: 49084 - DNA, 651 bp, Burkholderia ubonensis; identical to SEQ ID NO: 48936

SEQ ID NO: 49085 - DNA, 3372 bp, Burkholderia ubonensis
atgaatgagccgcgcacgctcggcctcgattttgccgcggacgacaccctgacgggctttcgcctcgagcggctcgaggttttcaactggggaaccttcgacgaccgggcttgggtgctgcgggtcgacggccgcaacggcctgctgacaggagacatcggttccggcaagtcgacgctcgtcgacgccattaccaccctcctcgtgcccgcgcagcgcatcgcctacaacaaggcggcaggcgcggacagcaaggaacgtacgctgcgctcgtatgtgctcggctactacaagtcggagcgcaacgaggtcacgggaacggccaagcccgtgagcctgcgcgaccataacagctattcggtgattttgggcgtgtttcgcaacgccgggtacgacgccaccgtcacgctcgcgcaagtgttctggatgaaggacgcgcaggctcaacctgcgcgattcttcgtcagtgccgaacgagatctctcgatcgcgaccgacttctcgcgcttcggcaccgacattgcgcaactgcgcaagaagctgcgcgggctgggcgccgaaatcgaggacacgtttccgaaatacagcgcctggttccggcggcgcttcggaatcgaaaacgagcaagcgctcgagctctttcatcaaacggtatcgatgaagtcggtgggcaatctcaccgacttcgtacgcagccacatgctcgagccgttcgacgtcgcaccgcgcgtcgacgccctgattgctcacttcgacgatctgaatcgcgcgcacgaggcggtactgaaaaccaagcgccaagtggaactgctgacaccgctcgtcgacgactgcgaccgccacagcgagcaagcacacgttctcgaaggctggcgcgcgtgccgtgaagcattgaggccctacttcgccgggctcaagctcggcctcgtcgaacgccgcctccaattgctcgaagaggatcatgcgcgcgcgacctcgcgaagggcgcggcacgaagaagcgcgcgaccaggcgcgccagcgcgtggacgatttacgccgtgccgtggccgaacaaggcggcgatcgcatcgcgcagctcgatgtcgagatccgcgagcacgagcgagaaagcgtgcgtcgccgcgaacgggcgcaacgctatgccgccatcgttacgctgttcggcgaaaccgaggccgcggatgaggctgcattcgcctcccagcgccaacgcctggctgagcagcgcagctcactcgttgacgacgaagcgcaacagcaaaatgcgataaccgaatggagcgtggcatttcgcgaaggcaaagcgcggcgtgatttgctggaggacgaaatcgcgagcctgaaagctcgacgcaacaacatcccgaaggaacaggtcgcgatgcgggcgagcctgtgctcagcgctcggcctggaggaagacgccctgccgttcgcgggcgaactcattcaggtgcgcgaggatgcgcgtgattgggagggcgccgccgagcgcgtcctgcgcaacttcggcctgtcgctgctcgtgcccgacgagcactatgcgaacgtcgcggcgtgggtcgatcgcactcatcttcgggggcggctcgtctactttcgcgtgcgctccgaacgcaccgcgcgtgtagccgaggccatcgagctgcaccgccactcgctcgcgcacaagctcgccatcaagcccgactcgcagttctatggctggctcgagcgcgaaatcggccgccgtttcgactatgcctgctgcgatacgcaggagcagtttcggcgcgagacgcgcgcgatcacgcgtgcgggccaggcgaaagcgcctggggagcgccacgaaaaagacgaccgccacgcgctcgacgatcgcagccgctacgtgctcggttggagcaacacggcaaaaatatccgccctcgcagcacaacggcaagcgctcgaagctcgccttggcgagatcggacaaaggctcggagaggtccaacatgagcacaccaaggtgcgtgagcaactcgaagcacttgcgcgtgccggcgagttcgccgagtttcgggaaatcgattggtcgagctgcgctgccgcgatcgcacgtcttgccgacgaaaaagcgcgactcgaatcggcaagcgacgccctcgcggagctaacggctcaattggactcggcgcaagcgtcgttgaaagagagtgaagcggcgatgtcggaaaccgactcggaactgggcggcatcctggccaagcgggaggcggcacaagcgttgcgcgaagagacgcacgcgctcgttgcagaagtggatgccgaactcgccgaacgaatcgaggccctgcgagcggagattctcggcgaacaccagctttccgtcgagtcatgcgacaaccgcgagcgggacgtgcgagaggcgttgacaacccgtatcgacaacgaaacgaaatcactcggccgcctggccgaaagaatcgtcaaggcaatggcggctttcaaggaagcctacaagctcgaaacggccgacttcgatgcgagcctcgccgcgaactcagagtaccgtgacatgctcgcgcggctgcaggcggacgatttgccgcgcttcgaaacgcgtttcaaggagctgctcaacgtcaacacgatcaacgagatcgccaactttcacgcccagcttgcgcgcgaacgggcgacgatcaaggaacgcatcgaacgcatcaacgaatcgctgcgacaaatcgactacaacgcgggtcgttacatcgtcctcgagagtcagcccagccccgacgcggagatccgcgaattccagagcgacctgcgcgcttgcaccgagggcgaactcaccggctcggacgatagccaatactcggaggccaagttcctgcaagtcaaacggatcatcgaccgcttccgcggccgcgaagggttgaccgagcaggaccggcgctggcgagccaaagtgaccgacgtgcgcaactggtttctgttcgccgccagcgagcgttggcgcgaggacgacagcgaatacgagcactactcggactccggcggtaaatcgggcggccagaaggaaaagctcgcctatacgatccttgccgcgagcctcgcctatcagttcggcctcgaatggggcgccgtgcgttcccgatcgttccgcttcgtcgtcatcgacgaagcatttggccgaggctccgacgaatcggcgcagtacggtctcacgctgtttcagaaactgaacctgcaactgctgatcgtcacgccactgcagaagattcacatcatcgagccgttcgtttcgagcgtcggattcgttcagaacgacggtggacgcgcctccaagctgcgcaccctgtcgatcgaggagtaccgcgcgcacaaggcggagttcgagcaatga

SEQ ID NO: 49086 - DNA, 1185 bp, Burkholderia ubonensis; identical to SEQ ID NO: 49046

SEQ ID NO: 49087 - DNA, 1461 bp, Burkholderia ubonensis
atgttcctcgactaccctaccctcgacgcgctgcgcacgcgccatcccgcttggcgacttttgcgctccgaccacgcgccgctcgccgtcagcttcctgcaccgcgcgttcgtcgcaccgaacgtgcgcgaggtggcggctccgtttcttgccgaagcactcgaggacgagctttacgcgttgcgcgaacaactcggcgacggcgccttcccgaagcccgcgctcgactatctgaacgactgggcaagtcctgaaaagggatggttgcgcaagttctatcgccaaggctccgatgaaccgcatttcgacctgacacccgccgcgggaaaagcgatagcgtggctcggcacgctgatggaacgaagctttgtcggcacggaatcccggctcctgacgcttttcgagttgctgcggcagatggccgaaggcagcgagacggacccggaaaggcgtcttgccgagctccacgcgcggcgcagccagctcgacgaagaaatcgctcgcgtggaagccggcgacgtccggctgctcgacgatgccgcgatcaaggaccgctttcagcaattcatgcagatggcgcgcgacctgctcacggatttccgtgaagtcgagcaaaacttccgtctgctggaccggcatgtacgtgagcgaatcgcgctctgggaaggatcgaagggtgcgctcatcgaagaaatcatgggcgagcgcgacgcgatcgccgattcggaccagggcagcagctttcgggcgttctgggacttcctgatgtcgagccgccgccaggaggaactctccgaacggctcgagcacgtgcttgcgctcccggcgatcacggaaatgaagccggacgcgcgcacgcggcgcgtccactatgactggctggaagccggcgagcacacgcaacgcacggtcgctcagctctcgcagcagcttcgacgtttcctcgacgatcaagcgtggctcgaaaaccgccgcatcatggacattctgcgcggtatcgaaacgaaagcgcttgtgctgcgtgaagcgcccccgccgggctccgtcatggagatcgagaccgcgtccgctgacatcgagctgccaatcgaacgcccgctttacgcgccggcgctgcgccctctcatcgccaacgtcgcaatcgagaccggcgatgcggacctcgatgcgtcggcactctacacgcagatcgtcgtcgatcgcgcgcgcctcgcaagccatatccgccgctgccttcaagatcggcggcaagtgacacttgccgaactggccgcttcgcagccgctcttgcacgggctcgctgaactcgtcgcctatttgcaactcagcgccgaagccggatcatttcgtgcgaccgtcgatgagaccgtctccgatacgatcgagtggcaggcgaacgatgccaacggagcagcaatcgtcaagcgcgcaacgatgccgcgggtgattttcacaaggtag

SEQ ID NO: 49088 - DNA, 651 bp, Burkholderia ubonensis; identical to SEQ ID NO: 48916

SEQ ID NO: 49089 - DNA, 3372 bp, Burkholderia ubonensis
atgaatgagccgcgcacgctcggcctcgattttgccgcggacgacacccggacgggctttcgcctcgagcggctcgaggttttcaactggggcaccttcgacgaacgggtctgggtgctgcgggtcgacggccgcaacggcctgctgacaggagacatcggttccggcaagtcgacgctcgtcgacgccattaccaccctcctcgtgcccgcgcagcgcatcgcctacaacaaggcggcaggcgcggacagcaaggaacgtacgctgcgctcgtatgtgctcggctactacaagtcggagcgcaacgaggtcacgggaacggccaagcccgtgagcctgcgcgaccataacagctattcggtgattttgggcgtgtttcgcaacgccgggtacgacgccaccgtcacgctcgcgcaagtgttctggatgaaggacgcgcaggctcaacctgcgcgattcttcgtcagcgccgaacgagatctctcgatcgcgacggacttctcgcgcttcggcaccgacattgcgcagctgcgcaagaagctgcgcgggctgggcgccgaaatcgaggacacgtttccgaaatacagcgcctggttccggcggcgcttcggaatcgaaaacgagcaagcgctcgagctctttcatcaaacggtatcgatgaagtcggtgggcaatctcaccgacttcgtacgcagccacatgctcgagccgttcgacgtcgcaccgcgcgtcgacgccctgattgctcacttcgacgatctgaatcgcgcgcacgaggcggtactgaaaaccaagcgccaagtggaattgctgacaccgctcgtcgacgactgcgaccgccacagcgagcaaggccacgttctcgaaggctggcgcgcgtgccgcgaagcattgaggccctacttcgccgggctcaagctcggcctcgtcgaacgccgcctccaattgctcgaggaggatcatgcgcgcgcgacctcgcgaaaggcgcggcacgaagaagcgcgcgaccaggcgcgccagcgcgtggacgatttgcgccgtgccgtggccgaacaaggcggcgatcgcatcgcgcagctcgatgtcgagattcgcgagcacgagcgagaaagcgtgcgtcgccgcgaacgtgcgcaacgctatgccgccatcgttacgctgttcggcgaaaccgaggccgcggatgaggctgcattcgcctcccagcgccaacgcctggccgagcagcgcagctcgctcgtcgacgacgaagcgcaacagcaaaatgcgataaccgaatggagcgtggcatttcgcgaaggaaaagcgcggcgtgatgtgctggaggacgaaatcgcgagcctgaaagcccgacgcaacaacatcccgaaggaacaggtcgcgatgcgggcgagcctgtgctcggcgctcggcctggaggaagacgccctgccgttcgcgggcgaactcattcaggtgcgcgaggatgcgcgtgattgggagggcgccgccgagcgcgtcctgcgcaacttcggcctgtcgctgctcgtgcccgacgagcactatgcgaacgtcgcggcgtgggtcgatcgcactcatcttcgggggcggctcgtctactttcgcgtgcgctccgaacgcaccgcgcgtgcagccgaggccatcgagctgcaccgccactcgctcgcgcacaagctcgcgatcaagcccgactcgcagttctatggctggctcgagcgcgaaatcggccgccgtttcgactatgcctgctgcgatacgcaggagcagtttcggcgcgagacgcgcgcgatcacgcgtgcgggccaggcgaaagcgcctggggagcgccacgaaaaagacgaccgccacgcgctcgacgatcgcagccgctacgtgctcggttggagcaacacggcaaaaatatccgcccttgcagcacaacggcaagcgctcgaagctcgccttggcgagatcgggcaaaggctcggagaggcccaacacgagcacaccaaggtgcgtgagcaactcgaagcacttgcgcgtgccggcgagttcgccgagtttcgggaaatcgattggtcgagctgcgctgccgcgatcgcacgtcttgcggacgaaaaggcgcgactcgaatcggcaagcgacgccctcgcagagctaacggctcaattggactcggcgcaagcgtcgttgaaagagagtgaagcggcgatgtcggaaaccgactcggaactgggcggcatcctggccaagcgggaggcggcacaagcgctgcgcgaagagacgcacgcgctcgttgcagaagtggatgccgaacttgccgaacgaatcgaggccctgcgagcggagattctcggcgaacaccagctttccgtcgagtcatgcgacaaccgcgagcgggacgtgcgagaagcgttgacaacccgtatcgacaacgaaacgaagtcactcggccgcctggccgaaagaatcgtcaaggcaatggcggccttcaaggaagcctacaagctcgaaacggccgacttcgatgcgagcctcgacgcgaacccggagtaccgtgacatgctcgcgcggctgcaggcggacgatttgccgcgcttcgaaacgcgtttcaaggagctgctcaacgtcaatacgatcaacgagatcgccaactttcacgcccagctcgcgcgcgaacgggcgacgatcaaggaacgcatcgaacgcatcaacgaatcgttgcgacaaatcgactacaacgcgggccgatacatcatcctcgagagtcagcccagccccgacgcggaaatccgcgatttccagagcgacctgcgcgcttgcaccgagggcgagctcaccggctcggacgatagccaatactcggaggccaagttcctgcaagtcaaacgaatcatcgaccgcttccgcggccgcgaagggttgaccgagcaggaccggcgttggcgcgccaaggtgaccgacgtgcgcaactggtttctgttcgccgccagcgagcgttggcgcgaagacgacagcgaatacgaacactactcggactccggcggtaaatcgggcggccagaaggaaaagctcgcctacacgatccttgccgcgagcctcgcctaccagttcggcctcgaatggggcgccgtgcgttcccgatcgttccgcttcgtcgtcatcgacgaagcatttggccgaggctccgacgaatcggcgcagtacggtctcacgctgtttcagaaactgaacctgcaactgctgatcgtcacgccactgcagaagattcacatcatcgagccgttcgtttcgagtgtcggattcgttcagaacgacggtggacgcgcctccaagctgcgcaccctgtcgatcgacgagtaccgcgcgcacaaggcggagttcgagcaatga

SEQ ID NO: 49090 - DNA, 1185 bp, Burkholderia ubonensis
atgagctggacaactgccgtcgaactgcgtgcccgcctccagcacctatgggcacgcggcgaatggctgcgaagcctcgtagacggcaccgaggggctattcccgctacgtctggcgctcaaaggcccaagctcgtccgagttggctgaacgcttcgacacggtacgcgcatggattacggaaattgccgcgacgccgcgcatacgcatcgaatggcgagaaatcaatcatcgaattctcggcgtgcagcgtttgccacgagcagcttgggtcgacagtctggacgatgcactcactgtcgccggcaagcaccgcgacgcagcgcggttcgagcggctgcttgaaatcacacgctcgcgccagccgaagctcatcgcgtggcttgcgcagcgcccgatgcaggccctcgaattggccggcgattgggaacgactgctggcggtcgtcgattggctgcaagcacatccgcacccgggcgtctatcttcgccaagccgaaatcgccggcgtcgacacgaaattcatcgaggcaaggcgcggcgtcctctcccaatggctcgatctcgtgctgccgtccgaggcgatcgacagcagccggacaggcgtcgctcaattcgccgcgcgctacgggttccgcgagaagcaaccccgtattcgatttcgcgtgctcgatgagcggctcgccgtcctgcccagcatgggccgccccgacatcgcactcgacgccgacagcttcgcgcgcctcgcactgccgtgccgccatgttttcgttacggaaaacgaaacaaattttctggcgtttcccgacgttccgcaggcgatcgtgctcttcggagcgggctacggctgggaagctctggagccggcgcgatggctcgcggactgtgcgctccactactggggcgacatcgacacgcacggctttgccattctcgaccaattgcgttgccgattccctcacgtgaactccttcctgatggaccgcgcgacactgatggcgcatgaagcattctggggagacgaaggcgatcaggtcatgcgtgatctgccgcgactcacggcgcaagagcgcgagctctttgacgacctgcgtgacaaccggattcgccgcggattgcggctcgaacaggagcgcgtcgggttcgggtgggtcagagcggcgctagagaaacggtctttcgtttag

SEQ ID NO: 49091 - DNA, 1461 bp, Burkholderia ubonensis; identical to SEQ ID NO: 48995

SEQ ID NO: 49092 - DNA, 651 bp, Burkholderia ubonensis; identical to SEQ ID NO: 48968

SEQ ID NO: 49093 - DNA, 3372 bp, Burkholderia ubonensis
atgaatgagccgcgcacgctcggcctcgattttgccgcggacgacaccctgacgggctttcgcctcgagcggctcgaggttttcaactggggcaccttcgacgaccgggcttgggtgctgcgggtcgatggccgcaacggcctgctgacaggagacatcggttccggcaagtcgacgctcgtcgacgccattaccaccctcctcgtgcccgcgcagcgcatcgcctacaacaaggcggcaggcgcggacagcaaggaacgtacgctgcgctcgtatgtgctcggctactacaagtcggagcgcaacgaggtcacgggaacggccaagcccgtgagcctgcgcgaccataacagctattcggtgattttgggcgtgtttcgcaacgccgggtacgacgccaccgtcacgctcgcgcaggtgttctggatgaaggacgcgcaggctcaacctgcgcgattcttcgtcagtgccgaacgagatctctcgatcgcgaccgatttctcgcgcttcggcaccgatattgcacagctgcgcaagaagctgcgcgggctgggcgccgaaatcgaggacacgtttccgaaatacagcgcctggttccggcggcgcttcggaatcgaaaacgagcaagcgctcgagctctttcatcaaacggtatcgatgaagtcggtgggcaatctcaccgacttcgtacgcagccacatgctcgagccgttcgacgtcgcaccgcgcgtcgacgccctgattgctcacttcgacgatctgaaccgcgcgcacgaggcggtactgaaaaccaagcgccaagtggaactgctgacaccgctcgtcgacgactgcgaccgccacagcgagcaagcacacgttctcgaaggctggcgcgcgtgccgtgaagcattgaggccctacttcgccgggctcaagctcggcctcgtcgaacgccgcctccaattgctcgaagaggatcatgcgcgcgcgacctcgcgaagggcgcggcacgaagaagcgcgcgaccaggcgcgccagcgcgtggacgatttacgccgtgccgtggccgaacaaggcggcgatcgcatcgcgcagctcgatgtcgagatccgcgagcacgagcgagaaagcgtgcgtcgccgcgaacgggcgcaacgctatgccgccatcgttacgctgttcggcgaaaccgaggccgcggatgaggctgcattcgcctcccagcgccaacgcctggctgagcagcgcagctcactcgttgacgacgaagcgcaacagcaaaatgcgataaccgaatggagcgtggcatttcgcgaaggcaaagcgcggcgtgatttgctggaggacgaaatcgcgagcctgaaagctcgacgcaacaacatcccgaaggaacaggtcgcgatgcgggcgagcctgtgctcagcgctcggcctggaggaagacgccctgccgttcgcgggcgaactcattcaggtgcgcgaggatgcgcgtgattgggagggcgccgccgagcgcgtcctgcgcaacttcggcctgtcgctgctcgtgcccgacgagcactatgcgaacgtcgcggcgtgggtcgatcgcactcatcttcgggggcggctcgtctactttcgcgtgcgctccgaacgcaccgcgcgtgtagccgaggccatcgagctgcaccgccactcgctcgcgcacaagctcgccatcaagcccgactcgcagttctatggctggctcgagcgcgaaatcggccgccgtttcgactatgcctgctgcgatacgcaggagcagtttcggcgcgagacgcgcgcgatcacgcgtgcgggccaggcgaaagcgcctggggagcgccacgaaaaagacgaccgccacgcgctcgacgatcgcagccgctacgtgctcggttggagcaacacggcaaaaatatccgccctcgcagcacaacggcaagcgctcgaagctcgccttggcgagatcggacaaaggctcggagaggtccaacatgagcacaccaaggtgcgtgagcaactcgaagcacttgcgcgtgccggcgagttcgccgagtttcgggaaatcgattggtcgagctgcgctgccgcgatcgcacgtcttgccgacgaaaaagcgcgactcgaatcggcaagcgacgccctcgcggagctaacggctcaattggactcggcgcaagcgtcgttgaaagagagtgaagcggcgatgtcggaaaccgactcggaactgggcggcatcctggccaagcgggaggcggcacaagcgttgcgcgaagagacgcacgcgctcgttgcagaagtggatgccgaactcgccgaacgaatcgaggccctgcgagccgagattctcggcgaacaccagctttccgtcgagtcatgcgacaaccgcgagcgggacgtgcgagaggcgttgacaacccgtattgacaacgaaacgaaatcactcggccgcctggccgaaagaatcgtcaaggcaatggcggctttcaaggaagcctacaagctcgaaacggccgacttcgatgcgagcctcgccgcgaactcagagtaccgtgacatgctcgcgcggctgcaggcggacgatttgccgcgcttcgaaacgcgtttcaaggagctgctcaacgtcaacacgatcaacgagatcgccaactttcacgcccagcttgcgcgcgaacgggcgacgatcaaggaacgcatcgaacgcatcaacgaatcgctgcgacaaatcgactacaacgcgggtcgttacatcgtcctcgagagtcagcccagccccgacgcggagatccgcgaattccagagcgacctgcgcgcttgcaccgagggcgaactcaccggctcggacgatagccaatactcggaggccaagttcctgcaagtcaaacggatcatcgaccgcttccgcggccgcgaagggttgaccgagcaggaccggcgttggcgcgccaaggtgaccgacgtgcgcaactggtttctgttcgccgccagcgagcgttggcgcgaggacgacagcgaatacgagcactactcggactccggcggtaaatcgggcggccagaaggaaaagcttgcctatacgatccttgccgcgagcctcgcctatcagttcggcctcgaatggggcgccgtgcgttcccgatcgttccgcttcgtcgtcatcgacgaagcatttggccgaggctccgacgaatcggcgcagtacggtctcacgctgtttcagaaactgaacctgcaactgctgatcgtcacgccactgcaaaagattcacatcatcgagccgttcgtttcgagtgtcggattcgttcagaacgacggtggacgcgcctccaagctgcgcaccctgtcgatcgaggagtaccgcgcgcacaaggcggagttcgagcaatga

SEQ ID NO: 49094 - DNA, 1200 bp, Burkholderia ubonensis; identical to SEQ ID NO: 48974

SEQ ID NO: 49095 - DNA, 1461 bp, Burkholderia ubonensis
atgttcctcgactaccctaccctcgacgcgctgcgcacgcgccatcccgcttggcgactgttacgctccgaccacgcgccgctcgccgtcagcttcctgcaccgcgcgttcgtcgcgccgaacgtgcgggaggtggcggctccgtttcttgccgaagcactcgaggacgagctttacgcgttgcgcgaacaactcggcgacggcgccttcccgaagcccgcgctcgactatctgaacgactgggcgagtcctgaaaagggatggttgcgcaagttctatcgccaaggctccgatgaaccgcatttcgacctgacacccgccgcgggaaaagcgatagcgtggctcggcacgctgatggaacgaagctttgtcggcacggaatcccggctcctgacgcttttcgagttgctgcggcagatggccgaaggcagcgagacggacccggaaaggcgtcttgccgagctccacgcgcggcgcagccagctcgacgaagaaatcgctcgcgtggaagccggcgacgtccggctgctcgacgatgccgcgatcaaggaccgctttcagcaattcatgcagatggcgcgcgacctgctcacggatttccgtgaagtcgagcaaaacttccgtctgctggaccggcatgtacgtgagcgaatcgcgctctgggaaggatcgaagggtgcgctcatcgaagaaatcatgggcgagcgcgacgcgatcgccgattcggaccagggcagcagctttcgggcgttctgggacttcctgatgtcgagccgccgccaggaggaactctccgaacggctcgagcacgtgcttgcgctcccggcgatcacggaaatgaagccggacgcgcgcacgcggcgcgtccactatgactggctggaagccggcgagcacacgcaacgcacggtcgctcagctctcgcagcagcttcgacgtttcctcgacgatcaagcgtggctcgaaaaccgccgcatcatggacattctgcgcggtatcgaaacgaaagcgcttgtgctgcgtgaagcgcccccgccgggctccgtcatggagatcgagaccgcgtccgctgacatcgagctgccaatcgaacgcccgctttacgcgccggcgctgcgccctctcatcgccaacgtcgcaatcgagaccggcgatgcggacctcgatgcgtcggcactctacacgcagatcgtcgtcgatcgcgcgcgcctcgcaagccacatccgccgctgccttcaagatcggcggcaagtgacacttgccgaactggccgcttcgcagccgctcttgcatgggctcgctgaactcgtcgcctatttgcaactcagcgccgaagccggatcatttcgtgcgaccgtcgatgagaccgtctccgatacgatcgagtggcaggcgaacgatgccaacggagcagcaatcgtcaagcgcgcaacgatgccgcgggtgattttcacaaggtag

SEQ ID NO: 49096 - DNA, 651 bp, Burkholderia ubonensis
atggaagaacagcaaaccccgtcgcttggtcgaggtgacttgtcgacggttgccatcgcgctgctcaagggcgtggtttatcgtgatgtaaacgagcgcctctgggccgcactgctcgaattgcagacacacgtgcgcgactacgtcgccgtgcttggcctcgagctcgtcgtggacgaggcggaaggctacgccttcgtaaagagccgcaccgagcctgacgccgaagtcgacggagaccaggtcaagctgccccggctcgttgcacggcgtccactctcgttccccgtgagcctgctgctcgcgctgctgcgaaagaaactggcggaatgggatgccggcggcggtgacacgcggctcgtcctttcgcgcgaggacatcgtcgagctcgtacgcgtcttccttcccgcgagcactaacgaggcgcgcctcgtcgatcagatcgacacgcacgtgaacaagatcgtcgacctcggtttcctgcgccggatgaagaccgcgagcggaccgcccacattcgaggtgcgacgcattctcaaggcgttcgtcgatgcgcaatggctgctcgatttcgacgcgcggctcgcaagctatcaggcgcaccttcgggattcgacgaattcagaccaaacggagagtcgcgatgaatga

SEQ ID NO: 49097 - DNA, 3372 bp, Burkholderia ubonensis
atgaatgagccgcgcacgctcggcctcgattttgccgcggacgacacccggacgggctttcgtctcgaacggctcgaggttttcaactggggcaccttcgacgaccgagcttgggtgctgcgggtcgacggccgcaacggcctgctgacaggagacatcggttccggcaagtcgacgctcgtcgacgccattaccaccctcctcgtgcccgcgcagcgcatcgcctacaacaaggcggcaggcgcggacagcaaggaacgtacgctgcgctcgtatgtgctcggctactacaagtcggagcgcaacgaggtcacgggaacggccaagcccgtgagcctgcgcgaccataacagctattcggtgattttgggcgtgtttcgcaacgccgggtacgacgccaccgtcacgctcgcgcaagtgttctggatgaaggacgcgcaggctcaacctgcgcgattcttcgtcagcgccgaacgagatctctcgatcgcgacggacttctcgcgcttcggcaccgacattgcgcagctgcgcaagaagctgcgcgggctgggcgccgaaatcgaggacacgtttccgaaatacagcgcctggttccggcggcgcttcggaatcgaaaacgagcaagcgctcgagctctttcatcaaacggtatcgatgaagtcggtgggcaatctcaccgacttcgtacgcagccacatgctcgagccgttcgacgtcgcaccgcgcgtcgacgccctgattgctcacttcgacgatctgaatcgcgcgcacgaggcggtactgaaaaccaagcgccaagtggaattgctgacaccgctcgtcgacgactgcgaccgccacagcgagcaaggccacgttctcgaaggctggcgcgcgtgccgcgaagcattgaggccctacttcgccgggctcaagctcggcctcgtcgaacgccgcctccaattgctcgaggaggatcatgcgcgcgcgacctcgcgaaaggcgcggcacgaagaagcgcgcgaccaggcgcgccagcgcgtggacgatttgcgccgtgccgtggccgaacaaggcggcgatcgcatcgcgcagctcgatgtcgagattcgcgagcacgagcgagaaagcgtgcgtcgccgcgaacgtgcgcaacgctatgccgccatcgttacgctgttcggcgaaaccgaggccgcggatgaggctgcattcgcctcccagcgccaacgcctggccgagcagcgcagctcgctcgtcgacgacgaagcgcaacagcaaaatgcgataaccgaatggagcgtggcatttcgcgaaggaaaagcgcggcgtgatgtgctggaggacgaaatcgcgagcctgaaagcccgacgcaacaacatcccgaaggaacaggtcgcgatgcgggcgagcctgtgctcggcgctcggcctggaggaagacgccctgccgttcgcgggcgaactcattcaggtgcgcgaggatgcgcgtgattgggagggcgccgccgagcgcgtcctgcgcaacttcggcctgtcgctgctcgtgcccgacgagcactatgcgaacgtcgcggcgtgggtcgatcgcactcatcttcgggggcggctcgtctactttcgcgtgcgctccgaacgcaccgcgcgtgcagccgaggccatcgagctgcaccgccactcgctcgcgcacaagctcgcgatcaagcccgactcgcagttctatggctggctcgagcgcgaaatcggccgccgtttcgactatgcctgctgcgatacgcaggagcagtttcggcgcgagacgcgcgcgatcacgcgtgcgggccaggcgaaagcgcctggggagcgccacgaaaaagacgaccgccacgcgctcgacgatcgcagccgctacgtgctcggttggagcaacacggcaaaaatatccgcccttgcagcacaacggcaagcgctcgaagctcgccttggcgagatcgggcaaaggctcggagaggcccaacacgagcacaccaaggtgcgtgagcaactcgaagcacttgcgcgtgccggcgagttcgccgagtttcgggaaatcgattggtcgagctgcgctgccgcgatcgcacgtcttgcggacgaaaaggcgcgactcgaatcggcaagcgacgccctcgcagagctaacggctcaattggactcggcgcaagcgtcgttgaaagagagtgaagcggcgatgtcggaaaccgactcggaactgggcggcatcctggccaagcgggaggcggcacaagcgctgcgcgaagagacgcacgcgctcgttgcagaagtggatgccgaacttgccgaacgaatcgaggccctgcgagcggagattctcggcgaacaccagctttccgtcgagtcatgcgacaaccgcgagcgggacgtgcgagaagcgttgacaacccgtatcgacaacgaaacgaagtcactcggccgcctggccgaaagaatcgtcaaggcaatggcggccttcaaggaagcctacaagctcgaaacggccgacttcgatgcgagcctcgacgcgaacccggagtaccgtgacatgctcgcgcggctgcaggcggacgatttgccgcgcttcgaaacgcgtttcaaggagctgctcaacgtcaatacgatcaacgagatcgccaactttcacgcccagctcgcgcgcgaacgggcgacgatcaaggaacgcatcgaacgcatcaacgaatcgttgcgacaaatcgactacaacgcgggccgatacatcatcctcgagagtcagcccagccccgacgcggaaatccgcgatttccagagcgacctgcgcgcttgcaccgagggcgagctcaccggctcggacgatagccaatactcggaggccaagttcctgcaagtcaaacgaatcatcgaccgcttccgcggccgcgaagggttgaccgagcaggaccggcgttggcgcgccaaggtgaccgacgtgcgcaactggtttctgttcgccgccagcgagcgttggcgcgaagacgacagcgaatacgaacactactcggactccggcggtaaatcgggcggccagaaggaaaagctcgcctacacgatccttgccgcgagcctcgcctaccagttcggcctcgaatggggcgccgtgcgttcccgatcgttccgcttcgtcgtcatcgacgaagcatttggccgaggctccgacgaatcggcgcagtacggtctcacgctgtttcagaaactgaacctgcaactgctgatcgtcacgccactgcagaagattcacatcatcgagccgttcgtttcgagtgtcggattcgttcagaacgacggtggacgcgcctccaagctgcgcaccctgtcgatcgacgagtaccgcgcgcacaaggcggagttcgagcaatga

SEQ ID NO: 49098 - DNA, 1185 bp, Burkholderia ubonensis; identical to SEQ ID NO: 49090

SEQ ID NO: 49099 - DNA, 1461 bp, Burkholderia ubonensis
atgttcctcgactaccctaccctcgacgcgctgcgcacgcgccatcccgcctggcgacttttgcgctccgaccacgcgccgctcgccgtcagcttcctgcaccgcgcgttcgtcgcgccgaacgtgcgcgaggtggcggctccgtttcttgccgaagcactcgaggacgagctttacgcgttgcgcgaacaactcggcgacggcgccttcccgaagcccgcgctcgagtatctgaacgactgggcgagccctgaaaagggatggttgcgcaagttctatcgccagggctccgatgaaccgcatttcgacctgacacccgccgcaggaaaagcgatctcgtggctcggcacgctgatggaacgaagctttgtcggcacggaatcccggctcctgacgcttttcgagttgctgcggcagatggccgaaggcagcgagacggacccggaaaggcgtctcgccgagctccacgcgcggcgcagccagatcgacgaagaaatcgctcgcgtggaggccggtgacgttcggctgctcgacgatgccgcgatcaaggaccgctttcagcaattcatgcagatggcgcgcgacctgctcacggatttccgtgaagtcgagcagaacttccgtctgctggaccggcatgtacgcgagcgaatcgcgctctgggaaggatcgaagggtgcgctcatcgaagaaatcatgggcgagcgcgacgcgatcgccgattcggaccagggcagcagctttcgggcgttctgggacttcctgatgtcgagccgccgtcaggaggaactctccgaacggctcgagcacgtgcttgcgctcccggcgatcacggaaatgaagccggacgcgcgcacgcggcgcgtccactatgactggctggaagccggcgagcacacgcaacgcacggtcgcccagctctcgcagcagcttcgacgtttcctcgacgatcaagcgtggctcgaaaaccgccgcatcatggacattctgcgcggtatcgaaacgaaagcgcttgtgctgcgtgaagcgcccccgccgggctccgtcatggagatcgagaccgcgtccgctgacatcgagctgccaattgaacgcccgctttacgcccctgcgctgcgccctctcatcgccaacgtcgcaatcgagaccggcgatgcggacctcgatgcgtcggcactctacacgcagatcgttgtcgatcgcgcgcgcctcgcaagccacatccgccgctgccttcaagatcggcggcaagtgacacttgccgaactggccgcttcgcagccgctcctgcatgggctcgctgaactcgtcgcctatttgcaactgagcgccgaagtcggaacatttcgcgcgaccgtcgatgagaccgtctccgatacgatcgagtggcaggcgaacgatgccaacggagcagcaatcgtcaagcgcgcaacgatgccgcgggtgattttcacaaggtag

SEQ ID NO: 49100 - DNA, 651 bp, Burkholderia ubonensis; identical to SEQ ID NO: 49072

SEQ ID NO: 49101 - DNA, 3372 bp, Burkholderia ubonensis
atgaatgagccgcgcacgctcggcctcgattttgccgcggacgacaccctgacgggctttcgcctcgagcggctcgaggttttcaactggggcaccttcgacgaccgggtctgggtgctgcgggtcgacggccgcaacggcctgctgacaggagacatcggttccggcaagtcgacgctcgtcgacgccattaccaccctcctcgtgcccgcgcagcgcatcgcctacaacaaggcggcaggcgcggacagcaaggaacgtacgctgcgctcgtatgtgctcggctactacaagtcggagcgcaacgaggtcacgggaacggccaagcccgtgagcctgcgcgaccataacagctattcggtgattttgggcgtgtttcgcaacgccgggtacgacgccaccgtcacgctcgcgcaagtgttctggatgaaggacgcgcaggctcaacctgcgcgattcttcgtcagtgccgaacgagatctctcgatcgcgaccgacttctcgcgcttcggcaccgacattgcgcagctgcgcaagaagctgcgcgggctgggcgccgaaatcgaggacacgtttccgaaatacagcgcctggttccggcggcgcttcggaatcgaaaacgagcaagcgctcgagctctttcatcaaacggtatcgatgaagtcggtgggcaatctcaccgacttcgtacgcagccacatgctcgagccgttcgacgtcgcaccgcgcgtcgacgccctgattgctcacttcgacgatctgaatcgcgcgcacgaggcggtactgaaaaccaagcgccaagtggaactgctgacaccgctcgtcgacgactgcgaccgccacagcgagcaagcacacgttctcgaaggctggcgcgcgtgccgtgaagcactgaggccctacttcgccgggctcaagctcggcctcgtcgaacgccgcctccaattgctcgacgaggatcatgcgcgcgcgacctcgcgaaaggcgcggcacgaagaagcgcgcgaccaggcgcgccagcgcgtggacgatttacgccgtgccgtggccgaacaaggcggcgatcgcatcgcgcagctcgatgccgagatccgcgagcacgagcgagaaagcgtgcgtcgccgcgaacgcgcgcaacgctatgccgccatcgttacgctgttcggcgaaaccgaggccgcggatgaggctgcattcgcctcccagcgccaacgcctggccgagcagcgcagctcactcgtcgacgacgaagcgcaacagcaaaatgcgataaccgaatggagcgtggcatttcgcgaaggcaaagcgcggcgtgatttgctggaagacgaaatcgcgagcctgaaagctcgacgcaacaacatcccgaaggaacaggtcgcgatgcgggcgagcctgtgctcggcgctcggcctggaggaagacgccgtgccgttcgcgggcgagctcattcaggtgcgcgaggatgcgcgtgattgggagggcgccgccgagcgcgtcctgcgcaacttcggcctgtcgctgctcgtgcccgacgagcactatgcgaacgtcgcggcgtgggtcgatcgcactcatctccgggggcggctcgtctactttcgcgtgcgctcggaacgcagcgcgcgtgcagccgaggccatcgagctgcaccgccactcgctcgcgcacaagctcgccatcaagcccgactcgcagttctatggctggctcgagcgcgaaatcggccgccgtttcgactatgcctgctgcgatacgcaggagcagtttcggcgcgagacgcgcgcgatcacgcgtgcgggccaggcgaaagcgcctggggagcgccacgaaaaagacgaccgccacgcgctcgacgatcgcagccgctacgtgctcggttggagcaacacggcaaaaatatccgccctcgcagcacaacggcaagcgctcgaagctcgccttggcgagatcgggcaaaggctcggagaggctcaacacgagcacaccaaggtgcgtgagcaactcgaagcacttgcgcgtgccggcgagttcgccgagtttcgggaaatcgattggtcgagctgcgctgccgcgatcgcacgtcttgcggacgaaaaggcgcgactcgaatcggcaagcgacgccctcgcggagctaacggctcaattggactcggcgcaagcgtcgttgaaagagagtgaagcggcgatgtcggaaaccgactcggaactgggcggcatcctggccaagcgggaggcggcacaagcgctgcgcgaagagacgcacgcgctcgttgcagaagtggatgccgaacttgccgaacgaatcgaggccctgcgagcggagattctcggcgaacaccagctttccgtcgagtcatgcgacaaccgcgagcgggacgtgcgagaagcgttgacaacccgtatcgacaacgaaacgaagtcactcggccgcctggccgaaagaatcgtcaaggcaatggcggccttcaaggaagcctacaagctcgaaacggccgacttcgatgcgagcctcgacgcgaacccggagtaccgtgacatgctcgcgcggctgcaggcggacgatttgccgcgcttcgaaacgcgtttcaaggagctgctcaacgtcaatacgatcaacgagatcgccaactttcacgcccagctcgcgcgcgaacgggcgacgatcaaggaacgcatcgaacgcatcaacgaatcgttgcgacaaatcgactacaacgcgggccgatacatcatcctcgagagtcagcccagccccgacgcggaaatccgcgatttccagagcgacctgcgcgcttgcaccgagggcgaactcaccggctcggacgatagccaatactcggaggccaagttcctgcaagtcaaacgaatcatcgaccgcttccgcggccgcgaagggttgaccgagcaggaccggcgttggcgcgccaaggtgaccgacgtgcgcaactggtttctgttcgccgccagcgagcgctggcgcgaagacgacagcgaatacgaacactactcggactccggcggtaaatcgggcggccagaaggaaaagctcgcctacacgatccttgccgcgagcctcgcctaccagttcggcctcgaatggggcgccgtgcgttcccgatcgttccgcttcgtcgtcatcgacgaagcatttggccgaggctccgacgaatcggcgcagtacggtctcacgctgtttcagaaactgaacctgcaactgctgatcgtcacgccactgcagaagattcacatcatcgagccgttcgtttcgagtgtcggattcgttcagaacgacggtggacgcgcctccaagctgcgcaccctgtcgatcgacgagtaccgcgcgcacaaggcggagttcgagcaatga

SEQ ID NO: 49102 - DNA, 1185 bp, Burkholderia ubonensis
atgagctggacaactgccgtcgaactgcgtgcccgcctccagcacctatgggcacgcggcgaatggctgcgaagcctcgtagacggcaccgaggggctattcccgctacgtctggcgctcaaaggcccaagctcgtccgagttggctgaacgcttcgacacggtacgcgcatggattacggaaattgccgcgacgccgcgcatacgcatcgaatggcgagaaatcaatcatcgaattctcggcgtgcagcgtttgccacgagcggcctgggtcgacagtctggacgatgcgctcgcagtcgccggcaagcaccgcgacgcagcgcagttcgcgcggctgctcgaaatcactcgcgcccgccagccgaagctcgccgcgtggcttgcgcagcgcccgttgcaagccctcgaattcgccggcgattgggaacgactgctggcagtcgtcgattggctgcaagcacatccgcacccgggcgtctatcttcgccaagccgaaatcgccggcgtcgacacgaaattcatcgaggcaaggcgcggcgtcctctcccaatggctcgatctcgtgctgccgtccgaggcgatcgacagcagccggacaggcgtcgctcaattcgccgcgcgctacgggttccgcgagaagcaaccccgtattcgatttcgcgtgctcgatgagcggctcgccgttctgcccggcatgggccgccccgacatcgcactcgacgccgacagcttcgcgcgcctcgcactgccgtgccgccatgttttcgttacggaaaacgaaacaaattttctggcgtttcccgacgttccgcaggcgatcgtgctcttcggagcgggctacggctgggaagctctggagccggcgcgatggctcgcggactgtgcgctccactactggggcgacatcgacacgcacggctttgccattctcgaccaattgcgttgccgattccctcacgtgaactccttcctgatggaccgcgcgacactgatggcgcatgaagcattctggggagacgaaggcgatcaggtcgtgcgtgatctgccgcgactcacggcgcaagagcgcgagctctttgacgacctgcgtgacaaccggattcgccgcggattgcggctcgaacaggagcgcgtcgggttcgggtgggtcagagcggcgctagaggaacggtctttcgtttag

SEQ ID NO: 49103 - DNA, 1461 bp, Burkholderia ubonensis
atgttcctcgactaccctaccctcgatgcgctgcgcacgcgccatcccgcttggcgacttttgcgctccgaccacgcgccgctcgccgtcagcttcctgcaccgcgcgttcgtcgcgccgaacgtgcgcgaggtggcggctccgtttcttgccgaagcactcgaggacgagctttacgcgttgcgcgaacaactcggcgatggcgccttcccgaagcccgcgctcgagtatctgaacgactgggcgagtcctgaaaagggatggttgcgcaaattctatcgccaaggctccgatgaaccgcatttcgacctgacacccgccgcgggaaaagcgatagcgtgggtcggcacgctgatggaacgaagctttgtcggcacggaatcccggctcctgacgcttttcgagttgctgcggcagatggccgaaggcagcgagacggacccggaaaggcgtcttgccgagctccacgcgcggcgcagccagatcgacgaagaaatcgctcgcgtggaggccggtgacgttcggctgctcgacgatgccgcgatcaaggaccgctttcagcaattcatgcagatggcgcgcgacctgcttacggatttccgtgaagtcgagcaaaacttccgtctgctggaccggcacgtacgcgagcgaatcgcgctctgggaaggatcgaagggtgcgctcatcgaagaaatcatgggcgagcgcgacgcgatcgccgattcggaccagggcagcagctttcgggcgttctgggacttcctgatgtcgagccgccgccaggaggaactctccgaacggctcgagcacgtgcttgcgctcccggcgatcacggaaatgaagccggacgcgcgcacgcggcgcgtccactatgactggctggaagccggcgagcacacgcaacgcacggtcgctcagctctcgcagcagctgcgacgtttcctcgacgatcaagcgtggctcgaaaaccgccgcatcatggacattctgcgcggtatcgaaacgaaagcgcttgtgctgcgtgaagcgcccccgtcgggctccgtcatggagatcgagaccgcgtccgctgacatcgagctgccaatcgaacgcccgctttacgcgccggcgctgcgccctctcatcgccaacgtcgcaatcgagaccggcgatgcggacctcgatgcgtcggcactctacacgcagatcgtcgtcgatcgcgcgcgcctcgcaagccacatccgccgctgccttcaagatcggcggcaagtgacacttgccgaactggccgcttcgcagccgctcctgcatgggctcgctgaactcgtcgcctatttgcaactcagcgccgaagccggatcatttcgtgcgaccgtcgatgagaccgtctccgatacgatcgagtggcaggcgaacgatgccaacggagcagcaatcgtcaagcgcgcaacgatgccgcgtgtgattttcacaaggtag

SEQ ID NO: 49104 - DNA, 651 bp, Burkholderia ubonensis
atggaagaacagcaaacttcgtcgcttggtcgaggtgacttgtcgacggttgccatcgcgctgctcaagggcgtggtttatcgtgatgtaaacgagcacctctgggccgcactgctcgaattgcagacacacgtgcgcgactacgtcgccgtgcttggcctcgagctcgtcgtggacgaggcggaaggctacgccttcgtaaagagccgcaccgagcctgacgccgaagtcgacggagaccaggtcaagctgccccggctcgttgcacggcgtccactctcgttccccgtgagcctgctgctcgccctgctgcgaaagaagctggcggaatgggatgctggcggcggcgacacgcggctcgtcctttcgcgcgaggacatcgtcgagctcgtacgcgtcttccttccctcgagcacgaacgaggcgcgcctcgtcgatcagatcgatacgcacgtgaacaagatcgtcgacctcggtttcctgcgccggatgaagaccgcgagcggaccgccgacgttcgaggtgcgacgcattctcaaggcgttcgtcgatgcgcaatggctgctcgatttcgacgcgcggctcgcaagctatcaagcgcaccttcgggatgcgacgaattcggatcaaatggagagtcgcgatgaatga

SEQ ID NO: 49105 - DNA, 3372 bp, Burkholderia ubonensis
atgaatgagccgcgcacgctcggcctcgattttaccgcggacgacacccggacgggctttcgcctcgagcggctcgaggttttcaactggggcaccttcgacgaacgggtctgggtgctgcgggtcgatggccgcaacggcctgctgacaggagacatcggttccggcaagtcgacgctcgtcgacgccattaccaccctcctcgtgcccgcgcagcgcatcgcctacaacaaggcggcaggcgcggacagcaaggaacgtacgctgcgctcgtatgtgctcggctactacaagtcggagcgcaacgaggtcacgggagcggccaagcccgtgagcctgcgcgaccataacagctattcggtgattttgggcgtgtttcgcaacgccgggtacgacgccaccgtcacgctcgcgcaagtgttctggatgaaggacgcgcaggctcaacctgcgcgattcttcgtcagtgccgaacgagatctctcgatcgcgaccgacttctcgcgcttcggcaccgacattgcgcagctgcgcaagaagctgcgcgggctgggcgccgaaatcgaggacacgtttccgaaatacagcgcctggttccggcggcgcttcggcatcgaaaacgagcaagcgctcgagctctttcatcaaacggtatcgatgaagtcggtgggcaatctcaccgacttcgtacgcagccacatgctcgagccgttcgacgtcgcaccgcgcgtcgacgccctgattgctcacttcgacgatctgaatcgcgcgcacgaggcggtactgaaaaccaagcgccaagtggaactgctgacaccgctcgtcgacgactgcgaccgccacagcgagcaagcacacgttctcgaaggctggcgcgcgtgccgtgaagcactgaggccctacttcgccgggctcaagctcggcctcgtcgaacgccgcctccaattgctcgacgaggatcatgcgcgcgcgacctcgcgaaaggcgcgtcacgaagaagcgcgcgaccaggcgcgccagcgcgtggacgatttgcgccgtgccgtggccgaacaaggcggcgatcgcatcgcgcagctcgatgccgagatccgcgagcacgagcgagaaagcgtgcgtcgccgcgaacgggcgcaacgctatgccgccatcgttacgctgttcggcgaaaccgaggccgcggatgaggctgcattcgcctcccagcgccaacgcctggccgagcagcgcagctcactcgtcgacgacgaagcgcaacagcaaaatgcgataaccgaatggagcgtggcatttcgcgaaggaaaagcgcggcgtgatttgctggaagacgaaatcgcgagcctgaaagctcgacgcaacaacatcccgaaggaacaggtcgcgatgcgggcgagcctgtgctcggcgctcggcctggaggaagacgccctgccgttcgcgggcgaactcattcaggtgcgcgaggatgcgcgtgattgggagggcgccgccgagcgcgtcctgcgcaacttcggcctgtcgctgctcgtgcccgacgagcactatgcgaacgtcgtggcgtgggtcgatcgcactcatcttcgggggcggctcgtctactttcgcgtacgctccgaacgcaccgcgcgtgcagccgaggccatcgagctgcaccgccactcgctcgcgcacaagctcgcgatcaagcccgactcgcagttctatggctggctcgagcgcgaaatcggccgccgtttcgactatgcctgctgcgatacgcaggagcagtttcggcgcgagacgcgcgcgatcacgcgtgcgggccaggcgaaagcgcctggggagcgccacgaaaaagacgaccgccacgcgctcgacgatcgcagccgctacgtgctcggttggagcaacacggcaaaaatatccgcccttgcagcacaacggcaagcgctcgaagctcgccttggcgagatcgggcaaaggctcggagaggcccaacacgagcacaccaaggtgcgtgagcaactcgaagcacttgcgcgtgccggcgagttcgccgagtttcgggaaatcgattggtcgagctgcgctgccgcgatcgcacgtcttgcggacgaaaaggcgcgactcgaatcggcaagcgacgccctcgcagagctaacggctcaattggactcggcgcaagcgtcgttgaaagagagtgaagcggcgatgtcggaaaccgactcggaactgggcggcatcctggccaagcgggaggcggcacaagcgttgcgcgaagagacgcacgcgctcgttgcagaagtggatgccgaactcgccgaacgaatcgaggccctgcgagcagagattctcggcgaacaccagctttccgtcgagtcatgcgacaaccgcgagcgggacgtgcgagaagcgttgacaacccgtatcgacaacgaaacgaagtcactcggccgcctggccgaaagaatcgtcaaggcaatggcggccttcaaggaagcctacaagctcgaaacggccgacttcgatgcgagcctcgacgcgaacccggagtaccgtgacatgctcgcgcggctgcaagcggacgatttgccgcgcttcgaaacgcgtttcaaggagctgctcaacgtcaatacgatcaacgagatcgccaactttcacgcccagctcgcgcgcgaacgggcgacgatcaaggaacgcatcgaacgcatcaacgaatcgttgcgacaaatcgactacaacgcgggccgatacatcatcctcgagagtcagcccagccccgacgcggaaatccgcgatttccagagcgacctgcgcgcttgcaccgagggcgagctcaccggctcggacgatagccaatactcggaggccaagttcctgcaagtcaaacgaatcatcgaccgcttccgcggccgcgaagggttgaccgagcaggaccggcgttggcgcgccaaggtgaccgacgtgcgcaactggtttctgttcgccgccagcgagcgctggcgcgaagacgacagcgaatacgaacactactcggactccggcggtaaatcgggcggccagaaggaaaagctcgcctatacgatccttgccgcgagcctcgcctatcagttcggcctcgaatggggcgccgtgcgttcccggtcgttccgcttcgtcgtcatcgacgaggcgtttggccgaggctccgacgaatcggcgcagtacggtctcacgctgtttcagaaactgaacctgcaactgctgatcgtcacgccgctgcagaagattcacatcatcgagccgttcgtttcgagtgtcggattcgttcagaacgacggtggacgcgcctccaagctgcgcaccctgtcgatcgaggagtaccgcgcgcacaaggcggagttcgagcaatga

SEQ ID NO: 49106 - DNA, 1185 bp, Burkholderia ubonensis
atgagctggacaactgccgtcgaactgcgtgcccgcctccagcacctatgggcacgcggcgaatggctgcgaagcttcgtagacggcaccgaggggctattcccgctacgtctggcgatcaaaggcccgagttcgtccgagctggctgaacgcttcgacgcggtacgcacatggatcgcggaaattgccgcgacgccgcacatacgcatcgaatggcgagaaatcaatcatcgaattctcggcgtgcagcgtttgccacgagcggcctgggtcgacagtctggacgatgcgctcgcagtcgccggcaagcaccgcgacgcagcgcagttcgcgcggctgctcgaaatcactcgcgcgcgccagccgaagctcgccgcgtggcttgcgcagcgcccgttgcaagccctcgaattcgccgccgattgggaacgactgctggcggtcgtcgattggctgcaagcacatccgcacccgggcgtctatcttcgccaagccgaaatcgccggcgtcgacacgaaattcatcgaggcaaggcgcggcgtcctctcccaatggctcgatctcgtgctgccgtccgaggcgatcgacagcagccggacaggcgtcgctcaattcgccgcgcgctacgggttccgcgagaagcaaccccgtattcgatttcgcgtgctcgatgagcggctcgccgttctgcccggcatgggccgccccgacatcgcactcgacgccgacagcttcgcgcgcctcgcactgccgtgccgccatgttttcgttacggaaaacgaaacaaattttctggcgtttcccgacgttccgcaggcgatcgtgctcttcggagcgggctacggctgggaagctctggagccggcgcgatggctcgcggactgtgcgctccactactggggcgacatcgacacgcacggctttgccattctcgaccaattgcgttgccgattccctcacgtgaactccttcctgatggaccgcgcgacactgatggcgcatgaagcattctggggagacgaaggcgatcaggtcatgcgtgatctgccgcgactcacggcgcaagagcgcgagctctttgacgacctgcgtgacaaccggattcgccacggattgcggctcgaacaggagcgcgtcgggttcgggtgggtcagagcggcgctagaggaacggtctttcgtttag

SEQ ID NO: 49107 - DNA, 1461 bp, Burkholderia ubonensis
atgttcctcgactaccctaccctcgacgcgctgcgcacgcgccatcccgcttggcgacttttgcgctccgaccacgcgccgctcgccgtcagcttcctgcaccgcgcgttcgtcgcgccgaacgtgcgcgaggtggcggctccgtttcttgccgaagcactggaggacgagctttacgcgttgcgcgaacaactcggcgacggcgccttcccgaagcccgcgctcgactatctgaacgactgggcgagtcctgaaaagggatggttgcgcaagttctatcgccaaggctccgatgaaccgcatttcgacctgacacccgccgcaggaaaagcgatcgcgtggctcggcacgctgatggaacgaagctttgtcggcacggaatcccggctcctgacgcttttcgagttgctgcggcagatggccgaaggcagcgagacggacccggaaaggcgtcttgccgagctccacgcgcggcgcagccagattgacgaagaaatcgctcgcgtggaggccggtgacgttcggctgctcgacgatgccgcgatcaaggaccgctttcagcaattcatgcagatggcgcgcgacctgctcacggatttccgtgaagtcgagcaaaacttccgtctgctggaccggcacgtacgcgagcgaatcgcgctctgggaaggatcgaagggtgcgctcatcgaagaaatcatgggcgagcgcgacgcgatcgccgattcggaccagggcagcagctttcgggcgttctgggatttcctgatgtcgagccgccgccaggaggaactctccgaacggctcgagcacgtgcttgcgctcccggcgatcacggaaatgaagccggacgcgcgcacgcggcgcgtccactacgactggctggaagccggcgagcacacgcaacgcacggtcgctcagctctcgcagcagcttcgacgtttcctcgacgatcaagcgtggctcgaaaaccgccgcatcatggacattctgcgcggtatcgaaacgaaagcgcttgtgctgcgtgaagcgcccccgccgggctccgtcatggagatcgagaccgcgtccgctgacatcgagctgccaattgaacgcccgctttacgcccctgcgctgcgccctctcatcgccaacgtcgcaatcgagaccggcgatgcggacctcgatgcgtcggcactctacacgcagatcgtcgtcgatcgcgcgcgcctcgcaagccacatccgccgctgccttcaagatcggcggcaagtgacacttgccgaactggccgcttcgcagccgctcctgcatgggctcgctgaactcgtcgcctatttgcaactgagcgccgaagccggaacatttcgcgcgaccgtcgatgagaccgtctccgatacgatcgagtggcaggcaaacgatgccaacggagcagcaatcgtcaagcgcgcaacgatgccgcgggtgattttcacaaggtag

SEQ ID NO: 49108 - DNA, 651 bp, Burkholderia ubonensis; identical to SEQ ID NO: 48936

SEQ ID NO: 49109 - DNA, 3372 bp, Burkholderia ubonensis
atgaatgagccgcgcacgctcggcctcgattttgccgcggacgacaccctgacgggctttcgcctcgagcggctcgaggttttcaactggggaaccttcgacgaccgggcttgggtgctgcgggtcgacggccgcaacggcctgctgacaggagacatcggttccggcaagtcgacgctcgtcgacgccattaccaccctcctcgtgcccgcgcagcgcatcgcctacaacaaggcggcaggcgcggacagcaaggaacgtacgctgcgctcgtatgtgctcggctactacaagtcggagcgcaacgaggtcacgggagcggccaagcccgtgagcctgcgcgaccataacagctattcggtgattttgggcgtgtttcgcaacgccgggtacgacgccaccgtcacgctcgcgcaagtgttctggatgaaggacgcgcaggctcaacctgcgcgattcttcgtcagtgccgaacgagatctctcgatcgcgaccgacttctcgcgcttcggcaccgacattgcgcagctgcgcaagaagctgcgcgggctgggcgccgaaatcgaggacacgtttccgaaatacagcgcctggttccggcggcgcttcggaatcgaaaacgagcaagcgctcgagctctttcatcaaacggtatcgatgaagtcggtgggcaatctcaccgacttcgtacgcagccacatgctcgagccgttcgacgtcgcaccgcgcgtcgacgccctgattgctcacttcgacgatctgaaccgcgcgcacgaggcggtactgaaaaccaagcgccaagtggaattgctgacaccgctcgtcgacgactgcgaccgccacagcgcgcaaggccgcgttctcgaaggctggcgcgcgtgccgtgaagcattgaggccctacttcgccgggctcaagctcggcctcgtcgaacgccgcctccaattgctcgaagaggatcatgcgcgcgcgacctcgcgaaaggcgcgacacgaagaagcgcgcgaccaggcacgccagcgcgtggacgatttgcgccgtgccgtggccgaacaaggcggcgatcgcatcgcgcagctcgatgtcgagatccgcgagcacgagcgagaaagcgtgcgtcgccgcgaacgggcgcaacgctatgccgccatcgttacgctgttcggcgaaaccgaggccgcggatgaggctgcattcgcctcccagcgccaacgcctggctgagcagcgcagctcactcgttgacgacgaagcgcaacagcaaaatgcgataaccgaatggagcgtggcatttcgcgaaggcaaagcgcggcgtgatttgctggaggacgaaatcgcgagcctgaaagctcgacgcaacaacatcccgaaggaacaggtcgcgatgcgggcgagcctgtgctcggcgctcggcctggaggaagacgccctgccgttcgcgggcgaactcattcaggtgcgcgaggatgcgcgtgattgggagggcgccgccgagcgcgtcctgcgcaacttcggcctgtcgctgctcgtgcccgacgagcactatgcgaacgtcgcggcgtgggtcgatcgcactcatctccgggggaggctagtctactttcgcgtgcgctccgaacgcaccgcgcgtgcagccgaggccatcgagctgcaccgccactcgctcgcgcacaagctcgccatcaagcccgactcgcagttctatggctggctcgagcgcgaaatcggccgccgtttcgactatgcctgctgcgatacgcaggagcagtttcggcgcgagacgcgcgcgatcacgcgtgcgggccaggcgaaagcgcctggggagcgccacgaaaaagacgaccgccacgcgctcgacgatcgcagccgctacgtgctcggttggagcaatacggcaaaaatatccgccctcgcagcacaacggcaagcgctcgaagctcgccttggcgagatcgggcaaaggctcggagaggcccaacacgagcacaccaaggtgcgtgagcaactcgaagcacttgcgcgtgccggcgagttcgccgagtttcgggaaatcgattggtcgagctgcgctgccgcgatcgcacgtcttgcggacgaaaaggcgcgactcgaatcggcaagcgacgccctcgcggagctaacggctcaattggactcggcgcaagcgtcgttgaaagagagtgaagcggcgatgtcggagaccgactcggaactgggcggcatcctggccaagcgggaggcggcacaagcgttgcgcgaagagacgcacgcgctcgttgcagaagtggatgccgaactcgccgaacgaatcgaggccctgcgagccgagattctcggcgaacaccagctttccgtcgagtcatgcgacaaccgcgagcgggacgtgcgagaggcgttgacaacccgtatcgacaacgaaacgaaatcactcggccgcctggccgaaagaatcgtcaaggcaatggcggctttcaaggaagcctacaagctcgaaacggccgacttcgatgcgagcctcgccgcgaactcagagtaccgtgacatgctcgcgcggctgcaggcggacgatttgccgcgcttcgaaacgcgtttcaaggagctgctcaacgtcaacacgatcaacgagatcgccaactttcacgcccagcttgcgcgcgaacgggcgacgatcaaggaacgcatcgaacgcatcaacgaatcgctgcgacaaatcgactacaacgcgggtcgttacatcgtcctcgagagtcagcccagccccgacgcggagatccgcgaattccagagcgacctgcgcgcttgcaccgagggcgaactcaccggctcggacgatagccaatactcggaggccaagttcctgcaagtcaaacggatcatcgaccgcttccgcggccgcgaagggttgaccgagcaggaccggcgctggcgagccaaagtgaccgacgtgcgcaactggtttctgttcgccgccagcgagcgttggcgcgaggacgacagcgaatacgagcactactcggactccggcggtaaatcgggcggccagaaggaaaagctcgcctatacgatccttgccgcgagcctcgcctatcagttcggcctcgaatggggcgccgtgcgttcccgatcgttccgcttcgtcgtcatcgacgaagcatttggccgaggctccgacgaatcggcgcagtacggtctcacgctgtttcagaaactgaacctgcaactgctgatcgtcacgccactgcagaagattcacatcatcgagccgttcgtttcgagcgtcggattcgttcagaacgacggtggacgcgcctccaagctgcgcaccctgtcgatcgaggagtaccgcgcgcacaaggcggagttcgagcaatga

SEQ ID NO: 49110 - DNA, 1185 bp, Burkholderia ubonensis
atgagttggacaactgccgtcgaactgcgtgcccgcctccagcgcctatgggaacgcggcgaatggctgcgaagcctcgtagacggtgccgaggggctattcccgctacgtctggcgatcaaaggcccaagctcgtccgagttggctgaacgcttcgacacggtacgcgcatggattacggaaattgccgcgacgccgcgcatacgcatcgaatggcgagaaatcaatcatcgaattctcggccagcagcgtttgccacgagcagcttgggtcgacagtctggacgatgcgctcactgtcgccggcaagcaccgcgacgcagcgcggttcgagcggctgcttgaaatcacacgctcgcgccagccgaagctcatcgcatggcttgcgcagcgcccgatgcaggccctcgaattggccggcgattgggaacgactgctggcagtcgtcgattggctgcaagcacatccgcagccgggcatctatcttcgccaagccgaaatcgccggcgtcgacacgaaattcatcgaggcgcggcgcggcgtcctctcccaatggctcgatctcgtgctgccgtccgaggcgatcgacagcagccggaccggcgccgcccaattcgccgctcgctacgggttccgcgataagccgcctcgtattcgatttcgcgtgctcgatgagcggctcgccgtcctgcccggcatgggccgacccgacatcacactcgacgccgacagcttcgcgcgcctcgcactgccgtgccgccatgttttcgttacggaaaacgaaacaaattttctggcgtttcccgacgttccgcaggcgatcgtgctcttcggagcgggctacggctgggaagctctggagccggcacaatggctcacggactgtgcgctccactactggggcgacatcgacacgcacggctttgccattctcgaccaattgcgttgccgattccctcacgcgggatccttcttgatggaccgcgcgacactgatagcgcatgaagcattctggggagacgaaggcgatcaggtcatgcgtgatctgccgcgactcacggcgcaagagcgcgagctctttgacgacctccgtgacaaccggattcgccgcggattacggctcgagcaggagcgcgtcgggttcgggtgggtcagagcggcgctagaggaacggtctttcgtttag

SEQ ID NO: 49111 - DNA, 1461 bp, Burkholderia ubonensis
atgttcctcgactaccctaccctcgacgcgctgcgcacgcgccatcccgcttggcgacttttgcgctccgaccacgcgccgctcgccgtcagcttcctgcaccgcgcgttcgtcgcgccgaacgtgcgcgaggtggcggctccgtttcttgccgaagcactcgaggacgagctttacgcgttgcgcgaacaactcggcgacggcgccttcccgaagcccgcgctcgagtatctgaacgactgggctagtcctgaaaagggatggttgcgcaagttctatcgccaaggctccgatgaaccgcatttcgacctgacacccgccgcgggaaaagcgatagcgtggctcggcacgctgatggaacgaagctttgtcggcacggaatcccggctcctgacgcttttcgagttgctgcggcagatggccgaaggcagcgagacggacccggaaaggcgtcttgccgaactccacgcgcggcgcagccagatcgacgaagaaatcgctcgcgtggaagccggcgacgtccggctgctcgacgatgccgcgatcaaggaccgctttcagcaattcatgcagatggcgcgcgacctgctcacggatttccgtgaagtcgagcagaacttccgtctgctggaccggcatgtacgcgagcgaatcgcgctctgggaaggatcgaagggtgcgctcatcgaagaaatcatgggcgagcgcgacgcgatcgccgattcggaccagggcagcagctttcgggcgttctgggacttcctgatgtcgagccgccgccaggaggaactctccgaacggctcgagcacgtgcttgcgctcccggcgatcacggaaatgaagccggacgcgcgcacgcggcgcgtccactatgactggctggaagccggcgagcacacgcaacgcacggtcgctcagctctcgcagcagcttcgacgtttcctcgacgatcaagcgtggctcgaaaaccgccgcatcatggacattctgcgcggtatcgaaacgaaagcgcttgtgctgcgtgatgcgcccccgccgggctccgtcatggagatcgagaccgcgtccgctgacatcgagctgccaattgaacgcccgctttacgcgccggcgctgcgccctctcatcgccaacgtcgcaatcgagaccggcgatgcggacctcgatgcgtcggcactctacacgcagatcgtcgtcgatcgcgcgcgcctcgcaagccacatccgccgctgccttcaagatcggcggcaagtgacacttgccgaactggccgcttcgcagccgctcgtgcatgggctcgctgaactcgtcgcctatttgcaactgagcgccgaagccggaacatttcgcgcgaccgtcgatgagaccgtctccgatacgatcgagtggcaggcaaacgatgccaacggagcagcaatcgtcaagcgcgcaacgatgccgcgggtgattttcacaaggtag

SEQ ID NO: 49112 - DNA, 651 bp, Burkholderia ubonensis
atggaagaacagcaaaccccgtcgcttggtcgaggtgacttgtcgacggttgccgtcgcgctgctcaagggcgtggtttatcgtgatggaaacgagcgcctctgggccgcactgctcgaattgcagacacacgtgcgcgactacgtcgccgtgcttggcctcgagctcgtcgtggacgaggcggaaggctacgccttcgtaaagagccgcaccgagcctgacgccgaagtcgacggagaccaggtcaagctgccccggctcgttgcacggcgtccactctcgttccccgtgagcctgctgctcgcgctgctgcgaaagaaactggcggaatgggatgccggcggcggcgacacgcggctcgtcctttcgcgcgaggacatcgtcgagctcgtacgcgtcttccttcccgcgagcactaacgaggcgcgcctggtcgatcagatcgatacgcacgtgaacaagatcgtcgacctcggtttcctgcgccggatgaagaccgcgagcggaccgcccacattcgaggtgcgacgcattctcaaggcgttcgtcgatgcgcaatggctgctcgatttcgacgcgcggctcgcaagctatcaggcgcaccttcgagattcgacgaattcggaccaaacggagagtcgcgatgaatga

SEQ ID NO: 49113 - DNA, 3372 bp, Burkholderia ubonensis
atgaatgagccgcgcacgctcggcctcgatttcgccgcggacgacacccggacgggctttcgcctcgagcggctcgaggttttcaactggggcaccttcgacgaacgggtctgggtgctgcgggtcgatggccgcaacggcctgctgacaggagacatcggttccggcaagtcgacgctcgtcgacgccatcaccaccctcctcgtgcccgcgcagcgcatcgcctacaacaaggcggcaggcgcggacagcaaggaacgtacgctgcgctcgtatgtgctcggctactacaagtcggagcgcaacgaggtcacgggagcagccaagcccgtgagcctgcgcgaccacaatcattattcggtgatattgggggtgtttcgcaacgccgggtacgacgccaccgtcacgctcgcgcaagtgttctggatgaaggacgcgcaggctcaacctgcgcgattcttcgtcagtgccgaacgagatctctcgatcgcgaccgacttctcgcgcttcggcaccgacattgcgcagctgcgcaagaagctgcgcgggctgggcgccgaaatcgaggacacgtttccgaaatacagcgcctggttccggcggcgcttcggaatcgaaaacgagcaagcgctcgagctctttcatcaaacggtatcgatgaagtcggtgggcaatctcaccgacttcgtacgcagccacatgctcgagccgttcgacgtcgcaccgcgcgtcgacgccctgattgctcacttcgacgatctgaatcgcgcgcacgaggcggtactgaaaaccaagcgccaagtggaattgctgacaccgctcgtcgacgactgcgaccgccacagcgagcaaggccacgttctcgaaggctggcgcgcgtgccgtgaagcattgaggccctacttcgccgggctcaagctcggcctcgtcgaacgccgcctccaattgctcgaagaggatcatgcgcgcgcgaccttgcgaaaggcgcggcacgaagaagcgcgcgaccaggcgcgccagcgcgtggacgatttgcgccgtgccgtggccgaacaaggcggcgatcgcatcgcgcagctcgatgtcgagatccgcgagcacgagcgagaaagcgtgcgtcgccgcgaacgcgcgcaacgctatgccgccatcgttacgctgttcggcgaaaccgaggccgcggatgaggctgcattcgcctcccagcgccaacgcctggccgagcagcgcagctcactcgtcgacgacgaagcgcaacagcaaaatgcgataaccgaatggagcgtggcgtttcgcgaaggaaaagcgcggcgtgatttgctggaggacgaaatcgcgagcctgaaagctcgacgcaacaacatcccgaaggaacaggtcgcgatgcgggcgagcctgtgctcagcgctcggcctggaggaagacgccctgccgttcgcgggcgaactcattcaggtgcgcgaggatgcgcgtgattgggagggcgccgccgagcgcgtcctgcgcaacttcggcctgtcgctgctcgtgcccgacgagcactatgcgaacgtcgcggcgtgggtcgatcgcactcatcttcgggggcggctcgtctactttcgcgtgcgctccgaacgcaccgcgcgtgtagccgaggccatcgagctgcaccgccactcgctcgcgcacaagctcgccatcaagcccgactcgcagttctatggctggctcgagcgcgaaatcggccgccgtttcgactatgcctgctgcgatacgcaggagcagtttcggcgcgagacgcgcgcgatcacgcgtgcgggccaggcgaaagcgcctggggagcgccacgaaaaagacgaccgccacgcgctcgacgatcgcagccgctacgtgctcggttggagcaacacggcaaaaatatccgccctcgcagcacaacggcaagcgctcgaagctcgccttggcgagatcggacaaaggctcggagaggtccaacatgagcacaccaaggtgcgtgagcaactcgaagcacttgcgcgtgccggcgagttcgccgagtttcgggaaatcgattggtcgagctgcgctgccgcgatcgcacgtcttgccgacgaaaaagcgcgactcgaatcggcaagcgacgccctcgcggagctaacggctcaattggactcggcgcaagcgtcgttgaaagagagtgaagcggcgatgtcggaaaccgactcggaactgggcggcatcctggccaagcgggaggcggcacaagcgttgcgcgaagagacgcacgcgctcgttgcagaagtggatgccgaactcgccgaacgaatcgaggccctgcgagccgagattctcggcgaacaccagctttccgtcgagtcatgcgacaaccgcgagcgggacgtgcgagaggcgttgacaacccgtattgacaacgaaacgaaatcactcggccgcctggccgaaagaatcgtcaaggcaatggcggctttcaaggaagcctacaagctcgaaacggccgacttcgatgcgagcctcgccgcgaactcagagtaccgtgacatgctcgcgcggctgcaggcggacgatttgccgcgcttcgaaacgcgtttcaaggagctgctcaacgtcaacacgatcaacgagatcgccaactttcacgcccagcttgcgcgcgaacgggcgacgatcaaggaacgcatcgaacgcatcaacgaatcgctgcgacaaatcgactacaacgcgggtcgttacatcgtcctcgagagtcagcccagccccgacgcggagatccgcgaattccagagcgacctgcgcgcttgcaccgagggcgaactcaccggctcggacgatagccaatactcggaggccaagttcctgcaagtcaaacggatcatcgaccgcttccgcggccgcgaagggttgaccgagcaggaccggcgctggcgagccaaagtgaccgacgtgcgcaactggtttctgttcgccgccagcgagcgttggcgcgaggacgacagcgaatacgagcactactcggactccggcggtaaatcgggcggccagaaggaaaagctcgcctatacgatccttgccgcgagcctcgcctatcagttcggcctcgaatggggcgccgtgcgttcccgatcgttccgcttcgtcgtcatcgacgaagcatttggccgaggctccgacgaatcggcgcagtacggtctcacgctgtttcagaaactgaacctgcaactgctgatcgtcacgccactgcagaagattcacatcatcgagccgttcgtttcgagcgtcggattcgttcagaacgacggtggacgcgcctccaagctgcgcaccctgtcgatcgaggagtaccgcgcgcacaaggcggagttcgagcaatga

SEQ ID NO: 49114 - DNA, 1185 bp, Burkholderia ubonensis; identical to SEQ ID NO: 48938

SEQ ID NO: 49115 - DNA, 1461 bp, Burkholderia ubonensis; identical to SEQ ID NO: 48935

SEQ ID NO: 49116 - DNA, 651 bp, Burkholderia ubonensis; identical to SEQ ID NO: 48936

SEQ ID NO: 49117 - DNA, 3372 bp, Burkholderia ubonensis; identical to SEQ ID NO: 48937

SEQ ID NO: 49118 - DNA, 1185 bp, Burkholderia ubonensis; identical to SEQ ID NO: 48938

SEQ ID NO: 49119 - DNA, 1461 bp, Burkholderia ubonensis
atgttcctcgactaccctaccctcgacgcgctgcgcacgcgccatcccgcttggcgacttttgcgctccgaccacgcgccgctcgccgtcagcttcctgcaccgcgcgttcgtcgcgccgaacgtgcgcgaggtggcggctccgtttcttgccgaagcactcgaggacgagctttacgcgttgcgcgaacaactcggcgacggcgccttcccgaagcccgcgctcgactatctgaacgactgggcgagtcctgaaaagggatggttgcgcaagttctatcgccaaggctccgatgaaccgcatttcgacctgacacccgccgcaggaaaagcgatcgcgtggctcggcacgctgatggaacgaagctttgtcggcacggaatcccggctcctgacgcttttcgagttgctgcggcagatggccgaaggcagcgagacggacccggaaaggcgtcttgccgagctccacgcgcggcgcagccagatcgacgaagaaatcgctcgcgtggaggccggtgacgtccggctgctcgacgatgccgcgatcaaggaccgctttcagcaattcatgcagatggcgcgcgacctgctcacggatttccgtgaagtcgagcaaaacttccgtctgctggaccggcatgtacgcgagcgaatcgcgctctgggaaggatcgaagggtgcgctcatcgaagaaatcatgggcgagcgcgacgcgatcgccgattcggaccagggcagcagctttcgggcgttctgggacttcctgatgtcgagccgccgtcaggaggaactctccgaacggctcgagcacgtgcttgcgctcccggcgatcacggaaatgaagccggacgcgcgcacgcggcgcgtccactacgactggctggaagccggcgagcacacgcaacgcacggtcgctcagctctcgcagcagcttcgacgtttcctcgacgatcaagcgtggctcgaaaaccgccgcatcatggacattctgcgcggtatcgaaacgaaagcgcttgtgctgcgtgaagcgcccccgccgggctccgtcatggagatcgagaccgcgtccgctgacatcgagctgccaattgaacgcccgctttacgcccctgcgctgcgccctctcatcgccaacgtcgcaatcgagaccggcgatgcggacctcgatgcgtcggcactctacacgcagatcgtcgtcgatcgcgcgcgcctcgcaagccacatccgccgctgccttcaagatcggcggcaagtgacacttgccgagctggccgcttcgcagccgctcctgcatgggctcgctgaactcgtcgcctatttgcaactgagcgccgaagccggaacatttcgcgcgaccgtcgatgagaccgtctccgatacgatcgagtggcaggcaaacgatgccaacggagcagcaatcgtcaagcgcgcaacgatgccgcgggtgattttcacaaggtag

SEQ ID NO: 49120 - DNA, 651 bp, Burkholderia ubonensis
atggaagaacagcaaaccccgtcgcttgatcgaggtgacttgtcgacggttgccatcgcgctgctcaagggcgtggtttatcgtgatggaagcgagcgcctctgggccgcactgctcgaattgcagacacacgtgcgcgactacgtcgccgtgcttggcctcgagctcgtcgtggacgaggcggaaggctacgccttcgtaaagagccgcaccgagcctgacgccgaagtcgacggagaccaggccaagctgccccggctcgttgcacggcgtccactctcgttccccgtgagcctgctgctcgcgctgctgcgaaagaaactggcggaatgggatgccggcggcggcgacacgcggctcgtcctttcgcgcgaggacatcgtcgagctcgtacgcgtcttccttcccgcgagcacgaacgaggcgcgcctggtcgatcagatcgatacgcacgtgaacaagatcgtcgacctcggtttcctgcgccggatgaagaccgcgagcggaccgcccacattcgaggtgcgacgcattctcaaggcgttcgtcgatgcgcaatggctgctcgatttcgacgcgcggctcgcaagctatcaggcgcaccttcgagattcgacgaattcggaccaaacggagagtcgcgatgaatga

SEQ ID NO: 49121 - DNA, 3372 bp, Burkholderia ubonensis
atgaatgagccgcgcacgctcggcctcgattttgccgcggacgacaccctgacgggctttcgcctcgagcggctcgaggttttcaactggggcaccttcgacgaacgggtctgggtgctgcgggtcgacggccgcaacggcctgctgacaggagacatcggttccggcaagtcgacgctcgtcgacgccatcaccaccctcctcgtgcccgcgcagcgcatcgcctacaacaaggcggcaggcgcggacagcaaggaacgtacgctgcgctcgtatgtgctcggctactacaagtcggagcgcaacgaggtcacgggagcggccaagcccgtgagcctgcgcgaccataacagctattcggtgattttgggcgtgtttcgcaacgccgggtacgacgccaccgtcacgctcgcgcaagtgttctggatgaaggacgcgcaggctcaacctgcgcgattcttcgtcagtgccgaacgagatctctcgatcgcgaccgacttctcgcgcttcggcaccgacattgcgcagctgcgcaagaagctgcgcgggctgggcgccgaaatcgaggacacgtttccgaaatacagcgcctggttccggcggcgcttcggaatcgaaaacgagcaagcgctcgagctctttcatcaaacggtatcgatgaagtcggtgggcaatctcaccgacttcgtacgcagccacatgctcgagccgttcgacgtcgcaccgcgcgtcgacgccctgattgctcacttcgacgatctgaatcgcgcgcacgaggcggtactgaaaaccaagcgccaagtggaactgctgacaccgctcgtcgacgactgcgaccgccacagcgagcaagcacacgttctcgaaggctggcgcgcgtgccgtgaagcattgaggccctacttcgccgggctcaagctcggcctcgtcgaacgccgcctccaattgctcgaagaggatcatgcgcgcgcgacctcgcgaagggcgcggcacgaagaagcgcgcgaccaggcgcgccagcgcgtggacgatttacgccgtgccgtggccgaacaaggcggcgatcgcatcgcgcagctcgatgtcgagatccgcgagcacgagcgagaaagcgtgcgtcgccgcgaacgggcgcaacgctatgccgccatcgttacgctgttcggcgaaaccgaggccgcggatgaggctgcattcgcctcccagcgccaacgcctggccgagcagcgcagctcactcgttgacgacgaagcgcaacagcaaaatgcgataaccgaatggagcgtggcatttcgcgaaggcaaagcgcggcgtgatttgctggaggacgaaatcgcgagcctgaaagcccgacgcaacaacatcccgaaggaacaggtcgcgatgcgggcgagcctgtgctcggcgctcggcctggaggaagacgccctgccgttcgcgggcgaactcattcaggtgcgcgaggatgcgcgtgattgggagggcgccgccgagcgcgtcctgcgcaacttcggcctgtcgctgctcgtgcccgacgagcactatgcaaacgtcgcggcgtgggtcgatcgcactcatcttcgggggcggctcgtctactttcgcgtgcgctccgaacgcaccgcgcgtgcagccgaggccatcgagctgcaccgccactcgctcgcgcacaagctcgccatcaagcccgactcgcagttctatggctggctcgagcgcgaaatcggccgccgtttcgactatgcctgctgcgatacgcaggagcagtttcggcgcgagacgcgcgcgatcacgcgtgcgggccaggcgaaagcgcctggggagcgccacgaaaaagacgaccgccacgcgctcgacgatcgcagccgctacgtgctcggttggagcaatacggcaaaaatatccgccctcgcagcacaacggcaagcgctcgaagctcgccttggcgagatcgggcaaaggctcggagaggcccaacacgagcacaccaaggtgcgtgagcaactcgaagcacttgcgcgtgccggcgagttcgccgagtttcgggaaatcgattggtcgagctgcgctgccgcgatcgcacgtcttgcggacgaaaaggcgcgactcgaatcggcaagcgacgccctcgcggagctaacggctcaattggactcggcgcaagcgtcgttgaaagagcgtgaagcggcgatgtcggaaaccgactcggaactgggcggcatcctggccaagcgggaggcggcacaagcgttgcgcgaagagacgcacgcgctcgttgcagaagtggatgccgaactcgccgaacgaatcgaggccctgcgagccgagattctcggcgaacaccagctttccgtcgagtcatgcgacaaccgcgagcgggacgtgcgagaggcgttgacaacccgtatcgacaacgaaacgaaatcactcggccgcctggccgaaagaatcgtcaaggcaatggcggctttcaaggaagcctacaagctcgaaacggccgacttcgatgcgagcctcgccgcgaactcagagtaccgtgacatgctcgcgcggctgcaggcggacgatttgccgcgcttcgaaacgcgtttcaaggagctgctcaacgtcaacacgatcaacgagatcgccaactttcacgcccagcttgcgcgcgaacgggcgacgatcaaggaacgcatcgaacgcatcaacgaatcgctgcgacaaatcgactacaacgcgggtcgttacatcgtcctcgagagtcagcccagccccgacgcggagatccgcgaattccagagcgacctgcgcgcttgcaccgagggcgaactcaccggctcggacgatagccaatactcggaggccaagttcctgcaagtcaaacgaatcatcgaccgcttccgcggccgcgaagggttgaccgagcaggaccggcgctggcgagccaaagtgaccgacgtgcgcaactggtttctgttcgccgccagcgagcgttggcgcgaggacgacagcgaatacgagcactactcggactccggcggtaaatcgggcggccagaaggaaaagctcgcctatacgatccttgccgcgagcctcgcctatcagttcggcctcgaatggggcgccgtgcgttcccgatcgttccgcttcgtcgtcatcgacgaagcatttggccgaggctccgacgaatcggcgcagtacggtctcacgctgtttcagaaactgaacctgcaactgctgatcgtcacgccactgcagaagattcacatcatcgagccgttcgtttcgagcgtcggattcgttcagaacgacggtggacgcgcctccaagctgcgcaccctgtcgatcgaggagtaccgcgcgcacaaggcggagttcgagcaatga

SEQ ID NO: 49122 - DNA, 1185 bp, Burkholderia ubonensis
atgagttggacaactgccgtcgaactgcgtgcccgcctccagcgcctatgggaacgcggcgaatggctgcgaagcctcgtagacggtgccgaggggctattcccgctacgtctggcgatcaaaggcccaagctcgtccgagttggctgaacgcttcgacacggtacgcgcatggattacggaaattgccgcgacgccgcacatacgcatcgaatggcgagaaatcaatcatcgaattctcggcgtgcagcgtttgccacgagcagcctgggtcgacagtctggacgatgcgctcactgtcgccggcaagcaacgcgacgcagcgcggttcgagcggctgcttgaaatcacacgctcgcgccagccgaagctcatcgcatggcttgcgcagcgcccgatgcaggccctcgaattggccggcgattgggaacgactgctggcagtcgtcgattggctgcaagcacatccgcagccgggcatctatcttcgccaagccgaaatcgccggagtcgacacgaaattcatcgaggcgcggcgcggcgtcctctcccaatggctcgatctcgtgctgccgtccgaggcgatcgacagcagtcggaccggcgccgcccaattcgccgctcgctacgggttccgcgataagccgcctcgtattcgatttcgcgtgctcgatgagcggctcgccgtcctgcccggcatgggccgacccgacatcacactcgacgccgacagcttcgcgcgcctcgcactgccgtgccgccatgttttcgttacggaaaacgaaacaaattttctggcgtttcccgacgttccgcaggcgatcgtgctcttcggagcgggctacggctgggaagctctggagccggcacaatggctcacggactgtgcgctccactactggggcgacatcgacacgcacggctttgccattctcgaccaattgcgttgccgattccctcacgcgggatccttcttgatggaccgcgcgacactgatagcgcatgaagcattctggggagacgaaggcgatcaggtcatgcgtgatctgccgcgactcacggcgcaagagcgcgagctctttgacgacctgcgtgacaaccggattcgccgcggattacggctcgagcaggagcgcgtcgggttcgggtgggtcagagcggcgctagaggaacggtctttcgtttag

SEQ ID NO: 49123 - DNA, 1482 bp, Burkholderia cepacia
atgaaaaccgcactagcgctgcatgaactgaaggcaatgcgagagaaaccgatgtggatgctgctcggctcccatcaggcgcctttgaccatggcgctattgcaatcgctgttttccgaaagctcgacgcagttgggctcggcaagtctaatagagaagctctcggtggagctggacggattgcgtgcgcgcggagaggatattgaaaagacgccgcagattctggttgccgagtgggtgcaggccaaatggctagctcgcagttttccagaaggggccagcgaagagctatacgagctctcggccgatgtagtgccagcactgcagctggtcaggggacagcttgagccgaggcagacggccactgaaagcggtctggcggtcgttatcgattctgtgcttcgcctagcttccgacaccgacctggaccctgcatctcgactgaaggctctccatgaggagtccagacgtattactgaggaaatccggcatgttatgaagcatggcgtgtcgcctctggatccggcccgtgccagcgagcgtgggcgtcatatcgttgcgatgactgaggcgattgcagtcgactttaggcgcgtgcgtgaagcatttgagcgcctcaatcgcgacttgcgccggcaactggtggagcacgatggatcgcgcggtgaggtgttggagaaagtatttctcggaagcgacgtcattgcggaaagcgacgaaggtaagtcctttctcgcattttggcggttgctgactgacccttctcaatttgaaggactaaaagcagcgctggaagcgctggagtcgcgaccgtttgtccgctcactgggcctcgaggaacgccggcggcttttccgcgtgacggagacattgctgatcgaaggtgggatggttcaggacgttatggcgacgctgagccgtagtctgaaaacctttgtgcaaagtcgggagttccaggagcagcgcaagattcagcgtctgatccgcaccgcgattgcggagtcactggcactaaaggaccaactgactaatggccggactctggattacacactaacgttatcgaccagtagcttgcgttcggtggcgcaactgatgcttgctgacccacaggagcgccccggagaaacttcagtcgacgaggccgaggcgccggaaatcgacctcgaggtcatgcgcgagatgatcgacaacgcggatatcgacattccgctgcttaagcagaacgtccggtccgcgctagccgaacgcaatcaggtgagcgttggcgaattgacccgtatgttcgagataacccaggggcttgcctcgatcgtcggctatatgtcacttggtcagagatacggtatcgtgctccagaacagtgagcgtgaattccatccgtgggaaagggtgtcgtgggccggacaagatggcgttgtgcgccatgcacggatcgcacagatactgtttacgagggactgcctgaatgacctcgattag

SEQ ID NO: 49124 - DNA, 729 bp, Burkholderia cepacia
ctgcttgacgaaggggacgatgagtcccgtcgtccagtggactgcggccaggagaaggcgcttttcgaaggcgactcgtcgacgctaccgtatgacgtgcgccgggcgtacgcgctgcttcttcgcggcccatcaattgacgaacgtcacagcaaactctggccagtcctgatcgatcatgaactgcgattgcgacagttgctacacgcggccttcctcgatctcgtcatcgatcgggagcaaaaaatcgcatttgcacgcccggtcgatgctccggagctcgacgtgccgcaacttctgcgggaggtccggcttactttcgttgattccgctctggtgcttttcctgaggatggagctgactctggctgaggccgaaggccgccgtgcaacggtttcccggtccgaaatggtcgatcatctcaaagcgtacgaagctagcgataatgttgaccgagcccgctttagcaggcaggtcgaggcggcgattgaaaaggccaagaaatacaacttccttcgcctgattcgtaatagcggagatcgcttcgaggtgtcgccagcgctcaagctggtgttctcacatgagcagataagtgaactgtcgcgaacctatcggcgtatcagggaacaggcggacggaagaccagcagaggtcgatggcgcggggagttttccgggcgtcgacgagccggacgaatttgatgaagacaatgtgatggacggggagtga

SEQ ID NO: 49125 - DNA, 3450 bp, Burkholderia cepacia
gtggagacagcccagctattcgaggatccggaattgtcgccggcagcggcggacgagacggcgcataggggagaggatcatcgcccgacatggagcgatcatgatctcgaagaagcggggcaacagcagttcaggctgcggcaaatgcaggtcatgaactgggggacgtttagcaagctccacgtattcgatatctctccgcgcggacacttgctcgttgggccgtccggatcgggcaagtcgaccattctcgatgcgcattcggcgttgatggcgccgccgaattcagagttcaatgccgccgcccggggtaacgataaagtcacccgcgatcggacgatggtcacttatgtgcgcggggcttgggctacgcaggaatcggatgaagggatcatcgctgcgcagtacctgcggcccgacaccacccttagtgcagtcgccgaggtgtatgcaaacgcacaggggcagatgctgacgctggtcggcatgtggtggattaagggtaagtcgacactcgcaaaggacgtgcgacactgtttcttcgtgatcgaacgggaattcagtctcaaggaactgtcgttcttcatgcaggccgactacaatctgcgctcgtttgcaaagcatcttccggaagtcaaacctttcgatacgcacgcgtccttccgtgaacgcttcaaggcgcgcctcggtatcgaccacgacctggcgttgcgactgcttcacaggacgcagtcgtcgaagaatctgggtgatatcaacgcgttcatgcgcgacaatatgctggacgagccccaaacgttcagcctcgccaaagcgctctgcgacgacttcaacacgctggcagcggcccaccaggacgtcgtggaggctcgtaagcagcgggacctgctgaacctcgcacgttcgcatcatgagctgtatcaggagcatcacgcggaggtcgccagggtcgacgaactgctgaagcagctggaccatcaccgcgaatatctgcaatacacgttgcgtggcaggcgtgtggacgagttgaagattgtgctcaaagggctgcaccagagcgtcgatgcattggcccggaaggcgaacgacgagcagaccgaactccagcgattgatgacgcagcgtgccggcatgaacgacggcaatgtcgcaggactacagtcgcagttggccacgaaggaaacgcaactgaagcaggttcgccgtgcacgcgcacgggtgtcagtctggctccagacgctcgggtggcctgagccgcaagatgctggccattttggcgaatgtgtcggccgcgctggggtgctgcgggatcgtggtcagggcgaagaaggcgaggcaaaggccgaggaactgcgccagaagaaatttgaggcagagcggcaactcaaggacctgcttgctgatgcggcatcgcttgaacagagaaaatcgaacttgccgcgagaactggtcaatgtccgtgaccagattgcacttgccctgaatctggatcccgcttcgcttccattcggcggtgaactgctcgacgtatccgagaaattcaaacggtggcaaggtgctcttgagcgtttgctggctcctcttacccgctcgtttctcgtgccggaagaacactatccgggagttgtgaactggctcgagtcaaatcatacgggacagcatgtgctttacctgcgtatgcgcccgcatcagaagcgtttcgataatggtccgaaggctccgggcaggatgctggattcgtcggcggatgaatacggcgactggctgcgcgacgagatagctgtgcattacggcgactttgtgtgcgcagaaacgactgaagagtttcgcaattcgccacgcgccgtcagtctgcatggtcagataaagcggggaggtgcacggcatgagaaaaatgaccgtacccgccttgatgaacgccggggctgggcgattggcttttccaacgagcagaaaaaacttgagcttctccatgaaattcacgctcagcagaaggtggaaagcgaagctagtcgggagttagccgaactcctggtgacgcagaacaaggaacgggagaagctgaacgcagcggcggaattgacgcaggtggtctgggaggacatcgacgacgtctcggtggccgatgaggtgcagcgtttgctgaaccagatagaagaggcgcaacggtcacacccggagatacaggaactcgatgggcaaatcaaggcgcagggggtaaaggcgtcccaggtgggtagcgcgcatgaaaccgaaaagaaaaaatacgctgatactgaacagcggatcaacgggttgatccgggatctggaaaatacacgtgacgatgtgcgtatgccgcctgtagatggggatgagcttcagttattgtttggccacctggacggcctgacgctggagaacctggagcagcggcgcctgtctgcgcgcagcgaactgaaggacagaaagaacgacgccgataaggctcaagcaaatgaccggagtctgcttgaggaagtactccgtacgtttcagcgtgaacataagatagcggccgcggatatggggacgacgctggacgattggcccgactatgcccggctgttagccaaaatcgaggaggacgatctgccccgattcgaggagcggtttttcaggcttctcaacgagcagagcgatcgccatctggccagactgcggcagcgtctcgttaccgagaaggatgagatacgggggcgcatgaatattgtcaacgacgcactatcgcagactgagttcaacgctggcacctatctggttctggagaaccgccctcgaacgctgccggatgtgaccgcgttcctggccgaactcaagaactgccttgagcgcaatatcaaaccagatgcgacccgcgaagagcgcgaggagcagtttaaggcgctcaatacaatcgtccaacggttacacagtgacaagccggaggacgagcgttggaaagcactcgtcctcgacgtacggcaacacgtcgaatttgtggcgaaggaatttgatgctgatggtcgtgtgcgcgacatttttcagtccggcgccggtaagtctggcggacagcgacaaaagcttgccgcgacgtgcctcgcggcggcgctgcgctatcaactcgccgggacgcaacgaccgctgccgcagttttgcacggtattgatggatgaggcgttcgacaaagccgatagcgagttcacggcgatgacgctgaacatcttcaatacattcggattccagatgctgatggctacgccaatgaaggcagtaagaacgctcgaaccattcataggcggtgcacacgtctttagcaacaggttgcgcaacagttctggagcggtggcgatcgagtacgacatggcgcatcgacggctgctaggtctcagccaccagcgatccttagaaaaaggtaacgccgacggtgaaatgccgcagagcgaggactaa

SEQ ID NO: 49126 - DNA, 960 bp, Burkholderia cepacia
gtgtggcggtcggtgaactggcggaccatgggcaacgtcaccataccggaaaaggtgttgttcgaagatgcgcaggctgtggcggattgtgcaggactgcgccggcattgggatacccttcatgcgcgctggcggaggataggcgagcggtatccggtcttggccggcgagcgcgattgcacgaatgccgtcataagaaccgccgactggtctgacgatgatttccggcgactgatggaattgctggcctggtgcaggcagaacccggcgagcggactctacctgcgccaattgccactggtagacatagacacgaaatgggttgagggacggcgtggcgtcgtggagccgctgcttcgaatccttatgggcaaggagggtgatattcgtgaggtcatggggctgaggcgttcacccgatacggtccggatgagattgctcgatgccgggcttcgcgagcaactgctgggcatggaggatcttcagatccccgtaggccagtggaaccatgtgtttcggtatccaccaaagcgactactgattgtcgagaacctcgagtgcgggctggcgcttcccgatatcgaaggggtggcggtcgtgatggcgctcgggaacaatgtgactgctctacgggggatagaatgggcgcccgctgcggatgttctctactggggggacatcgatacctgggggttgcatattctgtcccgggctcgcggcatcttcccacatctgaggtcggttctgatgacggagggggtcgttgagtcgcatcgacatctcctgaccgacgagccgactcaggacaagcggcctgccgtgaatctcacgaaggacgaggcggaactattgtccgaccttcaaaccggacgatggggcgaacgccgtcgtctggaacaggagcgaatacactggccaaaggtaacagaggaagttcgccgtcaatggacttattcttga

SEQ ID NO: 49127 - DNA, 1461 bp, Burkholderia ubonensis; identical to SEQ ID NO: 49059

SEQ ID NO: 49128 - DNA, 651 bp, Burkholderia ubonensis; identical to SEQ ID NO: 48968

SEQ ID NO: 49129 - DNA, 3372 bp, Burkholderia ubonensis
atgaatgagccgcgcacgctcggcctcgattttgccgcggacgacaccctgacgggctttcgcctcgagcggctcgaggttttcaactggggcaccttcgacgaccgggcttgggtgctgcgggtcgatggccgcaacggcctgctgacaggagacatcggttccggcaagtcgacgctcgtcgacgccattaccaccctcctcgtgcccgcgcagcgcatcgcctacaacaaggcggcaggcgcggacagcaaggaacgtacgctgcgctcgtatgtgctcggctactacaagtcggagcgcaacgaggtcacgggaacggccaagcccgtgagcctgcgcgaccataacagctattcggtgattttgggcgtgtttcgcaacgccgggtacgacgccaccgtcacgctcgcgcaggtgttctggatgaaggacgcgcaggctcaacctgcgcgattcttcgtcagtgccgaacgagatctctcgatcgcgaccgatttctcgcgcttcggcaccgatattgcacagctgcgcaagaagctgcgcgggctgggcgccgaaatcgaggacacgtttccgaaatacagcgcctggttccggcggcgcttcggaatcgaaaacgagcaagcgctcgagctctttcatcaaacggtatcgatgaagtcggtgggcaatctcaccgacttcgtacgcagccacatgctcgagccgttcgacgtcgcaccgcgcgtcgacgccctgattgctcacttcgacgatctgaaccgcgcgcacgaggcggtactgaaaaccaagcgccaagtggaactgctgacaccgctcgtcgacgactgcgaccgccacagcgagcaaggccacgttctcgaaggctggcgcgcgtgccgtgaagcattgaggccctacttcgccgggctcaagctcggcctcgtcgaacgccgcctccaattgctcgaagaggatcatgcgcgcgcgacctcgcgaaaggcgcggcacgaagaagcgcgcgaccaggcgcgccagcgcgtggacgatttgcgccgtgccgtggccgaacaaggcggcgatcgcatcgcgcagctcgatgtcgagatccgcgagcacgagcgagaaagcgtgcgtcgccgcgaacgcgcgcaacgctatgccgccatcgttacgctgttcggcgaaaccgaggctgcggatgaggctgcattcgcctcccagcgccaacgcctggccgagcagcgcagctcgctcgtcgacgacgaagcgcaacagcaaaatgcgataaccgaatggagcgtggcatttcgcgaaggcaaagcgcggcgtgatttgctggaggacgaaatcgcgagcctgaaagctcgacgcaacaacatcccgaaggaacaggtcgcgatgcgggcgagcctgtgctcggcgctcggcctggaggaagacgccctgccgttcgcgggcgaactcattcaggtgcgcgaggatgcgcgtgattgggagggcgccgccgagcgcgtcctgcgcaacttcggcctgtcgctgctcgtgcccgacgagcactatgcgaacgtcgcggcgtgggtcgatcgcactcatctccgggggaggctagtctactttcgcgtgcgctccgaacgcaccgcgcgtgcagccgaggccatcgagctgcaccgccactcgctcgcgcacaagctcgccatcaagcccgactcgcagttctatggctggctcgagcgcgaaatcggccgccgtttcgactatgcctgctgcgatacgcaggagcagtttcggcgcgagacgcgcgcgatcacgcgtgcgggccaggcgaaagcgcctggggagcgccacgaaaaagacgaccgccacgcgctcgacgatcgcagccgctacgtgctcggttggagcaatacggcaaaaatatccgccctcgcagcacaacggcaagcgctcgaagctcgccttggcgagatcgggcaaaggctcggagaggcccaacacgagcacaccaaggtgcgtgagcaactcgaagcacttgcgcgtgccggcgagttcgccgagtttcgggaaatcgattggtcgagctgcgctgccgcgatcgcacgtcttgcggacgaaaaggcgcgactcgaatcggcaagcgacgccctcgcggagctaacggctcaattggactcggcgcaagcgtcgttgaaagagagtgaagcggcgatgtcggaaaccgactcggaactgggcggcatcctggccaagcgggaggcggcacaagcgttgcgcgaagagacgcacgcgctcgttgcagaagtggatgccgaactcgccgaacgaatcgaggccctgcgagccgagattctcggcgaacaccagctttccgtcgagtcatgcgacaaccgcgagcgggacgtgcgagaggcgttgacaacccgtatcgacaacgaaacgaaatcactcggccgcctggccgaaagaatcgtcaaggcaatggcggctttcaaggaagcctacaagctcgaaacggccgacttcgatgcgagcctcgccgcgaactcagagtaccgtgacatgctcgcgcggctgcaggcggacgatttgccgcgcttcgaaacgcgtttcaaggagctgctcaacgtcaacacgatcaacgagatcgccaactttcacgcccagcttgcgcgcgaacgggcgacgatcaaggaacgcatcgaacgcatcaacgaatcgctgcgacaaatcgactacaacgcgggtcgttacatcgtcctcgagagtcagcccagccccgacgcggagatccgcgaattccagagcgacctgcgcgcttgcaccgagggcgaactcaccggctcggacgatagccaatactcggaggccaagttcctgcaagtcaaacggatcatcgaccgcttccgcggccgcgaagggttgaccgagcaggaccggcgctggcgagccaaagtgaccgacgtgcgcaactggtttctgttcgccgccagcgagcgttggcgcgaggacgacagcgaatacgagcactactcggactccggcggtaaatcgggcggccagaaggaaaagctcgcctatacgatccttgccgcgagcctcgcctatcagttcggcctcgaatggggcgccgtgcgttcccgatcgttccgcttcgtcgtcatcgacgaagcatttggccgaggctccgacgaatcggcgcagtacggtctcactctgtttcagaaactgaacctgcaactgctgatcgtcacgccactgcagaagattcacatcatcgagccgttcgtttcgagcgtcggattcgttcagaacgacggtggacgcgcctccaagctgcgcaccctgtcgatcgaggagtaccgcgcgcacaaggcggagttcgagcaatga

SEQ ID NO: 49130 - DNA, 1185 bp, Burkholderia ubonensis
atgagttggacaactgccgtcgaactgcgtgcccgcctccagcgcctatgggaacgcggcgaatggctgcgaagcctcgtagacggtgccgaggggctattcccgctacgtctggcgatcaaaggcccaagctcgtccgagttggctgaacgcttcgacacggtacgcgcatggattacggaaattgccgcgacgccgcgcatacgcatcgaatggcgagaaatcaatcatcgaattctcggcgtgcagcgtttgccacgagcggcctgggtcgacagtctggacgatgcgctcgcagtcgccggcaagcaccgcgacgcagcgcagttcgcgcggctgcttgaaatcacacgctcgcgccagccgaagctcatcgcatggcttgcgcagcgcccgatgcaggccctcgaattggccggtgattgggaacgactgctggcagtcgtcgattggctgcaagcacatccgcagccgggcatctatcttcgccaagccgaaatcgccggcatcgacacgaaattcatcgaggcgcggcgcggcgtcctctcccaatggctcgatctcgtgctgccgtccgaggcgatcgacagcagccggaccggcgccgcccaattcgccgctcgctacgggttccgcgataagccgcctcgtattcgatttcgcgtgctcgatgagcggctcgccgtcctgcccggcatgggccgacccgacatcacactcgacgccgacagcttcgcgcgcctcgcactgccgtgccgccatgttttcgttacggaaaacgaaacaaattttctggcgtttcccgacgttccgcaggcgatcgtgctcttcggagcgggctacggctgggaagctctggagccggcacaatggctcacggactgtgcgctccactactggggcgacatcgacacgcacggctttgccattctcgaccaattgcgttgccgattccctcacgcgggatccttcttgatggaccgcgcgacactgatagcgcatgaagcattctggggagacgaaggcgatcaggtcatgcgtgatctgccgcgactcacggcgcaagagcgcgagctctttgacgacctgcgtgacaaccggattcgccacggattgcggctcgaacaggagcgcgtcgggttcgggtgggtcagagcggcgctagaggaacggtctttcgtttag

SEQ ID NO: 49131 - DNA, 1446 bp, Burkholderia cepacia
atgcgcgaaggaccgatgtggcggttactggcctcttatcaggcgcccgtgacggtgtcactgttgcaatcgctctttcccgagacgtccacgcaactgacttcggcgagtctgatggagcgactatcggtggaagtagatgggcttcgcgcccgtggcgaggaaatcaacaagacccctcaaatgatcatcgctgactgggtccatcagaagtggctcgcgcggagcttcccggagggggccagcgaagagcagtacgagctcgctgccgatgtcgtaccggcaatgcgcctggttatggggctgcttgagccgagacaaacggcgacggagagcggactggcagtggttatcgactccgttttgcggcttgctgccgatactgatcctgacccggagtcccgcctgcgggcgctgcacgaagagtctcgacgtattactgaggagattcgacgtgtcatgcaacatggcgtttcacctttagatccggcacgtgcaagtgagcggggacgtcatattgttgccacgactgaggcgattgccgcagatttccgacgggtacgcgaggcgttcgagattctcaatcgtgatctacgtcggcaactggttgctcatgctgggccgcgcggcgaagtgctcgacaaggtgtttcttgacagtgacgtcatcgcggaaagcgacgaagggaaatcctttctcgcgttctggcgcctgttaacagacccctcccaacttgagggattgcaagcagcattagaggcgttggagtcccgaccgttcatccgcctgctcagtttggaggaacgcaagaggttgttcagggtgacggagatgctgctggttgaggggacgatggttcaggacgtgatgacgacgctcggtcgaagtctccggacttttgtccagagccgagaattccaggaacagcgacgaatccagaacctgatccgcaaagcgatcacggaatccttggaactcaaggacaccctgacgaatggtagaacgatcgacttcagcttgaccctgtccacgagcagtttgcgttcggtcgcacaactcacgttgacggatccgcgagagcgtccgggtgaaacttccgttgacgacgccgaagcgcccgagatcgatttggaggccatgcgggaaatgatcgataacgccgatatcgacatgccgctcctgaaggccaatatccgcgctgcattggcggagcgagctcaggtgagtgttcgtgatctgaccattatgttcgaggtagcccaagggcttgcatcaatcgtgggctacatgtctctcggacagcgagtcggcattgtgctcgacaaccgagatagagagttccatcccaccgaactcgtatcctgggtcggccaagacggcatcgtgcgtcaggcgcgaatcgcccagttacttttcactagggaatgcctggatgagctcgattaa

SEQ ID NO: 49132 - DNA, 549 bp, Burkholderia cepacia
ttgcggttgaggcagcttctgcatgcggcctttctcgatttggtcatcgatcgcgagcagaaaatcgcatttgcacgtccggcgcatatacctgacgaggatgtgccccaactgttgcgtgaggtccggctgacctttgtcgactctgcgctcgtgctgcacttgcgaatgatgctggttcaggcggaagccgaagggcggcgagcgacggtgtcgagattcgaaatgatcgaccacctgaaagcctatgaggccagcgataacgtcgatcagacgcgctttaaccgccaggtcgacggcgcgatcgagaaagcaaaaaaatacaactttcttcgattgattcgcaacagcggcgagcgctttgagatatcgcccgtgctcaagctggtgttttcccacgatcagattgaggagctacgccgaacctatcaggacatcagaaaccagttaggcggacgtccattggagggcgatggggatttgacgaatcgatccgactccaagtcgtccggcgacccggacgatggtcacgatattgacgaggtgtaa

SEQ ID NO: 49133 - DNA, 3126 bp, Burkholderia cepacia
atggtcacttatattcggggggcgtgggcgacgcgtgaaacggatctgggggggatcgcagcacagtatttgcgcccggataccacgcttagtgcagtggccgaggtttatgccaattcgcgcagtcaaaccctgacgctggtcggtatgtggtggatcaagggcaaatcgacatttgccaaagacgtgcgtcatagcttcttcgtgatagagcgagcgttcaagctcaaggaactgtcgttcttcatgcaaaccgactacaaccttcgctcatttcagaagcatcttccggaggtcaagctattcgagacgcacgcctcgtttcgcgagcgcttcaaggcgcgactgggcatcgaccatgaccttgcactgcgcttgctgcatcggacgcagtcctcgaagaatctcggcgatatcaatacgttcatgcgcgataacatgctggacgaaccgcagacgtttagcctggctaaggcgctgtgtgaagagttcaacacgttagccgccgcacatcgtgatgtcgtcgacgctcgcaaacagcgagacttattgcgcgacgcgaaatctcatgaggagcagtatcaagagcatcacgcaaaagtcgaccggatcgagacgctgttgaagcaagtcgatcatcacagcaagtacctgcagtacacgttgcgccgagggcgcgcgaacgcgctgacgatcgagcttgagcggctgcgtcagcaggttgaggcactcggaaggcgggccaatagtgagcaggccgagctcgagagattgattaccctgcgtggcgggatgaacgacggcaatgtggcgggtctgactgcgcagttggagaccaccgctacgcgactgaaccaagtgggacgggagcgcacccgagtcgcggggtggttaaaaacgctcgggtggccggaacctgaggatgccgcgcatttcggcgagtatctcggcaaagccaatatcttgcgagaacatggccacccgcacgaagaggaagccaaggagcacgcgctacgtaatgatctcagtgtcgcacagacgcagctctcggaactgctgcaagagatccggtcgatggaactacgtaaatcgaacctgccgtggcaactcgttgacgttcgcgaccagatcgcaactgccttaaagttagaccctggcatcctcccgtttgggggcgaattgcttgacgtaccgaagaagttcgaacgatggcaaggtgcgctggagcgtcttctcgggccgctcacgcgttcgttcctggtaccggaggcgcattaccgagacgtcgttgattggctcgagtcgaaccacacgggccagcacgtcctctatctgcgaatgcggacacatcaacgccttgcggacgatggccccaaatctccgatacgcatgctggacacggcagacgacaagtacggtgactggttgcgcgatgagatctctcagcactatggagatttcgtctgtgccgaaacgatggatgagtttcgcgaggcggcccgtgccatcagtctccaaggtcaaatcaagcgtggcggcacccggcatgaaaaaaacgaccggacccgcctggataaccgcaaagagtggtcgataggcttctcgaacgagcagaagaaacttgagctgctcgacgaacttcacgctcagcagacgaagataagcgaatcgaagcaggttctggacgatctcgtcgcatcacgcaagcgggaagagcaaaagcttgctgcagcgcaggaactatcgcaagtcatgtgggcggacattgacacggtgtcggttgcgcttcaactgcagcgtttgcaggttcagttggagaacgctcagcgagctcatccggaagttcgggaactcgatacgcaaattgaagcgcagcgacagacggtcagcgatgcgcagggagcgcgcggatcggagtctgacaaatacgaccgttccgtggagcagatggccgcgctgagccgtgagcttgaagcgacgcccgcggagcttcaggtgccaccgcccgatgctggcgagctccaggaactgttcggaaaggtggatcgcctcacactggacaatctcgagtcgagacgagagcgtgcacgcggtgatttgaaggagcaacgagggcaagccgacaaggatcggtcgaacgcaagaaaggatctcgaggaggctttgcggacgtttcgacgcaatcatccattggcggcggcggatatgggtgagacgttggacgactggccagactatgcgcgcgtgcttgtgcgcatcgagcaggatgatctgcctcgcttcgaagagcggttctttcggttactcaacgagcagagcgatcgccacatcgccaggctgaggcaacgactcgtcacggaaaaggaagagatccgtggtcgcatgaacatcgtcaatgatgccctgtcgcaatcccagttcaatccgggaacctatcttcggttggaaaaccggccgagaacgctgcctgaggtgacgacctttctcgctgatctcacggcctgtcttgagcgcaatatcaagccggacgccacacgggatgagcgggaagagcagttcaaggcactcagtaagcttgttgagcgcttgcacagcgacaagtccgaggatgagcgatggaaggcgcaagtgctggacgtgcgccaacatgtcgagtttgttgcaaaggagttcgatgccgaaggcagtgttcgagacattttccagtcgggtgccggcaaatcgggcggccagcgtcagaagctcgctgcgacttgtctggcagcggcgctgcggtatcaattggctggaacggatcgacccttgccgcaattctgcacggtgctcatggatgaggctttcgacaaagcggacagcgagtttaccgccatgaccctgaacatcttccatacctttggttttcagatgctgatggccacacccatgaaggcagtcagaacactggaacccttcattggcggtgcacatgtgttcagtaacaagtctcgggacagctccggtgcggtatcgatcgaatacgacatgacacatcatcggctgatcggcctgggggcgccgcgacccgacgatccgggccgcgccgccaatgatgattccgacgaaggaggcgcgcgtgccgttgattga

SEQ ID NO: 49134 - DNA, 819 bp, Burkholderia cepacia
atgcagcatcccgtgatgattggcatgccagagtgcgcgaaggtactggtgagtgcggcagactggtcagacgacgacttcatgcgactactggagtttctttcatggggcaagcaccatcccacgagcggcttgtacctccgtcaactgccactgaaggggatcgacacaaaatgggtggagcggcggctgggcgtcgtggtgcccctgctcaaaaccatactgggacgcgacggtgatttgcatcaattgttggggcttcgacgtgcgccgcctacgatccggatgagattgctggatccccttgtccgtgaacagcttggaggagcagactatctcgagatgcccgtggaccaatggaatacggtgctgcaccggccaccggcccgattactggtggtcgaaaatttggatacggggttggctgcccccgacattcgagacgctgccgtggtgatgggccacgggaacggtatcacgctcctgcagaagatcgcgtggagccgtgctgcggagatactctactggggagacattgacacctgggggttgcacatcctgtcgcgtatgcgcggcatctatccccgattggaatccattctgatgacggaggaggtgctcgagtcgcatcagcatttctgggtcgacgaagagacgcaggacatgcgacctgccgaacaccatacgagcaaggaagccaaacttctgcgcgatttgcaacagcggcgctggggaaggccgattcgcctagagcaggaacgtgtgcactggccgatggcggttgaggcattgacgcgtcgttggggaggcttggcataa

SEQ ID NO: 49135 - DNA, 1461 bp, Burkholderia ubonensis; identical to SEQ ID NO: 49059

SEQ ID NO: 49136 - DNA, 651 bp, Burkholderia ubonensis; identical to SEQ ID NO: 48968

SEQ ID NO: 49137 - DNA, 3372 bp, Burkholderia ubonensis
atgaatgagccgcgcacgctcggcctcgattttgccgcggacgacaccctgacgggctttcgcctcgagcggctcgaggttttcaactggggcaccttcgacgaccgggcttgggtgctgcgggtcgatggccgcaacggcctgctgacaggagacatcggttccggcaagtcgacgctcgtcgacgccattaccaccctcctcgtgcccgcgcagcgcatcgcctacaacaaggcggcaggcgcggacagcaaggaacgtacgctgcgctcgtatgtgctcggctactacaagtcggagcgcaacgaggtcacgggaacggccaagcccgtgagcctgcgcgaccataacagctattcggtgattttgggcgtgtttcgcaacgccgggtacgacgccaccgtcacgctcgcgcaggtgttctggatgaaggacgcgcaggctcaacctgcgcgattcttcgtcagtgccgaacgagatctctcgatcgcgaccgatttctcgcgcttcggcaccgatattgcacagctgcgcaagaagctgcgcgggctgggcgccgaaatcgaggacacgtttccgaaatacagcgcctggttccggcggcgcttcggaatcgaaaacgagcaagcgctcgagctctttcatcaaacggtatcgatgaagtcggtgggcaatctcaccgacttcgtacgcagccacatgctcgagccgttcgacgtcgcaccgcgcgtcgacgccctgattgctcacttcgacgatctgaaccgcgcgcacgaggcggtactgaaaaccaagcgccaagtggaactgctgacaccgctcgtcgacgactgcgaccgccacagcgcgcaaggccgcgttctcgaaggctggcgcgcgtgccgtgaagcattgaggccctacttcgccgggctcaagctcggcctcgtcgaacgccgcctccaattgctcgaagaggatcatgcgcgcgcgacctcgcgaaaggcgcgacacgaagaagcgcgcgaccaggcacgccagcgcgtggacgatttgcgccgtgccgtggccgaacaaggcggcgatcgcatcgcgcagctcgatgtcgagatccgcgagcacgagcgagaaagcgtgcgtcgccgcgaacgggcgcaacgctatgccgccatcgttacgctgttcggcgaaaccgaggccgcggatgaggctgcattcgcctcccagcgccaacgcctggctgagcagcgcagctcactcgttgacgacgaagcgcaacagcaaaatgcgataaccgaatggagcgtggcatttcgcgaaggcaaagcgcggcgtgatttgctggaggacgaaatcgcgagcctgaaagctcgacgcaacaacatcccgaaggaacaggtcgcgatgcgggcgagcctgtgctcggcgctcggcctggaggaagacgccctgccgttcgcgggcgaactcattcaggtgcgcgaggatgcgcgtgattgggagggcgccgccgagcgcgtcctgcgcaacttcggcctgtcgctgctcgtgcccgacgagcactatgcgaacgtcgcggcgtgggtcgatcgcactcatctccgggggaggctagtctactttcgcgtgcgctccgaacgcaccgcgcgtgcagccgaggccatcgagctgcaccgccactcgctcgcgcacaagctcgccatcaagcccgactcgcagttctatggctggctcgagcgcgaaatcgtccgccgtttcgactatgcctgctgcgatacgcaggagcagtttcggcgcgagacgcgcgcgatcacgcgtgcgggccaggcgaaagcgcctggggagcgccacgaaaaagacgaccgccacgcgctcgacgatcgcagccgctacgtgctcggttggagcaatacggcaaaaatatccgccctcgcagcacaacggcaagcgctcgaagctcgccttggcgagatcgggcaaaggctcggagaggcccaacacgagcacaccaaggtgcgtgagcaactcgaagcacttgcgcgtgccggcgagttcgccgagtttcgggaaatcgattggtcgagctgcgctgccgcgatcgcacgtcttgcggacgaaaaggcgcgactcgaatcggcaagcgacgccctcgcggagctaacggctcaattggactcggcgcaagcgtcgttgaaagagagtgaagcggcgatgtcggagaccgactcggaactgggcggcatcctggccaagcgggaggcggcacaagcgttgcgcgaagagacgcacgcgctcgttgcagaagtggatgccgaactcgccgaacgaatcgaggccctgcgagccgagattctcggcgaacaccagctttccgtcgagtcatgcgacaaccgcgagcgggacgtgcgagaggcgttgacaacccgtatcgacaacgaaacgaaatcactcggccgcctggccgaaagaatcgtcaaggcaatggcggctttcaaggaagcctacaagctcgaaacggccgacttcgatgcgagcctcgccgcgaactcagagtaccgtgacatgctcgcgcggctgcaggcggacgatttgccgcgcttcgaaacgcgtttcaaggagctgctcaacgtcaacacgatcaacgagatcgccaactttcacgcccagcttgcgcgcgaacgggcgacgatcaaggaacgcatcgaacgcatcaacgaatcgctgcgacaaatcgactacaacgcgggtcgttacatcgtcctcgagagtcagcccagccccgacgcggagatccgcgaattccagagcgacctgcgcgcttgcaccgagggcgaactcaccggctcggacgatagccaatactcggaggccaagttcctgcaagtcaaacggatcatcgaccgcttccgcggccgcgaagggttgaccgagcaggaccggcgctggcgagccaaagtgaccgacgtgcgcaactggtttctgttcgccgccagcgagcgttggcgcgaggacgacagcgaatacgagcactactcggactccggcggtaaatcgggcggccagaaggaaaagctcgcctatacgatccttgccgcgagcctcgcctatcagttcggcctcgaatggggcgccgtgcgttcccgatcgttccgcttcgtcgtcatcgacgaagcatttggccgaggctccgacgaatcggcgcagtacggtctcacgctgtttcagaaactgaacctgcaactgctgatcgtcacgccactgcagaagattcacatcatcgagccgttcgtttcgagcgtcggattcgttcagaacgacggtggacgcgcctccaagctgcgcaccctgtcgatcgaggagtaccgcgcgcacaaggcggagttcgagcaatga

SEQ ID NO: 49138 - DNA, 1185 bp, Burkholderia ubonensis
atgagttggacaactgccgtcgaactgcgtgcccgcctccagcgcctatgggaacgcggcgaatggctgcgaagcctcgtagacggtgccgaggggctattcccgctacgtctggcgatcaaaggcccaagctcgtccgagttggctgaacgcttcgacacggtacgcgcatggattacggaaattgccgcgacgccgcgcatacgcatcgaatggcgagaaatcaatcatcgaattctcggccagcagcgtttgccacgagcagcttgggtcgacagtctggacgatgcgctcactgtcgccggcaagcaacgcgacgcagcgcggttcgagcggctgcttgaaatcacacgctcgcgccagccgaagctcatcgcatggcttgcgcagcgcccgatgcaggccctcgaattggccggcgattgggaacgactgctggcagtcgtcgattggctgcaagcacatccgcagccgggcatctatcttcgccaagccgaaatcgccggagtcgacacgaaattcatcgaggcgcggcgcggcgtcctctcccaatggctcgatctcgtgctgccgtccgaggcgatcgacagcagtcggaccggcgccgcccaattcgccgctcgctacgggttccgcgataagccgcctcgtattcgatttcgcgtgctcgatgagcggctcgccgtcctgcccggcatgggccgacccgacatcacactcgacgccgacagcttcgcgcgcctcgcactgccgtgccgccatgttttcgttacggaaaacgaaacaaattttctggcgtttcccgacgttccgcaggcgatcgtgctcttcggagcgggctacggctgggaagctctggagccggcacaatggctcacggactgtgcgctccactactggggcgacatcgacacgcacggctttgccattctcgaccaattgcgttgccgattccctcacgcgggatccttcttgatggaccgcgcgacactgatagcgcatgaagcattctggggagacgaaggcgatcaggtcatgcgtgatctgccgcgactcacggcgcaagagcgcgagctctttgacgacctgcgtgacaaccggattcgccgcggattacggctcgagcaggagcgcgtcgggttcgggtgggtcagagcggcgctagaggaacggtctttcgtttag

SEQ ID NO: 49139 - DNA, 1461 bp, Burkholderia ubonensis
atgttcctcgactaccctaccctcgacgcgctgcgcacgcgccatcccgcttggcgacttttgcgctccgaccacgcgccgctcgccgtcagcttcctgcaccgcgcgttcgtcgcgccgaacgtgcgcgaggtggcggctccgtttcttgccgaagcactcgaggacgagctttacgcgttgcgcgaacaactcggcgacggcgccttcccgaagcccgcgctcgactatctgaacgactgggcgagtcctgaaaagggatggttgcgcaagttctatcgccaaggctccgatgaaccgcatttcgacctgacacccgccgcaggaaaagcgatcgcgtggctcggcacgctgatggaacgaagctttgtcggcacggaatcccggctcctgacgcttttcgagttgctgcggcagatggccgaaggcagcgagacggacccggaaaggcgtcttgccgagctccacgcgcggcgcagccagatcgacgaagaaatcgctcgcgtggaggccggtgacgttcggctgctcgacgatgccgcgatcaaggaccgctttcagcaattcatgcagatggcgcgcgacctgctcacggatttccgtgaagtcgagcaaaacttccgtctgctggaccggcacgtacgcgagcgaatcgcgctctgggaaggatcgaagggtgcgctcatcgaagaaatcatgggcgagcgcgacgcgatcgccgattcggaccagggcagcagctttcgggcgttctgggacttcctgatgtcgagccgccgtcaggaggaactctccgaacggctcgagcacgtgcttgcgctcccggcgatcacggaaatgaagccggacgcgcgcacgcggcgcgtccactacgactggctggaagccggcgagcacacgcaacgcacggtcgctcagctctcgcagcagcttcgacgtttcctcgacgatcaagcgtggctcgaaaaccgccgcatcatggacattctgcgcggtatcgaaacgaaagcgcttgcgctgcgtgaagcgcccccgccgggctccgtcatggagatcgagaccgcgtccgctgacatcgagctgccaattgaacgcccgctttacgcccctgcgctgcgccctctcatcgccaacgtcgcaatcgagaccggcgatgcggacctcgatgcgtcggcactctacacgcagatcgtcgtcgatcgcgcgcgcctcgcaagccacatccgccgctgccttcaagatcggcggcaagtgacacttgccgaactggccgcttcgcagccgctcctgcatgggctcgctgaactcgtcgcctatttgcaactgagcgccgaagccggaacatttcgcgcgaccgtcgatgagaccgtctccgatacgatcgagtggcaggcaaacgatgccaacggagcagcaatcgtcaagcgcgcaacgatgccgcgggtgattttcacaaggtag

SEQ ID NO: 49140 - DNA, 651 bp, Burkholderia ubonensis; identical to SEQ ID NO: 48968

SEQ ID NO: 49141 - DNA, 3372 bp, Burkholderia ubonensis
atgaatgagccgcgcacgctcggcctcgattttgccgcggacgacaccctgacgggctttcgcctcgagcggctcgaggttttcaactggggcaccttcgacgaccgggcttgggtgctgcgggtcgatggccgcaacggcctgctgacaggagacatcggttccggcaagtcgacgctcgtcgacgccattaccaccctcctcgtgcccgcgcagcgcatcgcctacaacaaggcggcaggcgcggacagcaaggaacgtacgctgcgctcgtatgtgctcggctactacaagtcggagcgcaacgaggtcacgggaacggccaagcccgtgagcctgcgcgaccataacagctattcggtgattttgggcgtgtttcgcaacgccgggtacgacgccaccgtcacgctcgcgcaggtgttctggatgaaggacgcgcaggctcaacctgcgcgattcttcgtcagtgccgaacgagatctctcgatcgcgaccgatttctcgcgcttcggcaccgatattgcacagctgcgcaagaagctgcgcgggctgggcgccgaaatcgaggacacgtttccgaaatacagcgcctggttccggcggcgcttcggaatcgaaaacgagcaagcgctcgagctctttcatcaaacggtatcgatgaagtcggtgggcaatctcaccgacttcgtacgcagccacatgctcgagccgttcgacgtcgcaccgcgcgtcgacgccctgattgctcacttcgacgatctgaaccgcgcgcacgaggcggtactgaaaaccaagcgccaagtggaactgctgacaccgctcgtcgacgactgcgaccgccacagcgagcaaggccacgttctcgaaggctggcgcgcgtgccgtgaagcattgaggccctacttcgccgggctcaagctcggcctcgtcgaacgccgcctccaattgctcgaagaggatcatgcgcgcgcgacctcgcgaaaggcgcggcacgaagaagcgcgcgaccaggcgcgccagcgcgtggacgatttgcgccgtgccgtggccgaacaaggcggcgatcgcatcgcgcagctcgatgtcgagatccgcgagcacgagcgagaaagcgtgcgtcgccgcgaacgcgcgcaacgctatgccgccatcgttacgctgttcggcgaaaccgaggctgcggatgaggctgcattcgcctcccagcgccaacgcctggccgagcagcgcagctcgctcgtcgacgacgaagcgcaacagcaaaatgcgataaccgaatggagcgtggcatttcgcgaaggcaaagcgcggcgtgatttgctggaggacgaaatcgcgagcctgaaagctcgacgcaacaacatcccgaaggaacaggtcgcgatgcgggcgagcctgtgctcggcgctcggcctggaggaagacgccctgccgttcgcgggcgaactcattcaggtgcgcgaggatgcgcgtgattgggagggcgccgccgagcgcgtcctgcgcaacttcggcctgtcgctgctcgtgcccgacgagcactatgcgaacgtcgcggcgtgggtcgatcgcactcatctccgggggaggctagtctactttcgcgtgcgctccgaacgcaccgcgcgtgcagccgaggccatcgagctgcaccgccactcgctcgcgcacaagctcgccatcaagcccgactcgcagttctatggctggctcgagcgcgaaatcggccgccgtttcgactatgcctgctgcgatacgcaggagcagtttcggcgcgagacgcgcgcgatcacgcgtgcgggccaggcgaaagcgcctggggagcgccacgaaaaagacgaccgccacgcgctcgacgatcgcagccgctacgtgctcggttggagcaatacggcaaaaatatccgccctcgcagcacaacggcaagcgctcgaagctcgccttggcgagatcgggcaaaggctcggagaggcccaacacgagcacaccaaggtgcgtgagcaactcgaagcacttgcgcgtgccggcgagttcgccgagtttcgggaaatcgattggtcgagctgcgctgccgcgatcgcacgtcttgcggacgaaaaggcgcgactcgaatcggcaagcgacgccctcgcggagctaacggctcaattggactcggcgcaagcgtcgttgaaagagagtgaagcggcgatgtcggaaaccgactcggaactgggcggcatcctggccaagcgggaggcggcacaagcgttgcgcgaagagacgcacgcgctcgttgcagaagtggatgccgaactcgccgaacgaatcgaggccctgcgagccgagattctcggcgaacaccagctttccgtcgagtcatgcgacaaccgcgagcgggacgtgcgagaggcgttgacaacccgtatcgacaacgaaacgaaatcactcggccgcctggccgaaagaatcgtcaaggcaatggcggctttcaaggaagcctacaagctcgaaacggccgacttcgatgcgagcctcgccgcgaccccggagtaccgtgacatgctcgcgcggctgcaggcggacgatttgccgcgcttcgaaacgcgtttcaaggagctgctcaacgtcaacacgatcaacgagatcgccaactttcacgcccagcttgcgcgcgaacgggcgacgatcaaggaacgcatcgaacgcatcaacgaatcgctgcgacaaatcgactacaacgcgggtcgttacatcgtcctcgagagtcagcccagccccgacgcggagatccgcgaattccagagcgacctgcgcgcttgcaccgagggcgaactcaccggctcggacgatagccaatactcggaggccaagttcctgcaagtcaaacggatcatcgaccgcttccgcggccgcgaagggttgaccgagcaggaccggcgctggcgagccaaagtgaccgacgtgcgcaactggtttctgttcgccgccagcgagcgttggcgcgaggacgacagcgaatacgagcactactcggactccggcggtaaatcgggcggccagaaggaaaagctcgcctatacgatccttgccgcgagcctcgcctatcagttcggcctcgaatggggcgccgtgcgttcccgatcgttccgcttcgtcgtcatcgacgaagcatttggccgaggctccgacgaatcggcgcagtacggtctcactctgtttcagaaactgaacctgcaactgctgatcgtcacgccactgcagaagattcacatcatcgagccgttcgtttcgagcgtcggattcgttcagaacgacggtggacgcgcctccaagctgcgcaccctgtcgatcgaggagtaccgcgcgcacaaggcggagttcgagcaatga

SEQ ID NO: 49142 - DNA, 1185 bp, Burkholderia ubonensis
atgagttggacaactgccgtcgaactgcgtgcccgcctccagcgcctatgggaacgcggcgaatggctgcgaagcctcgtagacggtgccgaggggctattcccgctacgtctggcgatcaaaggcccaagctcgtccgagttggctgaacgcttcgacacggtacgcgcatggattacggaaattgccgcgacgccgcgcatacgcatcgaatggcgagaaatcaatcatcgaattctcggccagcagcgtttgccacgagcagcttgggtcgacagtctggacgatgcgctcactgtcgccggcaagcaacgcgacgcagcgcggttcgagcggctgcttgaaatcacacgctcgcgccagccgaagctcatcgcatggcttgcgcagcgcccgatgcaggccctcgaattggccggcgattgggaacgactgctggcagtcgtcgattggctgcaagcacatccgcagccgggcatctatcttcgccaagccgaaatcgccggagtcgacacgaaattcatcgaggcgcggcgcggcgtcctctcccaatggctcgatctcgtgctgccgtccgaggcgatcgacagcagtcggaccggcgccgcccaattcgccgctcgctacgggttccgcgataagccgcctcgtattcgatttcgcgtgctcgatgagcggctcgccgtcctgcccggcatgggccgacccgacatcacactcgacgccgacagcttcgcgcgcctcgcactgccgtgccgccatgttttcgttacggaaaacgaaacaaattttctggcgtttcccgacgttccgcaggcgatcgtgctcttcggagcgggctacggctgggaagctctggagccggcgcgatggctcgcggactgtgcgctccactactggggcgacatcgacacgcacggctttgccattctcgaccaattgcgttgccgattccctcacgcgggatccttcttgatggaccgcgcgacactgatggcgcatgaagcattctggggagacgaagccgatcaggtcatgcgtgatctgccgcgactcacggcgcaagagcgcgagctctttgacgacctgcgtgacaaccggattcgccgcggattacggctcgagcaggagcgcgtcgggttcgggtgggtcagagcggcgctagaggaacggtctttcgtttag

SEQ ID NO: 49143 - DNA, 1482 bp, Burkholderia multivorans
atgaaaaccgcactggcgctgcatgaactgaaggcaatgcgagagaaaccgatgtggatgctgctcggctcccatcaggcgcctttgaccatggcgctattgcaatcgctgtttttcgaaagctcgacgcagctgggctcggcaagtctaatggagaagctctcgatcgagctggacggactgcgtgcgcgcggggaggatatcgacaagacgccgcagattctggttgccgagtgggtacaggccaaatggctggctcgtagttttccggaaggggccagcgaggagcgatacgagctctcagcagacatcgtgccagcgctgcaactggtcagggcacagcttgagccgaggcaggcggctactgaaagtggcctcgcggtcgttatcgattctgtgctccgcctggcttccgacaccgatccggatccggcgtctcgcctgacggctctccatgaggaatccagacgtattaccgaggaaatccggcatgtcatgaagcatggtgtgtcgcctctggatccggctcgtgccagcgaacgcgggcgtcatatcgttgcgatgactgaggcaattgcagtcgatttcaggcgggtgcgtgaagcatttgaacgcctcaatcgcgacttgcgccgtcaactagtggagcatgatggatcgcgcggggaggtgttggagaaagtcttcctcgggagcgacgttattgcggaaagtgacgaaggtaaatcttttctcgcgttttggcgtttgctgactgacccttcgcaatttgaagggctaaaagcagccttggaagcgctggagtcgcgaccatttatccgctcactgggcctcgatgaacgccgacggcttttccgggtgacggagacgctgctggtcgaaggcgggatggttcaggacgtcatggcgacgctgagccgtagtctgaaaacctttgtgcaaagtcgggagttccaggagcagcgcaagattcagcgtctgatccgcagcgcgattgcggagtcactggcactgaaggaccaactgaccaatgggcggactctcgatttcaccctgacgttatcgaccagcagcttgcgttcggtggcgcaactagtactcaccgacccacaggagcgccccggagaaacttctgtcggcgaggccgaggtaccggaaatcgacctcgaggtcatgcgcgagatgatcgacaacgcggatatcgacattccactactcaagcagaacgtccggtccgcgctagctgaacgcagccaggtgagcgttggagacttgacccgtatgttcgagatcacacaggggcttgcctcgatagtcggctatatgtcgctcggtcagcgatacggtatcgtgctccagaacagcgagcgcgaattccatccatgggaaagggtatcgtgggccggacaggatgacgtcgtgcgccacgcgcggattgcacagatactgtttacgagggactgtctgaatgacctcgattag

SEQ ID NO: 49144 - DNA, 3450 bp, Burkholderia multivorans
gtggagacagcccagttattcgaggatccggaactgtcgccggtggcgacggacggggcagcgcgtagggaaggggagcctcgcccgacatggagcgatcgtcatctcgaagaagcggggcaacagcagttcaggctgcgacaaatgcaggtcatgaactgggggaccttcagcaagctccacgtattcgatatttcgccgcgcggacacttgcttgttgggccgtccggatcgggcaagtcgaccatcctcgatgcgcattcggcgctgatggcgccgccgaattcggaattcaatgctgccgcccggggtaacgataaagtcacccgcgatcggacgatggtcacttatgtgcgtggggcctgggctacgcaggaatccgaagaagggatcatcgcggcgcagtacctgcggcccgataccacccttagcgcggtcgccgaagtgtatgcaaatgcgcagggacagatgctgacgctggtcggcatgtggtggatcaagggtaagtcgacactcgcaaaggacgtgcgacactgtttcttcgtgattgaacgggcattcagtctcaaggagctgtccttcttcatgcaggccgactacaacctgcgctcgtttgccaagcatcttcctgaagtcaaacctttcgatacgcacgcgtccttccgtgagcgcttcaaggcgcgcctcggtatcgaccacgacctggcgttgcgactgcttcacaggacgcagtcgtcgaagaatctgggcgatatcaatgcgttcatgcgtgacaatatgctggacgagccccagacgttcggcctcgccaaagcactctgcgacgacttcaacacgctggcagcggcccaccaggacgtcgtggaggctcgtgagcagcgggatctgctgaacctcgcacgttcgcatcatgagcggtatcgcgcgcaccacgcggagctcgccagggtcgacgaactgctgacgcaacttgaccatcaccgcgaatacctgcaatacacgttgcgtggcaggcgcgtggacgagttgaagatcgtgctcgaagggctgcgtcagagtgtcgatgcattggcccggaaggcgaacgacgagcagaccgaactccagcgattgatgacgcagcgtgccggcatgaacgacggaaacgtcgcggggctacagtcccagctggtcacgaaggaaacgcaactgaagcaggtccgccgagcgcgtgcacgggtgtccgtctggctccagacgctcgggtggcctgagccgcaagatgcgggtcattttggcgaatgggtcggccgcgccggagtgctgcgggatcgtggtcctggcgaagaaggcgaggtgaaggccgaggaacttcgccagaagagatttgaggcggaacggcagcttaaggaactgcttgctgatgcggcatcgcttgaacagagaaaatcgaacttgccacgtgaattggtcaatgtccgcgaccagattgcactcgccctgaatctggatcccgcctcacttccgttcggcggtgaactgctcgatatacccgaaaaattcaggcagtggcaaggtgctctggagcgtttgctggctcctcttacccgctcgtttcttgtgccggaggaatactatccgggagttgtgaactggctcgagtcgaatcatacgggacagcatgtgctttacctgcgcatgcgcccgcatcagaagcgtttcgataatggtccgaaggctcccggcaggatgctcgattcgtccgcggatgaatacggcggttggctgcgcaacgagatagcttcacattacggcgagttcgtgtgcgcagaaacggctgaagagtttcgtaattcaccacgggccatcagcctgcacggccagatcaagcggggcggtgcacggcacgaaaaaaatgaccgtacccgccttgatgaacgccggcactgggttatcggtttctccaacgagcagaaaaaacttgagcttctcgatgaaatccacgcacagcagaaggttgaaagagaagccagtcgggcgctagccgaactccaggcgacgcagaacaaggaacgggagaagctgaatgcagcggcggaattgacgcaggtggtctgggaggacatcgacgacgtctccgtggctgacgaggtgcagcgtttgctgaaacagatagaggaggcgcaacgttcacaccctgagatccaggaactcgatggccagatccaggcgcagggggtaaaggcgtcccaggtgggtagcgcgcacgaaaccgaaaagaaaaaattcgctgatactgaacagcagatcaacgggttgatccgggatcgggaaaatacgcgcgacgatgtgcgtatgccgcctgtagacggggatgagctccagttattgtttggccatctggacggcctgacgctggagaatctggagcagcggcggctgtctgtgcgcagtgaactgaaggacagaaggaacgacgccgacaaggctcaagcaaatgaccggagcctgcttgaggaagttctccgtacgtttcagcgtgaacacaggatggcagcagcggatatgggggcgacgctggacgattggtcagactatgcccagctgttagccaaaattgaggaggacgatctgccccgcttcgaggagcggtttttcaggctcctcaacgagcagagcgatcgccatctggcccgactgcggcaacgtctcattacggagaaagatgagatacgggggcgcatgaatattgtcaacgacgcactgtcgcagtcggagtttaacgctggcacctatctggttctggagaaccggcctcgaacactgccggatgtgaccgcgttcctggccgagctcaagaactgccttgagcgcaatatcaagccagatgcgacccgcgaggagcgcgaggaacagtttaaggccctcaatacaatcgtccaacggttgcacagtgacaagccggaggacgagcgctggaaagcgctcgtcctcgatgtacggcaacacgtggaatttgtggcgaaagaatttgatgctgatggccgtgtgcgcgacatttttcagtccggcgcaggtaagtcaggcggacagcgacaaaagctggctgcgacgtgcctcgcggcggcattgcgctatcaactggcgggatcgcagagaccgctgccgcagttttgcacggtgttgatggacgaggcgttcgacaaagccgatagcgagttcacggcaatgacgctgaacatcttcaatacattcggattccagatgctgatggctacgccgatgaaggcagtaagaaccctcgagccattcatcggtggtgcgcatgtctttagcaacaagttgcgcaacagttctggagcggtggcgatcgagtacgacatggcgcatcggcggctggtcggccttggccaccagcgatccgaagagagaggtaacgctggcggtgaaataccgcggagcgaggactaa

SEQ ID NO: 49145 - DNA, 933 bp, Burkholderia multivorans
atgggcaacgtcacgataccggaaagggtgttgttcgaaaatgcgcaggcggtggcggattgcgcaggactgcgccggcattgggacacccttcatgcgcggtggcggaggataggcgagcagtatccggttttggccggccagcgcgattgcacgaatgcggtcataagaaccgccgactggtctgacgatgatttccggcgactgatggaattgctggcctggtgcgggcagaacccggcgagtggactctacctgcgccaattgccactgatagacatagacacgaaatgggtcgagggacggcgtggcgtcgtggagccgctggttcgggtccttatggggaaggacggtgatattcgtgaggtcatggggctgaggcgttcacctgatacggtgcggatgagactgctcgatccagggcttcgcgagcaactgctgggcatggaggaccttcagattccgataggccagtggaaccatgggtttcggtatccaccaaagcgactactgattgtcgagaaccttgagagcgggctggcacttccggatatcgaaggggtggcggtcgtgatggcgctcgggaacaatgtgaccactctacggggaatagaatgggcgcttgctgcggatgtcctctactggggggacattgatacgtggggattgcatattctgtcccgggcccgcggcatcttcccacatctgcggtcggttctgatgacggagggggtggttgagtcgcatcgacatctcctgaccgaggagccgactcaggacaggcggccagccgtgaatctcacgaaggacgaggcgcaactgctgtccgatctacagaccggacgatggggtgaacgccgccgtctggaacaggagcgaatacactggccaaacgtaattgaggaagtttgccgtcagtggactgattcttga

SEQ ID NO: 49146 - DNA, 1374 bp, Thiobacillus denitrificans
ttggccggcgcgaaccggaacatttacgttaacgtcctgacacgtttgcacgcgttgttctttggcacttcggcagccttgctgcctgcttacgaaacggtgcggagcgagattgaagaagtgctgtcggatatgacactgcaggactggcaatccgaggaaggcgaagagtcggcaccagacatccccaatacccaacttggctatgctgcccgcgcttatcggcgtttacggcagtgcggatggctggaggaagaacaagacggttatcgcattcgcgtcgccatgccgcccgatgtcgggcgactgctcggtaacttgttggagatcgcgcaacagcgtaatcgcctttacggcgggatagtgcagaccattcataacaatattatccaggtgcaactggctcctgccgaccaggcagccgcgctgtcggaggcagcacgacaggcgcgagagttctttttacacttgcgctcgttggcctatggcttacgcgaagtatcgcaaaggcttcgctcagaacatgaccccaggattctgctgggtggattcttctcggattttgtcgaggaatttctggttgcggattacaaaacgctgtacacccgtgacaaccccttccgctatcgagcggaaatccttagcaaggtaagaagcattcgtttctcgcatgatgcacgcacgacacttccggaggcctatctgcgccagcgcattgtccgtagcgaaatagaagctttgcgccgggtggacgacgatttagctacgctcgaacaggtattttccgaagtggatgcgcacctggaacgcattaacgaattccgcgccgggctggagcgccgggttgcagaggctgtgcgatatatggacaagacccagcccggcgcagccgcgcgcatcgcgcggctggtaaagcgtgccgccttgtctgatgatgccgcaaccttaacggcaccccatcgcctgatgcgtgtgttgccgttttcgccgcgcagccctcgcacccccgtctcgccaaagcgcccgcccgagccggaacgcctgcgccgcaccgagccagacccagtgcgtctagctcggcaaaaagccatccgcaattatcttgctcgccgccgcctggatccgcgcgcggtggagacctacctggatcagcagatgggatcgcgccaggaactgcgcgcgcaagaattttgcatcgaatcagtcgaggatttcgtcgccttctcgcacctttcgcaactcagccagctgatacggtcaggcgaaagcgggcagcggctcaatcgacgttttgacgtgcgcgccggaatggcgcgcatcgacacggaatggcttgcgtgccgggacttcaccatcattcgaaaaacaatttga

SEQ ID NO: 49147 - DNA, 618 bp, Thiobacillus denitrificans
atgctacgcgacctcaaacacctgctcgaccgcaacgatgaactcagcgaatccgacttcaagagcgcggccaatgccttattgaccaggcaatttctctacctggccgacgagcgcccacactaccgcttgattactgaccatttcgagtactttcgcgcgctcttcgatgcgttgggctggcaactttatctggatcaggattttggctacgtcggcgtactgccgggcgatgaagagacctatctgcgccttgatctcaccgaaactctgcttctttttgttgcgcggctagctttcgaggaaggcgtggaggcgcgccaaacgcaggatggcaaggtacatctaagcgcagccgatctgctggaacgctaccttgcgttgacccaccgcgaatcccctaagaaaggcgattacatcggcctgctcaaacactttcaacgtcacggtctgctgcgattcggtgacgaagatgccgccacgggtctaccccgaattgccctgttgccagccttgcgccaggtagcgggagaccactgcctggaacggctggaagcacacctggaaaaggccgggcaagccaatgaaatcggcctgccagaagcgggcgaacaatga

SEQ ID NO: 49148 - DNA, 2472 bp, Thiobacillus denitrificans
atggagttcagcgccttgggcaagcagaacgagcaggatcaagcagaaatcctgcgcctcactgggctcatcgaagcaagcggcagcgaggccaaacgtcgggaactggaagcgcgtattgagacgcagcggacccacgcaaaccaggctggcaacgacctgaactcaattcggcgaaatctctccgtcgtctggaaactgctcgacttccgtgaagacctgcccaagcctttgacgactgtgttggaagcgcttgcggatacgctccccaaggacgagttgctcgtccctatttggcccgaagcacccgagatcgtcgaacagcttgccaacgaagtccgcactgggcttgaagctgtgctgtcaggcataaaggaacgcacgaggaaattcggaaatgaagttgaagccatgaacaccgacttgttgggtttgcgcgagcggctgcagacccttcaacgcggagaaacccctttgtcgaggaaaacccaagccctcatcgccctgctcgaccagcacaacatcggtagccgcccactgtgcgattgcgtggaaatcgtggacgaacgctggcgggactgcatcgagcgctatctcggcagcaatcgcgaagccctgatcgtcgcacccgagggtgcgcgtgacgccatcaccgtctaccgccgtcagggtcgagagctgtttggcgcacgcgtaatcaacacacgcaaaacccaggactggttgaagcgttgcgagtcgggttcgctggcagaaatcgtcaccaccgacgacgaccatgcccgcgcctatatcaatcgtctgctcggtcgtgtgatgcgggtggaaacggaggatgaactcctgcgccaggatcgcgccgccacggacgacggcatgcttgccgccaacggtgccatcgaacgcatggcgcctgtgcaagaccacctactgggacgcgccagccgcgaactcacgcgcaagcgcctggaacaacagtttcaggcggatgccgacaaatacgccaaggctgatcgcgctcataaatgccttgcgggtgtctccgaagccttggctgactttgcacgcaagctggaaaatggcatcgagctgactgcactggctgggagccgagctgacgctcaagcaaagataaagcgtctgaacgaagaattggggcagctcgacctgaaagaggcagacacccttaaacaaaaattcaaagcgactcagaacagcatagaaacgcgtaaggggaagttcagcgcacttgaagcgctgaaaacaggcttattaaaacaaaccactattcaggaagagaagaatcgccagaataatgtggcattcgcgcaagccaccgaggaacgcacgcgccgcacccagtccgcgaccctcaagatggcagaggcttctgcccaattcgagcgcctgctgactgaatatggtgaagacctcaacaaagtggaggaagtcgcccgccagcgcacccgaaaaaaccgcactgatcaggctcagagccgggatgccgcgcacggtgatctgcgcgaatatgcgctgaagtattccgctttgctgccaggctcgaccaaccatgcgcccgaagccctgcatgcagaactagaagcctggagcatcgccaacctcaccaacctggaagacactcagcttgccggcctgactgatcgcgccgagaaagccaggctggatgctgaacaaattttccacgcacagttcatcggcctgttgcgcgacaatctggccggcatcgacgatgcgctcgatgaactcaatcgcaacctgaaaaaacgcgatttccacggcgaagtgtaccagttcaagaagcttcccaaagccgagtacaagccgctgatcgaatgggtgcgctcggccaccgccgaagtacaagccaatgtcggcagcctgttcgatacgcaggccttgccgggctccgagcatttcgaagcgcgcaaaaaagtccgcgaactgctcatgggcggtgccgacggagccagcgcgctggaagacaagctggctgattaccgcaactactaccacttcgacgtggaaatgaaggatcccaatcgggcaggttccgctgccttgttatcgcaccgcctgggcaaaggctccggcggtgagcatcaggcgccgttttatgtcgccattggcgcggcgctggcggccacctaccggctggagcgtgacgaatctactggtaaagtgaaaggcggcatggcgctggccttattcgacgaggcattcagcaaactggatgtgggcaatacgcaaagtgcgctcgccttcctgcgcgatcttggggtgcaggcaataatcgccgcgcccgacgagcgccatgccctgttggctgaggaaatggacaccatcgtcaacgtgtatcgcgacggcggcgcggtttctatcgagtcgcaatatttcaaacctgcgctgcatgcgctgcttgccatcgacaatccgttcaagacgtatgactga

SEQ ID NO: 49149 - DNA, 1191 bp, Thiobacillus denitrificans
atgactgatcccgcgctcggactgctcaataccttgttcgagcgttggcagcgcagcgacaacagcagtaaaacgctcagcctcagcctggcgggacgcgacagcggcggttatcgagccacgtcgggaaactgccgcgaaagttttcatgcggtcatggcgaacgcagcagcatgcggtgcagtcacgcttgaatgggggcgttttgaagccgagcacgaattgcgacgcgtgctgcttgttgacgggcacaagctggctggcttccttggccgcacgcctgcccgaacccaggtggtcgctcttgcgccacggatcaccctcctgctagaacacgcaccgccgtggctgcaaacctgctgggataacgcggccacccgttggcaacggggagacgctgcgctacggctgcgtttaccgcaacatgccgccgacatcgagcggctattcaaagccttgcttgctgtcaaccacaatcaacaagagaacctcgacctgcgcagtttcagcgttcaggtcacagatgactccaaagcgatggaacgcctaaaagccagctttgccgaagcctggtgcaaggcgcatgactgcgaatcccgggatgttgacgacctctatcattcgctgggtttgatcaaaacaccgcaacccgttttgttgcggggggcagtgagcctgcgcggagaacagaccctgctggatttgtccgaagtacgtccctggatcggcctgcctggcgaaaccttggccaatctggtgctacccgagcggccgggctatgtgctcagtatcgaaaactggaccagctttgcccgccattgccgggaagtgcctgatacgggattcatcctttataccggcgggtttcccaatcccagcatccagtctgtatttaagcgcttggggcaggaactcagccaagccaccccgttttaccactggggcgacactgacgtgcgcggcttggaaattttcgccctagtcactcgactgagcggccgcgaagtgcgcccccaccagatggggcacgggcagtggacgcaagggcgactgcttatccccagcgaaatccgcactgttgaaagcttgcgctgggtgccgggcattgcagatttggcaaaccgacttattacgtcaggggtgccgcaggattttgagcaggagagtcgctcgccccaaacccccgtctag

SEQ ID NO: 49150 - DNA, 1494 bp, Burkholderia cepacia
atggctgttcatgacctgactgaccaaattcgccaagagaaggtggccgagcgctatccgccgctctttaaacgcttgccggaccgccttttcgcgccactggcgtcggccaatcgcttccagtattggtcactgctgtgcgtgctgcacgccaagcgcttcggccccgaggcaccgttacctccgagcaccggattcctgatgcgcgagataacggccgacatcgccgaggaacttcagtaccaggattgggccccggagagcgacgacgtgacgccggcaacgccgctggcgatccgggccatcatggtcttcaatcgccttcgtgaagccggatggatccgcgtggacagagtgggtgtgcgcgagatggtgacgatggcgccggccgtcgcccacttcatgaaccgactcgtcgagttcgctcacaccggcccggaattcgtctccggaaagattcgcagcatcgaggctaatctgaaactgctcctagacgaaactacggacggtgcgtcactgcaggaggccgcccggcagtcacgcgccctcctcgagcacgtccgcatcgccggcaccaacgtgcgcgacctgatgctagaaattggccgtaccgacgccactggagaattcgtgcggcgcttcttcgacgactacgtcgaacgcatgttcatcggcgactacaaggaactgcgcacgcgcgagcatcccctggcccggcgtcaggagatcttacgcctcgtatcccatatccagcagacgcaggacctgcgctcccggctgatccagtggtaccttgagaagcaggctgggcgtgatcctacccgcgccgaagccatgttcgagcgagatatccagaaggtggaggacctacgccggatcgacgagtacctggaccggcttgacgatgagatccgacgcgccaacaagctagcgttggcctacctggattaccgactgcgggccgcccggcccctcgacgagttgatcggccaagccatcgacaccgtcgtcaagcacggcagcaaggcagccgcgctggcaccgtttgcacccggtgattgcatcgccggcgagcgtctggccgccccccgtgtcgagaccaagcgtccgccgcctagcggactgcgcaagcaagtcatgtccgcggaacaagaggcgcgggcccgcctggctctgatggcacgagaccggcgcaccatgtcgttgccgaagctcgcggccttcgtgcgccaacagctcggtgaggccaatgcaatgtccagcatcgctcttaaggtagacagtatcgaggcggtccgagcactgcaggtgttgtgcaccatcgcggcagcgaacgcgaccccgagcaaggtgttgcgcgccaatgcacgggcgatgagcagcggattcaccactgtccggatggaaggcgaagaggaccagaaccagcgcatatctcacctgcccttcacgatcgcaagaacaaccaagccagccaagggaggaaaccaatga

SEQ ID NO: 49151 - DNA, 663 bp, Burkholderia cepacia
atgagtttctgggcgaatgcggcggacgccaccaagaacgtggtcaccgaggatgattttgaggctgcagcgaaccggctaatcaccgagcaggttctgtacgccgcggatcgtggcagcaaggtagcctatgggctgatccgcgacttcgagcgcgaattcaagcgtgctctggaacccctcggctacgtcgtgcgcgtcaacagccaactgcgatatgcctgcgctatccccaaacacgccaagacctcgccggtcaccgtggatcagacgctgctcgcgctggtgctacgcaaaattttcgacgaggagacgcgctccgggcaccacgacgagaacggcgaggtggcctgcgacctagtcacactggaagtcaagtacaagcagacgacgggtgggcgcgagttggccaccggaggcaagctcgtcgcgctgatgcagtggatgcggcgctggggcctcgcgcgagtgtcggacgaggacggcaatcagttcggacacgatgcggatcagccgtacgtggtcatcatccgtcccggcatcgccgaggtcctgggagaggctgcgctgactcgaatcgccctattcactgacccggccaccgaggtcgagggcgtggaccatgcggtcaccctttccatcgaagaaggcggtgccgcatga

SEQ ID NO: 49152 - DNA, 3444 bp, Burkholderia cepacia
atgaaaaagctaatcaggatccgggtagtccagttctttctgtacgaaatgcgtgacgtaaacgtcggcatgaactgcggcatcttcggtgccaacggcagcggcaaatcatcgttgctggacgctgtgcaaattgtcatgcttggagccaacgagagccgcggcagcaccggcgtcgcgttcaacgcacaggcagatgagtccaaccacaacagtcgcaatattcgcagctactgcctgggccagtacggtgattcaccggatgcgcgcgtgcgcgacagtgccaacacctacatcaccctggtttgggaggacaccgagaccaaggaaattgtctccacgggcgtgtgcatctacgcaagtgtcgaccgcgagaagtccgacgtgcaaggtcgctacactctccccgtggacctcgcgctcagcgaccatctcgaactcgtcgacggcgaatacagaccgcggccatgggcgagcttcaggcagatgctgtcgcagcgtgctcacggtgaggaagtgctctttcacgactccgagcgcttcgtcaatgcgatgctgttccggctaaggggcgcgcgcggtgccccgcgcttggacgcctaccgccaggcgttccgtttcgggctgcgcatgaagttcgacaagagcgtcgacgacatcgtccgccagcaagttctcgagaccaggccaaccaacatcaagcgcttcaaggacgtgttgcacacattccaggagatggcggccctggtacgcagcgtgcaggcgaagctcgacgaggccgagttgatcgagacggatttcgccgatgcacatcggcgtaacagtcactcggtctcgcttgctgccttggcccaggcagcagcactcgaggtcgccaatgaggcagttaccgccgccgaggaagccgaaggccgtgcggcagcaactttggaagccgccaacgcccggcgtgacgaagtgaactgtcaggtagaggcggccgagcagcgcgcacgcgacagcgcctccgaccgagacaagcacgcgtcccatgcggacgctgcgctattgcgcgagagcctcgccgggatacaggaccggctcaaccatcaaagaatggggctgcatcgcagcatcaaagccatcggcaaggccatcgacgcgcagatacctggcaagctcgtcgccgacagtgccgaggccacgactctggcgttcaaggacatccgtgccctgctggaggacgacaaggtcggcaatcgcgccgcagttgagtcgacggtccgcaaggcgctgcgtgctgccaagctgctcagcaacgaggtgttcgaggaaatgcagtccgtcggtcgagcacagacgacagccgaagccgatctcgccggcgtgcgagagaaccaggagcgcatatccaaaggcaagccacctctggagggtccggctgcggcgctcaaacgcgtgctggcccacgccaacgtggacgctaccccggtgtgcgacctggtgcgcgtcgacgacccggactggcaacctgccatcgagtcctacctgggtacgtcgaacatgcaagccctgctggtcgacgaggctgacgagcgcaaggcattccaggtgtcgcgccgagccggggtctacgaggcaaaggtcgtgatgcccagcaagttctccaaccgcggcagtcccaggcgcggcgctgtggccgagctgattagcggcagcagcgccgcagcggtcaactacctgcggtccaagttcggcgacacacagcgtgcggataccgaggacgagtgcttcgcccatcgcttcgcgatgaccaaggacggcatgaggctggccgacggcgagatggtacgcaagaagccgacggatccggccttatttaagatcggcccgacttctacggcgacgcgcacctcgatcgccgaacgagcccgccagctccaagaacaagttgaggccctcaaggacaggtacgacaagctcaagatgctcttgaacaacctcagcccgtttgtgggcgcggagcaggataaggttcacgagatccttgaggtctttgatcagatttccaaggaggtcagcgaagagacggacctgacacggcgtctggaagccttggacactgaagagtaccggcagctggtgcaagcagccgaagaggcgagcacggcggtgatcgcgttgcgcaagcagcacctcgatacagttcaagccgtcggcgccgcagagaccgaatgccggcaaaagaacgaggacaccacgaagaagaaggcagatgccatcacccagcaggggatcgccgatgcggcgcgtgcggctgagggtttcgacgccaactatgcgtcggaccagtgggagagactactgacacgccaaggcttgtcgttccaagagatcgtcacagactgcactcgccgcagtaatggggctaaggatgactcccggcagaaggcgacgaacgccatgcagaagctgtcggccttcctcgtcaggcacaacgagttcatgccggctggcactcaggacgactggcgcagcgcccgcgcctggctggaggcgcgcgtcataatcctgaacgaaaccggcctgcgcgagaataaggctcgaatggaagacgccctaagcgccgccaaaagcaccttccgcaacgacgtcgcggtggcgctgcacgagcacctcgagtggttaagcgacaccatcaaccgaatgaatgaggccttacgccttgcgccgatgttcacgaacaacgaacgctaccagtttcgctcgcatgtgcgaccggctttcgccgtgcttctgaagttcatcaaggatgtcgcccagtacggcccgaccgaggacctgcttggcggtgccggggaactacccaaggagttcgaggagctgatgcgcgaaaagacgatcgccggcgcagctgcagtcaaatctccgctggacgactatcgtgagttcttcgacttcgacatcgaggtgctccgcgaagaagccactacgggctcgaccaggcacatcggctggctcagcaagcgcgtcggatccggctcgggcggcgagcatcgcgcgccgctgtacgtgatcgcaggtgccgcgctgtcctctgcctatcgactggagcgcggcgacgacactggtatacggttgctggtcatcgacgaggccttcatcaagatggacccgagaaacatcgtggctaccatgcgctacttcgaggagctaggcctgcagatcttcatggcaagcacgggcgacgccttgggtagcctaaccgcattccttgatcggtactacgacatcatgcgcgacgccgagagcaatgtggtggtactcgagggtcacgacgtcccccccgagacgcgcgagatgttccgcgccgatctgcctgagttcaacccagaactgatcgaagcggagatcaggagacagtaccagccgcagaccgactcgtcggagagcatcgcaacgtga

SEQ ID NO: 49153 - DNA, 1164 bp, Burkholderia cepacia
atggatccgctggccaggaaagcgctagagcacctgttcaagtccgccgacaggcacgaggccggcgctaccgtgcggcgccctgccctgacgagttctgcgctgtccgaataccacgatttgcgcagcctgaaggccaaggaagacttcgaggcggtaatgacccacgcccaggcagagggcgcaatcgtggtccttcgccctcggggtgacccccatgggctcattgagcgagtcgaactgatcgacgtcgtcagactggcttcgattttgggcaagataccccatgcgatgcgagtccagtctgcaagacgggcccttgccatgtgcctaggcgagcaccctgtcttgaatgacgtcctgtccggctgggagaagctcaagaaggttcgcggcacggggcctgacgccgcccccaactgggcgatggcttgtgacgtcatcacctactgccggactcaggtggcgctcggcgccacggagacaccggtgcgggacgccagcgcgcgcctgttcaagaatagcaagcgtatcgagtccctgacgccttgcctcgatgtactactggcaggcaacgtcgaggacgacgcgcgcccggaagccgaggtactgcaggagctcggcctctatcgcgaaccgcagccagcgcgtctggctggcaacatcgtggtccgccgagagcgtggcgcgttcccgctggactgcccctacggcgctctgcctccgtccacggtgctgggcctcgggtcctttcccagccaggtgctgacaatcgagaaccagaccacgttccatgtatgggcgcgccagaactgtgactccgatgtgctgtgcctctacaccgctggaatgccatcccccgcatggcgggcaatgtacctccggctgctcgctgacctcccagtgtcaactccggtgctgcactggggcgacgtcgacgaaggcggttttcgaatcgccgccttcctgagcaggtgtgccactgaagccggtcacaccctactgccgtggaagatgtgcccagcggatgttcctgagtcgctgcgccgggcggcaccgacgcgcaccgtcgagcggatggtcaaatatgctcgagagaccggatgggacggtattgcaaccgaattggcggaagccaagattgtcgccgagcaagagggttga

SEQ ID NO: 49154 - DNA, 1461 bp, Burkholderia ubonensis
atgttcctcgactaccctaccctcgacgcgctgcgcacgcgccatcccgcttggcgacttttgcgctccgaccacgcgccgctcgccgtcagcttcctgcaccgcgcgttcgtcgcgccgaacgtgcgcgaggtggcggctccgtttcttgccgaagcactcgaggacgagctttacgcgttgcgcgaacaactcggcgacggcgccttcccgaagcccgcgctcgagtatctgaacgactgggcaagtcctgaaaagggatggttgcgcaagttctatcgccaaggctccgatgaaccgcatttcgacctgacacccgccgcgggaaaagcgatcgcgtggctcggcacgctgatggaacgaagctttgtcggcacggaatcccggctcctgacgcttttcgagttgctgcggcagatggccgaaggcagcgagacggacccggaaaggcgtcttgccgaactccacgcgcggcgcagccagatcgacgaagaaatcgctcgcgtggaagccggcgacgtccggctgctcgacgatgccgcgatcaaggaccgctttcagcaattcatgcagatggcgcgcgacctgctcacggatttccgtgaagtcgagcagaacttccgtctgctggaccggcatgtacgcgagcgaatcgcgctctgggaaggatcgaagggtgcgctcatcgaagaaatcatgggcgagcgcgacgcgatcgccgattcggaccagggcagcagctttcgggcgttctgggacttcctgatgtcgagccgccgccaggaggaactctccgaacggctcgagcacgtgcttgcgctcccggcgatcacggaaatgaaacccgacgcgcgcacgcggcgcgtccactatgactggctggaagccggcgagcacacgcaacgcacggtcgctcagctctcgcagcagcttcgacgtttcctcgacgatcaagcgtggctcgaaaaccgccgcatcatggacattctgcgcggtatcgaaacgaaagcgcttgtgctgcgtgatgcgcccccgccgggctccgtcatggagatcgagaccgcgtccgctgacatcgagctgccaattgaacgcccgctttacgcgccggcgctgcgccctctcatcgccaacgtcgcaatcgagaccggcgatgcggacctcgatgcgtcggcactctacacgcagatcgtcgtcgatcgcgcgcgcctcgcaagccacatccgccgctgccttcaagatcggcggcaagtgacacttgccgaactggccgcttcgcagccgctcgtgcatgggctcgctgaactcgtcgcctatttgcaactgagcgccgaagccggaacatttcgcgcgaccgtcgatgagaccgtctccgatacgatcgagtggcaggcaaacgatgccaacggagcagcaatcgtcaagcgcgcaacgatgccgcgggtgattttcacaaggtag

SEQ ID NO: 49155 - DNA, 651 bp, Burkholderia ubonensis
atggaagaacagcaaacttcgtcgcttggtcgaggtgacttgtcgacggttgccgtcgcgctgctcaagggcgtggtttatcgtgatggaaacgagcgcctctgggccgcactgctcgaattgcagacacacgtgcgcgactacgtcgccgtgcttggcctcgagctcgtcgtggacgaggcggaaggctacgccttcgtaaagagccgcaccgagcctgacgccgaagtcgacggagaccaggccaagctgccccggctcgttgcacggcgtccactctcgttccccgtgagcctgctgctcgcgctgctgcgaaagaaactggcggaatgggatgccggcggcggcgacacgcggctcgtcctttcgcgcgaggacatcgtcgagctcgtacgcgccttccttcccgcgagcactaacgaggcgcgcctggtcgatcagatcgatacgcacgtgaacaagatcgtcgacctcggtttcctgcgccggatgaagaccgcgagcggaccgcccacattcgaggtgcgacgcattctcaaggcgttcgtcgatgcgcaatggctgctcgatttcgacgcgcggctcgcaagctatcaggcgcaccttcgagattcgacgaattcggaccaaacggagagtcgcgatgaatga

SEQ ID NO: 49156 - DNA, 3372 bp, Burkholderia ubonensis
atgaatgagccgcgcacgctcggcctcgatttcgccgcggacgacacccggacgggctttcgcctcgagcggctcgaggttttcaactggggcaccttcgacgaacgggtctgggtgctgcgggtcgatggccgcaacggcctgctgacaggagacatcggttccggcaagtcgacgctcgtcgacgccattaccaccctcctcgtgcccgcgcagcgcatcgcctacaacaaggcggcaggcgcggacagcaaggaacgtacgctgcgctcgtatgtgctcggctactacaagtcggagcgcaacgaggtcacgggagcagccaagcccgtgagcctgcgcgaccacaatcattattcggtgatattgggggtgtttcgcaacgccgggtacgacgccaccgtcacgctcgcgcaagtgttctggatgaaagacgcgcaggctcaacctgcgcgattcttcgtcagtgccgaacgagatctctcgatcgcgaccgacttctcgcgcttcggcaccgacattgcacagctgcgcaagaagctgcgcgggctgggcgccgaaatcgaggacacgtttccgaaatacagcgcctggttccggcggcgcttcggaatcgaaaacgagcaagcgctcgagctctttcatcaaacggtatcgatgaagtcggtgggcaatctcaccgacttcgtacgcagccacatgctcgagccgttcgacgtcgcaccgcgcgtcgacgccctgattgctcacttcgacgatctgaatcgcgcgcacgaggcggtactgaaaaccaagcgccaagtggaattgctgacaccgctcgtcgacgactgcgaccgccacagcgagcaaggccacgctctcgaaggctggcgcgcgtgccgtgaagcattgaggccctacttcgccgggctcaagctcggcctcgtcgaacgccgcctccaattgctcgaagaggatcatgcgcgcgcgacctcgcgaaaggcgcggcacgacgaagcgcgcgaccaggcgcgccagcgcgtggacgatttgcgccgtgccgtggccgaacaaggcggcgatcgcatcgcgcagctcgatgtcgagatccgcgagcacgagcgagaaagcgtgcgtcgccgcgaacgcgcgcaacgctatgccgccatcgttacgctgttcggcgaaaccgaggccgcggatgacgctgcattcgcctcccagcgccaacgcctggccgagcagcgcagctcactcgtcgacgacgaagcgcaacagcaaaatgcgataaccgaatggagcgtggcgtttcgcgaaggaaaagcgcggcgtgatttgctggaggacgaaatcgcgagcctgaaagcccgtcgcaacaacatcccgaaggaacaggtcgcgatgcgggcgagcctgtgctcggcgctcggcctggaggaagacgccctgccgttcgcgggcgaactcattcaggtgcgcgaggatgcacgtgattgggagggcgccgccgagcgcgttctacgcaacttcggcctgtcgctgctcgtgcccgacgagcactatgcgagcgtcgcggcgtgggtcgatcgcactcatctccgggggaggctagtctactttcgcgtgcgctcggaacgcagcgcgcgtgcagccgaggccatcgagctgcaccgccactcgctcgcgcacaagctcgccatcaagcccgactcgcagttctatggctggctcgagcgcgaaatcggccgccgtttcgactatgcctgctgcgatacgcaggagcagtttcggcgcgagacgcgcgcgatcacgcgtgcgggccaggcgaaagcgcctggggagcgccacgaaaaagacgaccgccacgcgctcgacgatcgcagccgctacgtgctcggttggagcaacacggcaaaaatatccgctctcgcagcacaacggcaagcgctcgaagctcgccttggcgagatcgggcaaaggctcggagaggcccaacacgagcacaccaaggtgcgtgagcaactcgaagcacttgcgcgtgccggcgagttcgccgagtttcgggaaatcgactggtcgagctgcgctgccgcgatcgcacgtcttgcggacgaaaaggcgcgactcgaatcggcaagcgacgccctcgcagagctaacggctcaattggactcggcgcaagcgtcgttgaaagagcgtgaagcggcgatgtcggaaaccgactcggaactgggcggcatcctggccaagcgggaggcggcacaagcgctgcgcgaagagacgctcgcgctcgttgcagaagtggatgccgaacttgccgaacgaatcgaggccctgcgagcggagattctcggcgaacaccagctttccgtcgagtcatgcgacaaccgcgagcgggacgtgcgagaagcgttgacaacccgtatcgacaacgaaacgaagtcactcggccgcctggccgaaagaatcgtcaaggcaatggcggccttcaaggaagcctacaagctcgaaaccgccgacttcgatgcgagcctcgacgcgaactcggagtaccgtgacatgctcgcgcggctgcaagcggacgatttgccgcgcttcgaaacgcgtttcaaggagctgctcaacgtcaatacgatcaacgagatcgccaactttcacgcccagctcgcgcgcgaacgggcgacaatcaaggaacgcatcgaacgcatcaacgaatcgttgcgacaaatcgactacaacgcgggccgatacatcatcctcgagagtcagcccagccccgacgcggaaatccgcgaattccagagcgacctgcgcgcttgcaccgagggcgaactcaccggctcggacgatagccaatactcggaggccaagttcctgcaagtcaaacgaatcattgaccgcttccgcggccgcgaagggttgaccgagcaggaccggcgttggcgcgccaaggtgaccgacgtgcgcaactggtttctgttcgccgccagcgagcgttggcgcgaagacgacagcgaatacgagcactactcggactccggcggtaaatcgggcggccagaaggaaaagctcgcctatacgatccttgccgcgagcctcgcctaccagttcggcctcgaatggggcgccgtgcgttcccggtcgttccgcttcgtcgtcatcgacgaagcatttggccgaggctccgacgaatcggcgcagtatggtctcactctgtttcagaaactgaacctgcaactgctgatcgtcacgccactgcagaagattcacatcatcgagccgttcgtttcgagtgtcggattcgttcagaacgacggtggacgcgcctccaagctgcgcaccctgtcgatcgaggagtaccgcgcgcacaaggcggagttcgagcaatga

SEQ ID NO: 49157 - DNA, 1185 bp, Burkholderia ubonensis
atgagctggacaactgccgtcgaactgcgcgcccgcctccagcagctatgggcacgcggcgaatggctgcgaagcttcgtagacggcaccgaggggctattcccgctacgtctggcgatcaaaggcccgagttcgtccgagctggctgaacgcttcgacgcggtacgcgcgtggatcgcggaaattgccgcgacgccgcacatacgcatcgaatggcgagaaatcaatcatcgaattctcggcgtgcagcgtttgccacgagcggcctgggtcgacagtctggacgatgcgctcgcagtcgccggcaagcaccgcgacgcagcgcagttcgcgcggctgctcgaaatcactcgcgcccgccagccgaagcttacagcgtggcttgcacagcgcccgttgcaagccctcgaattcgccggtgattgggaacgactgctggcggtcgtcgattggctgcaagcacatccgcacccgggcgtctatcttcgccaagccgaaatcgcaggcgtcgacacgaaattcatcgaggcaaggcgcggcgtcctctcccaatggctcgatctcgtgctgccgtccgaggcgatcgacagcagccggacaggcgtcgctcaattcgccgcgcgctacgggttccgcgagaagcaaccccgtattcgatttcgcgtgctcgatgagcgcctcgccgtcctgcccggcatgggccgccccgacatcgcactcgacgccgacagcttcgcgcgcctcgcactgccgtgccgccatgttttcgttacggaaaacgaaacaaattttctggcgtttcccgacgttccgcaggcgatcgtgctcttcggagcgggctacggctgggaagctctggagccggcgcgatggctcgcggactgtgcgctccactactggggcgacatcgacacgcacggctttgccattctcgaccaattgcgttgccgattccctcacgtgaactccttcctgatggaccgcgcgacactgatggcgcatgaagcgttctggggagacgaaggcgatcaggtcgtgcgtgatctgccgcgactcacggcgcaagagcgcgagctctttgacgacctgcgtgacaaccggattcgccacggattgcggctcgaacaggagcgcgtcgggttcgggtgggtcagagcggcgctagaggaacggtctttcgtttag

SEQ ID NO: 49158 - DNA, 1461 bp, Burkholderia ubonensis
atgttcctcgactaccctaccctcgatgcgctgcgcacgcgccatcccgcttggcgacttttgcgctccgaccacgcgccgctcgccgtcagcttcctgcaccgcgcgttcgtcgcgccgaacgtgcgcgaggtggcggctccgtttcttgccgaagcactggaggacgagctttacgcgttgcgcgaacaactcggcgacggcgccttcccgaagcccgcgctcgactatctgaacgactgggcgagtcctgaaaagggatggttgcgcaagttctatcgccaaggctccgatgaaccgcatttcgacctgacacccgccgcaggaaaagcgatcgcgtggctcggcacgctgatggaacgaagctttgtcggcacggaatcccggctcctgacgcttttcgagttgctgcggcagatggccgaaggcagcgagacggacccggaaaggcgtcttgccgagctccacgcgcggcgcagccagattgacgaagaaatcgctcgcgtggaggccggtgacgttcggctgctcgacgatgccgcgatcaaggaccgctttcagcaattcatgcagatggcgcgcgacctgctcacggatttccgtgaagtcgagcaaaacttccgtctgctggaccggcacgtacgcgagcgaatcgcgctctgggaaggatcgaagggtgcgctcatcgaagaaatcatgggcgagcgcgacgcgatcgccgattcggaccagggcagcagctttcgggcgttctgggatttcctgatgtcgagccgccgccaggaggaactctccgaacggctcgagcacgtgcttgcgctcccggcgatcacggaaatgaagccggacgcgcgcacgcggcgcgtccactacgactggctggaagccggcgagcacacgcaacgcacggtcgctcagctctcgcagcagcttcgacgtttcctcgacgatcaagcgtggctcgaaaaccgccgcatcatggacattctgcgcggtatcgaaacgaaagcgcttgtgctgcgtgaagcgcccccgccgggctccgtcatggagatcgagaccgcgtccgctgacatcgagctgccaattgaacgcccgctttacgcgccggcgctgcgccctctcatcgccaacgtcgcaatcgagaccggcgatgcggacctcgatgcgtcggcactctacacgcagatcgtcgtcgatcgcgcgcgcctcgcaagccacatccgccgctgccttcaagatcggcggcaagtgacacttgccgaactggccgcttcgcagccgctcctgcatgggctcgctgaactcgtcgcctatttgcaactgagcgccgaagccggaacatttcgcgcgaccgtcgatgagaccgtctccgatacgatcgagtggcaggcaaacgatgccaacggagcagcaatcgtcaagcgcgcaacgatgccgcgggtgattttcacaaggtag

SEQ ID NO: 49159 - DNA, 651 bp, Burkholderia ubonensis
atggaagaacagcaaaccccgtcgcttgatcgaggtgacttgtcgacggttgccatcgcgctgctcaagggcgtggtttatcgtgatggaaacgagcgcctctgggccgcactgctcgaattgcagacacacgtgcgcgactacgtcgccgtgcttggcctcgagctcgtcgtggacgaggcggaaggctacgccttcgtaaagagccgcaccgagcctgacgccgaagtcgacggagaccaggccaagctgccccggctcgttgcacggcgtccactctcgttccccgtgagcctgctgctcgcgctgctgcgaaagaagctggcggaatgggatgccggcggcggcgacacgcggctcgtcctttcgcgcgaggacatcgtcgagctcgtacgcgtcttccttcccgcgagcactaacgaggcgcgcctggtcgatcagatcgatacgcacgtgaacaagatcgtcgacctcggtttcctgcgccggatgaagaccgcgagcggaccgcccacattcgaggtgcgacgcattctcaaggcgttcgtcgatgcgcaatggctgctcgatttcgacgcgcggctcgcaagctatcaggcgcaccttcgagattcgacgaattcggaccaaacggagagtcgcgatgaatga

SEQ ID NO: 49160 - DNA, 3372 bp, Burkholderia ubonensis
atgaatgagccgcgcacgctcggcctcgattttgccgcggacgacaccctgacgggctttcgcctcgagcggctcgaggttttcaactggggcaccttcgacgaccgggcttgggtgctgcgggtcgatggccgcaacggcctgctgacaggagacatcggttccggcaagtcgacgctcgtcgacgccattaccaccctcctcgtgcccgcgcagcgcatcgcctacaacaaggcggcaggcgcggacagcaaggaacgtacgctgcgctcgtatgtgctcggctactacaagtcggagcgcaacgaggtcacgggaacggccaagcccgtgagcctgcgcgaccataacagctattcggtgattttgggcgtgtttcgcaacgccgggtacgacgccaccgtcacgctcgcgcaggtgttctggatgaaggacgcgcaggctcaacctgcgcgattcttcgtcagtgccgaacgagatctctcgatcgcgaccgatttctcgcgcttcggcaccgatattgcgcagctgcgcaagaagctgcgcgggctgggcgccgaaatcgaggacacgtttccgaaatacagcgcctggttccggcggcgcttcggaatcgaaaacgagcaagcgctcgagctctttcatcaaacggtatcgatgaagtcggtgggcaatctcaccgacttcgtacgcagccacatgctcgagccgttcgacgtcgcaccgcgcgtcgacgccctgattgctcacttcgacgatctgaaccgcgcgcacgaggcggtactgaaaaccaagcgccaagtggaactgctgacaccgctcgtcgacgactgcgaccgccacagcgagcaaggccacgttctcgaaggctggcgcgcgtgccgtgaagcattgaggccctacttcgccgggctcaagctcggcctcgtcgaacgccgcctccaattgctcgaagaggatcatgcgcgcgcgacctcgcgaaaggcgcggcacgaagaagcgcgcgaccaggcgcgccagcgcgtggacgatttgcgccgtgccgtggccgaacaaggcggcgatcgcatcgcgcagctcgatgtcgagatccgcgagcacgagcgagaaagcgtgcgtcgccgcgaacgcgcgcaacgctatgccgccatcgttacgctgttcggcgaaaccgaggccgtggatgaggctgcattcgcctcccagcgccaacgcctggccgagcagcgcagctcgctcgttgacgacgaagcgcaacagcaaaatgcgataaccgaatggagcgtggcatttcgcgaaggaaaagcgcggcgtgatgtgctggaggacgaaatcgcgagcctgaaagcccgacgcaacaacatcccgaaggaacaggtcgcgatgcgggcgagcctgtgctcggcgctcggcctggaggaagacgccctgccgttcgcgggcgaactcattcaggtgcgcgaggatgcgcgtgattgggagggcgccgccgagcgcgtcctgcgcaacttcggcctgtcgctgctcgtgcccgacgagcactatgcgaacgtcgcggcgtgggtcgatcgcactcatcttcgggggcggctcgtctactttcgcgtgcgctccgaacgcaccgcgcgtgcagccgaggccatcgagctgcaccgccactcgctcgcgcacaagctcgccatcaagcccgactcgcagttctatggctggctcgagcgcgaaatcggccgccgtttcgactatgcctgctgcgatacgcaggagcagtttcggcgcgagacgcgcgcgatcacgcgtgcgggccaggcgaaagcgcctggggagcgccacgaaaaagacgaccgccacgcgctcgacgatcgcagccgctacgtgctcggttggagcaatacggcaaaaatatccgccctcgcagcacaacggcaagcgctcgaagctcgccttggcgagatcgggcaaaggctcggagaggcccaacacgagcacaccaaggtgcgtgagcaactcgaagcacttgcgcgtgccggcgagttcgccgagtttcgggaaatcgattggtcgagctgcgctgccgcgatcgcacgtcttgcggacgaaaaggcgcgactcgaatcggcaagcgacgccctcgcggaactaacggctcaattggactcggcgcaagcgtcgttgaaagagagtgaagcggcgatgtcggaaaccgactcggaactgggcggcatcctggccaagcgggaggcggcacaagcgttgcgcgaagagacgcacgcgctcgttgcagaagtggatgccgaactcgccgaacgaatcgaggccctgcgagccgagattctcggcgaacaccagctttccgtcgagtcatgcgacaaccgcgagcgggacgtgcgagaggcgttgacaacccgtatcgacaacgaaacgaaatcactcggccgcctggccgaaagaatcgtcaaggcaatggcggctttcaaggaagcctacaagctcgaaacggccgacttcgatgcgagcctcgccgcgaactcagagtaccgtgacatgctcgcgcggctgcaggcggacgatttgccgcgcttcgaaacgcgtttcaaggagctgctcaacgtcaacacgatcaacgagatcgccaactttcacgcccagcttgcgcgcgaacgggcgacgatcaaggaacgcatcgaacgcatcaacgaatcgctgcgacaaatcgactacaacgcgggtcgttacatcgtcctcgagagtcagcccagccccgacgcggagatccgcgaattccagagcgacctgcgcgcttgcaccgagggcgaactcaccggctcggacgatagccaatactcggaggccaagttcctgcaagtcaaacggatcatcgaccgcttccgcggccgcgaagggttgaccgagcaggaccggcgctggcgagccaaagtgaccgacgtgcgcaactggtttctgttcgccgccagcgagcgttggcgcgaggacgacagcgaatacgagcactactcggactccggcggtaaatcgggcggccagaaggaaaagctcgcctatacgatccttgccgcgagcctcgcctatcagttcggcctcgaatggggcgccgtgcgttcccgatcgttccgcttcgtcgtcatcgacgaagcatttggccgaggctccgacgaatcggcgcagtacggtctcactctgtttcagaaactgaatctgcaactgctgatcgtcacgccactgcagaagattcacatcatcgagccgttcgtttcgagcgtcggattcgttcagaacgacggtggacgcgcctccaagctgcgcaccctgtcgatcgaggagtaccgcgcgcacaaggcggagttcgagcaatga

SEQ ID NO: 49161 - DNA, 1185 bp, Burkholderia ubonensis
atgagttggacaactgccgtcgaactgcgtgcccgcctccagcgcctatgggaacgcggcgaatggctgcgaagcctcgtagacggtgccgaggggctattcccgctacgtctggcgatcaaaggcccaagctcgtccgagttggctgaacgcttcgacacggtacgcgcatggattacggaaattgccgcgacgccgcgcatacgcatcgaatggcgagaaatcaatcatcgaattctcggccagcagcgtttgccacgagcagcttgggtcgacagtctggacgatgcgctcactgtcgccggcaagcaacgcgacgcagcgcggttcgagcggctgcttgaaatcacacgctcgcgccagccgaagctcatcgcatggcttgcgcagcgcccgatgcaggccctcgaattggccggcgattgggaacgactgctggcagtcgtcgattggctgcaagcacatccgcagccgggcatctatcttcgccaagccgaaatcgccggagtcgacacgaaattcatcgaggcgcggcgcggcgtcctctcccaatggctcgatctcgtgctgccgtccgaggcgatcgacagcagtcggacaggcgtcgctcaattcgccgcgcgctacgggttccgcgagaagcaaccccgaattcgatttcgcgtgctcgatgagcggctcgccgttctgcccggcatgggccgccccgacatcgcactcgacgccgacagcttcgcgcgcctcgcactgccgtgccgccatgttttcgttacggaaaacgaaacaaattttctggcgtttcccgacgttccgcaggcgatcgtgctcttcggagcgggctacggctgggaagctctggagccggcgcgatggctcgcggactgtgcgctccactactggggcgacatcgacacgcacggctttgccattctcgaccaattgcgttgccgattccctcacgcgggatccttcttgatggaccgcgcgacactgatggcgcatgaagcattctggggagacgaagccgatcaggtcatgcgtgatctgccgcgactcacggcgcaagagcgcgagctctttgacgacctgcgtgacaaccggattcgccgcggattgcggctcgagcaggagcgcatcgggttcggatgggtcagagcggcgctagaggaacgagcgctcgtttag

SEQ ID NO: 49162 - DNA, 1461 bp, Burkholderia ubonensis
atgttcctcgactaccctaccctcgacgcgctgcgcacgcgccatcccgcttggcgacttttgcgctccgaccacgcgccgctcgccgtcagcttcctgcaccgcgcgttcgtcgcgccgaacgtgcgcgaggtggcggctccgtttcttgccgaagcactcgaggacgagctttacgcgttgcgcgaacaactcggcgacggcgccttcccgaagcccgcgctcgactatctgaacgactgggcgagtcctgaaaagggatggttgcgcaagttctatcgccaaggctccgatgaaccgcatttcgacctgacacccgccgcaggaaaagcgatcgcgtggctcggcacgctgatggaacgaagctttgtcggcacggaatcccggctcctgacgcttttcgagttgctgcggcagatggccgaaggcagcgagacggacccggaaaggcgtcttgccgagctccacgcgcggcgcagccagatcgacgaagaaatcgctcgcgtggaggccggtgacgtccggctgctcgacgatgccgcgatcaaggaccgctttcagcaattcatgcagatggcgcgcgacctgctcacggatttccgtgaagtcgagcaaaacttccgtctgctggaccggcacgtacgcgagcgaatcgcgctctgggaaggatcgaagggtgcgctcatcgaagaaatcatgggcgagcgcgacgcgatcgccgattcggaccagggcagcagctttcgggcgttctgggatttcctgatgtcgagccgccgccaggaggaactctccgaacggctcgagcacgtgcttgcgctcccggcgatcacggaaatgaagccggacgcgcgcacgcggcgcgtccactacgactggctggaagccggcgagcacacgcaacgcacggtcgctcagctctcgcagcagcttcgacgtttcctcgacgatcaagcgtggctcgaaaaccgccgcatcatggacattctgcgcggtatcgaaacgaaagcgcttgtgctgcgtgaagcgcccccgccgggctccgtcatggagatcgagaccgcgtccgctgacatcgagctgccaattgaacgcccgctttacgcgccggcgctgcgccctctcatcgccaacgtcgcaatcgagaccggcgatgcggacctcgatgcgtcggcactctacacgcagatcgtcgtcgatcgcgcgcgcctcgcaagccacatccgccgctgccttcaagatcggcggcaagtgacacttgccgaactggccgcttcgcagccgctcctgcatgggctcgctgaactcgtcgcctatttgcaactgagcgccgaagccggaacatttcgcgcgaccgtcgatgagaccgtctccgatacgatcgagtggcaggcaaacgatgccaacggagcagcaatcgtcaagcgcgcaacgatgccgcgggtgattttcacaaggtag

SEQ ID NO: 49163 - DNA, 651 bp, Burkholderia ubonensis; identical to SEQ ID NO: 48968

SEQ ID NO: 49164 - DNA, 3372 bp, Burkholderia ubonensis
atgaatgagccgcgcacgctcggcctcgattttgccgcggacgacaccctgacgggctttcgcctcgagcggctcgaggttttcaactggggcaccttcgacgaccgggcttgggtgctgcgggtcgatggccgcaacggcctgctgacaggagacatcggttccggcaagtcgacgctcgtcgacgccattaccaccctcctcgtgcccgcgcagcgcatcgcctacaacaaggcggcaggcgcggacagcaaggaacgtacgctgcgctcgtatgtgctcggctactacaagtcggagcgcaacgaggtcacgggaacggccaagcccgtgagcctgcgcgaccataacagctattcggtgattttgggcgtgtttcgcaacgccgggtacgacgccaccgtcacgctcgcgcaggtgttctggatgaaggacgcgcaggctcaacctgcgcgattcttcgtcagtgccgaacgagatctctcgatcgcgaccgatttctcgcgcttcggcaccgatattgcacagctgcgcaagaagctgcgcgggctgggcgccgaaatcgaggacacgtttccgaaatacagcgcctggttccggcggcgcttcggaatcgaaaacgagcaagcgctcgagctctttcatcaaacggtatcgatgaagtcggtgggcaatctcaccgacttcgtacgcagccacatgctcgagccgttcgacgtcgcaccgcgcgtcgacgccctgattgctcacttcgacgatctgaaccgcgcgcacgaggcggtactgaaaaccaagcgccaagtggaactgctgacaccgctcgtcgacgactgcgaccgccacagcgcgcaaggccgcgttctcgaaggctggcgcgcgtgccgtgaagcattgaggccctacttcgccgggctcaagctcggcctcgtcgaacgccgcctccaattgctcgaagaggatcatgcgcgcgcgacctcgcgaaaggcgcgacacgaagaagcgcgcgaccaggcacgccagcgcgtggacgatttgcgccgtgccgtggccgaacaaggcggcgatcgcatcgcgcagctcgatgtcgagatccgcgagcacgagcgagaaagcgtgcgtcgccgcgaacgcgcgcaacgctatgccgccatcgttacgctgttcggcgaaaccgaggccgcggatgaggctgcattcgcctcccagcgccaacgcctggctgagcagcgcagctcgctcgtcgacgacgaagcgcaacagcaaaatgcgataaccgaatggagcgtggcatttcgcgaaggcaaagcgcggcgtgatttgctggaggacgaaatcgcgagcctgaaagctcgacgcaacaacatcccgaaggaacaggtcgcgatgcgggcgagcctgtgctcggcgctcggcctggaggaagacgccctgccgttcgcgggcgaactcattcaggtgcgcgaggatgcgcgtgattgggagggcgccgccgagcgcgtcctgcgcaacttcggcctgtcgctgctcgtgcccgacgagcactatgcgaacgtcgcggcgtgggtcgatcgcactcatctccgggggaggctagtctactttcgcgtgcgctccgaacgcaccgcgcgtgcagccgaggccatcgagctgcaccgccactcgctcgcgcacaagctcgccatcaagcccgactcgcagttctatggctggctcgagcgcgaaatcgtccgccgtttcgactatgcctgctgcgatacgcaggagcagtttcggcgcgagacgcgcgcgatcacgcgtgcgggccaggcgaaagcgcctggggagcgccacgaaaaagacgaccgccacgcgctcgacgatcgcagccgctacgtgctcggttggagcaatacggcaaaaatatccgccctcgcagcacaacggcaagcgctcgaagctcgccttggcgagatcgggcaaaggctcggagaggcccaacacgagcacaccaaggtgcgtgagcaactcgaagcacttgcgcgtgccggcgagttcgccgagtttcgggaaatcgattggtcgagctgcgctgccgcgatcgcacgtcttgcggacgaaaaggcgcgactcgaatcggcaagcgacgccctcgcggagctaacggctcaattggactcggcgcaagcgtcgttgaaagagagtgaagcggcgatgtcggaaaccgactcggaactgggcggcatcctggccaagcgggaggcggcacaagcgttgcgcgaagagacgcacgcgctcgttgcagaagtggatgccgaactcgccgaacgaatcgaggccctgcgagccgagattctcggcgaacaccagctttccgtcgagtcatgcgacaaccgcgagcgggacgtgcgagaggcgttgacaacccgtatcgacaacgaaacgaaatcactcggccgcctggccgaaagaatcgtcaaggcaatggcggctttcaaggaagcctacaagctcgaaacggccgacttcgatgcgagcctcgccgcgaccccggagtaccgtgacatgctcgcgcggctgcaggcggacgatttgccgcgcttcgaaacgcgtttcaaggagctgctcaacgtcaacacgatcaacgagatcgccaactttcacgcccagcttgcgcgcgaacgggcgacgatcaaggaacgcatcgaacgcatcaacgaatcgctgcgacaaatcgactacaacgcgggtcgttacatcgtcctcgagagtcagcccagccccgacgcggagatccgcgaattccagagcgacctgcgcgcttgcaccgagggcgaactcaccggctcggacgatagccaatactcggaggccaagttcctgcaagtcaaacggatcatcgaccgcttccgcggccgcgaagggttgaccgagcaggaccggcgctggcgagccaaagtgaccgacgtgcgcaactggtttctgttcgccgccagcgagcgttggcgcgaggacgacagcgaatacgagcactactcggactccggcggtaaatcgggcggccagaaggaaaagctcgcctatacgatccttgccgcgagcctcgcctatcagttcggcctcgaatggggcgccgtgcgttcccgatcgttccgcttcgtcgtcatcgacgaagcatttggccgaggctccgacgaatcggcgcagtacggtctcacgctgtttcagaaactgaacctgcaactgctgatcgtcacgccactgcagaagattcacatcatcgagccgttcgtttcgagcgtcggattcgttcagaacgacggtggacgcgcctccaagctgcgcaccctgtcgatcgaggagtaccgcgcgcacaaggcggagttcgagcaatga

SEQ ID NO: 49165 - DNA, 1185 bp, Burkholderia ubonensis; identical to SEQ ID NO: 49142

SEQ ID NO: 49166 - DNA, 1494 bp, Burkholderia cepacia; identical to SEQ ID NO: 49150

SEQ ID NO: 49167 - DNA, 663 bp, Burkholderia cepacia; identical to SEQ ID NO: 49151

SEQ ID NO: 49168 - DNA, 3444 bp, Burkholderia cepacia; identical to SEQ ID NO: 49152

SEQ ID NO: 49169 - DNA, 1164 bp, Burkholderia cepacia; identical to SEQ ID NO: 49153

SEQ ID NO: 49170 - DNA, 1461 bp, Burkholderia ubonensis
atgttcctcgactaccctaccctcgacgcgctgcgcacgcgccatcccgcttggcgacttttgcgctccgaccacgcgccgctcgccgtcagcttcctgcaccgcgcgttcgtcgcgccgaacgtgcgcgaggtggcggctccgtttcttgccgaagcactcgaggacgagctttacgcgttgcgcgaacaactcggcgacggcgccttcccgaagcccgcgctcgactatctgaacgactgggctagtcctgaaaagggatggttgcgcaagttctatcgccaaggctccgatgaaccgcatttcgacctgacacccgccgcgggaaaagcgatcgcgtggctcggcacgctgatggaacgtagctttgtcggcacggaatcccggctcctgacgcttttcgagttgctgcggcagatggccgaaggcagcgagacggacccggaaaggcgtcttgccgagctccacgcgcggcgcagccagatcgacgaagaaatcgctcgcgtggaagccggtgacgttcggctgctcgacgatgccgcgatcaaggaccgctttcagcaattcatgcagatggcgcgcgacctgctcacggatttccgtgaagtcgagcaaaacttccgtctgctggaccggcatgtacgcgagcgaatcgcgctctgggaaggatcgaagggtgcgctcatcgaagaaatcatgggcgagcgcgacgcgatcgccgattcggaccagggcagcagctttcgggcgttctgggacttcctgatgtcgagccgccgccaggaggaactctccgaacggctcgagcacgtgcttgcgctcccggcgatcacggaaatgaagccggacgcgcgcacgcggcgcgtccactatgactggctggaagccggcgagcacacgcaacgcacggtcgctcagctctcgcagcagcttcgacgtttcctcgacgatcaagcgtggctcgaaaaccgccgcatcatggacattctgcgcggtatcgaaacgaaagcgcttgtgctgcgtgaagcgcccccgccgggctccgtcatggagatcgagaccgcgtccgctgacatcgagctgccaattgaacgcccgctttacgcgccggcgctgcgccctctcatcgccaacgtcgcaatcgagaccggcgatgcggacctcgatgcgtcggcactctacacgcagatcgtcgtcgatcgcgcgcgcctcgcaagccacatccgccgctgccttcaagatcggcggcaagtgacacttgccgaactggccgcttcgcagccgctcctgcatgggctcgctgaactcgtcgcctatttgcaactgagcgccgaagccggaacatttcgcgcgaccgtcgatgagaccgtctccgatacgatcgagtggcaggcaaacgatgccaacggagcagcaatcgtcaagcgcgcaacgatgccgcgggtgattttcacaaggtag

SEQ ID NO: 49171 - DNA, 651 bp, Burkholderia ubonensis
atggaagaacagcaaaccccgtcgcttggtcgaggtgacttgtcgacggttgccgtcgcgctgctcaagggcgtggtttatcgtgatggaaacgagcgcctctgggccgcactgctcgaattgcagacacacgtgcgcgactacgtcgccgtgcttggcctcgagctcgtcgtggacgaggcggaaggctacgccttcgtaaagagccgcaccgagcctgacgccgaagtcgacggagaccaggccaagctgccccggctcgttgcacggcgtccactctcgttccccgtgagcctgctgctcgcgctgctgcgaaagaaactggcggaatgggatgccggcggcggcgacacgcggctcgtcctttcgcgcgaggacatcgtcgagctcgtacgcgtcttccttcccgcgagcactaacgaggcgcgcctggtcgatcagatcgatacgcacgtgaacaagatcgtcgacctcggtttcctgcgccggatgaagaccgcgagcggaccgcccacattcgaggtgcgacgcattctcaaggcgttcgtcgatgcgcaatggctgctcgatttcgacgcgcggctcgcaagctatcaggcgcaccttcgagattcgacgaattcggaccaaacggagagtcgcgatgaatga

SEQ ID NO: 49172 - DNA, 3372 bp, Burkholderia ubonensis
atgaatgagccgcgcacgctcggcctcgatttcgccgcggacgacacccggacgggctttcgcctcgagcggctcgaggttttcaactggggcaccttcgacgaacgggtctgggtgctgcgggtcgacggccgcaacggcctgctgacaggagacatcggttccggcaagtcgacgctcgtcgacgccattaccaccctcctcgtgcccgcgcagcgcatcgcctacaacaaggcggcaggcgcggacagcaaggaacgtacgctgcgctcgtatgtgctcggctactacaagtcggagcgcaacgaggtcacgggagcggccaagcccgtgagcctgcgcgaccataacagctattcggtgattttgggcgtgtttcgcaacgccgggtacgacgccaccgtcacgctcgcgcaagtgttctggatgaaggacgcgcaggctcaacctgcgcgattcttcgtcagtgccgaacgagatctctcgatcgcgaccgacttctcgcgcttcggcaccgacattgcgcagctgcgcaagaagctgcgcgggctgggcgccgaaatcgaggacacgtttccgaaatacagcgcctggttccggcggcgcttcggaatcgaaaacgagcaagcgctcgagctctttcatcaaacggtatcgatgaagtcggtgggcaatctcaccgacttcgtacgcagccacatgctcgagccgttcgacgtcgcaccgcgcgtcgacgccctgattgctcacttcgacgatctgaatcgcgcgcacgaggcggtactgaaaaccaagcgccaagtggaattgctgacaccgctcgtcgacgactgcgaccgccacagcgagcaaggccacgttctcgaaggctggcgcgcgtgccgtgaagcattgaggccctactttgccgggctcaagctcggcctcgtcgaacgccgcctccaattgctcgaagaggatcatgcgcgcgcgacctcgcgaaaggcgcggcacgaagaagcgcgcgaccaggcgcgccagcgcgtggacgatttgcgccgtgccgtggccgaacaaggcggcgatcgcatcgcgcagctcgatgtcgagatccgcgagcacgagcgagaaagcgtgcgtcgccgcgaacgcgcgcaacgctatgccgccatcgttacgctgttcggcgaaaccgaggccgcggatgacgctgcattcgcctcccagcgccaacgcctggccgagcagcgcagctcactcgtcgacgacgaagcgcaacagcaaaatgcgataaccgaatggagcgtggcgtttcgcgaaggaaaagcgcggcgtgatttgctggaggacgaaatcgcgagcctgaaagcccgtcgcaacaacatcccgaaggaacaggtcgcgatgcgggcgagcctgtgctcggcgctcggcctggaggaagacgccctgccgttcgcgggcgaactcattcaggtgcgcgaggatgcacgtgattgggagggcgccgccgagcgcgttctacgcaacttcggcctgtcgctgctcgtgcccgacgagcactatgcgagcgtcgcggcgtgggtcgatcgcactcatctccgggggaggctagtctactttcgcgtgcgctcggaacgcagcgcgcgtgcagccgaggccatcgagctgcaccgccactcgctcgcgcacaagctcgccatcaagcccgactcgcagttctatggctggctcgagcgcgaaatcggccgccgtttcgactatgcctgctgcgatacgcaggagcagtttcggcgcgagacgcgcgcgatcacgcgtgcgggccaggcgaaagcgcctggggagcgccacgaaaaagacgaccgccacgcgctcgacgatcgcagccgctacgtgctcggttggagcaacacggcaaaaatatccgctctcgcagcacaacggcaagcgctcgaagctcgccttggcgagatcgggcaaaggctcggagaggcccaacacgagcacaccaaggtgcgtgagcaactcgaagcacttgcgcgtgccggcgagttcgccgagtttcgggaaatcgactggtcgagctgcgctgccgcgatcgcacgtcttgcggacgaaaaggcgcgactcgaatcggcaagcgacgccctcgcagagctaacggctcaattggactcggcgcaagcgtcgttgaaagagcgtgaagcggcgatgtcggaaaccgactcggaactgggcggcatcctggccaagcgggaggcggcacaagcgctgcgcgaagagacgctcgcgctcgttgcagaagtggatgccgaacttgccgaacgaatcgaggcccttcgagcggagattctcggcgaacaccagctttccgtcgagtcatgcgacaaccgcgagcgggacgtgcgagaagcgttgacaacccgtatcgacaacgaaacgaagtcactcggccgcctggccgaaagaatcgtcaaggcaatggcggccttcaaggaagcctacaagctcgaaaccgccgacttcgatgcgagcctcgacgcgaactcggagtaccgtgacatgctcgcgcggctgcaagcggacgatttgccgcgcttcgaaacgcgtttcaaggagctgctcaacgtcaatacgatcaacgagatcgccaactttcacgcccagctcgcgcgcgaacgggcgacgatcaaggaacgcatcgaacgcatcaacgaatcgttgcgacaaatcgactacaacgcgggccgatacatcatcctcgagagtcagcccagccccgacgcggaaatccgcgaattccagagcgacctgcgcgcttgcaccgagggcgaactcaccggctcggacgatagccaatactcggaggccaagttcctgcaagtcaaacgaatcattgaccgcttccgcggccgcgaagggttgaccgagcaggaccggcgttggcgcgccaaggtgaccgacgtgcgcaactggtttctgttcgccgccagcgagcgttggcgcgaagacgacagcgaatacgagcactactcggactccggcggtaaatcgggcggccagaaggaaaagctcgcctatacgatccttgccgcgagcctcgcctaccagttcggcctcgaatggggcgccgtgcgttcccggtcgttccgcttcgtcgtcatcgacgaagcatttggccgaggctccgacgaatcggcgcagtatggtctcactctgtttcagaaactgaacctgcaactgctgatcgtcacgccactgcagaagattcacatcatcgagccgttcgtttcgagtgtcggattcgttcagaacgacggtggacgcgcctccaagctgcgcaccctgtcgatcgaggagtaccgcgcgcacaaggcggagttcgagcaatga

SEQ ID NO: 49173 - DNA, 1185 bp, Burkholderia ubonensis
atgagctggacaactgccgtcgaactgcgcgcccgcctccagcagctatgggcacgcggcgaatggctgcgaagcttcgtagacggcaccgaggggctattcccgctacgtctggcgatcaaaggcccgagttcgtccgagctggctgaacgcttcgacgcggtacgcgcgtggatcgcggaaattgccgcgacgccgcacatacgcatcgaatggcgagaaatcaatcatcgaattctcggcgtgcagcgtttgccacgagcggcctgggtcgacagtctggacgatgcgctcgcagtcgccggcaagcaccgcgacgcagcgcagttcgcgcggctgctcgaaatcactcgcgcccgccagccgaagctcgccgcgtggcttgcacagcgcccgttgcaagccctcgaattcgccggtgattgggaacgactgctggcggtcgtcgattggctgcaagcacatccgcacccgggcgtctatcttcgccaagccgaaatcgcaggcgtcgacacgaaattcatcgaggcaaggcgcggcgtcctctcccaatggctcgatctcgtgctgccgtccgaggcgatcgacagcagccggacaggcgtcgctcaattcgccgcgcgctacgggttccgcgagaagcaaccccgtattcgatttcgcgtgctcgatgagcgcctcgccgtcctgcccggcatgggccgccccgacatcgcactcgacgccgacagcttcgcgcgcctcgcactgccgtgccgccatgttttcgttacggaaaacgaaacaaattttctggcgtttcccgacgttccgcaggcgatcgtgctcttcggagcgggctacggctgggaagctctggagccggcgcgatggctcgcggactgtgcgctccactactggggcgacatcgacacgcacggctttgccattctcgaccaattgcgttgccgattccctcacgtgaactccttcctgatggaccgcgcgacactgatggcgcatgaagcgttctggggagacgaaggcgatcaggtcgtgcgtgatctgccgcgactcacggcgcaagagcgcgagctctttgacgacctgcgtgacaaccggattcgccacggattgcggctcgaacaggagcgcgtcgggttcgggtgggtcagagcggcgctagaggaacggtctttcgtttag

SEQ ID NO: 49174 - DNA, 1467 bp, Burkholderia stagnalis; identical to SEQ ID NO: 49031

SEQ ID NO: 49175 - DNA, 654 bp, Burkholderia stagnalis; identical to SEQ ID NO: 49032

SEQ ID NO: 49176 - DNA, 3372 bp, Burkholderia stagnalis; identical to SEQ ID NO: 49033

SEQ ID NO: 49177 - DNA, 1185 bp, Burkholderia stagnalis; identical to SEQ ID NO: 49034

SEQ ID NO: 49178 - DNA, 1461 bp, Burkholderia ubonensis; identical to SEQ ID NO: 49039

SEQ ID NO: 49179 - DNA, 651 bp, Burkholderia ubonensis; identical to SEQ ID NO: 49040

SEQ ID NO: 49180 - DNA, 3372 bp, Burkholderia ubonensis
atgaatgagccgcgcacgctcggcctcgattttgccgcggacgacaccctgacgggctttcgcctcgagcggctcgaggttttcaactggggaaccttcgacgaccgggcttgggtgctgcgggtcgacggccgcaacggcctgctgacaggagacatcggttccggcaagtcgacgctcgtcgacgccatcaccaccctcctcgtgcccgcgcagcgcatcgcctacaacaaggcggcaggcgcggacagcaaggaacgtacgctgcgctcgtatgtgctcggctactacaagtcggagcgcaacgaggtcacgggagcggccaagcccgtgagcctgcgcgaccacaacagctattcggtgattttgggcgtgtttcgcaacgccgggtacgacgccaccgtcacgctcgcgcaagtgttctggatgaaggacgcgcaggctcaacctgcgcgattcttcgtcagtgccgaacgagatctctcgatcgcgaccgacttctcgcgcttcggcaccgacattgcgcagctgcgcaagaagctgcgcgggctgggcgccgaaatcgaggacacgtttccgaaatacagcgcctggttccggcggcgcttcggaatcgaaaacgagcaagcgctcgagctctttcatcaaacggtatcgatgaagtcggtgggcaatctcaccgacttcgtacgcagccacatgctcgagccgttcgacgtcgcaccgcgcgtcgacgccctgattgctcacttcgacgatctgaatcgcgcgcacgaggcggtactgaaaaccaagcgccaagtggaattgctgacaccgctcgtcgacgactgcgaccgccacagcgcgcaaggccgcgttctcgaaggctggcgtgcgtgccgtgaagcattgaggccctacttcgccgggctcaagctcggcctcgtcgaacgccgcctccaattgctcgaagaggatcatgcgcgcgcgacctcgcgaaaggcgcgacacgaagaagcgcgcgaccaggcacgccagcgcgtggacgatttgcgccgtgccgtggccgaacaaggcggcgatcgcatcgcgcagctcgatgtcgagattcgcgagcacgagcgagaaagcgtgcgtcgccgcgaacgcgcgcaacgctatgccgccatcgttacgctgttcggcgaaaccgaggccgcggatgaggctgcattcgcctcccagcgccaacgcctggccgagcagcgcagctcactcgtcgacgacgaagcgcaacagcaaaatgcgataaccgaatggagcgtggcatttcgcgaaggcaaagcgcggcgtgatttgctggaggacgaaatcgcgagcctgaaagcccgacgcaacaacatcccgaaggaacaggtcgcgatgcgggcgagcctgtgctcggcgctcggcctggaggaagacgccctgccgttcgcgggcgaactcattcaggtgcgcgaggatgcgcgtgattgggagggcgccgccgagcgcgtcctgcgcaacttcggcctgtcgctgctcgtgcccgacgagcactatgcgaacgtcgcggcgtgggtcgatcgcactcatcttcgggggcggctcgtctactttcgcgtgcgctcggaacgcagcgcgcgtgcagccgaggccatcgagctgcaccgccactcgctcgcgcacaagctcgcgatcaagcccgactcgctgttctatggctggctcgagcgcgaaatcggccgccgtttcgactatgcctgctgcgatacgcaggagcagtttcggcgcgagacgcgcgcgatcacgcgtgcgggccaggcgaaagcgcctggggagcgccacgaaaaagacgaccgtcacgcgctcgacgatcgcagccgctacgtgctcggctggagcaacacggcaaagatatccgctctcgaagcacaacggcaagcgctcgaagctcgccttggcgagatcgggcaaaggctcggagaggcccaacacgagcacaccaaggtgcgtgagcaactcgaagcacttgcgcgtgccggcgagttcgccgagtttcgggaaatcgattggtcgagctgcgctgccgcgatcgcacgtcttgccgacgaaaaagcgcgactcgaatcggcaagcgacgccctcgcggagctaacggctcaattggactcggcgcaagcgtcgttgaaagagagtgaagcggcgatgtcggaaaccgactcggaactgggcggcatcctggccaagcgggaggcggcacaagcgctgcgcgaagagacgcacgcgctcgttgcagaagtggatgccgaacttgccgaacgaatcgaggccctgcgagccgagattctcggcgaacaccagctttccgtcgagtcatgcgacaaccgcgagcgggacgtgcgagaggcgttgacaacccgtatcgacaacgaaacgaaatcactcggccgcctggccgaaagaatcgtcaaggcaatggcggctttcaaggaagcctacaagctcgaaacggccgacttcgatgcgagcctcgccgcgaactcggagtaccgtgacatgctcgcgcggctgcaggcggacgatttgccgcgcttcgaaacgcgtttcaaggagctgctcaacgtcaacacgatcaacgagatcgccaacttccacgcccagctcgcgcgcgaacgggcgacgatcaaggaacgcatcgaacgcatcaacgaatcgctgcgacaaatcgactacaacgcgggccgttacatcgtcctcgagagtcagcccagccccgacgcggagatccgcgaattccagagcgacctgcgcgcttgcaccgagggcgaactcaccggctcggacgatagccaatactcggaggccaagttcctgcaagtcaaacggatcatcgaccgcttccgcggccgcgaagggttgaccgagcaggaccggcgctggcgagccaaagtgaccgacgtgcgcaactggtttctgttcgccgccagcgagcgttggcgcgaggacgacagcgaatacgagcactactcggactccggcggtaaatcgggcggccagaaggaaaagctcgcctatacgatccttgccgcgagcctcgcctatcagttcggcctcgaatggggcgccgtgcgttcccgatcgttccgcttcgtcgtcatcgacgaagcatttggccgaggctccgacgaatcggcgcagtacggtctcacgctgtttcagaaactgaacctgcaactgctgatcgtcacgccactgcagaagattcacatcatcgagccgttcgtttcgagcgtcggattcgttcagaacgacggtggacgcgcctccaagctgcgcaccctgtcgatcgaggagtaccgcgcgcacaaggcggagttcgagcaatga

SEQ ID NO: 49181 - DNA, 1185 bp, Burkholderia ubonensis; identical to SEQ ID NO: 49042

SEQ ID NO: 49182 - DNA, 1500 bp, Burkholderia anthina; identical to SEQ ID NO: 48939

SEQ ID NO: 49183 - DNA, 762 bp, Burkholderia anthina; identical to SEQ ID NO: 48940

SEQ ID NO: 49184 - DNA, 3330 bp, Burkholderia anthina; identical to SEQ ID NO: 48941

SEQ ID NO: 49185 - DNA, 1146 bp, Burkholderia anthina; identical to SEQ ID NO: 48942

SEQ ID NO: 49186 - DNA, 1461 bp, Burkholderia ubonensis
atgttcctcgactaccctaccctcgacgcgctgcgcacgcgccatcccgcttggcgacttttgcgctccgaccacgcgccgctcgccgtcagcttcctgcaccgcgcgttcgtcgcgccgaacgtgcgcgaggtggcggctccgtttcttgccgaagcactcgaggacgagctttacgcgttgcgcgaacaactcggcgacggcgccttcccgaagcccgcgctcgagtatctgaacgactgggcgagtcctgaaaagggatggttgcgcaaattctatcgccaaggctccgatgaaccgcatttcgacctgacacctgccgcaggaaaagcgatcgcgtggctcggcacgctgatggaacgaagctttgtcggcacggaatcccggctcctgacgcttttcgagttgctgcggcagatggccgaaggcagcgagacggacccggaaaggcgtcttgccgagctccacgcgcggcgcagccagctcgacgaagaaatcgctcgcgtggaggccggtgacgttcggctgctcgacgatgccgcgatcaaggaccgctttcagcaattcatgcagatggcgcgcgacctgctcacggatttccgtgaagtcgagcagaacttccgtctgctggaccggcatgtacgcgagcgaatcgcgctctgggaaggatcgaagggtgcgctcatcgaagaaatcatgggcgagcgcgacgcgatcgccgattcggaccagggcagcagctttcgggcgttctgggacttcctgatgtcgagccgccgccaggaggaactctccgaacggctcgagcacgtgcttgcgctcccggcgatcacggaaatgaagccggacgcgcgcacgcggcgcgtccactatgactggctggaagccggcgagcacacgcaacgcacggtcgctcagctctcgcagcagcttcgacgtttcctcgacgatcaagcgtggctcgaaaaccgccgcatcatggacattctgcgcggtatcgaaacgaaagcgcttgtgctgcgtgaagcgcccccgccgggctccgtcatggagatcgagaccgcgtccgctgacatcgagctgccaattgaacgcccgctttacgcccctgcgctgcgccctctcatcgccaacgtcgcaatcgagaccggcgatgcggacctcgatgcgtcggcactctacacgcagatcgttgtcgatcgcgcgcgcctcgcaagccacatccgccgctgccttcaagatcggcggcaagtgacacttgccgaactggccgcttcgcagccgctcctgcatgggctcgctgaactcgtcgcctatttgcaactgagcgccgaagtcggaacatttcgcgcgaccgtcgatgagaccgtctccgatacgatcgagtggcaggcgaacgataccaacggagcagcaatcgtcaagcgcgcaacgatgccgcgggtgattttcacaaggtag

SEQ ID NO: 49187 - DNA, 651 bp, Burkholderia ubonensis; identical to SEQ ID NO: 49072

SEQ ID NO: 49188 - DNA, 3372 bp, Burkholderia ubonensis
atgaatgagccgcgcacgctcggcctcgattttgccgcggacgacaccctgacgggctttcgcctcgagcggctcgaggttttcaactggggcaccttcgacgaccgggtctgggtgctgcgggtcgacggccgcaacggcctgctgacaggagacatcggttccggcaagtcgacgctcgtcgacgccattaccaccctcctcgtgcccgcgcagcgcatcgcctacaacaaggcggcaggcgcggacagcaaggaacgtacgctgcgctcgtatgtgctcggctactacaagtcggagcgcaacgaggtcacgggaacggccaagcccgtgagcctgcgcgaccataacagctattcggtgattttgggcgtgtttcgcaacgccgggtacgacgccaccgtcacgctcgcgcaagtgttctggatgaaggacgcgcaggctcaacctgcgcgattcttcgtcagcgccgagcgagatctctcgatcgcgacggacttctcgcgcttcggcaccgacattgcgcagctgcgcaagaagctgcgcgggctgggcgccgaaatcgaggacacgtttccgaaatacagcgcctggttccggcggcgcttcggaatcgaaaacgagcaagcgctcgagctctttcatcaaacggtatcgatgaagtcggtgggcaatctcaccgacttcgtacgcagccacatgctcgagccgttcgacgtcgcaccgcgcgtcgacgccctgattgctcacttcgacgatctgaatcgcgcgcacgaggcggtactgaaaaccaagcgccaagtggaactgctgacaccgctcgtcgacgactgcgaccgccacagcgagcaagcacacgttctcgaaggctggcgcgcgtgccgtgaagcactgaggccctacttcgccgggctcaagctcggcctcgtcgaacgccgcctccaattgctcgacgaggatcatgcgcgcgcgacctcgcgaaaggcgcggcacgaagaagcgcgcgaccaggcgcgccagcgcgtggacgatttgcgccgtgccgtggccgaacaaggcggcgatcgcatcgcgcagctcgatgtcgagattcgcgagcacgagcgagaaagcgtgcgtcgccgcgaacgcgcgcaacgctatgccgccatcgttacgctgttcggcgaaaccgaggccgcggatgaggctgcattcgcctcccagcgccaacgcctggccgagcagcgcagctcgctcgtcgacgacgaagcgcagcagcaaaatgcgataaccgaatggagcgtggcatttcgcgaaggaaaagcgcggcgtgatgtgctggaggacgaaatcgcgagcctgaaagcccgacgcaacaacatcccgaaggaacaggtcgcgatgcgggcgagcctgtgctcggcgctcggcctggaggaagacgccctgccgttcgcgggcgaactcattcaggtgcgcgaggatgcgcgtgattgggagggcgccgccgagcgcgtcctgcgcaacttcggcctgtcgctgctcgtgcccgacgagcactatgcgaacgtcgcggcgtgggtcgatcgcactcatctccgggggaggctagtctactttcgcgtgcgctcggaacgcagcgcgcgtgcagccgaggccatcgagctgcaccgccactcgctcgcgcacaaactcgcgatcaagcccgactcgctgttctatggctggctcgagcgcgaaatcggccgccgtttcgactatgcctgctgcgatacgcaggagcagtttcggcgcgagacgcgcgcgatcacgcgtgcgggccaggcgaaagcgcctggggagcgccacgaaaaagacgaccgccacgcgctcgacgatcgcagccgctacgtgctcggttggagcaacacggcaaaaatatccgcccttgcagcacaacggcaagcgctcgaagctcgccttggcgagatcgggcaaaggctcggagaggcccaacacgagcacaccaaggtgcgtgagcaactcgaagcacttgcgcgtgccggcgagttcgccgagtttcgggaaatcgattggtcgagctgcgctgccgcgatcgcacgtcttgcggacgaaaaggcgcgactcgaatcggcaagcgacgccctcgcggagctaacggctcaattggactcggcgcaagcgtcgttgaaggagagtgaagcggcgatgtcggaaaccgactcggaactgggcggcatcctggccaagcgggaggcggcacaagcgttgcgcgaagagacgcacgcgctcgttgcagaagtggatgccgaactcgccgaacgaatcgaggccctgcgagcggagattctcggcgaacaccagctttccgtcgagtcatgcgacaaccgcgagcgggacgtgcgagaagcgttgacaacccgtatcgacaacgaaacgaagtcactcggccgcctggccgaaagaatcgtcaaggcaatggcggccttcaaggaagcctacaagctcgaaacggccgacttcgatgcgagcctcgacgcgaacccggagtaccgtgacatgctcgcgcggctgcaggcggacgatttgccgcgcttcgaaacgcgtttcaaggagctgctcaacgtcaacacgatcaacgagatcgccaactttcacgcccagctcgcgcgcgaacgggcgacgatcaaggaacgcatcgaacgcatcaacgaatcgttgcgacaaatcgactacaacgcgggtcgatacatcatcctcgagagtcagcccagccccgacgcggaaatccgcgaattccagagcgacctgcgcgcttgcaccgagggcgagctcaccggctcggacgatagccaatactcggaggccaagttcctgcaagtcaaacgaatcatcgaccgcttccgcggccgcgaagggttgaccgagcaggaccggcgttggcgcgccaaggtgaccgacgtgcgcaactggtttctgttcgccgccagcgagcgttggcgcgaagacgacagcgaatacgaacactactcggactccggcggtaaatcgggcggccagaaggaaaagctcgcctacacgatccttgccgcgagcctcgcctaccagttcggcctcgaatggggcgccgtgcgttcccgatcgttccgcttcgtcgtcatcgacgaagcatttggccgaggctccgacgaatcggcgcagtacggtctcacgctgtttcagaaactgaacctgcaactgctgatcgtcacgccgctgcagaagattcacatcatcgagccgttcgtttcgagtgtcggattcgttcagaacgacggtggacgcgcctccaagctgcgcaccctgtcgatcgacgagtaccgcgcgcacaaggcggagttcgagcaatga

SEQ ID NO: 49189 - DNA, 1185 bp, Burkholderia ubonensis
atgagctggacaactgccgtcgaactgcgtgcccgcctccagcacctatgggcacgcggcgaatggctgcgaagcctcgtagacggcaccgaggggctattcccgctacgtctggcgctcaaaggcccaagctcgtccgagttggctgaacgcttcgacacggtacgcgcatggattacggaaattgccgcgacgccgcgcatacgcatcgaatggcgagaaatcaatcatcgaattctcggcgtgcagcgtttgccacgagcagcttgggtcgacagtctggacgatgcactcactgtcgccggcaagcaccgcgacgcagcgcggttcgagcggctgcttgaaatcacacgctcgcgccagccgaagctcatcgcgtggcttgcgcagcgcccgatgcaggccctcgaattggccggcgattgggaacgactgctggcggtcgtcgattggctgcaagcacatccgcacccgggcgtctatcttcgccaagccgaaatcgccggcgtcgacacgaaattcatcgaggcaaggcgcggcgtcctctcccaatggctcgatctcgtgctgccgtccgaggcgatcgacagcagccggacaggcgtcgctcaattcgccgcgcgctacgggttccgcgagaagcaaccccgtattcgatttcgcgtgctcgatgagcggctcgccgtcctgcccggcatgggccgccccgacatcgcactcgacgccgacagcttcgcgcgcctcgcactgccgtgccgccatgttttcgttacggaaaacgaaacaaattttctggcgtttcccgacgttccgcaggcgatcgtgctcttcggagcgggctacggctgggaagctctggagccggcgcgatggctcgcggactgtgcgctccactactggggcgacatcgacacgcacggctttgccattctcgaccaattgcgttgccgattccctcacgtgaactccttcctgatggaccgcgcgacactgatggcgcatgaagcattctggggagacgaaggcgatcaggtcgtgcgtgatctgccgcgactcacggcgcaagagcgcgagctctttgacgacctgcgtgacaaccggattcgccgcggattgcggctcgaacaggagcgcgtcgggttcgggtgggtcagagcggcgctagaggaacggtctttcgtttag

SEQ ID NO: 49190 - DNA, 1461 bp, Burkholderia ubonensis
atgttcctcgactaccctaccctcgacgcgctgcgcacgcgccatcccgcctggcgacttttgcgctccgaccacgcgccgctcgccgtcagcttcctgcaccgcgcgttcgtcgcgccgaacgtgcgcgaggtggcggctccgtttcttgccgaagcactcgaggacgagctttacgcgttgcgcgaacaactcggcgacggcgccttcccgaagcccgcgctcgagtatctgaacgactgggcgagtcctgaaaagggatggttgcgcaagttctatcgccagggctccgatgaaccgcatttcgacctgacacccgccgcgggaaaagcgatagcgtggctcggcacgctgatggaacgaagctttgtcggcacggaatcccggctcctgacgcttttcgagttgctgcggcagatggccgaaggcagcgagacggacccggaaaggcgtcttgccgaactccacgcgcggcgcagccagatcgacgaagaaatcgctcgcgtggaagccggcgacgtccggctgctcgacgatgccgcgatcaaggaccgctttcagcaattcatgcagatggcgcgcgacctgctcacggatttccgtgaagtcgagcaaaacttccgtctgctggaccggcatgtacgcgagcgaatcgcgctctgggaaggatcgaagggtgcgctcatcgaagaaatcatgggcgagcgcgacgcgatcgccgattcggaccagggcagcagctttcgggcgttctgggacttcctgatgtcgagccgccgccaggaggaactctccgaacggctcgagcacgtgcttgcgctcccggcgatcacggaaatgaagccggacgcgcgcacgcggcgcgtccactatgactggctggaagccggcgagcacacgcaacgcacggtcgctcagctctcgcagcagcttcgacgtttcctcgacgatcaagcgtggctcgaaaaccgccgcatcatggacattctgcgcggtatcgaaacgaaagcgcttgtgctgcgtgaagcgcccccgccgggctccgtcatggagatcgagaccgcgtccgctgacatcgagctgccaattgaacgcccgctttacgcgccggcgctgcgccctctcatcgccaacgtcgcaatcgagaccggcgatgcggacctcgatgcgtcggcactctacacgcagatcgtcgtcgatcgtgcgcgcctcgcaagccacatccgccgctgccttcaagatcggcggcaagtgacacttgccgaactggccgcttcgcagccgctcctgcatgggctcgctgaacttgtcgcctatttgcaactgagcgccgaagccggaacatttcgcgcgaccgtcgatgagaccgtctccgatacgatcgagtggcaggcaaacgatgccaacggagcagcaatcgtcaagcgcgcaacgatgccgcgggtgattttcacaaggtag

SEQ ID NO: 49191 - DNA, 651 bp, Burkholderia ubonensis
atggaagaacagcaaaccccgtcgcttggtcgaggtgacttgtcgacggttgccgtcgcgctgctcaagggcgtgatttatcgtgatggaaacgagcgcctctgggccgcactgctcgaattgcagacacacgtgcgcgactacgtcgccgtgcttggcctcgagctcgtcgtggacgaggcggaaggctacgccttcgtaaagagccgcaccgagcctgacgccgaagtcgacggagaccaggccaagctgccccggctcgttgcacggcgtccactctcgttccccgtgagcctgctgctcgcgctgctgcgaaagaaactggcggaatgggatgccggcggcggcgacacgcggctcgtcctttcgcgcgaggacatcgtcgagctcgtacgcgtcttccttcccgcgagcactaacgaggcgcgcctggtcgatcagatcgatacgcacgtgaacaagatcgtcgacctcggtttcctgcgccggatgaagaccgcgagcggaccgcccacattcgaggtgcgacgcattctcaaggcgttcgtcgatgcgcaatggctgctcgatttcgacgcgcggctcgcaagctatcaggcgcaccttcgagattcgacgaattcagaccaaacggagagtcgcgatgaatga

SEQ ID NO: 49192 - DNA, 3372 bp, Burkholderia ubonensis
atgaatgagccgcgcacgctcggcctcgattttgccgcggacgacaccctgacgggctttcgcctcgagcggctcgaggttttcaactggggcaccttcgacgaacgggtctgggtgctgcgggtcgacggccgcaacggcctgctgacaggagacatcggttccggcaagtcgacgctcgtcgacgccattaccaccctcctcgtgcccgcgcagcgcatcgcctacaacaaggcggcaggcgcggacagcaaggaacgtacgctgcgctcgtatgtgctcggctactacaagtcggagcgcaacgaggtcacgggaacggccaagcccgtgagcctgcgcgaccataacagctattcggtgattttgggcgtgtttcgcaacgccgggtacgacgccaccgtcacgctcgcgcaagtgttctggatgaaggacgcgcaggctcaacctgcgcgattcttcgtcagtgccgaacgagatctctcgatcgcgaccgacttctcgcgcttcggcaccgacattgcgcagctgcgcaagaagctgcgcgggctgggcgccgaaatcgaggacacgtttccgaaatacagcgcctggttccggcggcgcttcggaatcgaaaacgagcaagcgctcgagctctttcatcaaacggtatcgatgaagtcggtgggcaatctcaccgacttcgtacgcagccacatgctcgagccgttcgacgtcgcaccgcgcgtcgacgccctgattgctcacttcgacgatctgaatcgcgcgcacgaggcggtactgaaaaccaagcgccaagtggaattgctgacaccgcttgtcgacgactgcgaccgccacagcgagcaaggccacgttctcgaaggctggcgcgcgtgccgcgaagcattgaggccctacttcgccgggctcaagctcggcctcgtcgaacgccgcctccaattgctcgaagaggatcatgcgcgcgcgacctcgcgaaaggcgcgacacgaagaagcgcgcgaccaggcgcgccagcgcgtggacgatttgcgccgtgccgtggccgaacaaggcggcgatcgcatcgcgcagctcgatgtcgagatccgcgagcacgagcgagaaagcgtgcgtcgccgcgaacgcgcgcaacgctatgccgccatcgttacgctgttcggcgaaaccgaggccgtggatgaggctgcattcgcctcccagcgccaacgcctggccgagcagcgcagctcgctcgtcgacgacgaagcgcaacagcaaaatgcgataaccgaatggagcgtggcatttcgcgaaggaaaagcgcggcgtgatgtgctggaggacgaaatcgcgagcctgaaagcccgacgcaacaacatcccgaaggaacaggtcgcgatgcgggcgagcctgtgctcggcgctcggcctggaggaagacgccctgccgttcgcgggcgaactcattcaggtgcgcgaggatgcgcgtgattgggagggcgccgccgagcgcgtcctgcgcaacttcggcctgtcgctgctcgtgcccgacgagcactatgcgaacgtcgcggcgtgggtcgatcgcactcatcttcgggggcggctcgtctactttcgcgtgcgctccgaacgcaccgcgcgtgtagccgaggccatcgagctgcaccgccactcgctcgcgcacaagctcgccatcaagcccgactcgcagttctacggctggctcgagcgcgaaatcggccgccgtttcgactatgcctgctgcgatacgcaggagcagtttcggcgcgagacgcgcgcgatcacgcgtgcgggccaggcgaaagcgcctggggagcgccacgaaaaagacgaccgccacgcgctcgacgatcgcagccgctacgtgctcggttggagcaacacggcaaaaatatccgctctcgcagcacaacggcaagcgctcgaagctcgccttggcgagatcgggcaaaggctcggagaggcccaacacgagcacaccaaggtgcgtgagcaactcgaagcacttgcgcgtgccggcgagttcgccgagtttcgggaaatcgattggtcgagctgcgctgccgcgatcgcacgtcttgcggacgaaaaggcgcgactcgaatcggcaagcgacgccctcgcagagctaacggctcaattggactcggcgcaagcgtcgttgaaagagagtgaagcggcgatgtcggaaaccgactcggaactgggcggcatcctggccaagcgggaggcggcacaagcgctgcgcgaagagacgcacgcgctcgttgcagaagtggatgccgaacttgccgaacgaatcgaggccctgcgagcggagattctcggcgaacaccagctttccgtcgagtcatgcgacaaccgcgagcgggacgtgcgagaagcgttgacaacccgtatcgacaacgaaacgaagtcactcggccgcctggccgaaagaatcgtcaaggcaatggcggccttcaaggaagcatacaagctcgaaacggccgacttcgatgcgagcctcgacgcgaactcagagtaccgtgacatgctcgcgcggctgcaagcggacgatttgccgcgcttcgaaacgcgtttcaaggagctgctcaacgtcaacacgatcaacgagatcgccaactttcacgcccagctcgcgcgcgaacgggcgacgatcaaggaacgcatcgaacgcatcaacgaatcgctgcgacaaatcgactacaacgcgggtcgatacatcatcctcgagagtcagcccagccccgacgcggaaatccgcgaattccagagcgacctgcgcgcttgcaccgagggcgaactcaccggctcggacgatagccaatactcggaggccaagttcctgcaagtcaaacggatcatcgaccgcttccgcggccgcgaagggttgaccgagcaggaccggcgttggcgcgccaaggtgaccgacgtgcgcaactggtttctgttcgccgccagcgagcgttggcgcgaggacgacagcgaatacgagcactactcggactccggcggtaaatcgggcggccagaaggaaaagctcgcctatacgatccttgccgcgagcctcgcctatcagttcggcctcgaatggggcgccgtgcgttcccggtcgttccgcttcgtcgtcatcgacgaagcatttggccgaggctccgacgaatcggcgcagtatggtctcactctgtttcagaaactgaaccttcaactgctgatcgtcacgccactgcagaagattcacatcatcgagccgttcgtttcgagtgtcggattcgttcagaacgacggtggacgcgcctccaagctgcgcaccctgtcgatcgaggagtaccgcgcgcacaaggcggagttcgagcaatga

SEQ ID NO: 49193 - DNA, 1185 bp, Burkholderia ubonensis
atgagctggacaactgccgtcgaactgcgtatccgcctccagcgcctatgggaacgcggcgaatggctgcgaagcctcgtagacggcaccgaggggctattcccgctacgtctggcgctcaaaggcccaagctcgtccgagttggctgaacgcttcgacacggtacgcgcatggattacggaaattgccgcgacgccgcgcatacgcatcgaatggcgagaaatcaatcatcgaattctcggcgtgcagcgtttgccacgagcagcttgggtcgacagtctggacgatgcactcactgtcgccggcaagcaccgcgacgcagcgcggttcgagcggctgcttgaaatcacacgctcgcgccagccgaagctcatcgcgtggcttgcgcagcgcccgatgcaggccctcgaattggccggcgattgggaacgactgctggcagtcgtcgattggctgcaagcacatccgcagccgggcatctatcttcgccaagccgaaatcgccggcgtcgacacgaaattcatcgaggcgcggcgcggcgtcctctcccaatggctcgatctcgtgctgccgtccgaggcgatcgacagcagccggaccggcgccgcccaattcgccgcgcgctacgggttccgcgataagccgcctcgtattcgatttcgcgtgctcgatgagcggctcgccgtcctgcccggcatgggccgacccgacatcacactcgacgccgacagcttcgcgcgcctcgcactgccgtgccgccatgttttcgttacggaaaacgaaacaaattttctggcgtttcccgacgttccgcaggcgatcgtgctcttcggagcgggctacggctgggaagctctggagccggcacaatggctcacggactgtgcgctccactactggggcgacatcgacacgcacggctttgccattctcgaccaattgcgttgccgattccctcacgtgaactccttcctgatggaccgcgcgacactgatggcgcatgaagcattctggggagacgaaggcgatcaggtcatgcgtgatctgccgcgactcacggcgcaagagcgcgagctctttgacgacctgcgtgacaaccggattcgccacggattgcggctcgagcaggagcgcgtcgggttcggatgggtcagagcggcgctagaggaacgggcgctcgtttag

SEQ ID NO: 49194 - DNA, 1461 bp, Burkholderia ubonensis
atgttcctcgactaccctaccctcgatgcgctgcgcacgcgccatcccgcttggcgacttttgcgctccgaccacgcgccgctcgccgtcagcttcctgcaccgcgcgttcgtcgcgccgaacgtgcgcgaggtggcggctccgtttcttgccgaagcactcgaggacgagctttacgcgttgcgcgaacaactcggcgacggcgccttcccgaagcccgcgctcgagtatctgaacgactgggcaagtcctgaaaagggatggttgcgcaagttctatcgccaaggctccgatgaaccgcatttcgacctgacacccgccgcgggaaaagcgatcgcgtggctcggcacgctgatggaacgaagctttgtcggcacggaatcccggctcctgacgcttttcgagttgctgcggcagatggccgaaggcagcgagacggacccggaaaggcgtcttgccgagctccacgcgcggcgcagccagatcgacgaagaaatcgctcgcgtggaggccggtgacgttcggctgctcgacgatgccgcgatcaaggaccgctttcagcaattcatgcagatggcgcgcgacctgctcacggatttccgtgaagtcgagcaaaacttccgtctgctggaccggcatgtacgcgagcgaatcgcgctctgggaaggatcgaagggtgcgctcatcgaagaaatcatgggcgagcgcgacgcgatcgccgattcggaccagggcagcagctttcgggcgttctgggacttcctgatgtcgagccgccgtcaggaggaactctccgaacggctcgagcacgtgcttgcgctcccggcgatcacggaaatgaagccggacgcgcgcacgcggcgcgtccactatgactggctggaagccggcgagcacacgcaacgcacggtcgctcagctctcgcagcagcttcgacgtttcctcgacgatcaagcgtggctcgaaaaccgccgcatcatggacattctgcgcggtatcgaaacgaaagcgcttgtgctgcgtgaagcgcccccgccgggctccgtcatggagatcgagaccgcgtccgctgacatcgagctgccaattgaacgcccgctttacgcccctgcgctgcgccctctcatcgccaacgtcgcaatcgagaccggcgatgcggacctcgatgcgtcggcactctacacgcagatcgtcgtcgatcgtgcgcgcctcgcaagcaacatccgccgctgccttcaagatcggcggcaagtgacacttgccgaactggccgcttcgcagccgctcctgcatgggctcgctgaactcgtcgcctatttgcaactgagcgccgaagccggaacatttcgcgcgaccgtcgatgagaccgtctccgatacgatcgagtggcaggcaaacgatgccaacggagcagcaatcgtcaagcgcgcaacgatgccgcgggtgattttcacaaggtag

SEQ ID NO: 49195 - DNA, 651 bp, Burkholderia ubonensis
atggaagaacagcaaaccccatcgcttggtcgaggtgacttgtcgacggttgccgtcgcgctgctcaagggcgtgatttatcgtgatggaaacgagcgcctctgggccgcactgctcgaattgcagacacacgtgcgcgactacgtcgccgtgcttggcctcgagctcgtcgtggacgaggcggaaggctacgccttcgtaaagagccgcaccgagcctgacgccgaactcgacggagaccaggccaagctgccccggctcgttgcacggcgtccactctcgttccccgtgagcctgctgctcgcgctgctgcgaaagaaactggcggaatgggatgccggcggcggcgacacgcggctcgtcctttcgcgcgaggacatcgtcgagctcgtacgcgtgttccttcccgcgagcactaacgaggcgcgcctggtcgatcagatcgatacgcacgtgaacaagatcgtcgacctcggtttcctgcgccggatgaagaccgcgagcggaccgcccacattcgaggtgcgacgcattctcaaggcgttcgtcgatgcgcaatggctgctcgatttcgacgcgcggctcgcaagctatcaggcgcaccttcgagattcgacgaattcggaccaaacggagagtcgcgatgaatga

SEQ ID NO: 49196 - DNA, 3372 bp, Burkholderia ubonensis
atgaatgagccgcgcacgctcggcctcgattttgccgcggacgacaccctgacgggctttcgcctcgagcggctcgaggttttcaactggggcaccttcgacgaacgggtctgggtgctgagggtcgacggccgcaacggcctgctgacaggagacatcggttccggcaagtcgacgctcgtcgacgccattaccaccctcctcgtgcccgcgcagcgcatcgcctacaacaaggcggcaggcgcggacagcaaggaacgtacgctgcgctcgtatgtgctcggctactacaagtcggagcgcaacgaggtcacgggagcggccaagcccgtgagcctgcgcgaccataacagctattcggtgattttgggcgtgtttcgcaacgccgggtacgacgccaccgtcacgctcgcgcaagtgttctggatgaaggacgcgcaggctcaacctgcgcgattcttcgtcagtgccgaacgagatctctcgatcgcgaccgacttctcgcgcttcggcaccgacattgcgcagctgcgcaagaagctgcgcgggctgggcgccgaaatcgaggacacgtttccgaaatacagcgcctggttccggcggcgcttcggaatcgaaaacgagcaagcgctcgagctctttcatcaaacggtatcgatgaagtcggtgggcaatctcaccgacttcgtacgcagccacatgctcgagccgttcgacgtcgcaccgcgcgtcgacgccctgattgctcacttcgacgatctgaatcgcgcgcacgaggcggtactgaaaaccaagcgccaagtggaattgctgacaccccttgtcgacgactgcgaccgccacagcgagcaaggccacgttctcgaaggctggcgcgcgtgccgtgaagcattgaggccctacttcgccgggctcaagctcggcctcgtcgaacgccgcctccaattgctcgaagaggatcatgcgcgcgcgacctcgcgaaaggcgcggcacgaagaagcgcgcgaccaggcacgccagcgcgtggacgatttgcgccgtgccgtggccgaacaaggcggcgatcgcatcgcgcagctcgatgtcgagatccgcgagcacgagcgagaaagcgtgcgtcgtcgcgaacgcgcgcaacgctatgccgccatcgttacgctgttcggcgaaaccgaggctgcggatgaggctgcattcgcctcccagcgccaacgcctggccgagcagcgcagctcgctcgttgacgacgaagcgcaacagcaaaatgcgataaccgaatggagcgtggcatttcgcgaaggaaaagcgcggcgtgatgtgctggaggacgaaatcgcgagcctgaaagcccgacgcaacaacatcccgaaggaacaggtcgcgatgcgggcgagcctgtgctcggcgctcggcctggaggaagacgccctgccgttcgcgggcgaactcattcaggtgcgcgaggatgcgcgtgattgggagggcgccgccgagcgcgtcctgcgcaacttcggcctgtcgctgctcgtgcccgacgagcactatgcgaacgtcgcggcgtgggtcgatcgcactcatcttcgggggcggctcgtctactttcgcgtgcgctccgaacgcaccgcgcgtgtagccgaggccatcgagctgcaccgccactcgctcgcgcacaagctcgcgatcaagcccgactcgcagttctatggctggctcgagcgcgaaatcggccgccgtttcgactatgcctgctgcgatacgcaggagcagtttcggcgcgagacgcgcgcgatcacgcgtgcgggccaggcgaaagcgcctggggagcgccacgaaaaagacgaccgccacgcgctcgacgatcgcagccgctacgtgctcggttggagcaacacggcaaaaatatccgctctcgcagcacaacggcaagcgctcgaagctcgccttggcgagatcgggcaaaggctcggagaggcccaacacgagcacaccaaggtgcgtgagcaactcgaagcacttgcacgcgccggcgagttcgccgagtttcgggaaatcgattggtcgagctgcgctgccgcgatcgcacgtcttgcggacgaaaaggcgcgactcgaatcggcaagcgacgccctcgcagagctaacggctcaattggactcggcgcaagcgtcgttgaaagagagtgaaacggcgatgtcggaaaccgactcggaactgggcggcatcctggccaagcgggaggcggcacaagcgctgcgcgaagagacgcacgcgctcgttgcagaagtggatgccgaacttgccgaacgaatcgaggccctgcgagcggagattctcggcgaacaccagctttccgtcgagtcatgcgacaaccgcgagcgggacgtgcgagaggcgttgacaacccgtatcgacaacgaaacgaaatcactcggccgcctggccgaaagaatcgtcaaggcaatggcggctttcaaggaagcctacaagctcgaaacggccgacttcgatgcgagcctcgacgcgaactcagagtaccgtgacatgctcgcgcggctgcaggcggacgatttgccgcgcttcgaaacgcgtttcaaggagctgctcaacgtcaatacgatcaacgagatcgccaactttcacgcccagctcgcgcgcgaacgggcgacgatcaaggaacgcatcgaacgcatcaacgaatcgctgcgacaaatcgactacaacgcgggtcgatacatcatcctcgagagtcagcccagccccgacgcggaaatccgcgaattccagagcgacctgcgcgcttgcaccgagggcgaactcaccggctcggacgatagccaatactcggaggccaagttcctgcaagtcaaacgaatcattgaccgcttccgcggccgcgaagggttgaccgagcaggaccggcgttggcgcgccaaggtgaccgacgtgcgcaactggtttctgttcgccgccagcgagcgttggcgcgaggacgacagcgaatacgagcactactcggactccggcggtaaatcgggcggccagaaggaaaagctcgcctatacgatccttgccgcgagcctcgcctatcagttcggcctcgaatggggcgccgtgcgttcccggtcgttccgcttcgtcgtcatcgacgaagcatttggccgaggctccgacgaatcggcgcagtatggtctcactctgtttcagaaactgaaccttcaactgctgatcgtcacgccactgcagaagattcacatcatcgagccgttcgtttcgagtgtcggattcgttcagaacgacggtggacgcgcctccaagctgcgcaccctgtcgatcgaggagtaccgcgcgcacaaggcggagttcgagcaatga

SEQ ID NO: 49197 - DNA, 1185 bp, Burkholderia ubonensis
atgagctggacaactgccgtcgaactgcgtatccgcctccagcgcctatgggaacgcggcgaatggctgcgaagcctcgtagacggcaccgaggggctattcccgctacgtctggcgctcaaaggcccaagctcgtccgagttggctgaacgcttcgacacggtacgcgcatggattacggaaattgccgcgacgccgcgcatacgcatcgaatggcgagaaatcaatcatcgaattctcggcgtgcagcgtttgccacgagcagcctgggtcgacagtctggacgatgcactcaccgtcgccggcaagcaccgcgacgcagcgcggttcgagcggctgcttgaaatcacacgctcgcgccagccgaagctcatcgcgtggcttgcgcagcgcccgatgcaggccctcgaattggccggcgattgggaacgactgctggcagtcgtcgattggctgcaagcacatccgcagccgggcatctatcttcgccaagccgaaatcgccggcgtcgacacgaaattcatcgaggcgcggcgcggcgtcctctcccaatggctcgatctcgtgctgccgtccgaggcgatcgacagcagccggaccggcgccgcccaattcgccgctcgctacgggttccgcgataagccgcctcgtattcgatttcgcgtgctcgatgagcggctcgtcgtcctgcccggcatgggccgacccgacatcacactcgacgccgacagcttcgcgcgcctcgcactgccgtgccgccatgttttcgttacggaaaacgaaacaaattttctggcgtttcccgacgttccgcaggcgatcgtgctcttcggagcgggctacggctgggaagctctggagccggcgcgatggctcgcggactgtgcgctccactactggggcgacatcgacacgcacggctttgccattctcgaccaattgcgttgccgattccctcacgcgggatccttcttgatggaccgcgcaacactgatggcgcatgaagcattctggggagacgaagccgatcaggtcatgcgtgatctgccgcgactcacggcgcaagagcgcgagctctttgacgacctgcgtgacaaccggattcgccgcggattgcggctcgagcaggagcgcatcgggttcggatgggtcagagcggcgctagaggaacgagcgctcgtttag

SEQ ID NO: 49198 - DNA, 1461 bp, Burkholderia ubonensis; identical to SEQ ID NO: 49039

SEQ ID NO: 49199 - DNA, 651 bp, Burkholderia ubonensis; identical to SEQ ID NO: 49040

SEQ ID NO: 49200 - DNA, 3372 bp, Burkholderia ubonensis
atgaatgagccgcgcacgctcggcctcgattttgccgcggacgacaccctgacgggctttcgcctcgagcggctcgaggttttcaactggggaaccttcgacgaccgggcttgggtgctgcgggtcgacggccgcaacggcctgctgacaggagacatcggttccggcaagtcgacgctcgtcgacgccatcaccaccctcctcgtgcccgcgcagcgcatcgcctacaacaaggcggcaggcgcggacagcaaggaacgtacgctgcgctcgtatgtgctcggctactacaagtcggagcgcaacgaggtcacgggagcggccaagcccgtgagcctgcgcgaccacaacagctattcggtgattttgggcgtgtttcgcaacgccgggcacgacgccaccgtcacgctcgcgcaagtgttctggatgaaggacgcgcaggctcaacctgcgcgattcttcgtcagtgccgaacgagatctctcgatcgcgaccgacttctcgcgcttcggcaccgacattgcgcagctgcgcaagaagctgcgcgggctgggcgccgaaatcgaggacacgtttccgaaatacagcgcctggttccggcggcgcttcggaatcgaaaacgagcaagcgctcgagctctttcatcaaacggtatcgatgaagtcggtgggcaatctcaccgacttcgtacgcagccacatgctcgagccgttcgacgtcgcaccgcgcgtcgacgccctgattgctcacttcgacgatctgaatcgcgcgcacgaggcggtactgaaaaccaagcgccaagtggaattgctgacaccgctcgtcgacgactgcgaccgccacagcgcgcaaggccgcgttctcgaaggctggcgtgcgtgccgtgaagcattgaggccctacttcgccgggctcaagctcggcctcgtcgaacgccgcctccaattgctcgaagaggatcatgcgcgcgcgacctcgcgaaaggcgcgacacgaagaagcgcgcgaccaggcacgccagcgcgtggacgatttgcgccgtgccgtggccgaacaaggcggcgatcgcatcgcgcagctcgatgtcgagattcgcgagcacgagcgagaaagcgtgcgtcgccgcgaacgcgcgcaacgctatgccgccatcgttacgctgttcggcgaaaccgaggccgcggatgaggctgcattcgcctcccagcgccaacgcctggccgagcagcgcagctcactcgtcgacgacgaagcgcaacagcaaaatgcgataaccgaatggagcgtggcatttcgcgaaggcaaagcgcggcgtgatttgctggaggacgaaatcgcgagcctgaaagcccgacgcaacaacatcccgaaggaacaggtcgcgatgcgggcgagcctgtgctcggcgctcggcctggaggaagacgccctgccgttcgcgggcgaactcattcaggtgcgcgaggatgcgcgtgattgggagggcgccgccgagcgcgtcctgcgcaacttcggcctgtcgctgctcgtgcccgacgagcactatgcgaacgtcgcggcgtgggtcgatcgcactcatcttcgggggcggctcgtctactttcgcgtgcgctcggaacgcagcgcgcgtgcagccgaggccatcgagctgcaccgccactcgctcgcgcacaagctcgcgatcaagcccgactcgctgttctatggctggctcgagcgcgaaatcggccgccgtttcgactatgcctgctgcgatacgcaggagcagtttcggcgcgagacgcgcgcgatcacgcgtgcgggccaggcgaaagcgcctggggagcgccacgaaaaagacgaccgtcacgcgctcgacgatcgcagccgctacgtgctcggctggagcaacacggcaaagatatccgctctcgaagcacaacggcaagcgctcgaagctcgccttggcgagatcgggcaaaggctcggagaggcccaacacgagcacaccaaggtgcgtgagcaactcgaagcacttgcgcgtgccggcgagttcgccgagtttcgggaaatcgattggtcgagctgcgctgccgcgatcgcacgtcttgccgacgaaaaagcgcgactcgaatcggcaagcgacgccctcgcggagctaacggctcaattggactcggcgcaagcgtcgttgaaagagagtgaagcggcgatgtcggaaaccgactcggaactgggcggcatcctggccaagcgggaggcggcacaagcgctgcgcgaagagacgcacgcgctcgttgcagaagtggatgccgaacttgccgaacgaatcgaggccctgcgagccgagattctcggcgaacaccagctttccgtcgagtcatgcgacaaccgcgagcgggacgtgcgagaggcgttgacaacccgtatcgacaacgaaacgaaatcactcggccgcctggccgaaagaatcgtcaaggcaatggcggctttcaaggaagcctacaagctcgaaacggccgacttcgatgcgagcctcgccgcgaactcggagtaccgtgacatgctcgcgcggctgcaggcggacgatttgccgcgcttcgaaacgcgtttcaaggagctgctcaacgtcaacacgatcaacgagatcgccaacttccacgcccagctcgcgcgcgaacgggcgacgatcaaggaacgcatcgaacgcatcaacgaatcgctgcgacaaatcgactacaacgcgggccgttacatcgtcctcgagagtcagcccagccccgacgcggagatccgcgaattccagagcgacctgcgcgcttgcaccgagggcgaactcaccggctcggacgatagccaatactcggaggccaagttcctgcaagtcaaacggatcatcgaccgcttccgcggccgcgaagggttgaccgagcaggaccggcgctggcgagccaaagtgaccgacgtgcgcaactggtttctgttcgccgccagcgagcgttggcgcgaggacgacagcgaatacgagcactactcggactccggcggtaaatcgggcggccagaaggaaaagctcgcctatacgatccttgccgcgagcctcgcctatcagttcggcctcgaatggggcgccgtgcgttcccgatcgttccgcttcgtcgtcatcgacgaagcatttggccgaggctccgacgaatcggcgcagtacggtctcacgctgtttcagaaactgaacctgcaactgctgatcgtcacgccactgcagaagattcacatcatcgagccgttcgtttcgagcgtcggattcgttcagaacgacggtggacgcgcctccaagctgcgcaccctgtcgatcgaggagtaccgcgcgcacaaggcggagttcgagcaatga

SEQ ID NO: 49201 - DNA, 1185 bp, Burkholderia ubonensis; identical to SEQ ID NO: 49042

SEQ ID NO: 49202 - DNA, 1461 bp, Burkholderia ubonensis; identical to SEQ ID NO: 49067

SEQ ID NO: 49203 - DNA, 651 bp, Burkholderia ubonensis; identical to SEQ ID NO: 49068

SEQ ID NO: 49204 - DNA, 3372 bp, Burkholderia ubonensis; identical to SEQ ID NO: 49069

SEQ ID NO: 49205 - DNA, 1185 bp, Burkholderia ubonensis; identical to SEQ ID NO: 49070

SEQ ID NO: 49206 - DNA, 1467 bp, Burkholderia stagnalis; identical to SEQ ID NO: 49031

SEQ ID NO: 49207 - DNA, 654 bp, Burkholderia stagnalis; identical to SEQ ID NO: 49032

SEQ ID NO: 49208 - DNA, 3372 bp, Burkholderia stagnalis; identical to SEQ ID NO: 49033

SEQ ID NO: 49209 - DNA, 1185 bp, Burkholderia stagnalis; identical to SEQ ID NO: 49034

SEQ ID NO: 49210 - DNA, 1467 bp, Burkholderia stagnalis; identical to SEQ ID NO: 49031

SEQ ID NO: 49211 - DNA, 654 bp, Burkholderia stagnalis; identical to SEQ ID NO: 49032

SEQ ID NO: 49212 - DNA, 3372 bp, Burkholderia stagnalis; identical to SEQ ID NO: 49033

SEQ ID NO: 49213 - DNA, 1185 bp, Burkholderia stagnalis; identical to SEQ ID NO: 49034

SEQ ID NO: 49214 - DNA, 1461 bp, Burkholderia ubonensis; identical to SEQ ID NO: 49039

SEQ ID NO: 49215 - DNA, 651 bp, Burkholderia ubonensis; identical to SEQ ID NO: 49040

SEQ ID NO: 49216 - DNA, 3372 bp, Burkholderia ubonensis
atgaatgagccgcgcacgctcggcctcgattttgccgcggacgacaccctgacgggctttcgcctcgagcggctcgaggttttcaactggggaaccttcgacgaccgggcttgggtgctgcgggtcgacggccgcaacggcctgctgacaggagacatcggttccggcaagtcgacgctcgtcgacgccattaccaccctcctcgtgcccgctcagcgcatcgcctacaacaaggcggcaggcgcggacagcaaggaacgtacgctgcgctcgtatgtgctcggctactacaagtcggagcgcaacgaggtcacgggaacggccaagcccgtgagcctgcgcgaccataacagctattcggtgattttgggcgtgtttcgcaacgccgggtacgacgccaccatcacgctcgcgcaagtgttctggatgaaggacgcgcaggctcaacctgcgcgattcttcgtcagtgccgaacgagatctctcgatcgcgaccgacttctcgcgcttcggcaccgacattgcacagctgcgcaagaagctgcgcgggctgggcgccgaaatcgaggacacgtttccgaaatacagcgcctggttccggcggcgcttcggaatcgaaaacgagcaagcgctcgagctctttcatcaaacggtatcgatgaagtcggtgggcaatctcaccgacttcgtacgcagccacatgctcgagccgttcgacgtcgcaccgcgcgtcgacgccctgattgctcacttcgacgatctgaatcgcgcgcacgaggcggtactgaaaaccaagcgccaagtggaactgctgacaccgctcgtcgacgactgcgaccgccacagcgagcaagcacacgttctcgaaggctggcgcgcgtgccgtgaagcattgaggccctacttcgccgggctcaagctcggcctcgtcgaacgccgcctccaattgctcgaagaggatcatgcgcgcgcgacctcgcgaagggcgcggcacgaagaagcgcgcgaccaggcgcgccagcgcgtggacgatttacgccgtgccgtggccgaacaaggcggcgatcgcatcgcgcagctcgatgtcgagatccgcgagcacgagcgagaaagcgtgcgtcgccgcgaacgggcgcaacgctatgccgccatcgttacgctgttcggcgaaaccgaggccgcggatgaggctgcattcgcctcccagcgccaacgcctggccgagcagcgcagctcactcgttgacgacgaagcgcaacagcaaaatgcgataaccgaatggagcgtggcatttcgcgaaggcaaagcgcggcgtgatttgctggaggacgaaatcgcgagcctgaaagctcgacgcaacaacatcccgaaggaacaggtcgcgatgcgggcgagcctgtgctcagcgctcggcctggaggaagacgccctgccgttcgcgggcgaactcattcaggtgcgcgaggatgcgcgtgattgggagggcgccgccgagcgcgtcctgcgcaacttcggcctgtcgctgctcgtgcccgacgagcactatgcgaacgtcgcggcgtgggtcgatcgcactcatcttcgggggcggctcgtctactttcgcgtgcgctccgaacgcaccgcgcgtgtagccgaggccatcgagctgcaccgccactcgctcgcgcacaagctcgccatcaagcccgactcgcagttctatggctggctcgagcgcgaaatcggccgccgtttcgactatgcctgctgcgatacgcaggagcagtttcggcgcgagacgcgcgcgatcacgcgtgcgggccaggcgaaagcgcctggggagcgccacgaaaaagacgaccgccacgcgctcgacgatcgcagccgctacgtgctcggttggagcaacacggcaaaaatatccgccctcgcagcacaacggcaagcgctcgaagctcgccttggcgagatcggacaaaggctcggagaggtccaacatgagcacaccaaggtgcgtgagcaactcgaagcacttgcgcgtgccggcgagttcgccgagtttcgggaaatcgattggtcgagctgcgctgccgcgatcgcacgtcttgccgacgaaaaagcgcgactcgaatcggcaagcgacgccctcgcggagctaacggctcaattggactcggcgcaagcgtcgttgaaagagagtgaagcggcgatgtcggaaaccgactcggaactgggcggcatcctggccaagcgggaggcggcacaagcgttgcgcgaagagacgcacgcgctcgttgcagaagtggatgccgaactcgccgaacgaatcgaggccctgcgagccgagattctcggcgaacaccagctttccgtcgagtcatgcgacaaccgcgagcgggacgtgcgagaggcgttgacaacccgtatcgacaacgaaacgaaatcactcggccgcctggccgaaagaatcgtcaaggcaatggcggctttcaaggaagcctacaagctcgaaacggccgacttcgatgcgagcctcgccgcgaactcagagtaccgtgacatgctcgcgcggctgcaggcggacgatttgccgcgcttcgaaacgcgtttcaaggagctgctcaacgtcaacacgatcaacgagatcgccaactttcacgcccagcttgcgcgcgaacgggcgacgatcaaggaacgcatcgaacgcatcaacgaatcgctgcgacaaatcgactacaacgcgggtcgttacatcgtcctcgagagtcagcccagccccgacgcggagatccgcgaattccagagcgacctgcgcgcttgcaccgagggcgaactcaccggctcggacgatagccaatactcggaggccaagttcctgcaagtcaaacggatcatcgaccgcttccgcggccgcgaagggttgaccgagcaggaccggcgctggcgagccaaagtgaccgacgtgcgcaactggtttctgttcgccgccagcgagcgttggcgcgaggacgacagcgaatacgagcactactcggactccggcggtaaatcgggcggccagaaggaaaagctcgcctatacgatccttgccgcgagcctcgcctatcagttcggcctcgaatggggcgccgtgcgttcccgatcgttccgcttcgtcgtcatcgacgaagcatttggccgaggctccgacgaatcggcgcagtacggtctcacgctgtttcagaaactgaacctgcaactgctgatcgtcacgccactgcagaagattcacatcatcgagccgttcgtttcgagcgtcggattcgttcagaacgacggtggacgcgcctccaagctgcgcaccctgtcgatcgaggagtaccgcgcgcacaaggcggagttcgagcaatga

SEQ ID NO: 49217 - DNA, 1185 bp, Burkholderia ubonensis
atgagttggacaactgccgtcgaactgcgtgcccgcctccagcgcctatgggaacgcggcgaatggctgcgaagcctcgtagacggtgccgaggggctattcccgctacgtctggcgatcaaaggcccaagctcgtccgagttggctgaacgcttcgacacggtacgcgcatggattacggaaattgccgcgacgccgcgcatacgcatcgaatggcgagaaatcaatcatcgaattctcggccagcagcgtttgccacgagcagcttgggtcgacagtctggacgatgcgctcactgtcgccggcaagcaacgcgacgcagcgcggttcgagcggctgcttgaaatcacacgctcgcgccagccgaagctcatcgcatggcttgcgcagcgcccgatgcaggccctcgaattggccggcgattgggaacgactgctggcagtcgtcgattggctgcaagcacatccgcagccgggcatctatcttcgccaagccgaaatcgccggcgtcgacacgaaattcatcgaggcgcggcgcggcgtcctctcccaatggctcgatctcgtgctgccgtccgaggcgatcgacagcagccggaccggcgccgcccaattcgccgctcgctacgggttccgcgataagccgcctcgtattcgatttcgcgtgctcgatgagcggctcgccgtcctgcccggcatgggccgacccgacatcacactcgacgccgacagcttcgcgcgcctcgcactgccgtgccgccatgttttcgttacggaaaacgaaacaaattttctggcgtttcccgacgttccgcaggcgatcgtgctcttcggagcgggctacggctgggaagctctggagccggcacaatggctcacggactgtgcgctccactactggggcgacatcgacacgcacggctttgccattctcgaccaattgcgttgccgattccctcacgcgggatccttcttgatggaccgcgcgacactgatagcgcatgaagcattctggggagacgaaggcgatcaggtcatgcgtgatctgccgcgactcacggcgcaagagcgcgagctctttgacgacctgcgtgacaaccggattcgccgcggattacggctcgagcaggagcgcgtcgggttcgggtgggtcagagcggcgctagaggaacggtctttcgtttag

SEQ ID NO: 49218 - DNA, 1467 bp, Burkholderia stagnalis; identical to SEQ ID NO: 49031

SEQ ID NO: 49219 - DNA, 654 bp, Burkholderia stagnalis; identical to SEQ ID NO: 49032

SEQ ID NO: 49220 - DNA, 3372 bp, Burkholderia stagnalis; identical to SEQ ID NO: 49033

SEQ ID NO: 49221 - DNA, 1185 bp, Burkholderia stagnalis; identical to SEQ ID NO: 49034

SEQ ID NO: 49222 - DNA, 1461 bp, Burkholderia ubonensis; identical to SEQ ID NO: 48995

SEQ ID NO: 49223 - DNA, 651 bp, Burkholderia ubonensis; identical to SEQ ID NO: 48968

SEQ ID NO: 49224 - DNA, 3372 bp, Burkholderia ubonensis; identical to SEQ ID NO: 48997

SEQ ID NO: 49225 - DNA, 1185 bp, Burkholderia ubonensis; identical to SEQ ID NO: 48998

SEQ ID NO: 49226 - DNA, 1431 bp, Burkholderia cepacia
atgtggcggttactggcctcttatcaggcgcccgtgacggtgtcactgttgcaatcgctctttcccgagacgtccacgcaactgacttcggcgagtctgatggagcgactatcggtggaagtagatgggcttcgcgcccgtggcgaggaaatcaacaagacccctcaaatgatcatcgctgactgggtccatcagaagtggctcgcgcggagcttcccggagggggccagcgaagagcagtacgagctcgctgccgatgtcgtaccggcaatgcgcctggttatggggctgcttgagccgagacaaacggcgacggagagcggactggcagtggttatcgactccgttttgcggcttgctgccgatactgatcctgacccggagtcccgcctgcgggcgctgcacgaagagtctcgacgtattactgaggagattcgacgtgtcatgcaacatggcgtttcacctttagatccggcacgtgcaagtgagcggggacgtcatattgttgccacgactgaggcgattgccgcagatttccgacgggtacgcgaggcgttcgagattctcaatcgtgatctacgtcggcaactggttgctcatggtgggccgcgcggcgaagtgctcgacaaggtgtttcttgacagtgacgtcatcgcggaaagcgacgaagggaaatcctttctcgcgttctggcgcctgttaacagacccctcccaacttgagggattgcaagcagcattagaggcgttggagtcccgaccgttcatccgcctgctcagtttggaggaacgcaagaggttgttcagggtgacggagatgctgctggttgaggggacgatggttcaggacgtgatgacgacgctcggtcgaagtctccggacttttgtccagagccgagaattccaggaacagcgacgaatccagaacctgatccgcagagcgatcacggaatccttggaactcaaggacaccctgacgaatggtagaacgatcgacttcagcttgaccctgtccacgagcagtttgcgttcggtcgcacaactcacgttgacggatccgcgagagcgtccgggtgaaacttccgttgacgacgccgaagcgcccgagatcgatttggaggccatgcgggaaatgatcgataacgccgatatcgacatgccgctcctgaaggccaatatccgcgctgcattggcggagcgagctcaggtgagtgttcgtgatctgaccattatgttcgaggtagcccaagggcttgcatcaatcgtgggctacatgtctctcggacagcgagtcggcattgtgctcgacaaccgagatagagagttccatcccaccgaactcgtatcctgggtcggccaagacggcatcgtgcgtcaggcgcgaatcgcccagttacttttcactagggaatgcctggatgagctcgattaa

SEQ ID NO: 49227 - DNA, 795 bp, Burkholderia cepacia
atgctcgccctaatgatccggatcctgcggacgagataccggaagtcgacgacgagggcccaggcgagttgctggacgatgacagcgagtcaacggcccggatggatggtggcgtggaaatgccactgtttgagggcgaagtcaacgctgccccatgaagttcgccgcgcgtatgcgttactacttcgtgggccgtcgctcgacgaacgccacagcaagctttggcctgttctgatcgatcatgaattgcggttgaggcagcttctgcatgcggcctttctcgatttggtcatcgatcgcgagcagaaaatcgcatttgcacgtccggcgcatatacctgacggggatgtgccccaactgttgcgtgaggtccggctgacctttgtcgactctgcgctcgtgctgcacttgcgaatgatgctggttcaggcggaagccgaagggcggcgagcgacggtgtcgagattcgaaatgatcgaccacctgaaagcctatgaggccagcgataacgtcgatcagacgcgctttaaccgccaggtcgacggcgcgatcgagaaagcaaaaaaatacaactttcttcgattgattcgcaacagcggcgagcgctttgagatatcacccgtgctcaagctggtgttttcccacgatcagattgaggagctacgccgaacctatcaggacatcagaaaccagttaggcggacgtccattggagggcgatggggatttgacgaatcgatccgactcccagtcgtccggcgacccggacgatggtcacgatattgacgaggtgtaa

SEQ ID NO: 49228 - DNA, 3126 bp, Burkholderia cepacia
atggtcacttatattcggggggcgtgggcgacgcgtgaaacggatctgggggggatcgcagcacagtatttgcgcccggataccacgctcagtgcagtggccgaggtttatgccaattcgcgcggtcaaaccctgacgctggtcggtatgtggtggatcaagggcaaatcgacacttgccaaagacgtgcgtcatagcttcttcgtgatagagcgagcgttcaagctcaaggaactgtcgttcttcatgcaaaccgactacaaccttcgctcatttcagaagcatcttccggaggtcaagctattcgagacgcacgcctcgtttcgcgagcgcttcaaggcgcgactgggcatcgaccatgaccttgcactgcgcttgctgcatcggacgcagtcctcgaagaatctcggcgatatcaatacgttcatgcgcgataacatgctggacgaaccgcagacgtttagcctggctaaggcgctgtgtgaagagttcaacacgttagctgcggcacatcgtgatgtcgtcgacgctcgcaaacagcgagacttattgcgcgacgcgaaatctcatgaggagcagtatcaagagcatcacgcaaaagtcgaccggatcgagacgctgttgaagcaagtcgatcatcacagcaagtacctgcagtacacgttgcgccgagggcgcgcgaacgagctgacgatcgagcttgagcggctgcgtcagcaggttgaggcactgggaaggcgggccaatagtgagcaggccgagctcgagagattgattaccctgcgtggcgggatgaacgacggcaatgtggcgggtctgactgcgcagttggagaccaccgctacgcgactgaaccaagtgggacgggagcgcacccgagtcgcggggtggttaaaaacgctcgggtggccggaacctgaggatgccgcgcatttcggcgagtatctcggcaaagccaatatcttgcgagaacatggccacccgcacgaagaggaagccaaggagcacgcgctacgtaatgatctcagtgtcgcacagacgcagctctcggaactgctgcaagagatccggtcgatggaactgcgtaaatcgaacctgccgtggcaactcgttgacgttcgcgaccagatcgcaactgccttaaagttagaccctggcatcctcccgtttgggggcgaattgcttgacgtaccgaagaagttcgaacgatggcaaggtgcgctggagcgtcttctcgggccgctcacgcgttcgttcctggtaccggaggcgcattaccgagacgtcgttgattggctcgagtcgaaccacacgggccagcacgtcctctatctgcgaatgcggacacatcaacgccgtgcggacgatggccccaaatctccgatacgcatgctggacacggcagacgacaagtacggtgactggttgcgcgatgagatctctcagcactatggagatttcgtctgtgccgaaacgatggatgagtttcgcgaggcggcccgtgccatcagtctccaaggtcaaatcaagcgtggcggcacccggcatgaaaaaaacgaccggacccgcctggataaccgcaaagagtggtcgataggcttctcgaacgagcagaagaaacttgagctgctcgacgaacttcacgctcagcagacgaagataagcgaatcgaagcaggttctggacgatctcgtcgcatcacgcaagcgggaagagcaaaagcttgctgcagcgcaggaactatcgcaagtcatgtgggcggacattgacacggtgtcggttgcgcttcaactgcagcgtttgcaggttcagttggaggacgctcagcgagctcatccggaagttcgggaactcgatacgcaaattgaaacgcagcgacagacggtcagcgatgcgcagggagcgcgcggatcggagtctgacaaatacgaccgttccgtggagcagatggccacgctgagccgtgagcttgaagcgacgcccgcggagcttcaggtgccaccgcccgatgctggcgagctccaggaactgttcggaaaggtggatcgcctcacactggacaatctcgagtcgagacgagagcgtgcacgcggtgatttgaaggagcaacgagggcaagccgacaaggatcggtcgaacgcaagaaaggatctcgaggaggctttgcggacgtttcgacgcaatcatccattggcggcggcggatatgggtgagacgttggacgactggccagactatgcacgcgtgcttgtgcgcatcgagcaggatgatctgcctcgcttcgaagagcggttctttcggttactcaacgagcagagcgatcgccacatcgccaagctgaggcaacgactcgtcacggaaaaggaagagatccgtggtcgcatgaacatcgtcaatgatgccctgtcgcaatcccagttcaatccgggaacctatcttcggttggaaaaccggccgagaacgctgcctgaggtgacgacctttctcgctgatctcacggcctgtcttgagcgcaatatcaagccggacgccacacgggatgagcgggaagagcagttcaaggcactcagtaagcttgttgagcgcttgcatagcgacaagtccgaggatgagcgatggaaggcgcaagtgctggacgtgcgccaacatgtcgagtttgttgcaaaggagttcgatgccgaaggcagtgttcgagacattttccagtcgggtgccggcaaatcgggcggccagcgtcagaagctcgctgcgacttgtctggcagcggcgctgcggtatcaattggctggaacggatcgacccttgccgcaattctgcacggtgctcatggatgaggctttcgacaaagcggacagcgagtttaccgccatgaccctgaacatcttccatacctttggttttcagatgctgatggcgacacccatgaaggcagtcagaacactggaacccttcattggcggtgcacatgtgttcagtaacaagtctcgggacagctccggtgcggtatcgatcgaatacgacatgacacatcatcggctgattggcctgggggcgccgcgacccgacgatccgagccgcgcagccaatgatgattccgacgaaggaggcgcgcgtgccgttgattga

SEQ ID NO: 49229 - DNA, 804 bp, Burkholderia cepacia
atgattggcatgccagagtgcgcgaaggtactggtgagtgcggcagactggtcagacgacgacttcatgcgactactggaatttctttcatggggcaaggaccatcccgcgagcggcttgtacctccgtcaactgccactgaaggggatcgacacaaaatgggtggagcggcggctgggcgtcgtggtgcccctgctcaaaaccatactgggacgcgacggtgatttgcatcaattgttgggccttcgacgtgcgccgcctacgatccggatgagattgctggatccccttgtccgtgaacagcttggaggagcagactatctcgagatgcccgtggaccaatggaatacggtgctgcaccggccaccggcccgattactggtggtcgaaaatttggatacggggttggctgcccccgacattcgagacgctgccgtggtgatgggccacgggaacggtatcacgctcctgcagaaggtcgcgtggagccgtgctgcggagatactctactggggagacattgacacctgggggttgcacatcctgtcacgtatgcgcggcatctatccccgattggaatccattctgatgacggaggaggtgctcgagtcgcatcagcatttctgggtcgacgaagagacgcaggacatgcgacctgccgaacaccatacgagcaaggaagccaaacttctgcgcgatttgcaacaacggcgctggggaaggccgattcgcctagagcaggaacgcgtgcactggccgatggcggttgaggcattgacgcgtcgttggggaggcttggcataa

SEQ ID NO: 49230 - DNA, 1461 bp, Burkholderia ubonensis; identical to SEQ ID NO: 49039

SEQ ID NO: 49231 - DNA, 651 bp, Burkholderia ubonensis; identical to SEQ ID NO: 49040

SEQ ID NO: 49232 - DNA, 3372 bp, Burkholderia ubonensis; identical to SEQ ID NO: 49216

SEQ ID NO: 49233 - DNA, 1185 bp, Burkholderia ubonensis; identical to SEQ ID NO: 49217

SEQ ID NO: 49234 - DNA, 1461 bp, Burkholderia ubonensis; identical to SEQ ID NO: 48979

SEQ ID NO: 49235 - DNA, 651 bp, Burkholderia ubonensis; identical to SEQ ID NO: 48980

SEQ ID NO: 49236 - DNA, 3372 bp, Burkholderia ubonensis; identical to SEQ ID NO: 48981

SEQ ID NO: 49237 - DNA, 1185 bp, Burkholderia ubonensis; identical to SEQ ID NO: 48938

SEQ ID NO: 49238 - DNA, 1461 bp, Burkholderia ubonensis
atgttcctcgactaccctaccctcgacgcgctgcgcacgcgccatcccgcttggcgacttttgcgctccgaccacgcgccgctcgccgtcagcttcctgcaccgcgcgttcggcgcgccgaacgtgcgcgaggtggcggctccgtttcttgccgaagcactcgaggacgagctttacgcgttgcgcgaacaattcggcgacggcgccttcccgaagcccgcgctcgactatctgaacgactgggcgagtcctgaaaagggatggttgcgcaagttctatcgccaaggctccgatgaaccgcatttcgacctgacacccgccgcaggaaaagcgatcgcgtggctcggcacgctgatggaacgaagctttgtcggcacggaatcccggctcctgacgcttttcgagttgctgcggcagatggccgaaggcagcgagacggacccggaaaggcgtcttgccgagctccacgcgcggcgcagccagatcgacgaagaaatcgctcgcgtggaggccggtgacgtccggctgctcgacgatgccgcgatcaaggaccgctttcagcaattcatgcagatggcgcgcgacctgctcacggatttccgtgaagtcgagcaaaacttccgtctgctggaccggcacgtacgcgagcgaatcgcgctctgggaaggatcgaagggtgcgctcatcgaagaaatcatgggcgagcgcgacgcgatcgccgattcggaccagggcagcagctttcgggcgttctgggatttcctgatgtcgagccgccgccaggaggaactctccgaacggctcgagcacgtgcttgcgctcccggcgatcacggaaatgaagccggacgcgcgcacgcggcgcgtccactacgactggctggaagccggcgagcacacgcaacgcacggtcgctcagctctcgcagcagcttcgacgtttcctcgacgatcaagcgtggctcgaaaaccgccgcatcatggacattctgcgcggtatcgaaacgaaagcgcttgtgctgcgtgaagcgcccccgccgggctccgtcatggagatcgagaccgcgtccgctgacatcgagctgccaattgaacgcccgctttacgcgccggcgctgcgccctctcatcgccaacgtcgcaatcgagaccggcgatgcggacctcgatgcgtcggcactctacacgcagatcgtcgtcgatcgcgcgcgcctcgcaagccacatccgccgctgccttcaagatcggcggcaagtgacacttgccgaactggccgcttcgcagccgctcctgcatgggctcgctgaactcgtcgcctatttgcaactgagcgccgaagccggaacatttcgcgcgaccgtcgatgagaccgtctccgatacgatcgagtggcaggcaaacgatgccaacggagcagcaatcgtcaagcgcgcaacgatgccgcgggtgattttcacaaggtag

SEQ ID NO: 49239 - DNA, 651 bp, Burkholderia ubonensis
atggaagaacagcaaaccccgtcgcttgatcgaggtgacttgtcgacggttgccatcgcgctgctcaagggcgtggtttatcgtgatggaaacgagcgcctctgggccgcactgctcgaattgcagacacacgtgcgcgactacgtcgccgtgcttggcctcgagctcgtcgtggacgaggcggaaggctacgccttcgtaaagagccgcaccgagcctgacgccgaagtcgacggacaccaggccaagctgccccggctcgttgcacggcgtccactctcgttccccgtgagcctgctgctcgcgctgctgcgaaagaaactggcggaatgggatgccggcggcggcgacacgcggctcgtcctttcgcgcgaggacatcgtcgagctcgtacgcgtcttccttcccgcgagcactaacgaggcgcgcctggtcgatcagatcgatacgcacgtgaacaagatcgtcgacctcggtttcctgcgccggatgaagaccgcgagcggaccgcccacattcgaggtgcgacgcattctcaaggcgttcgtcgatgcgcaatggctgctcgatttcgacgcgcggctcgcaagctatcaggcgcaccttcgagattcgacgaattcggaccaaacggagagtcgcgatgaatga

SEQ ID NO: 49240 - DNA, 3372 bp, Burkholderia ubonensis
atgaatgagccgcgcacgctcggcctcgattttgccgcggacgacaccctgacgggctttcgcctcgagcggctcgaggttttcaactggggcaccttcgacgaacgggtctgggtgctgcgggtcgacggccgcaacggcctgctgacaggagacatcggttccggcaagtcgacgctcgtcgacgccatcaccaccctcctcgtgcccgcgcagcgcatcgcctacaacaaggcggcaggcgcggacagcaaggaacgtacgctgcgctcgtatgtgctcggctactacaagtcggagcgcaacgaggtcacgggagcggccaagcccgtgagcctgcgcgaccacaacagctattcggtgattttgggcgtgtttcgcaacgccgggtacgacgccaccgtcacgctcgcgcaagtgttctggatgaaggacgcgcaggctcaacctgcgcgattcttcgtcagtgccgaacgagatctctcgatcgcgaccgacttctcgcgcttcggcaccgacattgcgcagctgcgcaagaagctgcgcgggctgggcgccgaaatcgaggacacgtttccgaaatacagcgcctggttccggcggcgcttcggaatcgaaaacgagcaagcgctcgagctctttcatcaaacggtatcgatgaagtcggtgggcaatctcaccgacttcgtacgcagccacatgctcgagccgttcgacgtcgcaccgcgcgtcgacgccctgattgctcacttcgacgatctgaatcgcgcgcacgaggcggtactgaaaaccaagcgccaagtggaactgctgacaccgctcgtcgacgactgcgaccgccacagcgagcaaggccacgttctcgaaggctggcgcgcgtgccgtgaagcattgaggccctacttcgccgggctcaagctcggcctcgtcgaacgccgcctccaattgctcgaagaggatcatgcgcgcgcgacctcgcgaaaggcgcggcacgaagaagcgcgcgaccaggcgcgccagcgcgtggacgatttgcgccgtgccgtggccgaacaaggcggcgatcacatcgcgcagctcgatgtcgagatccgcgagcacgagcgagaaagcgtgcgtcgccgcgaacgcgcgcaacgctatgccgccatcgttacgctgttcggcgaaaccgaggctgcggatgaggctgcattcgcctcccagcgccaacgcctggccgagcagcgcagctcgctcgtcgacgacgaagcgcaacagcaaaatgcgataaccgaatggagcgtggcatttcgcgaaggcaaagcgcggcgtgatttgctggaggacgaaatcgcgagcctgaaagctcgacgcaacaacatcccgaaggaacaggtcgcgatgcgggcgagcctgtgctcggcgctcggcctggaggaagacgccctgccgttcgcgggcgaactcattcaggtgcgcgaggatgcgcgtgattgggagggcgccgccgagcgcgtcctgcgcaacttcggcctgtcgctgctcgtgcccgacgagcactatgcgaacgtcgcggcgtgggtcgatcgcactcatctccgggggaggctagtctactttcgcgtgcgctccgaacgcaccgcgcgtgcagccgaggccatcgagctgcaccgccactcgctcgcgcacaagctcgccatcaagcccgactcgcagttctatggctggctcgagcgcgaaatcggccgccgtttcgactatgcctgctgcgatacgcaggagcagtttcggcgcgagacgcgcgcgatcacgcgtgcgggccaggcgaaagcgcctggggagcgccacgaaaaagacgaccgccacgcgctcgacgatcgcagccgctacgtgctcggttggagcaatacggcaaaaatatccgccctcgcagcacaacggcaagcgctcgaagctcgccttggcgagatcgggcaaaggctcggagaggcccaacacgagcacaccaaggtgcgtgagcaactcgaagcacttgcgcgtgccggcgagttcgccgagtttcgggaaatcgattggtcgagctgcgctgccgcgatcgcacgtcttgcggacgaaaaggcgcgactcgaatcggcaagcgacgccctcgcggagctaacggctcaattggactcggcgcaagcgtcgttgaaagagagtgaagcggcgatgtcggagaccgactcggaactgggcggcatcctggccaagcgggaggcggcacaagcgttgcgcgaagagacgcacgcgctcgttgcagaagtggatgccgaactcgccgaacgaatcgaggccctgcgagccgagattctcggcgaacaccagctttccgtcgagtcatgcgacaaccgcgagcgggacgtgcgagaggcgttgacaacccgtatcgacaacgaaacgaaatcactcggccgcctggccgaaagaatcgtcaaggcaatggcggctttcaaggaagcctacaagctcgaaacggccgacttcgatgcgagcctcgccgcgaactcagagtaccgtgacatgctcgcgcggctgcaggcggacgatttgccgcgcttcgaaacgcgtttcaaggagctgctcaacgtcaacacgatcaacgagatcgccaactttcacgcccagcttgcgcgcgaacgggcgacgatcaaggaacgcatcgaacgcatcaacgaatcgctgcgacaaatcgactacaacgcgggtcgttacatcgtcctcgagagtcagcccagccccgacgcggagatccgcgaattccagagcgacctgcgcgcttgcaccgagggcgaactcaccggctcggacgatagccaatactcggaggccaagttcctgcaagtcaaacggatcatcgatcgcttccgcggccgcgaagggttgaccgagcaggaccggcgctggcgcgccaaggtgaccgacgtgcgcaactggtttctgttcgccgccagcgagcgttggcgcgaggacgacagcgaatacgagcactactcggactccggcggtaaatcgggcggccagaaggaaaagctcgcctatacgatccttgccgcgagcctcgcctatcagttcggcctcgaatggggcgccgtgcgttcccgatcgttccgcttcgtcgtcatcgacgaagcatttggccgaggctccgacgaatcggcgcagtacggtctcactctgtttcagaaactgaacctgcaactgctgatcgtcacgccactgcagaagattcacatcatcgagccgttcgtttcgagcgtcggattcgttcagaacgacggtggacgcgcctccaagctgcgcaccctgtcgatcgaggagtaccgcgcgcacaaggcggagttcgagcaatga

SEQ ID NO: 49241 - DNA, 1185 bp, Burkholderia ubonensis; identical to SEQ ID NO: 49138

SEQ ID NO: 49242 - DNA, 1461 bp, Burkholderia ubonensis; identical to SEQ ID NO: 48915

SEQ ID NO: 49243 - DNA, 651 bp, Burkholderia ubonensis; identical to SEQ ID NO: 48916

SEQ ID NO: 49244 - DNA, 3372 bp, Burkholderia ubonensis
atgaatgagccgcgcacgctcggcctcgattttgccgcggacgacacccggacgggctttcgcctcgagcggctcgaggttttcaactggggcaccttcgacgaacgggtctgggtgctgcgggtcgacggccgcaacggcctgctgacaggagacatcggttccggcaagtcgacgctcgtcgacgccattaccaccctcctcgtgcccgcgcagcgcatcgcctacaacaaggcggcaggcgcggacagcaaggaacgtacgctgcgctcgtatgtgctcggctactacaagtcggagcgcaacgaggtcacgggaacggccaagcccgtgagcctgcgcgaccataacagctattcggtgattttgggcgtgtttcgcaacgccgggtacgacgccaccgtcacgctcgcgcaagtgttctggatgaaggacgcgcaggctcaacctgcgcgattcttcgtcagcgccgaacgagatctctcgatcgcgacggacttctcgcgcttcggcaccgacattgcgcagctgcgcaagaagctgcgcgggctgggcgccgaaatcgaggacgcgtttccgaaatacagcgcctggttccggcggcgcttcggcatcgaaaacgagcaagcgctcgagctctttcatcaaacggtatcgatgaagtcggtgggcaatctcaccgacttcgtacgcagccacatgctcgagccgttcgacgtcgcaccgcgcgtcgacgccctgattgctcacttcgacgatctgaatcgcgcgcacgaggcagtactgaaaaccaagcgccaagtggaactgctgacaccgctcgtcgacgactgcgaccgccacagcgagcaaggacacgttctcgaaggctggcgcgcgtgccgtgaagcattgaggccctacttcgccgggctcaagctcggcctcgtcgaacgccgcctccaattgctcgaggaggatcatgcgcgcgcgacctcgcgaaaggcgcggcacgaagaagcgcgcgaccaggcgcgccagcgcgtggacgatttgcgccgtgccgtggccgaacaaggcggcgatcgcatcgcgcagctcgatgtcgagattcgcgagcacgagcgagaaagcgtgcgtcgccgcgaacgcgcgcaacgctatgccgccatcgttacgctgttcggcgaaaccgaggccgcggatgaggctgcattcgcctcccagcgccaacgcctggccgagcagcgcagctcgctcgtcgacgacgaagcgcagcagcaaaatgcgataaccgaatggagcgtggcatttcgcgaaggaaaagcgcggcgtgatgtgctggaggacgaaatcgcgagcctgaaagcccgacgcaacaacatcccgaaggaacaggtcgcgatgcgggcgagcctgtgctcggcgctcggcctggaggaagacgccctgccgttcgcgggcgaactcattcaggtgcgcgaggatgcgcgtgattgggagggcgccgccgagcgcgtcctgcgcaacttcggcctgtcgctgctcgtgcccgacgagcactatgcgaacgtcgcggcgtgggtcgatcgcactcatcttcgggggcggctcgtctactttcgcgtgcgctccgaacgcaccgcgcgtgcagccgaggccatcgagctgcaccgccactcgctcgcgcacaagctcgcgatcaagcccgactcgcagttctatggctggctcgagcgcgaaatcggccgccgtttcgactatgcctgctgcgatacgcaggagcagtttcggcgcgagacgcgcgcgatcacgcgtgcgggccaggcgaaagcgcctggggagcgccacgaaaaagacgaccgccacgcgctcgacgatcgcagccgctacgtgctcggttggagcaacacggcaaaaatatccgcccttgcagcacaacggcaagcgctcgaagctcgccttggcgagatcgggcaaaggctcggagaggcccaacacgagcacaccaaggtgcgtgagcaactcgaagcacttgcgcgtgccggcgagttcgccgagtttcgggaaatcgattggtcgagctgcgctgccgcgatcgcacgtcttgcggacgaaaaggcgcgactcgaatcggcaagcgacgccctcgcagagctaacggctcaattggactcggcgcaagcgtcgttgaaagagagtgaagcggcgatgtcggaaaccgactcggaactgggcggcatcctggccaagcgggaggcggcacaagcgctgcgcgaagagacgcacgcgctcgttgcagaagtggatgccgaacttgccgaacgaatcgaggccctgcgagcggagattctcggcgaacaccagctttccgtcgagtcatgcgacaaccgcgagcgggacgtgcgagaagcgttgacaacccgtatcgacaacgaaacgaagtcactcggccgcctggccgaaagaatcgtcaaggcaatggcggctttcaaggaagcctacaagctcgaaacggccgacttcgatgcgagcctcgacgcgaacccggagtaccgtgacatgctcgcgcggctgcaggcggacgatttgccgcgcttcgaaacgcgtttcaaggagctgctcaacgtcaatacgatcaacgagatcgccaacttccatgcccagctcgcgcgcgaacgggcgacgatcaaggaacgcatcgaacgcatcaacgaatcgctgcgacaaatcgactacaacgcgggtcgatacatcatcctcgagagtcagcccagccccgacgcggaaatccgcgaattccagagcgacctgcgcgcttgcaccgagggcgaactcaccggctcggacgatagccaatactcggaggtcaagttcctgcaagtcaaacgaatcatcgaccgcttccgcggccgcgaagggttgaccgagcaggaccggcgttggcgcgccaaggtgaccgacgtgcgcaactggtttctgttcgccgccagcgagcgttggcgcgaagacgacggcgaatacgaacactactcggactccggcggtaaatcgggcggccagaaggaaaagctcgcctacacgatccttgccgcgagcctcgcctaccagttcggcctcgaatggggcgccgtgcgttctcgatcgttccgcttcgtcgtcatcgacgaagcatttggccgaggctccgacgaatcggcgcagtacggtctcacgctgtttcagaaactgaacctgcaactgctgatcgtcacgccgctgcagaagattcacatcatcgagccgttcgtttcgagtgtcggattcgttcagaacgacggtggacgcgcctccaagctgcgcaccctgtcgatcgacgagtaccgcgcgcacaaggcggagttcgagcaatga

SEQ ID NO: 49245 - DNA, 1185 bp, Burkholderia ubonensis
atgagctggacaactgccgtcgaactgcgtgcccgcctccagcacctatgggcacgcggcgaatggctgcgaagcctcgtagacggcaccgaggggctattcccgctacgtctggcgctcaaaggcccaagctcgtccgagttggctgaacgcttcgacacggtacgcgcatggattacggaaattgccgcgacgccgcgcatacgcatcgaatggcgagaaatcaatcatcgaattctcggcgtgcagcgtttgccacgagcagcttgggtcgacagtctggacgatgcactcactgtcgccggcaagcaccgcgacgcagcgcggttcgcgcggctgctcgaaatcactcgcgcccgccagccgaagctcgccgcgtggcttgcgcagcgcccgttgcaagccctcgaattcgccggcgattgggaacgactgctggcggtcgtcgattggctgcaagcacatccgcagccgggcatatatcttcgccaagccgaaatcgccggcgtcgacacgaaattcatcgaggcaaggcgcggcgtcctctcccaatggctcgatctcgtgctgccgtccgaggcgatcgacagcagccggacaggcgtcgctcaattcgccgcgcgctatgggttccgcgagaagcaaccccgtattcgatttcgcgtgctcgatgagcggctcgccgttctgcccggcatgggccgccccgacatcgcactcgacgccgacagcttcgcgcgcctcgcactgccgtgccgccatgttttcgttacggaaaacgaaacaaattttctggcgtttcccgacgttccgcaggcgatcgtgctcttcggagcgggctacggctgggaagctctggagccggcgcgatggctcgcggactgtgcgctccactactggggcgacatcgacacgcacggctttgccattctcgaccaattgcgttgccgattccctcacgtgaactccttcctgatggaccgcgcgacactgatggcgcatgaagcattctggggagacgaaggcgatcaggtcatgcgtgatctgccgcgactcacggcgcaagagcgcgagctctttgacgacctacgtgacaaccggattcgccgcggattgcggctcgaacaggagcgcgtcgggttcgggtgggtcagagcggcgctagaggaacggtctttcgtttag

SEQ ID NO: 49246 - DNA, 1461 bp, Burkholderia ubonensis
atgttcctcgactaccctaccctcgacgcgctgcgcacgcgccatcccgcttggcgacttttgcgctccgaccacgcgccgctcgccgtcagcttcctgcaccgcgcgttcgtcgcgccgaacgtgcgcgaggtggcggctccgtttcttgccgaagcactggaggacgagctttacgcgttgcgcgaacaactcggcgacggcgccttcccgaagcccgcgctcgactatctgaacgactgggcgagtcctgaaaagggatggttgcgcaagttctatcgccaaggctccgatgaaccgcatttcgacctgacacccgccgcaggaaaagcgatcgcgtggctcggcacgctgatggaacgaagctttgtcggcacggaatcccggctcctgacgcttttcgagttgctgcggcagatggccgaaggcagcgagacggacccggaaaggcgtcttgccgagctccacgcgcggcgcagccagattgacgaagaaatcgctcgcgtggaggccggtgacgttcggctgctcgacgatgccgcgatcaaggaccgctttcagcaattcatgcagatggcgcgcgacctgctcacggatttccgtgaagtcgagcaaaacttccgtctgctggaccggcacgtacgcgagcgaatcgcgctctgggaaggatcgaagggtgcgctcatcgaagaaatcatgggcgagcgcgacgcgatcgccgattcggaccagggcagcagctttcgggcgttctgggatttcctgatgtcgagccgccgccaggaggaactctccgaacggctcgagcacgtgcttgcgctcccggcgatcacggaaatgaagccggacgcgcgcacgcggcgcgtccactacgactggctggaagccggcgagcacacgcaacgcacggtcgctcagctctcgcagcagcttcgacgtttcctcgacgatcaagcgtggctcgaaaaccgccgcatcatggacattctgcgcggtatcgaaacgaaagcgcttgtgctgcgtgaagcgcccccgccgggctccgtcatggagatcgagaccgcgtccgctgacatcgagctgccaattgaacgcccgctttacgcgccggcgctgcgccctctcatcgccaacgtcgcaatcgagaccggcgatgcggacctcgatgcgtcggcactctacacgcagatcgtcgtcgatcgcgcgcgcctcgcaagccacatccgccgctgccttcaagatcggcggcaagtgacacttgccgaactggccgcttcgcagccgctcctgcatgggctcgctgaactcgtcgcctatttgcaactgagcgccgaagccggaacatttcgcgcgaccgtcgatgagaccgtctccgatacgatcgagtggcaggcaaacgatgccaacggagcagcaatcgtcaagcgcgcaacgatgccgcgggtgattttcacaaggtag

SEQ ID NO: 49247 - DNA, 651 bp, Burkholderia ubonensis
atggaagaacagcaaaccccgtcgcttgatcgaggtgacttgtcgacggttgccgtcgcgctgctcaagggcgtggtttatcgtgatggaaacgagcgcctctgggccgcactgctcgaattgcagacacacgtgcgcgactacgtcgccgtgcttggcctcgagctcgtcgtggacgaggcggaaggctacgccttcgtaaagagccgcaccgagcctgacgccgaagtcgacggagaccaggccaagctgccccggctcgttgcacggcgtccactctcgttccccgtgagcctgctgctcgcgctgctgcgaaagaaactggcggaatgggatgccggcggcggcgacacgcggctcgtcctttcgcgcgaggacatcgtcgagctcgtacgcctcttccttcccgcgagcactaacgaggcgcgcctggtcgatcagatcgatacgcacgtgaacaagatcgtcgacctcggtttcctgcgccggatgaagaccgcgagcggaccgcccacattcgaggtgcgacgcattctcaaggcgttcgtcgatgcgcaatggctgctcgatttcgacgcgcggctcgcaagctatcaggcgcaccttcgagattcgacgaattcggaccaaacggagagtcgcgatgaatga

SEQ ID NO: 49248 - DNA, 3372 bp, Burkholderia ubonensis
atgaatgagccgcgcacgctcggcctcgattttgccgcggacgacaccctgacgggctttcgcctcgagcggctcgaggttttcaactggggcaccttcgacgaccgggcttgggtgctgcgggtcgatggccgcaacggcctgctgacaggagacatcggttccggcaagtcgacgctcgtcgacgccatcaccaccctcctcgtgcccgcgcagcgcatcgcctacaacaaggcggcaggcgcggacagcaaggaacgtacgctgcgctcgtatgtgctcggctactacaagtcggagcgcaacgaggtcacgggagcggccaagcccgtgagcctgcgcgaccacaacagctattcggtgattttgggcgtgtttcgcaacgccgggtacgacgccaccgtcacgctcgcgcaggtgttctggatgaaggacgcgcaggctcaacctgcgcgattcttcgtcagtgccgaacgagatctctcgatcgcgaccgacttctcgcgcttcggcaccgacattgcgcagctgcgcaagaagctgcgcgggctgggcgccgaaatcgaggacacgtttccgaaatacagcgcctggttccggcggcgcttcggaatcgaaaacgagcaagcgctcgagctatttcatcaaacggtatcgatgaagtcggtgggcaatctcaccgacttcgtacgcagccacatgctcgagccgttcgacgtcgcaccgcgcgtcgacgccctgattgctcacttcgacgatctgaatcgcgcgcacgaggcggtactgaaaaccaagcgccaagtggaactgctgacaccgctcgtcgacgactgcgaccgccacagcgagcaagcacacgttctcgaaggctggcgcgcgtgccgtgaagcattgaggccctacttcgccgggctcaagctcggcctcgtcgaacgccgcctccaattgctcgaagaagatcatgcgcgcgcgacctcgcgaagggcgcggcacgaagaagcgcgcgaccaggcgcgccagcgcgtggacgatttgcgccgtgccgtggccgaacaaggcggcgatcgcatcgcgcagctcgatgtcgagatccgcgagcacgagcgagaaagcgtgcgtcgccgcgaacgggcgcaacgctatgccgccatcgttacgctgttcggcgaaaccgaggccgcggatgaggctgcattcgcctcccagcgccaacgcctggccgagcagcgcagctcgctcgtcgacgacgaagcgcaacagcaaaatgcgataaccgaatggagcgtggcatttcgcgacggaaaagcgcggcgtgatttgctggaggacgaaatcgcgagcctgaaagcccgacgcaacaacatcccgaaggaacaggtcgcgatgcgggcgagcctgtgctcggcgctcggcctggaggaagacgccctgccgttcgcgggcgaactcattcaggtgcgcgaggatgcgcgtgattgggagggcgccgccgagcgcgtcctgcgcaacttcggcctgtcgctgctcgtgcccgacgagcactatgcgagcgtcgcggcgtgggtcgatcgcactcatctccgggggaggctagtctactttcgcgtgcgctcggaacgcagcgcgcgtgcagccgaggccatcgagctgcaccgccactcgctcgcgcacaagctcgcgatcaagcccgactcgctgttctatggctggctcgagcgcgaaatcggccgccgtttcgactatgcctgctgcgatacgcaggagcagtttcggcgcgagacgcgcgcgatcacgcgtgcgggccaggcgaaagcgcctggggagcgccacgaaaaagacgaccgccacgcgctcgacgatcgcagccgctacgtgctcggttggagcaacacggcaaaaatatccgccctcgcagcacaacggcaagcgctcgaagctcgccttggcgagatcgggcaaaggctcggagaggtccaacatgagcacaccaaggtgcgtgagcaactcgaagcacttgcgcgtgccggcgagttcgccgagtttcgggaaatcgattggtcgagctgcgctgccgcgatcgcacgccttgccgacgaaaaagcgcgactcgaatcggcaagcgacgccctcgcggagctaacggctcaattggactcggcgcaagcgtcgttgaaagagagtgaagcggcgatgtcggaaaccgactcggaactgggcggcatcctggccaagcgggaggcggcacaagcgttgcgcgaagagacgcacgcgctcgttgcagaagtggatgccgaactcgccgaacgaatcgaggccctgcgagccgagattctcggcgaacaccagctttccgtcgagtcatgcgacaaccgcgagcgggacgtgcgagaagcgttgacaacccgtatcgacaacgaaacgaaatcactcggccgcctggccgaaagaatcgtcaaggcaatggcggctttcaaggaagcctacaagctcgaaacggccgacttcgatgcgagcctcgccgcgaactcggagtaccgtgacatgctcgcgcggctgcaggcggacgatttgccgcgcttcgaaacgcgtttcaaggagctgctcaacgtcaacacgatcaacgagatcgccaactttcacgcccagcttgcgcgcgaacgggcgacgatcaaggaacgcatcgaacgcatcaacgaatcgctgcgacaaatcgactacaacgcgggtcgttacatcgtcctcgagagtcagcccagccccgacgcggagatccgcgaattccagagcgacctgcgcgcttgcaccgagggcgaactcaccggctcggacgatagccaatactcggaggccaagttcctgcaagtcaaacggatcatcgaccgcttccgcggccgcgaagggttgaccgagcaggaccggcgctggcgagccaaagtgaccgacgtgcgcaactggtttctgttcgccgccagcgagcgttggcgcgaggacgacagcgaatacgagcactactcggactccggcggtaaatcgggcggccagaaggaaaagctcgcctatacgatccttgccgcgagcctcgcctatcagttcggcctcgaatggggcgccgtgcgttcccgatcgttccgcttcgtcgtcatcgacgaagcatttggccgaggctccgacgaatcggcgcagtacggtctcacgctgtttcagaaactgaacctgcaactgctgatcgtcacgccactgcagaagattcacatcatcgagccgttcgtttcgagtgtcggattcgttcagaacgacggtggacgcgcctccaagctgcgcaccctgtcgatcgaggagtaccgcgcgcacaaggcggagttcgagcaatga

SEQ ID NO: 49249 - DNA, 1185 bp, Burkholderia ubonensis
atgagttggacaactgccgtcgaactgcgtatccgcctccagcgcctatgggaacgcggcgaatggctgcgaagcctcgtagacggtgccgaggggctattcccgctacgtctggcgatcaaaggcccaagctcgtccgagttggctgaacgcttcgacacggtacgcgcatggattacggaaattgccgcgacgccgcacatacgcatcgaatggcgagaaatcaatcatcgaattctcggcgtgcagcgtttgccacgagcagcctgggtcgacagtctggacgatgcgctcactgtcgccggcaagcaacgcgacgcagcgcggttcgagcggctgcttgaaatcacacgctcgcgccagccgaagctcatcgcatggcttgcgcagcgcccgatgcaggccctcgaattggccggcgattgggaacgactgctggcagtcgtcgattggctgcaagcacatccgcagccgggcatctatcttcgccaagccgaaatcgccggagtcgacacgaaattcatcgaggcgcggcgcggcgtcctctcccaatggctcgatctcgtgctgccgtccgaggcgatcgacagcagtcggaccggcgccgcccaattcgccgctcgctacgggttccgcgataagccgcctcgtattcgatttcgcgtgctcgatgagcggctcgccgtcctgcccggcatgggccgacccgacatcacactcgacgccgacagcttcgcgcgcctcgcactgccgtgccgccatgttttcgttacggaaaacgaaacaaattttctggcgtttcccgacgttccgcaggcgatcgtgctcttcggagcgggctacggctgggaagctctggagccggcacaatggctcacggactgtgcgctccactactggggcgacatcgacacgcacggctttgccattctcgaccaattgcgttgccgattccctcacgcgggatccttcttgatggaccgcgcgacactgatagcgcatgaagcattctggggagacgaaggcgatcaggtcatgcgtgatctgccacgactcacggcgcaagagcgcgagctctttgacgacctgcgtgacaaccggattcgccgcggattacggctcgagcaggagcgcgtcgggttcgggtgggtcagagcggcgctagaggaacggtctttcgtttag

SEQ ID NO: 49250 - DNA, 1476 bp, Burkholderia ubonensis
ctgagcagccatggccggcatggcaccataccccggggcaaccattccatgagtcaacccgcgttcttcgaggctgagcgcaagcgtttcttccgacccctgaatagctcccgtagggagttcgttgtcgcttgcctccgtgccctgtatgagcgcctgcacgggccggcagctgactacgcgcacacgatgacgcgagattcgctgcgcgagctcctcatggcagtcgcgcgagataaccccgacagattgatcacagaagcagaagccgacgagttcagtatcgctgacgatgagcctctacaactgacaaacctcgtgatgaggacgctgcttaccgacggttggctcgagcagttcgccgaccgagaggggttggtcacggcgttccggttctcacgcccgggcaagctcttcgccgaggcgctgtggacgctggaccgcccgagccgaagccggcagcgaaacatgcgcggttgccgaaacgccttggaagcggccctgcagcctcgcggtgacgcccatgacctggtcgacgcttatgaatacgccgagaaggtcatcgaggacctgactgagggcatcgactatttccaggagcttgtgcgccacctaatgcaggccgcatcggcgcagcgccagtggggcgagttcgttgagttcctcgaccggttccagcgggagtactccaagcagttgaccgcggacaacgcgatgctaaaccggcaggccatccgtcaaaacttggacaggcttcgccaggtaaacgacgcgaagttcagccgaatggacgagcagcttcacgacattgcacactgggcagtgaaggagcacaccggtgcctcggtctatgagtggctcctcggccgcatagaggccattgtcgacgccgcctgtgagaccaagcagcccggctttctcaaggcgatggagacctacctgaagcgcatcaacgggttggcgatgcaatcgctgatgctgcgagcaggtcagacccgccatgcctatttgcaaggcattcagcgcgtggcgcaggctgaagacagggaggagcaggaccggcttctccggcactacggcgcttacctcaccgatgctgaggtccgtctgctcgacccggccagcttcaggctgcgcaccgcgacgcagcgccgcaaggccgtcaccgtgaccattcgaccgcgggctacgcgagaggaacgcctcgcagccgttctcgcacgcgcagaggcagaggctttctcactcccgaacgaacttgtggccgaaggcctccgcgcggacctgcgcatcttccggcatccggtgaggctctcagctcttccagccgaaagcgcggaagatgtgctcaaggctatgcaggctgtcgaagctgcgcgggccagtggtgatgacttcttggtgcgcaggctgcccacgcgcctggacaatccggcttattccggcagtgactacgaaatcgaactgaaaaaatga

SEQ ID NO: 49251 - DNA, 672 bp, Burkholderia ubonensis
atgaacttgtcctccgtcattcgcgaccaactggcgctgatcaacatgaagcaggaacgcttccgggagctgctcattcgacttttttcctacggcgtcatcgtccgcgacgaggaccgcaccgagcaggcgctgtacgacgacgctaggcgcatccaacaactgttagaagactacttcgatctcgccggcttcctgcttcaccacgacacgacgaatcagttttaccgtctctatgctccaggcgccgtggtcgacggactgccggaggacacgcttgagcctgtgccttcactgcgcgctcgcgtttcgaccgatttcgtcgccgcagccttggcgctgcgcttcctgtaccagaacaagctgaattcaggtgacatccagccccagggcgaagtgctcatcagcttcgaggatctagcggtggcgttgcaggctcaacttaagcgttcgttgccgaacggcgtcaccgagaagatgcagttgctggcagaattgcgcaagcatcggctgctgagttactcgacgaccttcagcatcgccgacgaagacgcgcttctggccatccggcccacgatcttgggcatcgtctccaatgatgcgatgaccgccgcgctcgatacggatggcattgtcgagcaggagacgatcgtcggggaggaggcggaatga

SEQ ID NO: 49252 - DNA, 705 bp, Burkholderia ubonensis
atgtccgaggtcgtggcccgcctgaacgaactgcaggtgttgaagcacgagcccttgtttcttcgcgaggtctcctcccggctgttctggggcatgtccaaggttctggataagcgccaggcgttggttgccgcgctactcgagctcgatgactgccctttcccggagtcgccggtgcagcttcaagtgttcctaccgccagaaggcttccgcggcgttctcttcatcgaaaacctgacaacctacgaccgggcgatgcggtctggtagcgctgccttcgaggggctggccttggcgttcgcatccggctttaagggtagcgctcagcggctgcgtacgcccgagggatgctcgctgtttttctctgatcaaggcggcaacacgcgcgatctgcgtgacggatttaagtcttggctcttcgggaaagaaacgcggccggcttacttttggggagacctggactgggctggtatgcgaatcctcgcagccatgagagccagtttctccgggctgactgcgtggcaaactggttatgcgcccatgttgcaggttcttcgagagggcaatgggcactcgccggaagcagccgagaagcaagggcaaaagattctcgcggaaaccggttgcgcgtacgccgatggccagctcgtgcctgcgctaagtgagacacgccgttttgtagaccaagaactattcatgccgtag

SEQ ID NO: 49253 - DNA, 1461 bp, Burkholderia ubonensis; identical to SEQ ID NO: 48915

SEQ ID NO: 49254 - DNA, 651 bp, Burkholderia ubonensis; identical to SEQ ID NO: 48916

SEQ ID NO: 49255 - DNA, 3372 bp, Burkholderia ubonensis; identical to SEQ ID NO: 49244

SEQ ID NO: 49256 - DNA, 1185 bp, Burkholderia ubonensis; identical to SEQ ID NO: 49245

SEQ ID NO: 49257 - DNA, 1467 bp, Burkholderia stagnalis; identical to SEQ ID NO: 49031

SEQ ID NO: 49258 - DNA, 654 bp, Burkholderia stagnalis; identical to SEQ ID NO: 49032

SEQ ID NO: 49259 - DNA, 3372 bp, Burkholderia stagnalis; identical to SEQ ID NO: 49033

SEQ ID NO: 49260 - DNA, 1185 bp, Burkholderia stagnalis; identical to SEQ ID NO: 49034

SEQ ID NO: 49261 - DNA, 1467 bp, Burkholderia stagnalis; identical to SEQ ID NO: 49031

SEQ ID NO: 49262 - DNA, 654 bp, Burkholderia stagnalis; identical to SEQ ID NO: 49032

SEQ ID NO: 49263 - DNA, 3372 bp, Burkholderia stagnalis; identical to SEQ ID NO: 49033

SEQ ID NO: 49264 - DNA, 1185 bp, Burkholderia stagnalis; identical to SEQ ID NO: 49034

SEQ ID NO: 49265 - DNA, 1461 bp, Burkholderia ubonensis
atgttcctcgactaccctaccctcgacgcgctgcgcacgcgccatcccgcttggcgacttttgcgctccgaccacgcgccgctcgccgtcagcttcctgcaccgcgcgttcgtcgcgccgaacgtgcgcgaggtggcggctccgtttcttgccgaagcactcgaggacgagctttacgcgttgcgcgaacaactcggcgacggcgccttcccgaagcccgcgctcgactatctgaacgactgggcgagtcctgaaaagggatggttgcgcaagttctatcgccaaggctccgatgaaccgcatttcgacctgacacccgccgcaggaaaagcgatcgcgtggctcggcacgctgatggaacgaagctttgtcggcacggaatcccggctcctgacgcttttcgagttgctgcggcagatggccgaaggcagcgagacggacccggaaaggcgtcttgccgagctccacgcgcggcgcagccagattgacgaagaaatcgctcgcgtggaggccggtgacgttcggctgctcgacgatgccgcgatcaaggaccgctttcagcaattcatgcagatggcgcgcgacctgctcacggatttccgtgaagtcgagcaaaacttccgtctgctggaccggcacgtacgcgagcgaatcgcgctctgggaaggatcgaagggtgcgctcatcgaagaaatcatgggcgagcgcgacgcgatcgccgattcggaccagggcagcagctttcgggcgttctgggatttcctgatgtcgagccgccgccaggaggaactctccgaacggctcgagcacgtgcttgcgctcccggcgatcacggaaatgaagccggacgcgcgcacgcggcgcgtccactatgactggctggaagccggcgagcacacgcaacgcacggtcgctcagctctcgcagcagcttcgacgtttcctcgacgatcaagcgtggctcgaaaaccgccgcatcatggacattctgcgcggtatcgaaacgaaagcgcttgtgctgcgtgaagcgcccccgccgggctccgtcatggagatcgagaccgcgtccgctgacatcgagctgccaattgaacgcccgctttacgcccctgcgctgcgccctctcatcgccaacgtcgcaatcgagaccggcgatgcggacctcgatgcgtcggcactctacacgcagatcgtcgtcgatcgcgcgcgcctcgcaagccacatccgccgctgccttcaagatcggctgcaagtgacacttgccgaactggccgcttcgcagccgctcctgcatgggctcgctgaactcgtcgcctatttgcaactgagcgccgaagccggaacatttcgcgcgaccgtcgatgagaccgtctccgatacgatcgagtggcaggcaaacgatgccaacggagcagcaatcgtcaagcgcgcaacgatgccgcgggtgattttcacaaggtag

SEQ ID NO: 49266 - DNA, 651 bp, Burkholderia ubonensis; identical to SEQ ID NO: 49048

SEQ ID NO: 49267 - DNA, 3372 bp, Burkholderia ubonensis
atgaatgagccgcgcacgctcggcctcgattttgccgcggacgacaccctgacgggctttcgcctcgagcggctcgaggttttcaactggggcaccttcgacgaacgggtctgggtgctgcgggtcgacggccgcaacggcctgctgacaggagacatcggttccggcaagtcgacgctcgtcgacgccatcaccaccctcctcgtgcccgcgcagcgcatcgcctacaacaaggcggcaggcgcggacagcaaggaacgtacgctgcgctcgtatgtgctcggctactacaagtcggagcgcaacgaggtcacgggagcggccaagcccgtgagcctgcgcgaccacaacagctattcggtgattttgggcgtgtttcgcaacgccgggtacgacgccaccatcacgctcgcgcaagtgttctggatgaaggacgcgcaggctcaacctgcgcgattcttcgtcagtgccgaacgagatctctcgatcgcgaccgacttctcgcgcttcggcaccgacattgcgcagctgcgcaagaagctgcgcgggctgggcgccgaaatcgaggacacgtttccgaaatacagcgcctggttccggcggcgcttcggaatcgaaaacgagcaagcgctcgagctatttcatcaaacggtatcgatgaagtcggtgggcaatctcaccgacttcgtacgcagccacatgctcgagccgttcgacgtcgcaccgcgcgtcgacgccctgattgctcacttcgacgatctgaatcgcgcgcacgaggcggtactgaaaaccaagcgccaagtggaactgctgacaccgctcgtcgacgactgcgaccgccacagcgagcaagcacacgttctcgaaggctggcgcgcgtgccgtgaagcattgaggccctacttcgccgggctcaagctcggcctcgtcgaacgccgcctccaattgctcgaagaggatcatgcgcgcgcgacctcgcgaagggcgcggcacgaagaagcgcgcgaccaggcgcgccagcgcgtggacgatttgcgccgtgccgtggccgaacaaggcggcgatcgcatcgcgcagctcgatgtcgagatccgcgagcacgagcgagaaagcgtgcgtcgccgcgaacgcgcgcaacgctatgccgccatcgttacgctgttcggcgaaaccgaggctgcggatgaggctgcattcgcctcccagcgccaacgcctggccgagcagcgcagctcgctcgtcgacgacgaagcgcaacagcaaaatgcgataaccgaatggagcgtggcatttcgcgaaggaaaagcgcggcgtgatttgctggaggacgaaatcgcgagcctgaaagcccgacgcaacaacatcccgaaggaacaggtcgcgatgcgggcgagcctgtgctcggcgctcggcctggaggaagacgccctgccgttcgcgggcgaactcattcaggtgcgcgaggatgcgcgtgattgggagggcgccgccgagcgcgtcctgcgcaacttcggcctgtcgctgctcgtgcccgacgagcactatgcgaacgtcgcggcgtgggtcgatcgcactcatcttcgggggcggctcgtctactttcgcgtgcgctccgaacgcaccgcgcgtgcagccgaggccatcgagctgcaccgccactcgctcgcgcacaagctcgccatcaagcccgactcgcagttctatggctggctcgagcgcgaaatcggccgccgtttcgactatgcctgctgcgatacgcaggagcagtttcggcgcgagacgcgcgcgatcacacgtgcgggccaggcgaaagcgcctggggagcgccacgaaaaagacgaccgccacgcgctcgacgatcgcagccgctacgtgctcggctggagcaacacggcaaaaatatccgctctcgcagcacaacggcaagcgctcgaagctcgccttggcgagatcgggcaaaggctcggagaggcccaacacgagcacaccaaggtgcgtgagcaactcgaagcacttgcgcgtgccggcgagttcgccgagtttcgggaaatcgattggtcgagctgcgctgccgcgatcgcacgtcttgcggacgaaaaggcgcgactcgaatcggcaagcgacgccctcgcggagctaacggctcaattggactcggcgcaagcgtcgttgaaagagagtgaagcggcgatgtcggaaaccgactcggaactgggcggcatcctggccaagcgggaggcggcacaagcgttgcgcgaagagacgcacgcgctcgttgcagaagtggatgccgaactcgccgaacgaatcgaggccctgcgagccgagattctcggcgaacaccagctttccgtcgagtcatgcgacaaccgcgagcgggacgtgcgagaagcgttgacaacccgtatcgacaacgaaacgaaatcactcggccgcctggccgaaagaatcgtcaaggcaatggcggctttcaaggaagcctacaagctcgaaacggccgacttcgatgcgagcctcgccgcgaactcagagtaccgtgacatgctcgcgcggctgcaggcggacgatttgccgcgcttcgaaacgcgtttcaaggagctgctcaacgtcaacacgatcaacgagatcgccaactttcacgcccagcttgcgcgcgaacgggcgacgatcaaggaacgcatcgaacgcatcaacgaatcgctgcgacaaatcgactacaacgcgggtcgttacatcgtcctcgagagtcagcccagccccgacgcggagatccgcgaattccagagcgacctgcgcgcttgcaccgagggcgaactcaccggctcggacgatagccaatactcggaggccaagttcctgcaagtcaaacggatcatcgaccgcttccgcggccgcgaagggttgaccgagcaggaccggcgctggcgagccaaagtgaccgacgtgcgcaactggtttctgttcgccgccagcgagcgttggcgcgaggacgacagcgaatacgagcactactcggactccggcggtaaatcgggcggccagaaggaaaagctcgcctatacgatccttgccgcgagcctcgcctatcagttcggcctcgaatggggcgccgtgcgttcccggtcgttccgcttcgtcgtcatcgacgaggcgtttggccgaggctccgacgaatcggcacagtacggtctcactttgtttcagaaactgaacctgcaactgctgatcgtcacgccactgcagaagattcacatcatcgagccgttcgtttcgagcgtcggattcgttcagaacgacggtggacgcgcctccaagctgcgcaccctgtcgatcgaggagtaccgcgcgcacaaggcggagttcgagcaatga

SEQ ID NO: 49268 - DNA, 1185 bp, Burkholderia ubonensis
atgagttggacaactgccgtcgaactgcgtatccgcctccagcgcctatgggaacgcggcgaatggctgcgaagcctcgtagacggtgccgaggggctattcccgctacgtctggcgatcaaaggcccaagctcgtccgagttggctgaacgcttcgacacggtacgcgcatggattacggaaattgccgcgacgccgcgcatacgcatcgaatggcgagaaatcaatcatcgaattctcggccagcagcgtttgccacgagcagcttgggtcgacagtctggacgatgcgctcactgtcgccggcaagcaacgcgacgcagcgcggttcgagcggctgcttgaaatcacacgctcgcgccagccgaagctcatcgcatggcttgcgcagcgcccgatgcaggccctcgaattggccggcgattgggaacgactgctggcagtcgtcgattggctgcaagcacatccgcagccgggcatctatcttcgccaagccgaaatcgccggcgtcgacacgaaattcatcgaggcgcggcgcggcgtcctctcccaatggctcgatctcgtgctgccgtccgaggcgatcgacagcagccggaccggcgccgcccaattcgccgctcgctacgggttccgcgataagccgcctcgtattcgatttcgcgtgctcgatgagcggctcgccgtcctgcccggcatgggccgacccgacatcacactcgacgccgacagcttcgcgcgcctcgcactgccgtgccgccatgttttcgttacggaaaacgaaacaaattttctggcgtttcccgacgttccgcaggcgatcgtgctcttcggagcgggctacggctgggaagctctggagccggcacaatggctcgcggactgtgcgctccactactggggcgacatcgacacgcacggctttgccattctcgaccaattgcgttgccgattccctcacgcgggatccttcttgatggaccgcgcgacactgatggcgcatgaagcattctggggagacgaaggcgatcaggtcatgcgtgatctgccgcgactcacggcgcaagagcgcgagctctttgacgacctgcgtgacaaccggattcgccgaggattacggctcgagcaggagcgcgtcgggttcgggtgggtcagagcggcgctagaggaacgagcgctcgtttag

SEQ ID NO: 49269 - DNA, 1461 bp, Burkholderia ubonensis; identical to SEQ ID NO: 49265

SEQ ID NO: 49270 - DNA, 651 bp, Burkholderia ubonensis; identical to SEQ ID NO: 49048

SEQ ID NO: 49271 - DNA, 3372 bp, Burkholderia ubonensis; identical to SEQ ID NO: 49267

SEQ ID NO: 49272 - DNA, 1185 bp, Burkholderia ubonensis; identical to SEQ ID NO: 49268

SEQ ID NO: 49273 - DNA, 1461 bp, Burkholderia ubonensis; identical to SEQ ID NO: 48995

SEQ ID NO: 49274 - DNA, 651 bp, Burkholderia ubonensis; identical to SEQ ID NO: 48968

SEQ ID NO: 49275 - DNA, 3372 bp, Burkholderia ubonensis; identical to SEQ ID NO: 49093

SEQ ID NO: 49276 - DNA, 1200 bp, Burkholderia ubonensis; identical to SEQ ID NO: 48974

SEQ ID NO: 49277 - DNA, 1461 bp, Burkholderia ubonensis; identical to SEQ ID NO: 48995

SEQ ID NO: 49278 - DNA, 651 bp, Burkholderia ubonensis; identical to SEQ ID NO: 48968

SEQ ID NO: 49279 - DNA, 3372 bp, Burkholderia ubonensis; identical to SEQ ID NO: 49093

SEQ ID NO: 49280 - DNA, 1200 bp, Burkholderia ubonensis; identical to SEQ ID NO: 48974

SEQ ID NO: 49281 - DNA, 1461 bp, Burkholderia ubonensis
atgttcctcgactaccctaccctcgatgcgctgcgcacgcgccatcccgcttggcgacttttgcgctccgaccacgcgccgctcgccgtcagcttcctgcaccgcgcgttcgtcgcgccgaacgtgcgcgaggtggcggctccgtttcttgccgaagcactggaggacgagctttacgcgttgcgcgaacaactcggcgacggcgccttcccgaagcccgcgctcgactatctgaacgactgggcgagtcctgaaaagggatggttgcgcaagttctatcgccaaggctccgatgaaccgcatttcgacctgacacccgccgcaggaaaagcgatcgcgtggctcggcacgctgatggaacgaagctttgtcggcacggaatcccggctcctgacgcttttcgagttgctgcggcagatggccgaaggcagcgagacggacccggaaaggcgtcttgccgagctccacgcgcggcgcagccagattgacgaagaaatcgctcgcgtggaggccggtgacgttcggctgctcgacgatgccgcgatcaaggaccgctttcagcaattcatgcagatggcgcgcgacctgctcacggatttccgtgaagtcgagcaaaacttccgtctgctggaccggcacgtacgcgagcgaatcgcgctctgggaaggatcgaagggtgcgctcatcgaagaaatcatgggcgagcgcgacgcgatcgccgattcggaccagggcagcagctttcgggcgttctgggatttcctgatgtcgagccgccgccaggaggaactctccgaacggctcgagcacgtgcttgcgctcccggcgatcacggaaatgaagccggacgcgcgcacgcggcgcgtccactatgactggctggaagccggcgagcacacgcaacgcacggtcgctcagctctcgcagcagcttcgacgtttcctcgacgatcaagcgtggctcgaaaaccgccgcatcatggacattctgcgcggtatcgaaacgaaagcgcttgtgctgcgtgaagcgcccccgccgggctccgtcatggagatcgagaccgcgtccgctgacatcgagctgccaattgaacgcccgctttacgcgccggcgctgcgccctctcatcgccaacgtcgcaatcgagaccggcgatgcggacctcgatgcgtcggcactctacacgcagatcgtcgtcgatcgcgcgcgcctcgcaagccacatccgccgctgccttcaagatcggcggcaagtgacacttgccgaactggccgcttcgcagccgctcctgcatgggctcgctgaactcgtcgcctatttgcaactgagcgccgaagccggaacatttcgcgcgaccgtcgatgagaccgtctccgatacgatcgagtggcaggcaaacgatgccaacggagcagcaatcgtcaagcgcgcaacgatgccgcgggtgattttcacaaggtag

SEQ ID NO: 49282 - DNA, 651 bp, Burkholderia ubonensis; identical to SEQ ID NO: 49159

SEQ ID NO: 49283 - DNA, 3372 bp, Burkholderia ubonensis; identical to SEQ ID NO: 49160

SEQ ID NO: 49284 - DNA, 1185 bp, Burkholderia ubonensis; identical to SEQ ID NO: 49161

SEQ ID NO: 49285 - DNA, 1461 bp, Burkholderia ubonensis; identical to SEQ ID NO: 49194

SEQ ID NO: 49286 - DNA, 651 bp, Burkholderia ubonensis; identical to SEQ ID NO: 49195

SEQ ID NO: 49287 - DNA, 3372 bp, Burkholderia ubonensis; identical to SEQ ID NO: 49196

SEQ ID NO: 49288 - DNA, 1185 bp, Burkholderia ubonensis; identical to SEQ ID NO: 49197

SEQ ID NO: 49289 - DNA, 1419 bp, Burkholderia cepacia
gtgttctttgaggctgagcgtcagcggttcttccgtcccctgaacagttcccgccgggagctcgtggctgcttgcctgcgtgcactctatgaccgactgcacggccctatggccgactatgcccacaacctcacgcgggacgcgctgcgcgagctcctgttgccagtcgttcggcagtaccaaagcgtcaaggcgcaagagggtggcgacgatgagctgagcggtgcggaagccgatgacccgcaggcgctcgtcggcatggtcatccgggcactgctgaccgacgcttggctggagcagttcgccgaccgcaccggcctcgtcacggccttccgattctctcggccagggaagctgttcgcggaggccctctggtcgttggaccgcccgagccgcagtcggcaacggaacatgcggggttgtcgcaatgcactgcaggcggcgctgtccgaccgaggtgacgcgcacgacctagtcgacgcttacgagtacgcggagaaagtcatcgaggacttgaccgatggcatcgactatttccaggagctggtccggcacctgatgcagaccgcctcggtgcagacgcaatggagcgagttcgtcgagttcctggaccgcttccagcgtgactattccaagcagctcactgccgataacgcaacgcttaaccggcaggccatcgtgcagaagctggagcggcttcgcctcgtcccagaggccaagttcaagcggatggacgagcaactgcgagaagtcgcccattgggccgtgaaagaacacgtgggcacgtccgtctatgactggctcctgacccgcatcgaagacatcgttgatgctgcgtgccagtcgaagcagcctggcttcctgaaggccatggagacttacctcaagcgggtcaatggcttggcgctgcagtcgatgatgctgcgggcaggccagacccgacatgcctacctcgctgcgattcagcaggtcgccgaggcccccaaggaacaacaggacctgctgctcgcgcacatcgggcagttcctggcgccggcggaggtgcggttgctggacccggcaagcttcaggctccggacggccgcccagcgccgcaaggcggtcaccatttccgttcggccgcgcccctctcgcgaagagcgtctggccgcagccatggcccgcgccgaggcggaggccttctcaatccccaacgaagaggttgccgagctgcttcgacgcgacctgcgcatctttcagcatcccattcgcgtctcagcgctcccaacagccacagcccgcgacacgctccgtgccatgcaggccgtcgaggcggttcgaagcgaggttggcgcggacctgtccatcaagaagctgcccacccgcttggagaacgagctctacagcggcaacgactacgagattgacctcaaaaaatga

SEQ ID NO: 49290 - DNA, 672 bp, Burkholderia cepacia
atgagcctcctgtcgcacattaacgaacaactcgcgcttgccaacatcaagccagaccggttccgggaaatcatcaaccgcctgatggcccacggcgccatcgtacgagaggaagaccgggttgagcagctgctgtatgacgacgcaaggcgcgtcgagggcctgctggaaggctacttcgacatcgctggcttccgtttgcaccacgacagcaataaccagttctaccgcctctacgtggcgggcgccgtagtcgatgggctgcgtgaggacaccctggagccgacgccatcgctgcgggctcgggtgtctcccgacttcgttgcgatggcccttgctctgcgcttcctgtaccagaacaagctcaacacgggcgacatccagccgcagggcgaagcgctggtgagcttcgaggaaatcgcggccaccatgcagacgcaattgaagcgtccgctgccgaatagcatgggcgacaagatagccttgctggccgagttgaagcggcatcgcctgctcagctacacggccgagttttcgatttccgatgaagacgcgctgctcgcaatccggccaaccatcctgggcatcgtgtccaacgacgcgctgagtgcggccctcgaggcggaaggcgtggttgaccaggagacgtctgccgaggagaccgaccaatga

SEQ ID NO: 49291 - DNA, 3633 bp, Burkholderia cepacia
atgaaacttgaccgcttggtgcttgtaaactggggccaaatgcagccaggcaactacgagctgggcaacatgacgctactcactggcccaacgggggcgggaaagtcgacgatgcttgacggtctccagaccatcatgacggcggcctaccaaggcatcgtggcttacaaccccggccaggaggaagtccagcaaaaccagcgccgaggcaagtccaggcgcacccttgagtcgttcgtggtcggcgccgagtacagccgcttctctcggccggcaggtgctcagggctacctcgcggcggtctttcgcccagggcccgaggacggctcggccaagatgtttactgcgctcgtagcagcctcggcgcgcgtggacggctcaggagagcggcgagacgcgaagctggagcgtctcgttctggtcatcgtcgaagatgctgcgctgtcggtcgaacagttctttgagaacatcgaccaaggtatctgtgtgccggtcgaagacatcgtcaagcgactgaaggccaagtacccaaaggtcatcgtctacgacgaccacaagcgggactacctcagcggcctctacggccggtttcgcgggcgcgtgtccattccctgggacgaggctcagaacgccgctcgggcatggtcgcagtcgattgcctacaagcctatcggctcggttcacgacctggttcgggacgacatcctcgagttcgatggaaagctgctgcaggagagcatcacccgcatcagtgacctgatgcgccaggtaacgaccttgaaggttgaaggcaagcgcattgaagcgactgtcattcgacttcgcgagctgaaggaggccatcggtaagacgaccgccaccttcgaagagcaggtccaacatgatttgctcttggcgaagatgcagctgtccgtggacgaagagcgcatcgcttcagagcggaagaaaatcaaggacgacagcgcgctggtcgaccaacacgagctcaaggccaagaccgaagcacagttgaagcgcaacgttgatagcagccgcattaatatcgcagcgaagttgagcggcattcccgcccacaccgagaagaaaacgcttgacgagcgccttgagcgagcgacgtcggccgcgcgcggcaagctcgctgagctgcatgcaggtcttctcgccgcggctcacatcaagaataccggcgacgccatcgtcaagcgaccggtgccggaacagttcccgaagctgcgcgcctctgtagatggtgtgtccaaggcccttgtgtccaccaatgtggaccggctggccgggctgctcaattccgtggggaatgcaaacagtgatgacgtcctgtcaatagagaagctgcttcagctggcccctgcatttgacggcatcgacgccggtctgagccagctgcacaactcgttggttggcaccgagggtagtgtgcttatggctgttgccgccgaatcggaatcgctcggccagcgcgtcgaggctgctaagaaggagcgcggcgagctggctgaccgcaagcaacgacttgcggccggtgcgggcaactacaaccgagacaccgtcctagcgcttgagcgcattcgagagcggctacccgacgcgggtgtccaggtgttgtgcgatctcgtcgagccagcgtctgaggagtggcaaggcgccatcgagggctacatggacggcgcacgcttcaacctcatcgtcaagccggattgggaagcccgcacgattgacttcctgcaatcctgggggtcgcgctcgaaggtcgttcaaggcaagcgatgcttggagcgtgccgaccagtctcgtgtgccgggcacttccatcattcacgagttgcgcactgaccaccctatcgcgcgggcctacctcatcgagcagttcgggtctgtcgtgaaggtggcagactcagaggaactgcggcggaccccgcgcggcctcaccaaggatggcaagggtagcggcgcgatgacgatgttcatctgcgaacgacgtgacttcgtgctcggtcgcaaggctcgcgagcgggcgttgcagcgcaccacagaaatgctagaggctgccgacaaggacatcagtgagctgaagagctctcaaggcgccttggatggtttccggacgttgctgacgacactgaaggagccgacgttcgacgcccagccgttggcccagcacgccggcgacatcgacgccacacgtcggacgctgtcacagctcgatttgaccgaagtcgaacagttgagggcagagctggctcgactggaagaactcatccgagcgcacgacttggcaattgaatcggccaagagggtggtcacgctcgcggagcagcgcatcaaaaccgcagaagatgtcatcgaacgcatcgacgggggccgggatgctcggctccaggagcgtgaaaaccagattcggcggctgaagcacctctgcgaagcaaactcagagaagacgtacacggtaatggcccaggaggtcgacgacctcatcgcctcgcagacgtacgaagtgcccgccgtccagacgcggctaagtcacctgcgcgctcaacccgagaaactcctgggggacgtgcgcgagatgctggcggagtacaacgctgctgttcgtaccgacgaacgctttcagtctgcgctgccgcacctgacggatgcgccgtccttcgacccctactacagccccctggtgctgctcgggcgctcggtcagcatgcttcacaacgaactcgagagcatcggcctgtacaacaaccgcgccaaagtcgaggaggcagaacgctcctttcacgacgtcttcaccaagcagttttgcgttgaaatcaagagcaaggtcgacgaaggcgtgcggatgctgcgccagttgaacatcgagctcgagaagctgaagttcggtaccgaccgcttcaacatcgactggtcgaagtgggagcccgagttccaggagtattacggcttcttctccgccgtcgcggaactggccgattctccggacgcggtggacctgtttggtgagacggagctttcgcctaagcacatcgaggtccgtgaccgcctggtcaagctgctcctggaccaagaccagggcagggcagggcgcgagctgctgcgcatcgctgactaccgcaactaccgacgctacgaaatctggaatgactcggacagcggcggccgcatcgccctgtcgacgtggggcacaggctcgggtggtcagttggagacacctgcgtacatcgtgcgcgccgccgttgtgaccaaccgcttgcgcctcttcgagaagggcgctagcttgaagttgcttgttagcgacgagtctttctctcgcatggacgagccgcgtgcacgtgccgtcctgcggtatctgcgagacagcatgggcctgcagctggtcagcgccatgccgaccaagcacgccggcgcgctgcgccctgagttcgaccgcgaattcagcttcagccggatgaatgtgccagacaacggcgaaattgacttcgtctccgagtgcgacgagcggatctttaagaaggaccgcatgcgtgaggtctgggaagcgcagcgtcaagaggttcgcgaacaagccgagttgctctttaatgcggcagagcccgaagaggtcacgggagctgcgaagtga

SEQ ID NO: 49292 - DNA, 705 bp, Burkholderia cepacia
atggccgaggttgtcgaacggctgaacgagctcccagcgcttgccggcaagcccatgctgctccgagaaatctcctctcagctattctggggcatgtcgaaggttttggacaaaaggcaaggactcgtcgccgcagtattgggtgttgatgaatgcccgtttccggagtctccgattcagctgcaggtgtttctgccgcctgcgggctgccggggcgtgctgttcatcgaaaacctcatgagcttcgaacgcgccattcgctcgacgagctcggcgttcgatgggctggcactggtctacgcgtcaggcttcaagggaagtgctcagcggctgcgcacgccggatggttgctctctcttctacgcggcgcgtggcggcatcagcgaaaaccttcgagatggcttcgaggcctggctctttggcaaggaagtcattccggttttcttctggggggacctggattggtctggcatgcgcatcctgtccgctatgcgcacaagtttcctcggcctcacggcttgggaaccaggctactgccagatgctggccgttctcatagaaggcaacgggcactcaccggaagccgccgacaaacaaggacagaaggcgctagacacctccggttgtgcctacgcggacgcccacctgatacccgcgctgcagtcctacggacggtttgttgaccaggagcaaatcaacccgtag

SEQ ID NO: 49293 - DNA, 1461 bp, Burkholderia ubonensis
atgttcctcgactaccctaccctcgatgcgctgcgcacgcgccatcccgcttggcgacttttgcgctccgaccacgcgccgctcgctgtcagcttcctgcaccgcgcgttcgtcgcgccgaacgtgcgcgaggtggcggctccgtttcttgccgaagcactcgaggacgagctttacgcgttgcgcgaacaactcggtgacggcgccttcccgaagccagcgctcgagtatctgaacgactgggcgagtcctgaaaagggatggttgcgcaagttctatcgccaaggctccgatgaaccgcatttcgacctgacacccgccgcaggaaaagcgatcgcgtggctcggcacgctgatggaacgaagctttgtcggcacggaatcccggctcctgacacttttcgagctgctgcggcagatggccgaaggcagcgagacggacccggaaaggcgtcttgccgatctccacgcgcggcgcagccagatcgacgaagaaatcgctcgcgtggaagccggcgacgtccggctgctcgacgatgccgcgatcaaggaccgctttcagcaattcatgcagatggcgcgcgacctgctcacggatttccgtgaagtcgagcaaaacttccgtctgctggaccggcatgtacgcgagcgaatcgcgctctgggaaggatcgaagggtgcgctcatcgaagaaatcatgggcgagcgcgacgcgatcgccgattcggaccagggcagcacctttcgggcgttctgggacttcctgatgtcgagccgccgtcaggaggaactctcggaacggctcgagcacgtgcttgcgctcccggcgatcacggaaatgaagccggacgcgcgcacgcggcgcgtccactatgactggctggaagccggcgagcatacgcaacgcacggtcgctcagctctcgcagcagcttcgacgcttcctcgacgatcaagcgtggctcgaaaaccgccgcatcatggacattctgcgcggtatcgaatcgaaagcgcttgcgctgcgtgaagcgcccccgccgggctccgtcatggagatcgagaccgcgtccgccgacatcgagctgccaattgaacgcccgctttacgcgccggcgctgcgccctctcatcgccaacgtcgcaatcgagaccggcgatgcggacctcgatgcgtcggcactctacacgcagatcgtcgtcgatcgcgcgcgcctcgccagccacatccgccgctgccttcaagatcggccgcaagtgacgcttgccgaactggccgcctcgcagccgctcgtgcatgggctcgccgagctcgttgcctatctgcagctgagcaccgaagccggatcatttcgcgcgaccgtcgacgagaccgtctccgatacgatcgagtggcaggcgaacgacgcaaacggcacaacaatcgtcaagcgcgcgacgatgccgcgtgtgattttcacaaggtag

SEQ ID NO: 49294 - DNA, 651 bp, Burkholderia ubonensis
atggaagaacagcaaacctggtcgcttggtcgggacgatttgtcggcggttgccatcgcgctgttcaagggcgtggtgtatcgcgatgggaacgagcgcctctgggccgcgctgctcgaattgcagacacacgtgcgcgactacgtcgccgtgcttggcctcgagctcgtcgcggacgaggcggaaggctacgccttcgtaaagagccgcaccgagcctgacgcagaagtcaacgcagaccaggccaagctgccccggcttgttgcgcggcgtccactctcgttccccgtgagcctgctgctcgccctgctgcgaaagaagctggcggaatgggatgctggcggcggcgacacgcggctcgtcctttcgcgcgaggacatcgtcgagctcgtacgcgtcttccttccctcgagcacgaacgaggcgcgcctcgtcgatcagatcgatacgcacgtgaacaagatcgtcgacctcggtttcctgcgccggatgaagaccgcgagcggaccgccgacgttcgaggtgcgacgcattctcaaggcgttcgtcgatgcgcaatggctgctcgatttcgacgcgcggctcgcaagctatcaggcgcaccttcgagattcgacgaattcggaccaaacggagagtcgcgatgaatga

SEQ ID NO: 49295 - DNA, 3372 bp, Burkholderia ubonensis
atgaatgagccgcgcacgctcggcctcgattttgccgcggacgacacccggacgggctttcgcctcgagcggctcgaggttttcaactggggcaccttcgacgaacgggtctgggtgctgcgggtcgatggccgcaacggcctgctgacaggagacatcggttccggcaagtcgacgctcgtcgacgccattaccaccctcctcgtgcccgcgcagcgcatcgcctacaacaaggcggcaggcgcggacagcaaggaacgtacgctgcgctcgtatgtgctcggctactacaagtcggagcgcaacgaggtcacgggagcagccaagcccgtgagcctgcgcgaccataatcattattcggtgattttgggtgtgtttcgcaacgccgggtacgacgccaccgtcacgctcgcgcaagtgttctggatgaaagacgcgcaggctcaacctgcgcgattcttcgtcagtgccgaacgagatctctcgatcgcgaccgacttctcgcgcttcggcaccgacattgcgcagctgcgcaagaagctgcgcgggctgggcgccgaaatcgaggacacgtttccgaaatacagcgcctggttccggcggcgcttcggaatcgaaaacgagcaagcgctcgagctctttcatcaaacggtatcgatgaagtcggtgggcaatctcaccgacttcgtacgcagccacatgctcgagccgttcgacgtcgcaccgcgcgtcgacgccctgattgctcatttcgacgatctgaatcgcgcgcacgaggcggtactgaaaaccaagcgccaagtggaattgctgacaccgctcgtcgacgactgcgaccgccacagcgagcaaggacacgttctcgaaggctggcgcacgtgccgtgaagcattgaggccctacttcgccgggctcaagctcggcctcgtcgagcgccgcctccaattgctcgatgaggatcgtgcgcgcgcgacttcgcgaaaggcgcggcacgaagaagcgcgcgaccaggcgcgccagcgcgtggacgatttgcgccgtgccgtggccgaacaaggcggcgatcgcatcgcacagctcgaggtcgaaatccgcgagcacgagcgagaaggcacccgtcgccgcgaccgcgcgcaacgctatgccgccatcgttacgctgttcggcgaaaccgaggccacggacgaggctgcattcgcgtcccagcgccaacgcctggccgagcagcgcagctcgctcgttgacgatgaagcgcagcagcagaatgcgataaccgaatggagcgtggcatttcgcgaagggaaagcgcggcgcgacctgctggaggacgaaatcgcgagcctgaaagctcgacgcaacaacatcccgaaggaacaggtcgcgatgcgggcgagcctgtgctcggcgctcggcctggaggaagacgccctgccgttcgcgggtgaactcattcaggtgcgcgaggatgcgcgtgattgggaaggcgccgccgagcgcgtcctgcgcaacttcggcctgtcgctgctcgtgcccgacgagcactatgcgagcgtcgcgacgtgggtcgatcgcactcatctccgggggcggctcgtctactttcgcgtgcgctctgaacgcgccgcgcgcgtcgccgagtccatcgagctgcaccgccactcgctcgcgcacaagctcgcgatcaagcccgactcgctgttctacggctggctcgagcgcgaaatcggccgccgtttcgactatgcctgctgcgatacgcaggagcagtttcggcgcgagacgcgcgcgatcacgtgcgcgggccagacgaaagcgcctggggagcgccacgaaaaagacgaccgtcacgcgctcgacgatcgcagccgctacgtgctcggctggagcaacacggcgaaaatatccgtcctcgaagcacaacggcgagcgctcgaagccaggcttggcgagatcgggcaaaggctcggagaagcccaacacgagcacgccaggacgcgtgagcaactcgaagcacttgcgcgtgctggcgagttcgcagagtttcgagagatcgattggtcgagctgcgctgccgcgatcgcacgtcttacggacgaaaaggtgcgacttgaatcggcaagcgacgccctcgcggagctgacggctcaattggactcggcgcaagcgcggttgaaagagaatgaggcggcgatctcggaaaccgattcggaactgggcggcatcctggccaagcaggaggcagcgcaagcgttgcgcaacgagacgcacgcgctcattgcagaagtggatgccgaacttgccgaacgaatcgaggccctgcgcgcggatatcctcggcgaacaccagctttccgtcgagtcgtgcgacaaccgcgagcgggacgtgcgagaggcattgacaacccgtatcgacaacgaaacgaagtcgctcggccgccttgccgaaagaatcgtcaaggccatgacggctttcaaggaagcctacaagctcgaaacggccgacttcgatgcgagcctcgacgcgaactcggagtaccgtgacatgctcgcgcggctgcaagcggacgacttgccacgcttcgagacgcgtttcaaggagttgctcaacgtcaatacgatcaacgagatcgccaacttccacgcccagctcgcgcgcgaacgggcgacgatcaaggaacgcatcgaacgcatcaacgaatcgttgcgacagatcgactacaacgcgggccgatacatcgtcctcgagagtcagcccagccccgacgcggagatccgcgaattccagagcgacctgcgcgcttgcaccgagggcgaactcaccggctcggacgatagccaatactcggaggccaagttcctgcaagtcaaacggatcattgaccgcttccgcggccgcgaagggttgaccgagcaggaccggcgctggcgcgccaaggtgaccgacgtgcgcaactggtttctgttcgccgccagcgagcgttggcgcgaagacgacagcgaatacgagcactactcggactccggcggtaaatcgggcggccagaaggaaaagctcgcctacacgatccttgccgcgagcctcgcctaccagttcggcctcgaatggggcgccgtgcgttctcgatcgttccgcttcgtcgtcatcgacgaagcatttggccgaggctccgacgaatcggcgcagtacggtctcacgctgtttcagaaactgaacctgcaactgctgatcgtcacgccgctgcagaagattcacatcatcgagccgttcgtttcgagtgtcggattcgttcagaacgacggtggacgcgcctccaagctgcgcaccctgtcgatcgaggagtaccgcgcgcacaaggcggagttcgagcaatga

SEQ ID NO: 49296 - DNA, 1185 bp, Burkholderia ubonensis
atgagctggacaactgccgtcgaactgcgcgaccgcctgctgcacctatggaaacgcggcgaatggctgcgaagcctcgtagacggcaccgaggggctattcccgctacgcctggcgataaaaggcccaagctcgtccgagctggctgaacgcttcgacacggtacgcgcatggatcgttgaaattgccgcgatgccgcgcatgcgcatcgaatggcgagaaatcaatcatcgaattctcggccagcagcgtttgccgcgagcagcctgggtcgacagtctggacgatgcgctcactgtcaccggcaagcagcgcgacgcagcgcagttcgagcgtctgctcgcgatcacgcgcgcccgccagccgaagctcaccacgtggcttgcgcagtgcccgttgcaagccctcgaattcgccggcgattgggatcggctgctcgcagtcgtcgattggctgcaagcccatccgcggccgggcgtctatcttcggcaagccgaaatcgccgacgtcgacacgaaattcatcgaggcgcggcgcggcgtcctcgcccaatggctcgatctcgtgctgccgtccgaggccatcgacagcagccggaccggcgtcgcccaattcgccgcgcgctacgggttccgcgagaagccgcctcgaattcgatttcgcgtgctcgatgagcggctcgccgtgctgcccggcatgggccggcccgacatcgcgctcgacgccgacagcttcgcgcgcctcgcactgccgtgccgtcacgtgttcgttacggaaaacgaaacaaattttttggcgtttcccgacgttccgcagtcgatcgcgctcttcggagcgggctacggttgggacgctctggagccggcacgatggctcgcggactgcgcgctccactactggggtgacatcgacacgcacggctttgccattctcgaccaattgcgttgccgattcccgcacgtggactcattcctgatggaccgcgcgacactgatggcgcatgaggcgttctggggggacgaaggcgatcaggtcatgcgtgatctgccgcggctcaccgtgcaagagcgcgagctctttgacgacctgcgtgacaaccggattcgccgcggattgcggctcgaacaggagcgcgtcgggttcggatgggtcagagcggcgctagaggaacggtctttcgtttag

SEQ ID NO: 49297 - DNA, 1461 bp, Burkholderia ubonensis; identical to SEQ ID NO: 49293

SEQ ID NO: 49298 - DNA, 651 bp, Burkholderia ubonensis; identical to SEQ ID NO: 49294

SEQ ID NO: 49299 - DNA, 3372 bp, Burkholderia ubonensis; identical to SEQ ID NO: 49295

SEQ ID NO: 49300 - DNA, 1185 bp, Burkholderia ubonensis; identical to SEQ ID NO: 49296

SEQ ID NO: 49301 - DNA, 1467 bp, Burkholderia stagnalis; identical to SEQ ID NO: 49031

SEQ ID NO: 49302 - DNA, 654 bp, Burkholderia stagnalis; identical to SEQ ID NO: 49032

SEQ ID NO: 49303 - DNA, 3372 bp, Burkholderia stagnalis; identical to SEQ ID NO: 49033

SEQ ID NO: 49304 - DNA, 1185 bp, Burkholderia stagnalis; identical to SEQ ID NO: 49034

SEQ ID NO: 49305 - DNA, 1500 bp, Burkholderia anthina
atggatctggattggaaacagcgcacgcatcagtacgtccagtcgcggcgtcaacaccctgcctggcaattgctggcggcgcgtagcgcaccgctcgtgctgagttgcttacagacgttgtttgaaaagagtcacgacggtattgaggtcgacgtggccgaacaaatgctcgcagccgtgctggagcagcacgcgaattcagacgaatttggcgttgatcccgagggcgattgtgcggcactggcgcgcaaggagctgcggggatggattcggcgttcgttgctgattgaacgggctgggcgtctctatgccaccgatgcgctcgaagaagcgctgcgattcgtcgccgccctggacgggcgcttaatgacctcgacggcatcacggctatcgatcgtgcaacgcgagatcgaaaacctggaatccaaccttaatccggatcgtcgaagtagatcgcggtatttgcagcggaagatccaggagttggagcgggaactcgaagacgtcaagacgggtaacatgcgtgcgatgacggaatcggaggctatcgagggtatccgggaaatctacaatctggctacgagtttgcgtgccgactttcgtcgggtcgaagactcttatcgtgaggccgatcaagcgttgcggcagtcgatcattagcgagcgcggtcatcggggcgcggtcgtggacaaactgttgaacagccatgacgaactgctcgaaaccgccgaaggaaaggtttttcgcggttttcagcagcagttgggacgctctgccgaactcgacgcgatgaagcatcggctgcgccagatcattcagcatcccgccacgcgctcggcactcaatcccagccagcaacatgaactgcgctggctcatcatccgcctgatcgacgaatcggcagcggtcatccgcgcgagagctcgaagtgaacgtgacgtcaaggggttcctccgtacgggacttgcggccgaacatcatcgggttggcgaactgatccacgacgtgttgcagcaagcgctggcactcgactggacgagcgcctcgacgcgcaacatggacggtccgttgccgcccgttgcaatttccgtggcgggtctaccgctcgtggaaagaatcaggttcaaggccatccaggacgatgcgcgactcgtgctcgaactgcaggcgcgaagcatggacccacgatccatcgacgacgaattttgggaggcgttcgatggtttggatcggcaggcactgtgtgagagtacggtggcgttgctcgagcaacatggcacgcgcatggggatcgcagaactggcgcggcatctgccgccgacgcatgatctggagacaatcgcgctctggttgagcatggcgcgggaagcaggggtttcgatggacggggagcgggaaagcgtcgacgtaatggggcgtgatggcatgccgctgcgctttgacgttccggtcgtggcgctcggtttcgacgacgtgcgcggcttggatatggagctataa

SEQ ID NO: 49306 - DNA, 762 bp, Burkholderia anthina; identical to SEQ ID NO: 48940

SEQ ID NO: 49307 - DNA, 3330 bp, Burkholderia anthina
atgatctcggccaactcggaccatcgcgctatcgacgcgctgttgtcgacgccggcattcattctcacccgtctcgatctcttcaattgggggccgttcggcgggcgccatcaggcagccatcgatatcgaaggtacggcgatcattggccagacaggcagcggcaagaccacgctcattgacgccctgatgacgttgattgccgcgcagccgcgctacaacctcgcgtcgaccggagggcacgagagcgatcgcgacctcgtctcgtatgtgcgtggggtttccggcgcgggacgtgaaggtgatacagaccatatctccagaccgggaaagactgtgtcagcgattgccgctacctttggcaatggcagcgacacgctgacgattgccggaatattttcgctggagggaagcggctcctcggccactgaactcgatcggatctggatgatcgagcggggcgcggagtttggtcttgacgaattgctggaattgcataacgccgggggcaagcgggcgctcaggcaacatgagcgagcgtcttcagggagcctgaaagtatacgacagcaagaaggcgtacatcctggaattgcgtcgcatcttcgaggtcggcgagaacgcgttcaccctgctcaatcgcgcggccggcctgaagcaactcaacagcattgacgacctcttccgggatctggtgctggacgatcgatcggccttttcgcgggcgctggaggtggcgtccgagttcgacaatctcgcggagattcgggaggaactggagacggcaagaaagcagcgggattcgctggtgccgatcgaaaaggggtgggcgcagcgtgcggagagactcgagcagcgggatcttcaggttcgtctcgtttcgcttttgcccatcgcggttgcgactcgcgagcatcaattgtgggtcgatcgggagcgcgaactgggacaggagaaagcgggctgtgaacgacggatcgaagaccacacccgtcgcacaaaggagctcgaatcagcggcacaaaggctgcgcgacatctatcttcgtgatggcgggagcggcatcgaggaactcgaaggcaagcttgaggctgaacgcaagcaccttgagacggttcggcgccacgcgaacgattatgtgttgttcgccaagaagcttcagttcagccaggcgcttaccctggagacgtttcggcagaacgaggccagcgcgcaggctttgctcgcttcgacggccgtcgcgatcgaggaagcggaacgcttggcatacgccaagggggccgcgctggcaggcactgaacagacgcttacagaacagcaggcggcccttgcaaatgcaaagtcacacccgggatccaacataccgtcgctgtatcaacagttcagacgcgatctggccggccaactgaacctgcacgatgaggatctgcccttcgttgcggaactggtcgaggtgcaaaaatcgcagtcggcatggcgcggcgcgatcgagcgcgcgatgggcggccatcggttgcgcatcatggttccggcatcacacatgaagcttgcactcgcatgggtgaatggccgcgacaaccggttgcatgttcgtcttgtggacgtgatggcgccggatcgcgccgtcgaattcctgatcgacggcttcacgcgaaaacttaacttcaaggaccatccgtatcgggaggctgttcgagggctacttgctcaaatcgatcgacattgcgtggcgtcccccgaggtgttgaaacatacgccgcatggtatgaccgcgcaggggctcatgtcgggcaagagcggtttcttcgaaaagcaggacaagaccccgttgagccagggatggctcaccggttttgacaacaaggacattctcgccgagctcgagcgtcagtgtgacgagacggcacgggaactcgctgagcttacggcaaagtttgaggcggcgagggcgcaggttacagaggtacaggttcgccgaacaatgcttgaccgcgtgctgtcgattgattttgcggatatcgatgtgcgtcaggccgagcgtaacgtggcggattccacccgacggctctcggcgctgacggatccatcatcggataccgcgagggccaaacaggcttgggaggaggttcgcgcggaactcgagaagatcggccaggcgcgcgacgagagcctcatacagcagacgaagcttcaagagcagtatgacaccgccgtgaatgggcgagaacgcgcattcgcgacgatcggcgaaggactgaatgcgatcgagatggcgctggtcgagcaacactttgatttcgtcggtgtccagaccgtggatacactgatgcgacagcaggcgcaaatcgacgtccggttgcgagcacgcctcgaggaacttgctgcaaggatcaatgatcacgaacggcaactggtccgtggcatgggcgcggcgcgtgctgtcgatacgggtgccttggcggaggtcggcacggaagttgaagacgtaccacagtatctagagcgactgcgcgtgctcagggatgaggcgctacccgaaaagctggatcgttttcttgggtatctgaatcaatcctcggacgagggggtgacgcaattgctccgcagtatcgataacgaggtggagaccatcgtcgagcggatcgaggacttgaacgccacgatgcgccgcgtcgactttcagccggggcggtatttgcaactggagccgcgtcgggtcgtccatgagagtctgcgaacattggagcaggcgcaacgcactctgcgcgccgcgacactgcaagacgaccagggcgagagccagttcaacgcgttagccgaggtcgtcaggctcatgagggacgcgagcgagcgacgcacgaccgttggggcgaaggcgcttctggatcctcgctatcggctgcagtttgcggtgtccgtcatcgagcgcagttcgggggcagtctgtgaaacccggaagggatctcaaggcggcagcggcggagaaaaggagatcattgcaagctatattttgacggcttcgttgagctatgcgctgtgcccggatggcaaggaccgtccattgtttggcaccatcgtgctggacgaggcgttctcgaagagttcacaggcggtggcaggacgcattatttcagcactgcgagagtttggccttcatccgctctttgtgacgccgaacaaggaaatgcggctacttcgagcgcatacgcgctcggccattctgatccatcgaaaaggactgcaggcaacgatgacgtctttgagctgggaagagctggattccattgcacgagcccggcaaatgatcggacgagatgaaatcaccgaatga

SEQ ID NO: 49308 - DNA, 1146 bp, Burkholderia anthina
atgaaatcaccgaatgatatggctgcacgcctcgctcgatcatggcaatcggccgatgaacgcgaggcgcggctgctttaccccgatagctggccgctgcgattgcctatcggcagacccagtcccaaggcttttaccgaacagaccgaaagcgtcaaacggcattgcgatgcctggcgatcggtggagattggcatcgtgcattgggaaaccgtggcctatcgtgcggggggcagccccgtgcgactgccgcacctttgggaactgagaagcccgtcggactgggtgcgcgcgacccaggatgccgcgattgcggccgagtacgaacggctcggtgaggtggttcggcacatggacgcgcagttccacgcactggtggtacgtcagcgaaggttgatgatggagcgcccggtgcacgagatcatcaaggctggggaagtggccttggggttatcgccgggatgtgcgcaagggcgtccactgcgggcgcttggtgtctgcaataccgatagcaagttcttcgagcggcaccgggcgttgctctgtcacatgctcaacgttcgctttggcggacaagtttccgaattggggctcgaggcgttcctcggcgcgcctgaggacgacgagcgttggttgctcgtcgtgccgctcgcggccgggatattgccgtttcgccagcagcgcatccgggccggtgaacttgttcagcttccgaagtgcgtcggccacatcatcattgtggaaaacgaacggtccgttcatcagttggcggagctacctgatgcggtggcgatcctcggtgcgggactgagtttggactggacgcatgatccgtggctcgcgagcaagcgtgtagcgtattggggggatatggatacctgggggctgaaaatgttggggaaagtgcgtcaagctattccgtccttgagcgcgctgctgatgaatcgggactgttttgaacgatacgcggcaaatctggccgtgcgtgaactcgtccccgtcgacgggcgccgtcctgacggactaaccgaggacgagggcgccttcttcgaatacctcctgacgcaggagcgcgggcgcttggaacaagaattcttgccgaaagacatcgtgagagcggcgatgcatgcgtggtatgaggcgtaa

SEQ ID NO: 49309 - DNA, 1467 bp, Burkholderia stagnalis; identical to SEQ ID NO: 49031

SEQ ID NO: 49310 - DNA, 654 bp, Burkholderia stagnalis; identical to SEQ ID NO: 49032

SEQ ID NO: 49311 - DNA, 3372 bp, Burkholderia stagnalis; identical to SEQ ID NO: 49033

SEQ ID NO: 49312 - DNA, 1185 bp, Burkholderia stagnalis; identical to SEQ ID NO: 49034

SEQ ID NO: 49313 - DNA, 1461 bp, Burkholderia ubonensis
atgttcctcgactaccctaccctcgacgcgctgtgcacgcgccatcccgcttggcgacttttgcgctccgaccacgcgccgctcgccgtcagcttcctgcaccgcgcgttcgtcgcgccgaacgtgcgcgaggtggcggctccgtttcttgccgaagcactcgaggacgagctttacgcgttgcgcgaacaactcggcgacggcgccttcccgaagcccgcgcttgagtatctgaacgactgggctagccctgaaaagggatggttgcgcaaattctatcgccaaggctccgatgaaccgcatttcgacctgacacccgccgcaggaaaagcgatcgcgtggctcggcacgctgatggaacgaagctttgtcggcacggaatcccggctcctgacgcttttcgagttgctgcggcagatggccgaaggcagcgagacggacccggaaaggcgtcttgccgagctccacgcgcggcgcagccagctcgacgaagaaatcgctcgcgtggaggccggcgacgttcggctgctcgacgatgccgcgatcaaggaccgctttcagcaattcatgcagatggcgcgcgacctgctcacggatttccgtgaagtcgagcagaacttccgtctgctggaccggcatgtacgcgagcgaatcgcgctctgggaaggatcgaagggtgcgctcatcgaagaaatcatgggcgagcgcgacgcgatcgccgattcggaccagggcagcagctttcgggcgttctgggacttcctgatgtcgagccgccgccaggaggaactctccgaacggctcgagcacgtgcttgcgctcccggcgatcacggaaatgaagccggacgcgcgcacgcggcgcgtccactatgactggctggaagccggcgagcacacgcaacgcacggtcgctcagctctcgcagcagcttcgacgtttcctcgacgatcaagcgtggctcgaaaaccgccgcatcatggacattctgcgcggtatcgaaacgaaagcgcttgtgctgcgtgaagcgcccccgccgggctccgtcatggagatcgagaccgcgtccgctgacatcgagctgccaatcgaacgcccgctttacgcgccggcgctgcgccctctcatcgccaacgtcgcaatcgagaccggcgatgcggacctcgatgcgtcggcactctacacgcagatcgtcgtcgatcgcgcgcgcctcgcaagccatatccgccgctgccttcaagatcggcggcaagtgacacttgccgaactggccgcttcgcagccgctcctgcatgggctcgctgaactcgtcgcctatttgcaactgagcgccgaagccggaacatttcgcgcgaccgtcgatgagaccgtctccgatacgatcgagtggcaggcgaacgatgccaacggagcagcaatcgttaagcgcgcaacgatgccgcgggtgattttcacaaggtag

SEQ ID NO: 49314 - DNA, 651 bp, Burkholderia ubonensis
atggaagaacagcaaaccccgtcgcttggtcgaggtgacttgtcgacggtcgccatcgcgctgctcaagggcgtgatttatcgtgatggaaacgagcgcctctgggccgcactgctcgaattgcagacacacgtgcgcgactacgtcgccgtgcttggcctcgagctcgtcgtggacgaggcggaaggctacgccttcgtaaagagccgcaccgagcctgacgccgaagtcgacggagaccaggtcaagctgccccggctcgttgcacggcgtccactctcgttccccgtgagcctgctgctcgcgctactgcgaaagaaactggcggaatgggatgccggcggcggtgacacgcggctcgtcctttcgcgcgaggacatcgtcgagctcgtacgcgtcttccttcccgcgagcactaacgaggcgcgcctcgtcgatcagatcgacacgcacgtgaacaagatcgtcgacctcggtttcctgcgccggatgaagaccgcgagcggaccgcccacattcgaggtgcgacgcattctcaaggcgttcgtcgatgcgcaatggctgctcgatttcgacgcgcggctcgcaagctatcaggcgcaccttcgggattcgacgaattcagaccaaacggagagtcgcgatgaatga

SEQ ID NO: 49315 - DNA, 3372 bp, Burkholderia ubonensis
atgaatgagccgcgcacgctcggcctcgattttgccgcggacgacacccggacgggctttcgtctcgaacggctcgaggttttcaactggggcaccttcgacgaccgggcttgggtgctgcgggtcgacggccgcaacggcctgctgacaggagacatcggttccggcaagtcgacgctcgtcgacgccattaccaccctcctcgtgcccgcgcagcgcatcgcctacaacaaggcggcaggcgcggacagcaaggaacgtacgctgcgctcgtatgtgctcggctactacaagtcggagcgcaacgaggtcacgggaacggccaagcccgtgagcctgcgcgaccataacagctattcggtgattttgggcgtgtttcgcaacgccgggtacgacgccaccgtcacgctcgcgcaagtgttctggatgaaggacgcgcaggctcaacctgcgcgattcttcgtcagcgccgaacgagatctctcgatcgcgacggacttctcgcgcttcggcaccgacattgcgcagctgcgcaagaagctgcgcgggctgggcgccgaaatcgaggacgcgtttccgaaatacagcgcctggttccggcggcgcttcggcatcgaaaatgagcaagcgctcgagctctttcatcaaacggtatcgatgaagtcggtgggcaatctcaccgacttcgtacgcagccacatgctcgagccgttcgacgtcgcaccgcgcgtcgacgccctgattgctcacttcgacgatctgaatcgcgcgcacgaggcagtactgaaaaccaagcgccaagtggaactgctgacaccgctcgtcgacgactgcgaccgccacagcgagcaaggacacgttctcgaaggctggcgcgcgtgccgtgaagcattgaggccctacttcgccgggctcaagctcggcctcgtcgaacgccgcctccaattgctcgaagaggatcatgcgcgcgcgacctcgcgaaaggcacggcacgaagaagcgcgcgaccaggcgcgccagcgcgtggacgatttgcgccgtgccgtggccgaacaaggcggcgatcgcatcgcgcagctcgatgtcgagatccgcgagcacgagcgagaaagcgtgcgtcgccgcgaacgggcgcaacgctatgccgccatcgttacgctgttcggcgaaaccgaggccgcggatgaggctgcattcgcctcccagcgccaacgcgtggccgagcagcgcagctcactcgttgacgacgaagcgcaacagcaaaatgcgataaccgaatggagcgtggcatttcgcgaaggcaaagcgcggcgtgatgtgctggaggacgaaatcgcgagcctgaaagctcgacgcaacaacatcccgaaggaacaggtcgcgatgcgggcgagcctgtgctcagcgctcggcctggaggaagacgccctgccgttcgcgggcgaactcattcaggtgcgcgaggatgcgcgtgattgggagggcgccgccgagcgcgttctacgcaacttcggcctgtcgctgctcgtgcccgacgagcactatgcgaacgtcgcggcgtgggtcgatcgcactcatcttcgggggcggctcgtctactttcgcgtgcgctccgaacgcaccgcgcgtgcagccgaggccatcgagctgcaccgccactcgctcgcgcacaagctcgcgatcaagcccgactcgcagttctatggctggctcgagcgcgaaatcggccgccgtttcgactatgcctgctgcgatacgcaggagcagtttcggcgcgagacgcgcgcgatcacgcgtgcgggccaggcgaaagcgcctggggagcgccacgaaaaagacgaccgccacgcgctcgacgatcgcagccgctacgtgctcggttggagcaacacggcaaaaatatccgcccttgcagcacaacggcaagcgctcgaagctcgccttggcgagatcgggcaaaggctcggagaggcccaacacgagcacaccaaggtgcgtgagcaactcgaagcacttgcgcgtgccggcgagttcgccgagtttcgggaaatcgattggtcgagctgcgctgccgcgatcgcacgtcttgcggacgaaaaggcgcgactcgaatcggcaagcgacgccctcgcagagctaacggctcaattggactcggcgcaagcgtcgttgaaagagagtgaagcggcgatgtcggaaaccgactcggaactgggcggcatcctggccaagcgggaggcggcacaagcgctgcgcgaagagacgcacgcgctcgttgcagaagtggatgccgaacttgccgaacgaatcgaggccctgcgagcggagattctcggcgaacaccagctttccgtcgagtcatgcgacaaccgcgagcgggacgtgcgagaagcgttgacaacccgtatcgacaacgaaacgaagtcactcggccgcctggccgaaagaatcgtcaaggcaatggcggccttcaaggaagcctacaagctcgaaacggccgacttcgatgcgagcctcgacgcgaacccggagtaccgtgacatgctcgcgcggctgcaggcggacgatttgccgcgcttcgaaacgcgtttcaaggagctgctcaacgtcaatacgatcaacgagatcgccaactttcacgcccagctcgcgcgcgaacgggcgacgatcaaggaacgcatcgaacgcatcaacgaatcgttgcgacaaatcgactacaacgcgggccgatacatcatcctcgagagtcagcccagccccgacgcggaaatccgcgatttccagagcgacctgcgcgcttgcaccgagggcgagctcaccggctcggacgatagccaatactcggaggccaagttcctgcaagtcaaacgaatcatcgaccgcttccgcggccgcgaagggttgaccgagcaggaccggcgttggcgcgccaaggtgaccgacgtgcgcaactggtttctgttcgccgccagcgagcgttggcgcgaagacgacagcgaatacgaacactactcggactccggcggtaaatcgggcggccagaaggaaaagctcgcctacacgatccttgccgcgagcctcgcctaccagttcggcctcgaatggggcgccgtgcgttcccgatcgttccgcttcgtcgtcatcgacgaagcatttggccgaggctccgacgaatcggcgcagtacggtctcacgctgtttcagaaactgaacctgcaactgctgatcgtcacgccgctgcagaagattcacatcatcgagccgttcgtttcgagtgtcggattcgttcagaacgacggtggacgcgcctccaagctgcgcaccctgtcgatcgacgagtaccgcgcgcacaaggcggagttcgagcaatga

SEQ ID NO: 49316 - DNA, 1185 bp, Burkholderia ubonensis
atgagctggacaactgccgtcgaactgcgtgcccgcctccagcacctatgggcacgcggcgaatggctgcgaagcttcgtagacggcaccgaggggctattcccgctacgtctggcgatcaaaggcccgagttcgtccgagctggctgaacgcttcgacgcggtacgcgcatggatcgcggaaattgccgcgacgccgcacatacgcatcgaatggcgagaaatcaatcatcgaattctcggcgtgcagcgtttgccacgagcggcctgggtcgacagtctggacgatgcgctcgcagtcgccggcaagcaccgcgacgcagcgcagttcgcgcggctgctcgaaatcactcgcgcccgccagccgaagctcgccgcgtggcttgcgcagcgcccgttgcaagccctcgaattcgccggcgattgggaacgactgctggcagtcgtcgattggctgcaagcacatccgcacccgggcgtctatcttcgccaagccgaaatcgccggcgtcgacacgaaattcatcgaggcaaggcgcggcgtcctctcccaatggctcgatctcgtgctgccgtccgaggcgatcgacagcagccggacaggcgtcgctcaattcgccgcgcgctacgggttccgcgagaagcaaccccgtattcgatttcgcgtgctcgatgagcggctcgccgttctgcccggcatgggccgccccgacatcgcactcgacgccgacagcttcgcgcgcctcgcactgccgtgccgccatgttttcgttacggaaaacgaaacaaattttctggcgtttcccgacgttccgcaggcgatcgtgctcttcggagcgggctacggctgggaagctctggagccggcgcgatggctcgcggactgtgcgctccactactggggcgacatcgacacgcacggctttgccattctcgaccaattgcgttgccgattccctcacgtgaactccttcctgatggaccgcgcgacactgatggcgcatgaagcattctggggagacgaaggcgatcaggtcgtgcgtgatctgccgcgactcacggcgcaagagcgcgagctctttgacgacctgcgcgacaaccggattcgccgcggattgcggctcgaacaggagcgcgtcgggttcgggtgggtcagagcggcgctagaggaacggtctttcgtttag

SEQ ID NO: 49317 - DNA, 1461 bp, Burkholderia ubonensis; identical to SEQ ID NO: 49071

SEQ ID NO: 49318 - DNA, 651 bp, Burkholderia ubonensis; identical to SEQ ID NO: 49072

SEQ ID NO: 49319 - DNA, 3372 bp, Burkholderia ubonensis; identical to SEQ ID NO: 49073

SEQ ID NO: 49320 - DNA, 1185 bp, Burkholderia ubonensis; identical to SEQ ID NO: 49074

SEQ ID NO: 49321 - DNA, 1461 bp, Burkholderia ubonensis; identical to SEQ ID NO: 49281

SEQ ID NO: 49322 - DNA, 651 bp, Burkholderia ubonensis; identical to SEQ ID NO: 49159

SEQ ID NO: 49323 - DNA, 3372 bp, Burkholderia ubonensis; identical to SEQ ID NO: 49160

SEQ ID NO: 49324 - DNA, 1185 bp, Burkholderia ubonensis; identical to SEQ ID NO: 49161

SEQ ID NO: 49325 - DNA, 1467 bp, Burkholderia stagnalis; identical to SEQ ID NO: 49031

SEQ ID NO: 49326 - DNA, 654 bp, Burkholderia stagnalis; identical to SEQ ID NO: 49032

SEQ ID NO: 49327 - DNA, 3372 bp, Burkholderia stagnalis; identical to SEQ ID NO: 49033

SEQ ID NO: 49328 - DNA, 1185 bp, Burkholderia stagnalis; identical to SEQ ID NO: 49034

SEQ ID NO: 49329 - DNA, 1461 bp, Burkholderia ubonensis
atgttcctcgactaccctaccctcgatgcgctgcgcacgcgccatcccgcttggcgacttttgcgctccgaccacgcgccgctcgctgtcagcttcctgcaccgcgcgttcgtcgcgccgaacgtgcgcgaggtggcggctccgtttcttgccgaagcactcgaggacgagctttacgcgttgcgcgaacaactcggtgacggcgccttcccgaagccagcgctcgagtatctgaacgactgggcgagtcctgaaaagggatggttgcgcaagttctaccgccaaggttccgatgaaccgcatttcgacctgacacccgccgcaggaaaagcgatcgcgtggctcggcacgctgatggaacgaagctttgtcggcacggaatcccggctcctgacacttttcgagctgctgcggcagatggccgaaggcagcgagacggacccggaaaggcgtcttgccgatctctacgcgcggcgcagccagatcgacgaagaaatcgctcgcgtggaagccggcgacgtccggctgctcgacgatgccgcgatcaaggaccgctttcagcaattcatgcagatggcgcgcgacctgctcacggatttccgtgaagtcgagcaaaacttccgtctgctggaccggcatgtacgcgagcgaatcgcgctctgggaaggatcgaagggtgcgctcatcgaagaaatcatgggcgagcgcgacgcgatcgccgattcggaccagggcagcagctttcgggcgttctgggacttcttgatgtcgagccgccgtcaggaggaactctcggaacggctcgagcacgtgcttgcgctcccggcgatcacggaaatgaagccggacgcgcgcacgcggcgcgtccactatgactggctggaagccggcgagcatacgcaacgcacggtcgctcagctctcgcagcagcttcgacgcttcctcgacgatcaagcgtggctcgaaaaccgccgcatcatggacattctgcgcggtatcgaatcgaaagcgcttgcgctgcgtgaagcgcccccgccgggcaccgtcatggagatcgagaccgcgtccgccgacatcgagctgccgatcgaacgcccgctttacgcgccggcgttgcgcccgctcatcgccaacgtcgcgatcgagaccggcgacgcggacctcgatgcgtcggcactctatacgcagatcgtcgtcgatcgcgcgcgcctcgccagccacatccgccgctgcctgcaagatcggccgcaagtgacgcttgccgaactggccgcctcgcagccgctcgtgcatgggctcgccgagctcgttgcctatctgcagctgagcaccgaagccggatcatttcgcgcgaccgtcgacgagaccgtctccgatacgatcgagtggcaggcgaacgacgcaaacggcacaacaatcgtcaagcgcgcgacgatgccgcgtgtgattttcacaaggtag

SEQ ID NO: 49330 - DNA, 648 bp, Burkholderia ubonensis
atggaagaacagcaaacctggtcgcttggccgggacgatttgtcggcggttgccatcgcgctgctcaagggcgtggtgtatcgcgatgggaacgagcgcctctgggccgcgctgctcgaattgcagacacacgtgcgcgactacgtcgccgtgcttggcctcgagctcgtcgcggacgaggcggaaggctacgccttcgtaaagagccgcgccgagcctgatgcagaagtcaacgcggaccaggccaagctgccccggctcgttgcacggcgtccactctcgttccccgtgagcctgctgctcgcgctgctgcgaaagaagctggcggaatgggatgctggcggcggcgacacgcggctcgtcctttcgcgcgaggacatcgtcgagctcgtacgcgtcttccttccctcgagcacgaacgaggcgcgcctcgtcgatcagatcgatacgcacgtgaacaagatcgtcgacctcggtttcctgcgccggatgaagaccgcgagcggaccgccgacgttcgaggtgcgacgcattctcaaggcgttcgtcgatgcgcaatggctgctcgatttcgacgcgcagctcgcaagctatcgggcgcaccttcgagattcgacgaattcggaccaaaacggagagtcgcgatga

SEQ ID NO: 49331 - DNA, 3372 bp, Burkholderia ubonensis
atgaatgagccgcgcacgctcggcctcgattttgccgcggacgacacccggacgggctttcgcctcgagcggctcgaggttttcaactggggcaccttcgacgaacgggtctgggtgctgcgggtcgatggccgcaacggcctgctgacaggagacatcggttccggcaagtcgacgctcgtcgacgccattaccaccctcctcgtgcccgcgcagcgcatcgcctacaacaaggcggcaggcgcggacagcaaggagcgtacgctgcgctcgtacgtgctcggctactacaagtcggagcgcaacgaggtcacgggagcagccaagcccgtgagcctgcgcgaccacaatcattattcggtgattttgggtgtgtttcgcaacgccggttacgatgccaccgtcacgctcgcgcaagtgttctggatgaaagacgcgcaggctcaacctgcgcgattcttcgtcagtgccgaacgagatctctcgatcgcgaccgacttctcgcgcttcggcaccgacattgcgcagctgcgcaagaagctgcgcgggctgggcgccgaaatcgaggacacgtttccgaaatacagcgcctggttccggcggcgcttcggaatcgaaaacgagcaagcgctcgagctctttcatcaaacggtatcgatgaagtcggtgggcaatctcaccgacttcgtgcgcagccacatgctcgagccgttcgacgtcgcaccgcgcgtcgacgccctgattgctcatttcgacgatctgaatcgcgcgcacgaggcggtactgaaaaccaagcgccaagtggaattgctgacaccgctcgtcgacgactgcgaccgccacagcgagcaaggacacgttctcgaaggctggcgcacgtgccgtgaagcattgaggccctacttcgccgggctcaagctcggcctcgtcgagcgccgcctccaattgctcgatgaggatcgtgcgcgcgcgacttcgcgaaaggcgcggcacgaagaagcgcgcgaccaggcgcgccagcgcgtggacgatttgcgccgtgccgtggccgaacaaggcggcgatcgcatcgcacagctcgaggtcgaaatccgcgagcacgagcgagaaggcacccgtcgccgcgaccgcgcgcaacgctatgccgccatcgttacgctgttcggcgaaaccgaggccacggacgaggctgcattcgcgtcccagcgccaacgcctggccgagcggcgcagctcgctcgtcgacgacgaagcgcagcagcagaatgcgataaccgaatggagcgtggcatttcgcgaagggaaagcgcggcgcgatctgctggaggacgaaatcgcgagcctgaaagctcgacgcaacaacatcccgaaggaacaggtcgcgatgcgggcgagcctgtgctcggcgctcggcctggaggaagacgccctgccgttcgcgggcgaactcattcaggtgcgcgaggatgcgcgtgattgggaaggcgccgccgagcgcgtcctgcgcaacttcggcctgtcgctgctcgtgcccgacgagcactatgcgagcgtcgcgacgtgggtcgatcgcactcatctccgggggcggctcgtctactttcgcgtgcgctctgaacgcgccgcgcgcgtcgccgagtccatcgagctgcaccgccactcgctcgcgcacaagctcgcgatcaagcccgactcgctgttctacggctggctcgagcgcgaaatcggccgccgtttcgactatgcctgctgcgatacgcaggagcagtttcggcgcgagacgcgcgcgatcacgtgcgcgggccagacgaaagcgcctggggagcgccacgaaaaagacgaccgtcacgcactcgacgatcgcagccgctacgtgctcggctggagcaacacggcgaaaatatccgtcctcgaagcacaacggcgagcgctcgaagccaggcttggcgagatcgggcaaaggctcggagaagcccaacacgagcacgccaggacgcgtgagcaactcgaagcacttgcgcgtgctggcgagttcgcagagtttcgagagatcgattggtcgagctgcgctgccgcgatcgcacgtcttacggacgaaaaggtgcgacttgaatcggcaagcgacgccctcgcggagctgacggctcaattggactcggcgcaagcgaggttgaaagagaatgaggcggcgatctcggaaaccgattcggaactgggcggcatcctggccaagcaggaggcagcgcaagcgttgcgcaacgagacgcacgcgctcattgcagaagtggatgccgaacttgccgaacgaatcgaggccctgcgcgcggatatcctcggcgaacaccagctttccgtcgagtcgtgcgacaaccgcgagcgggacgtgcgagaggcattgacaacccgtatcgacaacgaaacgaagtcgctcggccgccttgccgaaagaatcgtcaaggccatgacggccttcaaggaggcctacaagctcgaaacggccgacttcgatgcgagcctcgacgcgaacccggagtaccgtgacatgctcgcgcggctgcaagcggacgacttgccgcgcttcgagacgcgtttcaaggagttgctcaacgtcaatacgatcaacgagatcgccaacttccacgcccagctcgcgcgcgaacgggcgacgatcaaggaacgcatcgaacgcatcaacgaatcattgcgacagatcgactacaacgcgggccgatacatcgtcctcgagagtcagcccagccccgacgcggagatccgcgaattccagagcgacctgcgcgcttgcaccgagggcgaactcaccggctcggacgatagccaatactcggaggccaagttcctgcaagtcaaacggatcattgaccgcttccgcggccgcgaagggttgaccgagcaggaccggcgctggcgcgccaaggtgaccgacgtgcgcaactggtttctgttcgccgccagcgagcgttggcgcgaagacgacagcgaatacgagcactactcggactccggcggtaaatcgggcggccagaaggaaaagctcgcctacacgatccttgccgcgagcctcgcctaccagttcggcctcgaatggggcgccgtgcgttctcgatcgttccgcttcgtcgtcatcgacgaagcatttggccgaggctccgacgaatcggcgcagtacggtctcacgctgtttcagaaactgaacctgcaactgctgatcgtcacgccgctgcagaagattcacatcatcgagccgttcgtttcgagtgtcggattcgttcagaacgacggtggacgcgcctccaagctgcgcaccctgtcgatcgaggagtaccgcgcgcacaaggcggagttcgagcaatga

SEQ ID NO: 49332 - DNA, 1185 bp, Burkholderia ubonensis
atgagctggacaactgccgtcgaactgcgcgaccgcctgctgcacctatggaaacgcggcgaatggctgcgaagcctcgtagacggcaccgaggggctattcccgctacgcctggcgataaaaggcccaagctcgtccgagctggctgaacgcttcgacacggtacgcgcatggatcgtggaaattgccgcgatgccgcgcatgcgcatcgaatggcgagaaatcaatcatcgaattctcggccagcagcgtttgccgcgagcagcctgggtcgacagtctggacgatgcgctcactgtcaccggcaagcagcgcgacgcagcgcagttcgagcgtctgctcgcgatcacgcgcgcccgccagccgaagctcaccacgtggcttgcgcagtgcccgttgcaagccctcgaattcgccggcgattgggatcggctgctcgcagtcgtcgattggctgcaagcccatccgcagccgggcatatatcttcgccaagccgaaatcgccggagtcgacacgaaattcatcgaggcgcggcgcggcgtcctcgcccaatggctcgatctcgtgctgccgtccgaggccatcgacagcagccggaccggcgtcgcccaattcgccgcgcgctacgggttccgcgagaagccgcctcgaattcgatttcgcgtgctcgatgagcggctcgccgtgctgcccggcatgggccggcccgacatcgcgctcgacgccgacagcttcgcgcgcctcgcactgccgtgccgtcacgtgttcgttacggaaaacgaaacaaattttttggcgtttcccgacgttccgcagtcgatcgcgctcttcggagcgggctacggctgggacgctctggagccggcacgatggctcacggactgcgcgctccactactggggtgacatcgacacgcacggctttgccattctcgaccaattgcgttgccgattcccgcacgtggactcattcctgatggaccgcgcgacactgatggcgcatgaggcgttctggggagacgaaggcgatcaggtcatgcgtgatctgccgcggctcaccgtgcaagagcgcgagctctttgacgacctgcgtgacaaccggattcgccgcggattgcggctcgaacaggagcgcgtcgggttcggatgggtcagagcggcgctagaggaacgggcgctcgtttag

SEQ ID NO: 49333 - DNA, 1461 bp, Burkholderia ubonensis
atgttcctcgactaccctaccctcgacgcgctgcgcacgcgccatcccgcttggcgacttttgcgctccgaccacgcgccgctcgccgtcagcttcctgcaccgcgcgttcgtcgcaccgaacgtgcgcgaggtggcggctccgtttcttgccgaagcactcgaggatgagctttacgcgttgcgcgaacaactcggtgacgacgccttcccgaagcccgcgctcgagtatctgaacgactgggcgagtcctgaaaagggatggttgcgcaaattctatcgccaaggctccgatgaaccgcatttcgacctgacacccgccgcaggaaaagcgatagcgtggctcggcacgctgatggaacgaagctttgtcggcacggaatcccggctcctgacgcttttcgagttgctgcggcagatggccgaaggcagcgagacggacccggaaaggcgtcttgccgagctccacgcgcggcgcagccagatcgacgaagaaatcgctcgcgtggaggccggtgacgttcggctgctcgacgatgccgcgatcaaggaccgctttcagcaattcatgcagatggcgcgcgacctgctcacggatttccgtgaagtcgagcaaaacttccgtctgctggaccggcacgtacgcgagcgaatcgcgctctgggaaggatcgaagggtgcgctcatcgaagaaatcatgggcgagcgcgacgcgatcgccgattcggaccagggcagcagctttcgggcgttctgggacttcctgatgtcgagccgccgccaggaggaactctccgaacggctcgagcacgtgcttgcgctcccggcgatcacggaaatgaagccggacgcgcgcatgcggcgcgtccactatgactggctggaagccggcgagcacacgcaacgcacggtcgctcagctctcgcagcagcttcgacgtttcctcgacgatcaagcgtggctcgaaaaccgccgcatcatggacattctgcgcggtatcgaaacgaaagcgcttgtgctgcgtgaagcgcccccgccgggctccgtcatggagatcgagaccgcgtccgctgacatcgagctgccaattgaacgcccgctttacgcccctgcgctgcgccctctcatcgccaacgtcgcaatcgagaccggcgatgcggacctcgatgcgtcggcactctacacgcggatcgtcgtcgatcgtgcgcgcctcgcaagccacatccgccgctgccttcaagatcggcggcaagtgacacttgccgaactggccgcttcgcagccgctcctgcatgggctcgctgaactcgtcgcctatttgcaactgagcgccgaagtcggaacatttcgcgcgaccgtcgatgagaccgtctccgatacgatcgagtggcaggcgaacgatgccaacggagcagcaatcgtcaagcgcgcaacgatgccgcgggtgattttcacaaggtag

SEQ ID NO: 49334 - DNA, 651 bp, Burkholderia ubonensis
atggaagaactgcaaaccccgtcgcttggtcgaggtgacttgtcgacggttgccatcgcgctgctcaagggcgtgatttatcgtgatggaaacgagcgcctctgggccgcactgctcgaattgcagacacacgtgcgcgactacgtcgccgtgcttggcctcgagctcgtcgtggacgaggcggaaggctacgccttcgtaaagagccgcaccgagcctgacgccgaagtcgacggagaccaggtcaagctgccccggctcgttgcacggcgtccactctcgttccccgtgagcctgctgctcgcgctgctgcgaaagaaactggcggaatgggatgccggcggcggcgacacgcggctcgtcctttcgcgcgaggacatcgtcgagctcgtacgcgtcttccttcccgcgagcactaacgaggcgcgcctcgtcgatcagatcgacacgcacgtgaacaagatcgtcgacctcggtttcctgcgccggatgaagaccgcgagcggaccgcccacattcgaggtgcgacgcattctcaaggcgttcgtcgatgcgcaatggctgctcgatttcgacgcgcggctcgcaagctatcaggcgcaccttcgggatgcgacgaattcggaccaaacggagagtcgcgatgaatga

SEQ ID NO: 49335 - DNA, 3372 bp, Burkholderia ubonensis
atgaatgagccgcgcacgctcggcctcgattttgccgcggacgacacccggacgggctttcgcctcgagcggctcgaggttttcaactggggcaccttcgacgaacgggtctgggtgctgcgggtcgacggccgcaacggcctgctgacaggagacatcggttccggcaagtcgacgctcgtcgacgccattaccaccctcctcgtgcccgcgcagcgcatcgcctacaacaaggcggcaggcgcggacagcaaggaacgtacgctgcgctcgtatgtgctcggctactacaagtcggagcgcaacgaggtcacgggaacggccaagcccgtgagcctgcgcgaccataacagctattcggtgattttgggcgtgtttcgcaacgccgggtacgacgccaccgtcacgctcgcgcaagtgttctggatgaaggacgcgcaggctcaacctgcgcgattcttcgtcagcgccgaacgagatctctcgatcgcgacggacttctcgcgcttcggcaccgacattgcgcagctgcgcaagaagctgcgcgggctgggcgccgaaatcgaggacacgtttccgaaatacagcgcctggttccggcggcgcttcggaatcgaaaacgagcaagcgctcgagctctttcatcaaacggtatcgatgaagtcggtgggcaatctcaccgacttcgtacgcagccacatgctcgagccgttcgacgtcgcaccgcgcgtcgacgccctgattgctcacttcgacgatctgaatcgcgcgcacgaggcggtactgaaaaccaagcgccaagtggaattgctgacaccgctcgtcgacgactgcgaccgccacagcgagcaaggccacgttctcgaaggctggcgcgcgtgccgcgaagcattgaggccctacttcgccgggctcaagctcggcctcgtcgaacgccgcctccaattgctcgacgaggatcatgcgcgcgcgacctcgcgaaaggcgcggcacgaagaagcgcgcgaccaggcgcgccagcgcgtggacgatttgcgccgtgccgtggccgaacaaggcggcgatcgcatcgcgcagctcgatgtcgagattcgcgagcacgagcgagaaagcgtgcgtcgccgcgaacgcgcgcaacgctatgccgccatcgttacgctgttcggcgaaaccgaggccgcggatgaggctgcattcgcctcccagcgccaacgcctggccgagcagcgcagctcgctcgtcgacgacgaagcgcagcagcaaaatgcgataaccgaatggagcgtggcatttcgcgaaggaaaagcgcggcgtgatgtgctggaggacgaaatcgcgagcctgaaagcccgacgcaacaacatcccgaaggaacaggtcgcgatgcgggcgagcctgtgctcggcgctcggcctggaggaagacgccctgccgttcgcgggcgaactcattcaggtgcgcgaggatgcgcgtgattgggagggcgccgccgagcgcgtcctgcgcaacttcggcctgtcgctgctcgtgcccgacgagcactatgcgaacgtcgcggcgtgggtcgatcgcactcatcttcgggggcggctcgtctactttcgcgtgcgctccgaacgcaccgcgcgtgcagccgaggccatcgagctgcaccgccactcgctcgcgcacaagctcgcgatcaagcccgactcgcagttctatggctggctcgagcgcgaaatcggccgccgtttcgactatgcctgctgcgatacgcaggagcagtttcggcgcgagacgcgcgcgatcacgcgtgcgggccaggcgaaagcgcctggggagcgccacgaaaaagacgaccgccacgcgctcgacgatcgcagccgctacgtgctcggttggagcaacacggcaaaaatatccgcccttgcagcacaacggcaagcgctcgaagctcgccttggcgagatcgggcaaaggctcggagaggcccaacacgagcacaccaaggtgcgtgagcaactcgaagcacttgcgcgtgccggcgagttcgccgagtttcgggaaatcgattggtcgagctgcgctgccgcgatcgcacgtcttgcggacgaaaaggcgcgactcgaatcggcaagcgacgccctcgcagagctaacggctcaattggactcggcgcaagcgtcgttgaaagagagtgaagcggcgatgtcggaaaccgactcggaactgggcggcatcctggccaagcgggaggcggcacaagcgctgcgcgaagagacgcacgcgctcgttgcagaagtggatgccgaacttgccgaacgaatcgaggccctgcgagcggagattctcggcgaacaccagctttccgtcgagtcatgcgacaaccgcgagcgggacgtgcgagaagcgttgacaacccgtatcgacaacgaaacgaagtcactcggccgcctggccgaaagaatcgtcaaggcaatggcggccttcaaggaagcctacaagctcgaaacggccgacttcgatgcgagcctcgacgcgaacccggagtaccgtgacatgcttgcgcggctgcaggcggacgatttgccgcgcttcgaaacgcgtttcaaggagctgctcaacgtcaatacgatcaacgagatcgccaactttcacgcccagctcgcgcgcgaacgggcgacgatcaaggaacgcatcgaacgcatcaacgaatcgttgcgacaaatcgactacaacgcgggccgatacatcatcctcgagagtcagcccagccccgacgcggaaatccgcgatttccagagcgacctgcgcgcttgcaccgagggcgagctcaccggctcggacgatagccaatactcggaggccaagttcctgcaagtcaaacgaatcatcgaccgcttccgcggccgcgaagggttgaccgagcaggaccggcgttggcgcgccaaggtgaccgacgtgcgcaactggtttctgttcgccgccagcgagcgctggcgcgaagacgacagcgaatacgaacactactcggactccggcggtaaatcgggcggccagaaggaaaagctcgcctacacgatccttgccgcgagcctcgcctaccagttcggcctcgaatggggcgccgtgcgttcccgatcgttccgcttcgtcgtcatcgacgaagcatttggccgaggctccgacgaatcggcgcagtacggtctcacgctgtttcagaaactgaacctgcaactgctgatcgtcacgccgctgcagaagattcacatcatcgagccgttcgtttcgagtgtcggattcgttcagaacgacggtggacgcgcctccaagctgcgcaccctgtcgatcgaggagtaccgcgcgcacaaggcggagttcgagcaatga

SEQ ID NO: 49336 - DNA, 1185 bp, Burkholderia ubonensis
atgagctggacaactgccgtcgaactgcgtgcccgcctccagcacctatgggcacgcggcgaatggctgcgaagcttcgtagacggcaccgaggggctattcccgctacgtctggcgatcaaaggcccgagttcgtccgagctggctgaacgcttcgacgcggtacgcgcatggatcgcggaaattgccgcgacgccgcacatacgcatcgaatggcgagaaatcaatcatcgaattctcggcgtgcagcgtttgccacgagcggcctgggtcgacagtctggacgatgcgctcgcagtcgccggcaagcaccgcgacgcagcgcagttcgcgcggctgctcgaaatcactcgcgcccgccagccgaagctcgccgcgtggcttgcgcagcgcccgttgcaagccctcgaattcgccggcgattgggaacgactgctggcagtcgtcgattggctgcaagcacatccgcacccgggcgtctatcttcgccaagccgaaatcgccggcgtcgacacgaaattcatcgaggcaaggcgcggcgtcctctcccaatggctcgatctcgtgctgccgtccgaggcgatcgacagcagccggacaggcgtcgctcaattcgccgcgcgctacgggttccgcgagaagcaaccccgtattcgatttcgcgtgctcgatgagcggctcgccgttctgcccggcatgggccgccccgacatcgcactcgacgccgacagcttcgcgcgcctcgcactgccgtgccgccatgttttcgttacggaaaacgaaacaaattttctggcgtttcccgacgttccgcaggcgatcgtgctcttcggagcgggctacggctgggaagctctggagccggcgcgatggctcgcggactgtgcgctccactactggggcgacatcgacacgcacggctttgccattctcgaccaattgcgttgccgattccctcacgtgaactccttcctgatggaccgcgcgacactgatggcgcatgaagcattctggggagacgaaggcgatcaggtcgtgcgtgatctgccgcgactcacggcgcaagagcgcgagctctttgacgacctgcgtgacaaccggattcgccgcggattgcggctcgaacaggagcgcgtcgggttcgggtgggtcagagcggcgctagaggaacggtctttcgtttag

SEQ ID NO: 49337 - DNA, 1467 bp, Burkholderia stagnalis; identical to SEQ ID NO: 49031

SEQ ID NO: 49338 - DNA, 654 bp, Burkholderia stagnalis; identical to SEQ ID NO: 49032

SEQ ID NO: 49339 - DNA, 3372 bp, Burkholderia stagnalis; identical to SEQ ID NO: 49033

SEQ ID NO: 49340 - DNA, 1185 bp, Burkholderia stagnalis; identical to SEQ ID NO: 49034

SEQ ID NO: 49341 - DNA, 1467 bp, Burkholderia stagnalis; identical to SEQ ID NO: 49031

SEQ ID NO: 49342 - DNA, 654 bp, Burkholderia stagnalis; identical to SEQ ID NO: 49032

SEQ ID NO: 49343 - DNA, 3372 bp, Burkholderia stagnalis; identical to SEQ ID NO: 49033

SEQ ID NO: 49344 - DNA, 1185 bp, Burkholderia stagnalis; identical to SEQ ID NO: 49034

SEQ ID NO: 49345 - DNA, 1467 bp, Burkholderia stagnalis; identical to SEQ ID NO: 49031

SEQ ID NO: 49346 - DNA, 654 bp, Burkholderia stagnalis; identical to SEQ ID NO: 49032

SEQ ID NO: 49347 - DNA, 3372 bp, Burkholderia stagnalis; identical to SEQ ID NO: 49033

SEQ ID NO: 49348 - DNA, 1185 bp, Burkholderia stagnalis; identical to SEQ ID NO: 49034

SEQ ID NO: 49349 - DNA, 1461 bp, Burkholderia ubonensis
atgttcctcgactaccctaccctcgacgcgctgcgcacgcgccatcccgcttggcgacttttgcgctccgaccacgcgccgctcgccgtcagcttcctgcaccgcgcgttcgtcgcgccgaacgtgcgcgaggtggcggctccgtttcttgccgaagcactcgaggacgagctttacgcgttgcgcgaacaactcggcgacggcgccttcccgaagcccgcgctcgagtatctgaacgactgggcgagtcctgaaaagggatggttgcgcaaattctatcgccaaggctccgatgaaccgcatttcgacctgacacccgccgcaggaaaagcgatcgcgtggctcggcacgctgatggaacgaagctttgtcggcacggaatcccggctcctgacgcttttcgagttgctgcggcagatggccgaaggcagcgagacggacccggaaaggcgtcttgccgagctccacgcgcggcgcagccagctcgacgaagaaatcgctcgcgtggaggccggtgacgttcggctgctcgacgatgccgcgatcaaggaccgctttcagcaattcatgcagatggcgcgcgacctgctcacggatttccgtgaagtcgagcagaacttccgtctgctggaccggcatgtacgcgagcgaatcgcgctctgggaaggatcgaagggtgcgctcatcgaagaaatcatgggcgagcgcgacgcgatcgccgattcggaccagggcagcagctttcgggcgttctgggacttcctgatgtcgagccgccgccaggaggaactctccgaacggctcgagcacgtgcttgcgctcccggcgatcacggaaatgaagccggacgcgcgcacgcggcgcgtccactatgactggctggaagccggcgagcacacgcaacgcacggtcgctcagctctcgcagcagcttcgacgtttcctcgacgatcaagcgtggctcgaaaaccgccgcatcatggacattctgcgcggtatcgaaacgaaagcgcttgtgctgcgtgaagcgcccccgccgggctccgtcatggagatcgagaccgcgtccgctgacatcgagctgccaatcgaacgcccgctttacgcgccggcgctgcgccctctcatcgccaacgtcgcaatcgagaccggcgatgcggacctcgatgcgtcggcactctacacgcagatcgttgtcgatcgcgcgcgcctcgcaagccatatccgccgctgccttcaagatcggcggcaagtgacacttgccgaactggccgcttcgcagccgctcttgcacgggctcgctgaactcgtcgcctatttgcaactcagcgccgaagccggatcatttcgtgcgaccgtcgatgagaccgtctccgatacgatcgagtggcaggcgaacgatgccaacggagcagcaatcgtcaagcgcgcaacgatgccgcgggtgattttcacaaggtag

SEQ ID NO: 49350 - DNA, 651 bp, Burkholderia ubonensis; identical to SEQ ID NO: 48916

SEQ ID NO: 49351 - DNA, 3372 bp, Burkholderia ubonensis
atgaatgagccgcgcacgctcggcctcgattttgccgcggacgacacccggacgggctttcgcctcgagcggctcgaggttttcaactggggcaccttcgacgaacgggtctgggtgctgcgggtcgacggccgcaacggcctgctgacaggagacatcggttccggcaagtcgacgctcgtcgacgccattaccaccctcctcgtgcccgcgcagcgcatcgcctacaacaaggcggcaggcgcggacagcaaggaacgtacgctgcgctcgtatgtgctcggctactacaagtcggagcgcaacgaggtcacgggaacggccaagcccgtgagcctgcgcgaccataacagctattcggtgattttgggcgtgtttcgcaacgccgggtacgacgccaccgtcacgctcgcgcaagtgttctggatgaaggacgcgcaggctcaacctgcgcgattcttcgtcagcgccgaacgagatctctcgatcgcgacggacttctcgcgcttcggcaccgacattgcgcagctgcgcaagaagctgcgcgggctgggcgccgaaatcgaggacacgtttccgaaatacagcgcctggttccggcggcgcttcggaatcgaaaacgagcaagcgctcgagctctttcatcaaacggtatcgatgaagtcggtgggcaatctcaccgacttcgtacgcagccacatgctcgagccgttcgacgtcgcaccgcgcgtcgacgccctgattgctcacttcgacgatctgaatcgcgcgcacgaggcagtactgaaaaccaagcgccaagtggaactgctgacaccgcttgtcgacgactgcgaccgccacagcgagcaaggacacgttctcgaaggctggcgcgcgtgccgtgaagcattgaggccctacttcgccgggctcaagctcggcctcgtcgaacgccgcctccaattgctcgaggaggatcatgcgcgcgcgacctcgcgaaaggcgcggcacgaagaagcgcgcgaccaggcgcgccagcgcgtggacgatttgcgccgtgccgtggccgaacaaggcggcgatcgcatcgcgcagctcgatgtcgagatccgcgagcacgagcgagaaagcgtgcgtcgccgcgaacgggcgcaacgctatgccgccatcgttacgctgttcggcgaaaccgaggccgcggatgaggctgcattcgcctcccagcgccaacgcgtggccgagcagcgcagctcactcgttgacgacgaagcgcaacagcaaaatgcgataaccgaatggagcgtggcatttcgcgaaggcaaagcgcggcgtgatttgctggaggacgaaatcgcgagcctgaaagctcgacgcaacaacatcccgaaggaacaggtcgcgatgcgggcgagcctgtgctcagcgctcggcctggaggaagacgccctgccgttcgcgggcgaactcattcaggtgcgcgaggatgcgcgtgattgggagggcgccgccgagcgcgtcctgcgcaacttcggcctgtcgctgctcgtgcccgacgagcactatgcgaacgtcgcggcgtgggtcgatcgcactcatcttcgggggcggctcgtctactttcgcgtgcgctccgaacgcaccgcgcgtgcagccgaggccatcgagctgcaccgccactcgctcgcgcacaagctcgcgatcaagcccgactcgcagttctatggctggctcgagcgcgaaatcggccgccgtttcgactatgcctgctgcgatacgcaggagcagtttcggcgcgagacgcgcgcgatcacgcgtgcgggccaggcgaaagcgcctggggagcgccacgaaaaagacgaccgccacgcgctcgacgatcgcagccgctacgtgctcggttggagcaacacggcaaaaatatccgcccttgcagcacaacggcaagcgctcgaagctcgccttggcgagatcgggcaaaggctcggagaggcccaacacgagcacaccaaggtgcgtgagcaactcgaagcacttgcgcgtgccggcgagttcgccgagtttcgggaaatcgattggtcgagctgcgctgccgcgatcgcacgtcttgcggacgaaaaggcgcgactcgaatcggcaagcgacgccctcgcagagctaacggctcaattggactcggcgcaagcgtcgttgaaagagagtgaagcggcgatgtcggaaaccgactcggaactgggcggcatcctggccaagcgggaggcggcacaagcgctgcgcgaagagacgcacgcgctcgttgcagaagtggatgccgaacttgccgaacgaatcgaggccctgcgagcggagattctcggcgaacaccagctttccgtcgagtcatgcgacaaccgcgagcgggacgtgcgagaagcgttgacaacccgtatcgacaacgaaacgaagtcactcggccgcctggccgaaagaatcgtcaaggcaatggcggccttcaaggaagcctacaagctcgaaacggccgacttcgatgcgagcctcgacgcgaacccggagtaccgtgacatgctcgcgcggctgcaggcggacgatttgccgcgcttcgaaacgcgtttcaaggagctgctcaacgtcaatacgatcaacgagatcgccaactttcacgcccagctcgcgcgcgaacgggcgacgatcaaggaacgcatcgaacgcatcaacgaatcgttgcgacaaatcgactacaacgcgggccgatacatcatcctcgagagtcagcccagccccgacgcggaaatccgcgatttccagagcgacctgcgcgcttgcaccgagggcgagctcaccggctcggacgatagccaatactcggaggccaagttcctgcaagtcaaacgaatcatcgaccgcttccgcggccgcgaagggttgaccgagcaggaccggcgttggcgcgccaaggtgaccgacgtgcgcaactggtttctgttcgccgccagcgagcgttggcgcgaagacgacagcgaatacgaacactactcggactccggcggtaaatcgggcggccagaaggaaaagctcgcctacacgatccttgccgcgagcctcgcctaccagttcggcctcgaatggggcgccgtgcgttcccgatcgttccgcttcgtcgtcatcgacgaagcatttggccgaggctccgacgaatcggcgcagtacggtctcacgctgtttcagaaactgaacctgcaactgctgatcgtcacgccactgcagaagattcacatcatcgagccgttcgtttcgagtgtcggattcgttcagaacgacggtggacgcgcctccaagctgcgcaccctgtcgatcgacgagtaccgcgcgcacaaggcggagttcgagcaatga

SEQ ID NO: 49352 - DNA, 1185 bp, Burkholderia ubonensis
atgagctggacaactgccgtcgaactgcgtgcccgcctccagcacctatgggcacgcggcgaatggctgcgaagcttcgtagacggcaccgaggggctattcccgctacgtctggcgatcaaaggcccgagttcgtccgagctggctgaacgcttcgacgcggtacgcgcatggatcgcggaaattgccgcgacgccgcacatacgcatcgaatggcgagaaatcaatcatcgaattctcggcatgcagcgtttgccacgagcagcttgggtcgacagtctggacgatgcactcactgtcgccggcaagcaccgcgacgcagcgcggttcgagcggctgcttgaaatcacacgctcgcgccagccgaagctcatcgcgtggcttgcgcagcgcccgatgcaggccctcgaattggccggcgattgggaacgactgctggcggtcgtcgattggctgcaagcacatccgcacccgggcgtctatcttcgccaagccgaaatcgccggcgtcgacacgaaattcatcgaggcaaggcgcggcgtcctctcccaatggctcgatctcgtgctgccgtccgaggcgatcgacagcagccggacaggcgtcgctcaattcgccgcgcgctacgggttccgcgagaagcaaccccgtattcgatttcgcgtgctcgatgagcggctcgccgtcctgcccagcatgggccgccccgacatcgcactcgacgccgacagcttcgcgcgcctcgcactgccgtgccgccatgttttcgttacggaaaacgaaacaaattttctggcgtttcccgacgttccgcaggcgatcgtgctcttcggagcgggctacggctgggaagctctggagccggcgcgatggctcgcggactgtgcgctccactactggggcgacatcgacacgcacggctttgccattctcgaccaattgcgttgccgattccctcacgtgaactccttcctgatggaccgcgcgacactgatggcgcatgaagcattctggggagacgaaggcgatcaggtcgtgcgtgatctgccgcgactcacggcgcaagagcgcgagctctttgacgacctgcgcgacaaccggattcgccgcggattgcggctcgaacaggagcgcgtcgggttcgggtgggtcagagcggcgctagaggaacggtctttcgtttag

SEQ ID NO: 49353 - DNA, 1467 bp, Burkholderia stagnalis; identical to SEQ ID NO: 49031

SEQ ID NO: 49354 - DNA, 654 bp, Burkholderia stagnalis; identical to SEQ ID NO: 49032

SEQ ID NO: 49355 - DNA, 3372 bp, Burkholderia stagnalis; identical to SEQ ID NO: 49033

SEQ ID NO: 49356 - DNA, 1185 bp, Burkholderia stagnalis; identical to SEQ ID NO: 49034

SEQ ID NO: 49357 - DNA, 1467 bp, Burkholderia stagnalis; identical to SEQ ID NO: 49031

SEQ ID NO: 49358 - DNA, 654 bp, Burkholderia stagnalis; identical to SEQ ID NO: 49032

SEQ ID NO: 49359 - DNA, 3372 bp, Burkholderia stagnalis; identical to SEQ ID NO: 49033

SEQ ID NO: 49360 - DNA, 1185 bp, Burkholderia stagnalis; identical to SEQ ID NO: 49034

SEQ ID NO: 49361 - DNA, 1461 bp, Burkholderia ubonensis; identical to SEQ ID NO: 49071

SEQ ID NO: 49362 - DNA, 651 bp, Burkholderia ubonensis; identical to SEQ ID NO: 49072

SEQ ID NO: 49363 - DNA, 3372 bp, Burkholderia ubonensis; identical to SEQ ID NO: 49073

SEQ ID NO: 49364 - DNA, 1185 bp, Burkholderia ubonensis; identical to SEQ ID NO: 49074

SEQ ID NO: 49365 - DNA, 1467 bp, Burkholderia stagnalis
atgcccctcgactacccgaccctcgattcgctgcgcacgcgccatcccgcctggcgcctgttacgctcggatcacgcgccacttattgtcagcttcctgcaccgcgtgttcgtcgcaccgaacatgcgcgtggtagcggcgccgcttcttgccgaagcactcgacgacgaactttacgcgttacgcgaacaactcggcgacggggccttcccgaagcctgcgctcgagtatctgaacgattgggccggccctgaaaagggatggttgcgcaagttctatcgccaagattctgatgaaccgcagttcgacctgacacccgccgcggagaaagcgatcgcctggctcggcacactgacggaacgcagctttgtcggcacggagtcgcggctcctgacacttttcgagctgctgcggcagatgggcgaaggtagcgaggcaaacccggaaaagcgtctcgccgagctccacgcgcggcgcagccagatcgacgcagaaatcgcgcgcgtcgaggccggtgacgttcggctgctcgacgatgccgcgctcaaggaccgctttcagcaattcatgcagatggcgcgcgacctgctcgcggatttccgtgaagtcgagcaaaactttcggctgctggaccggcacgtacgcgagcggatcgcgctttgggaaggatcgaagggcgcactcatcgaggaaatcatgggcgagcgcgacgcgatcgccgattcggaccagggcagcagcttcagggctttttgggacttcctgatgtcgagccgccgtcaagaggaactctcggaacggctcgagcgcgtcctggcgctgccggcgatcaccgaaatgaggcccgacgcgcgcatgcggcgtgttcattacgactggctggaagcgggcgagcatacgcaacgcacgatcgctcagctttcgcagcagcttcgacggttcctcgacgatcaagcgtggctagaaaaccgccgtatcatggacatcctgcacggcattgaaacaaaggcgcttgcgctgcgcgaagcgcccccgccaagcgccgtcatggagatcgagaccgcgtccgctgacaccgagctgccgatggaacgcccgctttacgtgccggcgctgcgccctgtcatcgccaacgtcgccatcgagaccggcgaggcggacctcgatgcctcgccgctctacacgcagatcgtcgtcgatcgcgcgcgcctcgcaggccacatccgccgatgcctccaggatcgaccgcaagtgacgcttgtcgaactggcggcctcgcagccgctcacgcatgggctcgccgagctcgtcgcctatttgcagttgagcgccgaagccggatcatttcgcgcgaccgtcgatgagaccatcaccgacacgatcgcgtggcagacgaacgacgccgacggaaccacgagtgccaaacgcgcgacgatgccacgcgtgattttcacaaggcaaagatga

SEQ ID NO: 49366 - DNA, 654 bp, Burkholderia stagnalis; identical to SEQ ID NO: 49032

SEQ ID NO: 49367 - DNA, 3372 bp, Burkholderia stagnalis; identical to SEQ ID NO: 49033

SEQ ID NO: 49368 - DNA, 1185 bp, Burkholderia stagnalis; identical to SEQ ID NO: 49034

SEQ ID NO: 49369 - DNA, 1467 bp, Burkholderia stagnalis; identical to SEQ ID NO: 49031

SEQ ID NO: 49370 - DNA, 654 bp, Burkholderia stagnalis; identical to SEQ ID NO: 49032

SEQ ID NO: 49371 - DNA, 3372 bp, Burkholderia stagnalis; identical to SEQ ID NO: 49033

SEQ ID NO: 49372 - DNA, 1185 bp, Burkholderia stagnalis; identical to SEQ ID NO: 49034

SEQ ID NO: 49373 - DNA, 1467 bp, Burkholderia stagnalis; identical to SEQ ID NO: 49365

SEQ ID NO: 49374 - DNA, 654 bp, Burkholderia stagnalis; identical to SEQ ID NO: 49032

SEQ ID NO: 49375 - DNA, 3372 bp, Burkholderia stagnalis; identical to SEQ ID NO: 49033

SEQ ID NO: 49376 - DNA, 1185 bp, Burkholderia stagnalis; identical to SEQ ID NO: 49034

SEQ ID NO: 49377 - DNA, 1467 bp, Burkholderia stagnalis; identical to SEQ ID NO: 49031

SEQ ID NO: 49378 - DNA, 654 bp, Burkholderia stagnalis; identical to SEQ ID NO: 49032

SEQ ID NO: 49379 - DNA, 3372 bp, Burkholderia stagnalis; identical to SEQ ID NO: 49033

SEQ ID NO: 49380 - DNA, 1185 bp, Burkholderia stagnalis; identical to SEQ ID NO: 49034

SEQ ID NO: 49381 - DNA, 1461 bp, Burkholderia ubonensis
atgttcctcgactaccctaccctcgacgcgctgcgtacgcgccatcccgcttggcgacttttgcgctccgaccacgcgccgctcgccgtcagcttcctgcaccgcgcgttcgtcgcgccgaacgtgcgcgaggtggcggctccgtttcttgccgaagcactcgaggacgagctttacgcgttgcgcgaacaactcggcgacggcgccttcccgaagcccgcgctcgactatctgaacgactgggcgagtcctgaaaagggatggttgcgcaagttctatcgccaaggctccgatgaaccgcatttcgacctgacacccgccgcaggaaaagcgatcgcgtggctcggcacgctgatggaacgaagctttgtcggcacggaatcccggctcctgacgcttttcgagttgctgcggcagatggccgaaggcagcgagacagacccggaaaggcgtcttgccgagctccacgcgcggcgcagccagatcgacgaagaaatcgctcgcgtggaggccggtgacgtccggctgctcgacgatgccgcgatcaaggaccgctttcagcaattcatgcagatggcgcgcgacctgctcacggatttccgtgaagtcgagcagaacttccgtctgctggaccggcatgtacgcgagcgaatcgcgctctgggaaggatcgaagggtgcgctcatcgaagaaatcatgggcgagcgcgacgcgatcgccgattcggaccagggcagcagctttcgggcgttctgggatttcctgatgtcgagccgccgccaggaggaactctccgaacggctcgagcacgtgcttgcgctcccggcgatcacggaaatgaagccggacgcgcgcacgcggcgcgtccactacgactggctggaagccggcgagcacacgcaacgcacggtcgctcagctctcgcagcagcttcgacgtttcctcgacgatcaagcgtggctcgaaaaccgccgcatcatggacattctgcgcggtatcgaaacgaaagcgcttgtgctgcgtgaagcgcccccgccgggctccgtcatggagatcgagaccgcgtccgctgacatcgagctgccaattgaacgcccgctttacgcgccggcgctgcgccctctcatcgccaacgtcgcaatcgagaccggcgatgcggacctcgatgcgtcggcactctacacgcagatcgtcgtcgatcgcgcgcgcctcgcaagccacatccgccgctgccttcaagatcggcggcaagtgacacttgccgaactggccgcttcgcagccgctcctgcatgggctcgctgaactcgtcgcctatttgcaactgagcgccgaagccggaacatttcgcgcgaccgtcgatgagaccgtctccgatacgatcgagtggcaggcaaacgatgccaacggagcagcaatcgtcaagcgcgcaacgatgccgcgggtgattttcacaaggtag

SEQ ID NO: 49382 - DNA, 651 bp, Burkholderia ubonensis; identical to SEQ ID NO: 48968

SEQ ID NO: 49383 - DNA, 3372 bp, Burkholderia ubonensis; identical to SEQ ID NO: 49129

SEQ ID NO: 49384 - DNA, 1185 bp, Burkholderia ubonensis
atgagttggacaactgccgtcgaactgcgtgcccgcctccagcgcctatgggaacgcggcgaatggctgcgaagcctcgtagacggtgccgaggggctattcccgctacgtctggcgatcaaaggcccaagctcgtccgagttggctgaacgcttcgacacggtacgcgcatggattacggaaattgccgcgacgccgcgcatacgcatcgaatggcgagaaatcaatcatcgaattctcggccagcagcgtttgccacgagcagcttgggtcgacagtctggacgatgcgctcactgtcgccggcaagcaacgcgacgcagcgcggttcgagcggctgcttgaaatcacacgctcgcgccagccgaagctcatcgcatggcttgcgcagcgcccgatgcaggccctcgaattggccggcgattgggaacgactgctggcagtcgtcgattggctgcaagcacatccgcagccgggcatctatcttcgccaagccgaaatcgccggagtcgacacgaaattcatcgaggcgcggcgcggcgtcctctcccaatggctcgatctcgtgctgccgtccgaggcgatcgacagcagtcggaccggcgccgcccaattcgccgctcgctacgggttccgcgataagccgcctcgtattcgatttcgcgtgctcgatgagcggctcgccgtccttcccggcatgggccgacccgacatcacactcgacgccgacagcttcgcgcgcctcgcactgccgtgccgccatgttttcgttacggaaaacgaaacaaattttctggcgtttcccgacgttccgcaggcgatcgtgctcttcggagcgggctacggctgggaagctctggaaccggcacaatggctcacggactgtgcgctccactactggggcgacatcgacacgcacggctttgccattctcgaccaattgcgttgccgattccctcacgcgggatccttcttgatggaccgcgcgacactgatagcgcatgaagcattctggggagacgaaggcgatcaggtcatgcgtgatctgccgcgactcacggcgcaagagcgcgagctctttgacgacctgcgtgacaaccggattcgccgcggattacggctcgagcaggagcgcgtcgggttcgggtgggtcagagcggcgctagaggaacggtctttcgtttag

SEQ ID NO: 49385 - DNA, 1467 bp, Burkholderia stagnalis; identical to SEQ ID NO: 49031

SEQ ID NO: 49386 - DNA, 654 bp, Burkholderia stagnalis; identical to SEQ ID NO: 49032

SEQ ID NO: 49387 - DNA, 3372 bp, Burkholderia stagnalis; identical to SEQ ID NO: 49033

SEQ ID NO: 49388 - DNA, 1185 bp, Burkholderia stagnalis; identical to SEQ ID NO: 49034

SEQ ID NO: 49389 - DNA, 1461 bp, Burkholderia ubonensis; identical to SEQ ID NO: 49265

SEQ ID NO: 49390 - DNA, 651 bp, Burkholderia ubonensis; identical to SEQ ID NO: 49048

SEQ ID NO: 49391 - DNA, 3372 bp, Burkholderia ubonensis; identical to SEQ ID NO: 49267

SEQ ID NO: 49392 - DNA, 1185 bp, Burkholderia ubonensis; identical to SEQ ID NO: 49268

SEQ ID NO: 49393 - DNA, 1467 bp, Burkholderia stagnalis; identical to SEQ ID NO: 49031

SEQ ID NO: 49394 - DNA, 654 bp, Burkholderia stagnalis; identical to SEQ ID NO: 49032

SEQ ID NO: 49395 - DNA, 3372 bp, Burkholderia stagnalis; identical to SEQ ID NO: 49033

SEQ ID NO: 49396 - DNA, 1185 bp, Burkholderia stagnalis; identical to SEQ ID NO: 49034

SEQ ID NO: 49397 - DNA, 1467 bp, Burkholderia stagnalis; identical to SEQ ID NO: 49031

SEQ ID NO: 49398 - DNA, 654 bp, Burkholderia stagnalis; identical to SEQ ID NO: 49032

SEQ ID NO: 49399 - DNA, 3372 bp, Burkholderia stagnalis; identical to SEQ ID NO: 49033

SEQ ID NO: 49400 - DNA, 1185 bp, Burkholderia stagnalis; identical to SEQ ID NO: 49034

SEQ ID NO: 49401 - DNA, 1494 bp, Burkholderia sp. MSMB1459WGS
atggctgttcacgacctaaccgaccaaattcgccaagagaaggtggccgagcgctatccgccgctgttcaaccgcctgcccgaccgccttttcgctccgctagcctcagccaatcgcttccaatattggacactgctgtgcgcgctgcacgccaaacgcttcggccccgaggccccgttacccccaagcactggcttcctgatgcgcgagatcacggccgacatcgccgaggaacttcagtatcaggactggacgccagagagcgatgatgtgactcccgccacgccgctggcgatccgggccatcatggtattcaatcgcttgcgcgacgcaggatggatccgtgtggaccgggtgggcgtgcgcgaaatggtgacgatggcgccggccgtcgcccacttcatgaaccgcctcgtcgagttcgcccacacaggcccagaattcgtctccggcaagatccgcagcatcgaagccaacctgaagctgcttcttgacgagagcaccgatggcgcctcgctgcaggaggcagctcgccagtcgcgcgccctacttgaacacgtgcgcatcgccggcacgaacgtgcgcgatctgatgttggagatcggccgcgtcgatgccaccggcgaattcgtgaggcgtttcttcgacgactacgtcgagcgcatgttcatcggcgactacaaggaactgcgcacgcgcgagcatccgctcgctaggcgccaggagatcctgcgcctggtgacccatatccaacagacgcaagatctgcgtactcgtttaatccagtggtatctcgaaaagcaggctggtcgcgaccccacccgcgctgaagccatgttcgagcgcgacatccaaaaggtcgaggatctgcgccggatcgacgaatacttggaccgactggacgacgaaatccggcgcgccaacaagctcgcgttggcctacctagactaccggcttcgggccgctcgccccctcgacgatctgatcaaccaagccatcgatgccgtggtcaagcacggcagcaacgcggccgcgctcgcaccgtttgctcctggcgactgcatcggcggcgaacgactggcttcaccgcgcatcgagacccgacgtgcgccacccaccggactacgcaagcaagtgatgtccccggaacaggaggcaagggcccgcctggccctgatggctcgggaccggcgcacgatgtcgctgcccaagctcgcggccttcgtgcgccagcagctaggcgaggctgatgcggcacccagcactgctcttcaagtgaatagcatcgagtcagtccgagcgctgcaggtcttgtgcaccattgccaccgcgaacgcgacgtccagcaagctgctgcgtgccaacgcacgggccatgagcagcggattcaccacggtccggatggaaggcgaagaggatcggaaccacggcatctctcacctgcccttcacgatcgcaagaacaaccaagcccgccaagggaggaaaccaatga

SEQ ID NO: 49402 - DNA, 663 bp, Burkholderia sp. MSMB1459WGS
atgagtttctggacggatgcagcgacggccaccaaaaacgtcgtcaccgaggatgatttcgaggcagcggcaaatcggttaatcaccgaacaagtcttgtacgcagcagatcgcggcagcaaggtggcgtacggactgattcgcgacttcgagcgtgagttcaagcgggccctggaaccactcggctacatcgtgagagtcaacagccaattgcgctatgcctgcgcgatccccaagcacgctaggacgtcaccggtcaccgttgaccagacactgcttgcactcgtgctacgcaagatcttcgacgaggagactcgatccgggcatcatgacgagaacggcgaggtggcctgcgatctggtcaccttggaggtcaagtacaagcaaatgacggggggccgcgaattggccaccgggggtaagctcgccgcgctcatccagtggatgcggcgctggggcctcgcccgggtgtcggacgaggacggcaatccgttcggtcacgatgctggtcaaccctacgccctcatcattcgccccggcatcgccgagatcctgggagagggggcactggcacgcatcgccctgttcaccagcccggacgccgaggcggatggcgcggacctgacaatcacctccaccacgcaagaaggcggtgccgcatga

SEQ ID NO: 49403 - DNA, 3444 bp, Burkholderia sp. MSMB1459WGS
atgaagaagctgatccggatccgggtggtccagtttttcttgtacgaaatgcgtgatgtcgaagttggcacgaactgcggcatcttcggcgccaacggcagcggcaaatcctcgctcctggacgcggtacaaatcgtgatgctaggggccaacgagagccgcagcagcgcaggcgtcgccttcaacgcacaagctgacgagtccaaccacaacagccgcaatatccgcagctactgcctgggccagtatggcgattcaccggacgcgcgcgttcgcgacagtgccaacacttacatcaccctggtctgggaggacaccacgactcgggagattgtttccaccggtgtgagcatctacgtgagcgccgaacgcgaaaagtccgacgtgcaaggtcgctacattcttcccgcagacatcgcgctgagcgaccatctggagctggtcgacggcgagtatcggccgcggccatgggcaagcttcagacagatgctctcacaacgtgctcacggcgaggaagtgctcttccacgactccgagcgcttcgtcagcgcaatgctgttccgtctaaggggtgcacgcggtgcgccgcgcttggatgcctatcgtcaggcgtttcgtttcgggctgcgcatgaagttcgacaagagcgtcgacgacatcgtccgccagcaggtgctggagacccggccgaccaacatcaagcgattcaaggacgtgctgcacactttccaggagatggcggctctcgtgcgcaacgtgcaggccaagctcgacgaggccgaattgatcgagacggatttcgccgatgcgcaccgacgcaatacgcattcggtctcgctcgctgccttggcgcaagctgccgagcttgaggttgccaacgaaacggtgagcgccgcagaacaagccgaagcccacgcagcggcagcactgaaagacgccaatgcccgacgtgacgaagtcaaccgtcaggtcgaagcggccgagcaacgcgcccgcgatagcgcctctgcccgggacaagcacgcgtcccacgcggacgctgcgctgctgcgcgaaagcctcataaagatacaaaaccggctcactgaacaaagaacgggactgcatcgcagcatcaaagccatcggcagggcgatcgacacacagatccctggcaagctcatcgccgacagcgccgaggccactgcacacgcgttcaaggacatccatgccctgctagaggagggtaagctcagcacacgcgatgcggtagagtcgaccgtccgcaaggcgctgcgcgcggccaaactattaagcaacgaggtgttcgaggagatgcagttcgtcggtcgcgcgcagacagcagccgaggccgagctcgccggcgtgcaagagaaccaggcgcgcatcgccaagggcaagccacctctggaggggccggccgcggcgctcaaacgcgcgctactcaatgctggcatagaggctacgccggtgtgcgacctggtgcgcgtcgaggacccggactggcaacctgccatcgagtcctatctgggtacgtcgaatctgcaagccctgctagtcgacgagaccgatgagcgcaatgcattccgggtgtcgcgtcaggctgcgatctacgatgcgaaggtcgtcatgcccagcaagttctcccgtcgcagcagccccaggcacggtgccgtggcagagctcatcagtggtaacagcgctgcagcggtcaactacctgcgatctaagttcggtgacacgcaacgggcagagactgaggacgaatgcttcgctcatcgcttcgcaatgaccaaggacggcatgttgctggcggatggcgagatggtgcgcaagaagccggcgaatcccgccctcttcaagatcggcccaacctcgacggcgactcgcacttccatcgccgaacaagcccgtcagctccacgagaaaattgacggactgaaagaaaggtataccaagctcaaggagctcttcaataaccttggcccattcgcgggtgccgagcaggacaaggttcacgacgtcctcgacatcttcgatcggattatcaaggaggctgcggacgagcaggatctcacgcagcgcctgcaagcgctcgatactgaagagtatcgccagttggtacaagtagccgaagcagcagaaacgaccttgggcgacgtgcgaaaacagctgcttgctgcggccgaggcggtcggcgcggccgagacgtcatgtcagcaaaaacgcgaagacaccaagaagaagcaggatcgggccgctacccaaaagggaatcgctgaagcagcgcgtgcggttgacggttacgacgccgactacgcatcggaccaatgggaaaggctattgatacgccagggcctgtctttcagtgagatcgtcgtcgattgcaaacaccgcagcgcccgcgccgagacagactcgcgtcagaaatggtccagtgccatgcagaagctgtcggctttccttgtccggcacaacgagttcgtgcctgacgggatacaggacgactggcgcagcgcccgcgcttggctgcaagcacgggtcacagtcctgaccgagaccggcctgcgcgaaaacaaggcgcggatggaagatgccctgagcgctgccaagagcaccttccgcaacgacgttgcggtcgcgctgcacgagcaccttgagtggttgagcgataccatcaaccgaatgaacgaggccctgcgcctggcgccgatgttcaccaacaacgaacgctatcagttccgcacgcatgtgcgacccgcgttcgctgcgctgctgaaattcatcaaggacgtcgcccaatacggctcgacggaggacttgctcggcggcgctggagagttgcccacggagttcgaggagctgatgcgcgaaaagaccgtcaccggcgcggcagcggtgaagtcccccctggacgactatcgcgagttctttgacttcgatatcgaggtgctccgtgaagaggcctccactggcacgaccaagcacatcggctggcttagcaaacgtgtcgggtccggctctggtggcgagcatcgcgctccgctgtatgtcatcgcgggcgccgcactctcgtcagcctatcggctggagcgcggcgacgataccggcatccggctgctggtgatcgacgaggccttcatcaagatggacccgaggaatatcgtggccaccatgcgctacttcgaagagcttggcctgcaggtcttcatggccagcaccggcgacgccttgggtagtctcaccgccttccttgatcgctactatgacatcatgcgcgatgccgagagcaatgtcgtggtactcgagggccacgacgtgcttcccgagacgcgcgagatgttccgcgccgacctgcctgaattcaacccggaactggtcgaagctgagatcagaaggcaatacctgccgcgggccgactcgacggaaagtgccgcggcatga

SEQ ID NO: 49404 - DNA, 1182 bp, Burkholderia sp. MSMB1459WGS
atgagccaccaagacaagatggatccgctggccaggaaggcgctggagcgcctgctgcagtctgccgacaaatacgaggcgggcgccgccgtgcggcgacctgccctgacggactccgcgctgtccgagtatcgcgcgttgcgcagcctgaaggccaaagaggacttcgaggcggtgatggcctacgctcaggccgagggtgcaatcatggtccggcgccctcggggtgaccctcaaggcctgatcgagcgcatcgaactaattgaactcgccaaactggcttcgatcctgggtaaggtgccccacgcggtacgagtgcggtccgcaagacaagtcctcgcctcgcgtcttagtgagcactcaatcttgaacgacatcctgtcaagttgggagagactcaaaaaggtccgcggcattgggcctgacgccgctgccaactgggtcatggcgtgtgacgtcattgcctactgtcgggaccaagtcgcgctcggcgccaccgaaacgccggtgcgggacgccagcgcgcgcctgttcaaggacagcaagcgcatcgagtccttggtgccgtgcctcgacgttttactagcagagaacatcgacgatgatgcacgcccggatgccgaggtgttgcaggagctcgggctttaccgagagccgcagccagcgcgtctagccggcaacatcgtggttcgccgggagcgcggcgcgttcccactggatcgcccctatggcgctctgcctccgtccacggtgctgggcctggggtcgacacccagtcaggtgctgaccatcgagaatcaaaccacgttccacgtatgggcgcgccagcattgtgactccgatgtgctgggcctctacacggctggaatgccctcgcccgcgtggcgggcaatgtaccttcggctgctctctgaactcccggcttcggttccagtgctgcattggggcgacgttgacgaaggcggttttcggatcgccgcagtcctgagtcgttgtgcggccgaggcaggtcatgcccttctgccgtggaagatgagtccgtcagaagttcctgtgtcgttgcgccgggctgcaccgcaaagcaccgttgatcggatggtgaaatacgcccaggagaccgggtgggacggtatcgcatatgagttggctgaagccaagcttgtcgccgagcaggagggctga

SEQ ID NO: 49405 - DNA, 1461 bp, Burkholderia ubonensis; identical to SEQ ID NO: 49333

SEQ ID NO: 49406 - DNA, 651 bp, Burkholderia ubonensis; identical to SEQ ID NO: 49334

SEQ ID NO: 49407 - DNA, 3372 bp, Burkholderia ubonensis; identical to SEQ ID NO: 49335

SEQ ID NO: 49408 - DNA, 1185 bp, Burkholderia ubonensis; identical to SEQ ID NO: 49336

SEQ ID NO: 49409 - DNA, 663 bp, Pseudomonas aeruginosa; identical to SEQ ID NO: 45502

SEQ ID NO: 49410 - DNA, 2940 bp, Pseudomonas aeruginosa; identical to SEQ ID NO: 45503

SEQ ID NO: 49411 - DNA, 1182 bp, Pseudomonas aeruginosa
atgaagtcgcccactgacatcggtcgcagcttggccaggcaatggcagcgttctagtgttcggttggaccgcttactcaattctgctagctggccgcaaagcttcaacatcggcaagccttcggcacgactattctctgacaacatccggacggtgcttcggcatgtggaaaattggcggagcgtgaaagtgggtaaggtcgactgggaacccgtcagctaccgagcagggttggctccaatttccttgccaatgcgctggcacttgcgcagtccctccgaatggattgccgcaaccgacgatccttcggtcagccaggaatacgctcaactcgagtatctggtcgagcaggtagatagttcctttcatgctctgctggtggcgcaacggagcctgtggttgacgaagccctctgaagaagtcatcgctacagcgcagctcgccactcaactatctccgggctgcgctcaaggccgcccattgcgcctgcttgcagagcacggagtggacaccaagtttttcgagcgaaacgctatcttgctgacgaaactcctcgatgagcgcttcgaaggcgcggcgtccgagcaaggtctgacgacttttctggatgcctttgaagaaaccagtcagtgggttctagtcgttcctcttcagcctgagctgctgcccttcaagcggatcaggctcacgacttcggaactggccgaaacctcacttcccggttcgcgattgctcgtggtggaaaatgagcaatgtgttcacttgctacccgaaacgctgccggacaccctcgctgttctgggcgcagggctcgatttgcagtggttggcgtctgcgcatctggccgggaaacagatcgcttactggggcgacatggatacctggggcttactgatgctggcgcgagcgagacaccatcaacctgcagtcgaagcactgctaatggaccgggagctgtttgaccagcactccttgggaagcgcggtcgtcgagccagctaaagctcaggaattggctcccgaaggattgatgaccgacgaagctgatttctatcggtatctccttgcacaggagcgggggcgccttgagcaggagtatctgccacgcaggcaagtcgaacaggctattagtaaatggtttggagagtcggtagcgccggctcatcctgagcgaacggcttga

SEQ ID NO: 49412 - DNA, 1509 bp, Frankia sp. DSM 45899
gtggacacgtcagtggacggctcgctcgactacgacaccgttgacctgttgcgtcggcatgcggcgtggcggctgctgcgggccgatcacgccccactcgtcgtcagcttcctggcccgggtgttcgtggcggagaatgtgcgggagatcgcggcgtcggcgttggtcgaccggctcgacgacactctgtatgcgctcaatcagcggttgggcgccggtacctatccgcgggccgccaaggcgtacttggacgactggtcggcgaccgagcacggctggcttcggcggttctacccgcctggctcggacgagccgcatttcgacgccacgccggcactcgagcaggccgtgtcgttcctgtccagcctgcgttccagggcgttcgtcggcacggagtcgcggctgaacacgctgttcgacctgctgcgccagatggcgttgggtaccgagaccgaccccgaacggcggctcacggagctgcggctgcgccgcgacgcgctcgaccgggagatcgagcgggtcagccgaggcgagctcgacatgctcgacccctccgcccagcgggaccggttccagcagttcggcgacatggcacgtgagctgctggcggacttccgccaggtcgagacgaacttccgcgagctcgatcgggccctgcgggtccagatcgcctccttcaacggcgcgaagggcgagctgctcgacgaggtgctcagcagccggggcagcatcaccgactcggaccagggcaggagcttcggcgcgttctacgacttcctgctctcggctgaccggcaggcggagttcaaggcgctgctcgaccaggttctgggactggacgcactcgccggagccgacgagcggctgcgcgacatccactacgactggctggcggcgggtgaacgcacccaggcgaccgtccggttgctgtccgcgcagctgcgccggttcctggacgaccgggtctggctggagaaccgccgaatcggggaaatccttcgtggcatcgaggcgcacgccctccaactgcgcgacgccgccgggccgctgccgggagccgaactggaggagaccgcgccccggctcgtgctgccgatggaacgacggctgtacacgccgaaacgccggaccgcggtcgacagcgacggcatcacggccggagaaggtgacttcgagtccgacgcgctctatgagcaggtctacgtcgacccggcggagctgggcggggcggtgcgcgacgcgctgaccagccgaccgcgggtcacgctgacctcgttggtcgccgaccggccgctgcggcgggggctcgccgagctggtcacgtatctatcgctcagcggcgacggattcaccgtggtctttgatgaggacaacacggacgagctgagctgggacgacgacgatggcacccgcgtcgccaccgtgcccagggtgaccttcgtccgcgctggattcgccgccgtggcccccgacgcgaacgatgacggtgaggagcgcagggatgactga

SEQ ID NO: 49413 - DNA, 636 bp, Frankia sp. DSM 45899; identical to SEQ ID NO: 47666

SEQ ID NO: 49414 - DNA, 3396 bp, Frankia sp. DSM 45899; identical to SEQ ID NO: 47667

SEQ ID NO: 49415 - DNA, 1215 bp, Frankia sp. DSM 45899; identical to SEQ ID NO: 47668

SEQ ID NO: 49416 - DNA, 1461 bp, Burkholderia ubonensis; identical to SEQ ID NO: 49059

SEQ ID NO: 49417 - DNA, 651 bp, Burkholderia ubonensis; identical to SEQ ID NO: 48968

SEQ ID NO: 49418 - DNA, 3372 bp, Burkholderia ubonensis
atgaatgagccgcgcacgctcggcctcgattttgccgcggacgacaccctgacgggctttcgcctcgagcggctcgaggttttcaactggggcaccttcgacgaccgggcttgggtgctgcgggtcgatggccgcaacggcctgctgacaggagacatcggttccggcaagtcgacgctcgtcgacgccattaccaccctcctcgtgcccgcgcagcgcatcgcctacaacaaggcggcaggcgcggacagcaaggaacgtacgctgcgctcgtatgtgctcggctactacaagtcggagcgcaacgaggtcacgggaacggccaagcccgtgagcctgcgcgaccataacagctattcggtgattttgggcgtgtttcgcaacgccgggtacgacgccaccgtcacgctcgcgcaggtgttctggatgaaggacgcgcaggctcaacctgcgcgattcttcgtcagtgccgaacgagatctctcgatcgcgaccgatttctcgcgcttcggcaccgatattgcacagctgcgcaagaagctgcgcgggctgggcgccgaaatcgaggacacgtttccgaaatacagcgcctggttccggcggcgcttcggaatcgaaaacgagcaagcgctcgagctctttcatcaaacggtatcgatgaagtcggtgggcaatctcaccgacttcgtacgcagccacatgctcgagccgttcgacgtcgcaccgcgcgtcgacgccctgattgctcacttcgacgatctgaaccgcgcgcacgaggcggtactgaaaaccaagcgccaagtggaactgctgacaccgctcgtcgacgactgcgaccgccacagcgcgcaaggccgcgttctcgaaggctggcgcgcgtgccgtgaagcattgaggccctacttcgccgggctcaagctcggcctcgtcgaacgccgcctccaattgctcgaagaggatcatgcgcgcgcgacctcgcgaaaggcgcgacacgaagaagcgcgcgaccaggcacgccagcgcgtggacgatttgcgccgtgccgtggccgaacaaggcggcgatcgcatcgcgcagctcgatgtcgagatccgcgagcacgagcgagaaagcgtgcgtcgccgcgaacgggcgcaacgctatgccgccatcgttacgctgttcggcgaaaccgaggccgcggatgaggctgcattcgcctcccagcgccaacgcctggctgagcagcgcagctcactcgttgacgacgaagcgcaacagcaaaatgcgataaccgaatggagcgtggcatttcgcgaaggcaaagcgcggcgtgatttgctggaggacgaaatcgcgagcctgaaagctcgacgcaacaacatcccgaaggaacaggtcgcgatgcgggcgagcctgtgctcggcgctcggcctggaggaagacgccctgccgttcgcgggcgaactcattcaggtgcgcgaggatgcgcgtgattgggagggcgccgccgagcgcgtcctgcgcaacttcggcctgtcgctgctcgtgcccgacgagcactatgcgaacgtcgcggcgtgggtcgatcgcactcatctccgggggaggctagtctactttcgcgtgcgctccgaacgcaccgcgcgtgcagccgaggccatcgagctgcaccgccactcgctcgcgcacaagctcgccatcaagcccgactcgcagttctatggctggctcgagcgcgaaatcgtccgccgtttcgactatgcctgctgcgatacgcaggagcagtttcggcgcgagacgcgcgcgatcacgcgtgcgggccaggcgaaagcgcctggggagcgccacgaaaaagacgaccgccacgcgctcgacgatcgcagccgctacgtgctcggttggagcaatacggcaaaaatatccgccctcgcagcacaacggcaagcgctcgaagctcgccttggcgagatcgggcaaaggctcggagaggcccaacacgagcacaccaaggtgcgtgagcaactcgaagcacttgcgcgtgccggcgagttcgccgagtttcgggaaatcgattggtcgagctgcgctgccgcgatcgcacgtcttgcggacgaaaaggcgcgactcgaatcggcaagcgacgccctcgcggagctaacggctcaattggactcggcgcaagcgtcgttgaaagagagtgaagcggcgatgtcggagaccgactcggaactgggcggcatcctggccaagcgggaggcggcacaagcgttgcgcgaagagacgcacgcgctcgttgcagaagtggatgccgaactcgccgaacgaatcgaggccctgcgagccgagattctcggcgaacaccagctttccgtcgagtcatgcgacaaccgcgagcgggacgtgcgagaggcgttgacaacccgtatcgacaacgaaacgaaatcactcggccgcctggccgaaagaatcgtcaaggcaatggcggctttcaaggaagcctacaagctcgaaacggccgacttcgatgcgagcctcgccgcgaactcagagtaccgtgacatgctcgcgcggctgcaggcggacgatttgccgcgcttcgaaacgcgtttcaaggagctgctcaacgtcaacacgatcaacgagatcgccaactttcacgcccagcttgcgcgcgaacgggcgacgatcaaggaacgcatcgaacgcatcaacgaatcgctgcgacaaatcgactacaacgcgggtcgttacatcgtcctcgagagtcagcccagccccgacgcggagatccgcgaattccagagcgacctgcgcgcttgcaccgagggcgaactcaccggctcggacgatagccaatactcggaggccaagttcctgcaagtcaaacggatcatcgaccgcttccgcggccgcgaagggttgaccgagcaggaccggcgctggcgcgccaaggtgaccgacgtgcgcaactggtttctgttcgccgccagcgagcgttggcgcgaggacgacagcgaatacgagcactactcggactccggcggtaaatcgggcggccagaaggaaaagctcgcctatacgatccttgccgcgagcctcgcctatcagttcggcctcgaatggggcgccgtgcgttcccgatcgttccgcttcgtcgtcatcgacgaagcatttggccgaggctccgacgaatcggcgcagtacggtctcactctgtttcagaaactgaacctgcaactgctgatcgtcacgccactgcagaagattcacatcatcgagccgttcgtttcgagcgtcggattcgttcagaacgacggtggacgcgcctccaagctgcgcaccctgtcgatcgaggagtaccgcgcgcacaaggcggagttcgagcaatga

SEQ ID NO: 49419 - DNA, 1185 bp, Burkholderia ubonensis
atgagttggacaactgccgtcgaactgcgtgcccgcctccagcgcctatgggaacgcggcgaatggctgcgaagcctcgtagacggtgccgaggggctattcccgctacgtctggcgatcaaaggcccaagctcgtccgagttggctgaacgcttcgacacggtacgcgcatggattacggaaattgccgcgacgccgcgcatacgcatcgaatggcgagaaatcaatcatcgaattctcggccagcagcgtttgccacgagcagcttgggtcgacagtctggacgatgcgctcactgtcgccggcaagcaacgcgacgcagcgcggttcgagcggctgctcgaaatcacacgctcgcgccagccgaagctcatcgcatggcttgcgcagcgcccgatgcaggccctcgaattggccggcgattgggaacgactgctggcagtcgtcgattggctgcaagcacatccgcagccgggcatctatcttcgccaagccgaaatcgccggagtcgacacgaaattcatcgaggcgcggcgcggcgtcctctcccaatggctcgatctcgtgctgccgtccgaggcgatcgacagcagccggaccggcgccgcccaattcgccgctcgctacgggttccgcgataagccgcctcgtattcgatttcgcgtgctcgatgagcggctcgccgtcctgcccggcatgggccgacccgacatcacactcgacgccgacagcttcgcgcgcctcgcactgccgtgccgccatgttttcgttacggaaaacgaaacaaattttctggcgtttcccgacgttccgcaggcgatcgtgctcttcggagcgggctacggctgggaagctctggagccggcacaatggctcacggactgtgcgctccactactggggcgacatcgacacgcacggctttgccattctcgaccaattgcgttgccgattccctcacgcgggatccttcttgatggaccgcgcgacactgatagcacatgaagcattctggggagacgaaggcgatcaggtcatgcgtgatctgccgcgactcacggcgcaagagcgcgagctctttgacgacctgcgtgacaaccggattcgccgcggattacggctcgagcaggagcgcgtcgggttcgggtgggtcagagcggcgctagaggaacggtctttcgtttag

SEQ ID NO: 49420 - DNA, 1461 bp, Burkholderia ubonensis
atgttcctcgactaccctaccctcgatgcgctgcgcacgcgccatcccgcttggcgacttttgcgctccgaccacgcgccgctcgccgtcagcttcctgcaccgcgcgttcgtcgcgccgaacgtgcgcgaggtggcggctccgtttcttgccgaagcactcgaggacgagctttacgcgttgcgcgaacaactcggcgacggcgccttcccgaagcccgcgctcgactatctgaacgactgggcgagtcctgaaaagggatggttgcgcaagttctatcgccaaggctccgatgaaccgcagttcgacctgacacccgccgcgggaaaagcgatcgcgtggctcggcacgctgatggaacgaagctttgtcggcacggaatcccggctcctgacgcttttcgagttgctgcggcagatggccgaaggcagcgagacggacccggaaaggcgtcttgccgaactccacgcgcggcgcagccagatcgacgaagaaatcgctcgcgtggaagccggcgacgtccggctgctcgacgatgccgcgatcaaggaccgctttcagcaattcatgcagatggcgcgcgacctgctcacggatttccgtgaagtcgagcagaacttccgtctgctggaccggcatgtacgcgagcgaatcgcgctctgggaaggatcgaagggtgcgctcatcgaagaaatcatgggcgagcgcgacgcgatcgccgattcggaccagggcagcagctttcgggcgttctgggacttcctgatgtcgagccgccgtcaggaggaactctccgaacggctcgagcacgtgcttgcgctcccggcgatcacggaaatgaagccggacgcgcgcacgcggcgcgtccactatgactggctggaagccggcgagcacacgcaacgcacggtcgctcagctctcgcagcagcttcgacgtttcctcgacgatcaagcgtggctcgaaaaccgccgcatcatggacattctgcgcggtatcgaaacgaaagcgcttgtgctgcgtgaagcgcccccgccgggctccgtcatggagatcgagaccgcgtccgctgacatcgagctgccaatcgaacgcccgctttacgcgccggcgctgcgccctctcatcgccaacgtcgcaatcgagaccggcgatgcggacctcgatgcgtcggcactctacacgcagatcgtcgtcgatcgcgcgcgcctcgcaagccatatccgccgctgccttcaagatcggcggcaagtgacacttgccgaactggccgcttcgcagccgctcttgcacgggctcgctgaactcgtcgcctatttgcaactcagcgccgaagccggatcatttcgtgcgaccgtcgatgagaccgtctccgatacgatcgagtggcaggcgaacgatgccaacggagcagcaatcgtcaagcgcgcaacgatgccgcgggtgattttcacaaggtag

SEQ ID NO: 49421 - DNA, 651 bp, Burkholderia ubonensis; identical to SEQ ID NO: 48916

SEQ ID NO: 49422 - DNA, 3372 bp, Burkholderia ubonensis
atgaatgagccgcgcacgctcggcctcgattttgccgcggacgacacccggacgggctttcgcctcgagcggctcgaggttttcaactggggcaccttcgacgaacgggtctgggtgctgcgggtcgacggccgcaacggcctgctgacaggagacatcggttccggcaagtcgacgctcgtcgacgccattaccaccctcctcgtgcccgcgcagcgcatcgcctacaacaaggcggcaggcgcggacagcaaggaacgtacgctgcgctcgtatgtgctcggctactacaagtcggagcgcaacgaggtcacgggaacggccaagcccgtgagcctgcgcgaccataacagctattcggtgattttgggcgtgtttcgcaacgccgggtacgacgccaccgtcacgctcgcgcaagtgttctggatgaaggacgcgcaggctcaacctgcgcgattcttcgtcagcgccgaacgagatctctcgatcgcgacggacttctcgcgcttcggcaccgacattgcgcagctgcgcaagaagctgcgcgggctgggcgccgaaatcgaggacacgtttccgaaatacagcgcctggttccggcggcgcttcggaatcgaaaacgagcaagcgctcgagctctttcatcaaacggtatcgatgaagtcggtgggcaatctcaccgacttcgtacgcagccacatgctcgagccgttcgacgtcgcaccgcgcgtcgacgccctgattgctcacttcgacgatctgaatcgcgcgcacgaggcggtactgaaaaccaagcgccaagtggaattgctgacaccgctcgtcgacgactgcgaccgccacagcgagcaaggccacgttctcgaaggctggcgcgcgtgccgcgaagcattgaggccctacttcgccgggctcaagctcggcctcgtcgaacgccgcctccaattgctcgaggaggatcatgcgcgcgcgacctcgcgaaaggcgcggcacgaagaagcgcgcgaccaggcgcgccagcgcgtggacgatttgcgccgtgccgtggccgaacaaggcggcgatcgcatcgcgcagctcgatgtcgagattcgcgagcacgagcgagaaagcgtgcgtcgccgcgaacgcgcgcaacgctatgccgccatcgttacgctgttcggcgaaaccgaggccgcggatgaggctgcattcgcctcccagcgccaacgcctggccgagcagcgcagctcgctcgtcgacgacgaagcgcagcagcaaaatgcgataaccgaatggagcgtggcatttcgcgaaggaaaagcgcggcgtgatgtgctggaggacgaaatcgcgagcctgaaagcccgacgcaacaacatcccgaaggaacaggtcgcgatgcgggcgagcctgtgctcggcgctcggcctggaggaagacgccctgccgttcgcgggcgaactcattcaggtgcgcgaggatgcgcgtgattgggagggcgccgccgagcgcgttctacgcaacttcggcctgtcgctgctcgtgcccgacgagcactatgcgagcgtcgcggcgtgggtcgatcgcactcatcttcgggggcggctcgtctactttcgcgtgcgctccgaacgcagcgcgcgtgcagccgaggccatcgagctgcaccgccactcgctcgcgcacaagctcgcgatcaagcccgactcgcagttctatggctggctcgagcgcgaaatcggccgccgtttcgactatgcctgctgcgatacgcaggagcagtttcggcgcgagacgcgcgcgatcacgcgtgcgggccaggcgaaagcgcctggggagcgccacgaaaaagacgaccgccacgcgctcgacgatcgcagccgctacgtgctcggttggagcaatacggcaaaaatatccgcccttgcagcacaacggcaagcgctcgaagctcgccttggcgagatcgggcaaaggctcggagaggcccaacacgagcacaccaaggtgcgtgagcaactcgaagcacttgcgcgtgccggcgagttcgccgagtttcgggaaatcgattggtcgagctgcgctgccgcgatcgcacgtcttgcggacgaaaaggcgcgactcgaatcggcaagcgacgccctcgcggagctaacggctcaattggactcggcgcaagcgtcgttgaaagagagtgaagcggcgatgtcggaaaccgactccgaactgggcggtatcctggccaagcgggaggcggcacaagcgttgcgcgaagagacgcacgcgctcgttgcagaagtggatgccgaacttgccgaacgaatcgaggccctgcgagcggagattctcggcgaacaccagctttccgtcgagtcatgcgacaaccgcgagcgggacgtgcgagaagcgttgacaacccgtatcgacaacgaaacgaagtcactcggccgcctggccgaaagaatcgtcaaggcaatggcggccttcaaggaagcctacaagctagaaacggccgacttcgatgcgagcctcgacgcgagcccggagtaccgtgacatgctcgcgcggctgcaagcggacgatttgccgcgcttcgaaacgcgtttcaaggagctgctcaacgtcaacacgatcaacgagatcgccaactttcacgcccagctcgcgcgcgaacgggcgacgatcaaggaacgcatcgaacgcatcaacgaatcgctgcgacaaatcgactacaacgcgggtcgttacatcgtcctcgagagtcagcccagccccgacgcggagatccgcgaattccagagcgacctgcgcgcttgcaccgagggcgaactcaccggctcggacgatagccaatactcggaggccaagttcctgcaagtcaaacggatcatcgaccgcttccgcggccgcgaagggttgaccgagcaggaccggcgctggcgagccaaagtgaccgacgtgcgcaactggtttctgttcgccgccagcgagcgttggcgcgaggacgacagcgaatacgagcactactcggactccggcggtaaatcgggcggccagaaggaaaagctcgcctatacgatccttgccgcgagcctcgcctatcagttcggcctcgaatggggcgccgtgcgttcccggtcgttccgcttcgtcgtcatcgacgaagcatttggccgaggctccgacgaatcggcgcagtacggtctcacgctgtttcagaaactgaacctgcaactgctgatcgtcacgccactgcagaagattcacatcatcgagccgttcgtttcaagtgtcggattcgttcagaacgacggtggacgcgcctccaagctgcgcaccctgtcgatcgaggagtaccgcgcgcacaaggcggagttcgagcaatga

SEQ ID NO: 49423 - DNA, 1185 bp, Burkholderia ubonensis
atgagctggacaactgccgtcgaactgcgtgcccgcctccagcacctatgggcacgcggcgaatggctgcgaagcttcgcagacggcaccgaggggctattcccgctacgtctggcgatcaaaggcccgagttcgtccgagctggctgaacgcttcgacgcggtacgcgcatggatcgcggaaattgccgcgacgccgcacatacgcatcgaatggcgagaaatcaatcatcgaattctcggcgtgcagcgtttgccacgagcggcctgggtcgacagtctggacgacgcgctcgcagtcgccggcaagcaccgcgacgcagcgcagttcgcgcggctgctcgaaatcactcgcgcccgccagccgaagctcgccgcgtggcttgcgcagcgcccgttgcaagccctcgaattcgccggcgattgggaacgactgctggcagtcgtcgattggctgcaagcacatccgcagccgggcatctatcttcgccaagccgaaatcgccggcgtcgacacgaaattcatcgaggcgcggcgcggcgtcctctcccaatggctcgatctcgtgctgccgtccgaggcgatcgacagcagccggaccggcgccgcccaattcgccgctcgctacgggttccgcgataagccgcctcgtattcgatttcgcgtgctcgatgagcggctcgccgtcctgcccggcatgggccgacccgacatcacactcgacgccgacagcttcgcgcgcctcgcactgccgtgccgccatgttttcgttacggaaaacgaaacaaattttctggcgtttcccgacgttccgcaggcgatcgtgctcttcggagcgggctacggctgggaagctctggagccggcgcgatggctcgcggactgtgcgctccactactggggcgacatcgacacgcacggctttgccattctcgaccaattgcgttgccgattccctcacgcgggatccttcttgatggaccgcgcgacactgatagcgcatgaagcattctggggagacgaaggcgatcaggtcatgcgtgatctgccgcgactcacggcgcaagagcgcgagctctttgacgacctgcgtgacaaccggattcgccgcggattacggctcgagcaggagcgcgtcgggttcgggtgggtcagagcggcgctagaggaacggtctttcgtttag

SEQ ID NO: 49424 - DNA, 1470 bp, Xanthomonas translucens
atgaagcaccgcgcccgcatcgcccgctaccgcaccctgcgcgagcagccgctgtggaagctgctcgccgccgaccaggcgccggaagtcatcggcctgctgcagtcgctgctgctggacagcgaacgccggctgccggcggcggtgctgcacgagcggttgcagcgcatgctcgacgaactcaacgccgagcagctgtcgcgcgaactgccgcgcaccgcgcaagcctatgtcgcgcactggctggcgcagggctggctggagcggcggctgccggacggcgcgcagcaggaggaatacgaactgtccacccaggccacgcaggcgatccgcttcgccgatggcctggagcacgcgcgcggcgcggccaccgagagccgtctggccttggtgatgcagcagctggcgcagctggcggcgctgaccgagaccaatccggatgcgcggctgtcggcattgcgcgacgagcgcgagcgcatcgatgcggagatcgcgcgggtctccaagggcaaggtcgccgcgctggacggcaagcgcgcgctggagcgcgcgcgccaggtgatcgcgctggccgacgagctgaccgaggatttccgccgcgtgcgcgacgatttcgagcagctcaaccgcgacttccgcgagcgcatcatcgacgacgagggcgagcgcggcgagatcctgggcaagctgttcgaaggcgtggacgtgatcggcgacagcgatgccgggcgcagtttccaggcgttctgggccttgctcaacgatgccgagcagagcgcacagctggacgcggcgctggagacggtgctggcgcgctcgttcgcgcgcaagctcgaccgccgcgagcgcggcttcctgcgcgggctgaccggcaccatgctcgagcgcggcggccaggtgcacgacgtgatgcaacatttcgcgcgcagcctgcgcggtttcgtgcagagccgcggctatctggagcagcgccggctcaaccagctgctcaagcaggcgcaggccgaggcgctggccttgcgcgaccacatccccgcgcagcgcggcatcggccgcgacctgaacctgaccaccagccgcctgcgctcgctggcgcaatggcggctgcacgacccgcgtcagcagcaggtcgagggcggcatccagcgcaacgaggcggcggcgatttcgctggacagcgtcggcgacctggtggcgcaatcggaaatcgacttccgcagcctgcgccgcgacctgttcgagctgctcgccgagcagccgcaactgtccatcgctcaggtactgacccagcgcgaggccagccagggcctgggcagcgtgatcggttacctgtcgctgggcacccgccatggcgtggtcgccgccgggcagcacgagatcgcgcaatggcgtggcggcgacggccagtggcgccgcgcgcgcattccgttggtgtggttcacccaggagaaacgccatgaactggcatga

SEQ ID NO: 49425 - DNA, 705 bp, Xanthomonas translucens
atgaactggcatgaccacgagctggatcccgagcaggaacgctcgaacgatgcagtcgacagcgccgcgcccgacgccggtaccgacctgttccccggcgacagcggccgcctgccggtggaagcgcgccgcgcgctatgccagctgctcagcggccccagcgtggacgcgcagcgccacagcaagctgtggccggcgctgttgcgcagcgaggcggcgatccgcagcgccctggccgacctgttcctggaactggtgctggaccgcgaagccggcatcgccttcacccgccaggccgacaccggcgaactggaagcgccagtactgctgcgctcctcgccgctgaccttcatcgattcggtgctgctgctgtacctgcgccagcaactggccgaagccgatgcgcgcggcttgcgcgcggtggtggaggaagcgcagctgggcgaggcgctggcggtgtacgagaagaacctgtccaccgaccgcgccggtttcctgcgccggatcggcaacgccgtgcaaaagatgaaggacaaccacatcctgacccgcctgcgcggcgaagacgaacgctacgaagtctcgccggcgctgaagctgctgttctcggccgaggacgtggccgcgctggcgcaggtgtaccgccagctgcgcgaaggccccgattctggcgaggacgccgccgcggctgcgcaggacgcctag

SEQ ID NO: 49426 - DNA, 3585 bp, Xanthomonas translucens
atgaaatcctccgcttccacgcctggcctgttcgccggcgatctgcccgatccgcgcctccagcagttccgcatgcgccgcctgcaggtgcacaactggggcacgttttccggcctgaccgagatcccgatcgccgcgcgcggcttcctgttcgtcggccgctccggctcgggcaagtccaccctgctcgatgcgatgtcggccttgctgacgccgccgagcatcgtcgatttcaacgccgccgcgcgcgaggccgagcgcagcggccgcgaccgcaacctggtctcctacgtgcgcggcgcctgggccgaccagcaggacagcgaatcgggcgagatcgccacccagtacctgcgcaagggcgccacctggaccgcgctggtgctggaataccgcaacggcgaaggcagcgtggtcagcctagtacggctgttctggatcgccggcaacggcaccgccgcggccgacgtgcgcaagcactacatagtggccgagcgcgcgttcgacatcgccgccgacctggacggtttcgacctggacctgcgcaagctcaagcagcgcctgcacgacgtgcaccatttcgacagcttcgccggctatgccgaacgcttccgccaccagctcggcatcggcaacgagatggcgctgcggctgctgcacaagacccagtcggcgaagaacctgggcgacctcaacgccttcctgcgcggcttcatgctcgaggaaccgaagaccttcgacgccgccgagcgcctggtcggcgatttcgccgaactcgacggcgcgcaccaggcggtggtgaccgcgcgccgccaggtcgaaaccctgttgccggcgcgcgggcaccacgccgagctgatggcggtgcgccgccagcgcagcgaactggacgaactcaagctcggcatcgacagctaccgcgagcagcgccgcctggcgttgctggacgcgcgcctgcaggagctggacacgcaggaccgcggcctggccggcgaggaaggacaacgccgcgccgcgctggagaaccaccagcggcgcctggacgacctggaagcgcagcgccgcgcgcagggcggcgagcgcatcgatgcgctggaacgcgagcgcggccagctcgaagccgagtgcgaccgccgcgccggcaagcgcacccaggccgagcaggcctgccgccagctggagcaggtgctggccggcagcgcgcagggcttcgccgggcaggccgcacaggcgcgcgcggcgctggaggacggcacgcgcgcggccgccgaactcgacgaggcgatcagccagcgcatcgccggcaaggccgaggacgccaagcgcttcgccgaagtgcgcgccgagatcgacgcgctcaagcgcaatccgtccaatatcccggcgccgatgcaggcgctgcgcgcgcgcctgagcgccgacaccggcgtacccgaggccgccttgccgttcgtcggcgagctgctgcaggtgcgcaacgaggaatccgactggcgcggcgccatcgagcgcgtgctgcacggcttcgcgcaatcgctgctggtggacgaacgccactacgccgacgtggccgactgggtcaaccgcacccatctgggcatccgcctggtctattaccgggtacgcgacaacgagcacgccctgtctgggcgcgcgccggctgccggctcgctgctgcacaagctggaactgcgcgagcacgccttcgccggctggctgcgccgcgaactgggcaagcgtttcgactacgactgcgtggacaacgccaaggcgctgcgccatgccgaacgcgcgatcacccgcgaaggccaggtcaagcatcccggcgagcgctacgagaaggacgaccgccacgcggtgaacgatcgccggcgctggctgctgggcttcgacaaccgcgacaagctggccttgttcgaagaagagggcctggcgctggcgcagcgcatcgccgcctgcgacgccgacgtggccgcgctgcgtgcgcgccgcgaacgcgacggcgcgcggcgcttggcccagcacaccctggccaacctggcctgggacgagatcgacgtggccgcgccgctgcagcgcctggacgacatcgccacggcgctgcgccagttgcgcgagggcgacggcaacctgcgcgcgctgggcgaggcgatcgaccatgcgcgcgcggacatcaagcaggccgagcggacctacgagagcgtgcgcgaggagaggatcggactcggtgtcgagcgtgtgcggctggagaagcaacggctcaattgcgccgatgcgaatgcgcgcgtggtcacgccgttgcagcgccagggactgaacgaacgtctcgctggcctgggcgtgctgagcctggacaatctcgaggcgcattttcgccaaatcggcaatgccatcgtcgagcagaccagcgccagcgacaaggaacacaaccgcctggagcaactgctgctcggctgcttccgccgctactgccagcaatggcccgaagacagcggcgatttcaccgtcagcctgagcagcgccgaggatttcctcgcgcgcctgcagcgcctggaacgcgacggcctgccgcggcacgaggcgcgcttcttcgagttgctgcagagccagagcaagaacaacctgctggccctgcagcggcataccgccgaggcgcgcaagtccatcgcccagcgcctggacgaggtcaacgccagcctggagcaggtgccgttcaaccgcggcaccttgctgaccatcgaactgggcgaccgccgtctgccggaggtgatcgagttccaccagcgcctgcgcgacgtgctcggccaccaccagaccgagcagcgcgaactggccgaacaacagttcgcggtgctgcgcgaactggtgcgccggctcggttcgcaggacggcgaggacaagcgctggcgcgagctggtgctggatgtgcgcctgcacgtggaattcgtcggcgtcgagctcgatgccgccacccgccagcaggtggagatctaccgcagcggcgccggcaagtccggcggccagcggcagaagctggccaccacctgcctggccgcggcgctgcgctaccagctcggcggcgaggacggcgaactgccgcgttactgcgcggtggtgctggacgaagccttcgacaaggccgacaatgaattcaccgcgctggcgatgaacatcttcgagaacttcggcttccagatggtggtggccacgccgctgaaatcggtgatgaccctggaaccgttcatcggtggcgcctgtttcgtcgagatcagcggccggcacgattcgggcgtgctgctgatcgaatacgacgagcaggcgcgccggctcaagcttcccgagcgcacgcgcggcgcggccacgccaggcgatgcggcgccagcgccggaagcggaacaacccggcaccgcgccgagccgcctgcgcgccgacactgcggccgtggtgcgtggcgatgccggcgagccagcggtttccgatggcgccgccgccatggcgcccgtgccgcatcgcgcgctgccaaagtcaaaggcaaaatccaagcccgagtccaagccagggtccaaacccaaatccaaggcctga

SEQ ID NO: 49427 - DNA, 1470 bp, Xanthomonas translucens; identical to SEQ ID NO: 48650

SEQ ID NO: 49428 - DNA, 705 bp, Xanthomonas translucens; identical to SEQ ID NO: 48651

SEQ ID NO: 49429 - DNA, 3585 bp, Xanthomonas translucens; identical to SEQ ID NO: 48652

SEQ ID NO: 49430 - DNA, 1179 bp, Xanthomonas translucens; identical to SEQ ID NO: 48653

SEQ ID NO: 49431 - DNA, 1470 bp, Stenotrophomonas maltophilia; identical to SEQ ID NO: 43511

SEQ ID NO: 49432 - DNA, 702 bp, Stenotrophomonas maltophilia; identical to SEQ ID NO: 43512

SEQ ID NO: 49433 - DNA, 3381 bp, Stenotrophomonas maltophilia; identical to SEQ ID NO: 43513

SEQ ID NO: 49434 - DNA, 1455 bp, Arthrobacter sp. ATCC 21022
ttgaagggccagatggactactacgcgatcaacgcgctgcgcgaaaagcatgcaggctgggcattgcttcgagcccaaaacgcgcccctcgccctgcacttcttcatgtccgccttcacggaccccaatcagcggaacgtcgggcgccaacagctgattgacgttctggacgatgtcttgttcggcgtacgggaaacctatggggaggagaagtttccccgcaacgcctcggagtacctggatgactgggccgcgtctgagcgcgcttggctgcgaaaatactacgtccaaggcgaagacgaaccgcattacgaccttactccggcggctgaagatgtggtgcgctgggttgagagcctcaaaggccgcgagtttgtggccacccaatcgaggctgacaagcatctttgccgtgttgaagaccctcgtacagcagtcagagacagacccggacgtgcgatgggctgaacttcaacagcaacggaaccagattgatgccgagatgcaccggattcgtgagggagacctcaaagtcatgactgcaccggaggccctggaccacttccaacagctcaccaccctggcaaaggacctgctctccgacttccgcgaagtcgagcagaacttccggaaactggacagacaggtccgtgagcagattgctacgtgggacggcagccaaggagaactcctggactcaatcttcgccaaccagcaagacatcggaagctcgctccaaggccgcactttccagggtttctgggactacctcatgtctccgcagctgaggagagaactcaacgacctcctccacagggctacccggatcgaagctttggcccggatggataacctccacaccatcaccaacctccaccaggattggctacccgcagtggagcaaacacaggccacggttagacagctctcacaacagatgagacgcctcctggacgacaaagtcttcctcgagaacaaacgcatcatgcaacttatccgaagcatcgaggcgaacgcgctggaccaacgggaccagccgccgtcgaactttgccatggagattgaagcgtcctccgtggacgtcgccttaccgttcgagcggcctctttacgagccgggcagccgcgtgatggtgatggatgatgttgttaccgcagatgatcaggatctggatgcgagcgcgctgttcagtcagtttcatgtggaccgtgagcgcctgaagtccaatatcgaaagtgtcctcgaggaggagaaccaggcgacgctggcggacatcacggcggcccatccgttgtcccaagggctcgcggagattgtggcgtactaccagctcgctgcggagtcggactgggccagcatcaaccccgaaactacgcagcgcctccattggactttggaggatggcagcgtccgggcagcagtcatcgatcagatcatttttgtgaggccggcatga

SEQ ID NO: 49435 - DNA, 591 bp, Arthrobacter sp. ATCC 21022; identical to SEQ ID NO: 48902

SEQ ID NO: 49436 - DNA, 1125 bp, Arthrobacter sp. ATCC 21022
gtgttgaagcgcccatcggctaccgaactgcgcgatgactacgcggccgcccgcgactgggcagccaggctcttcgccgcagagggtccgttcagtttggaaaccgccgacgtcggccgcaccactatcggttcaaaccgccttcccgctgtggctgtgtttgcttctgtggaggacgagattgagttcgccggcaaacagcgggaaacgaagcagtttctgtccttggccgccgagctgggcggcttggacccggcgctccaggcctgggcggcgaaacgtccgaagcacttgctggttctaggtcaagacgctttgctcgctgcccgggtggcgctctggcttagggatcacccctccccctccgtttatgtgaggcagttgcgtctgcccggcgtgcacaccaaattcatcgaggcccaccgcaggacaattgacgagatggtggaggcgctgaggcccgtcctggcagaaacattgcctttggacggcgattcagatgcggcagacccgggccttgacgactctgtccttggcacgccgatagcccgcactcccgcagctcgtttcgcggagcgccacggcttcctccatcagcctgagcaggtgcgtttccggctattggacccgtccataccgctgctcggtgatgcgcgggacattacggtgacagcctcggcctttgaatcgctccggctcccggtcacccatgtgatcatcactgagaacctcgtaaacttccttgctttgcaagagcggcacgggacactcgccatcttcggtaagggctacggtttctcatcattgagggacgctgcctggttgcagtcctgtcaggttctctactggggtgacttggacactcacggcttccgcatcttggaccagctcagatccgtgcacccgcatgtggcgagcgtgctcatggacgaagcgactctcctggcgcaccgggacgcgtggagcatggaggcgtcgccttcgcgtgctgcgttgacacgcctgacccctgacgaagccctcgtgtatgaggcgctccaggccgggacttatggggacagggtccgcttggaacaggagctgattgcgtgggagtgggcgctgacgcggctcgagtctgactga

SEQ ID NO: 49437 - DNA, 1458 bp, Arthrobacter sp. ATCC 21022; identical to SEQ ID NO: 48904

SEQ ID NO: 49438 - DNA, 882 bp, Arthrobacter sp. ATCC 21022; identical to SEQ ID NO: 48905

SEQ ID NO: 49439 - DNA, 3444 bp, Arthrobacter sp. ATCC 21022; identical to SEQ ID NO: 48906

SEQ ID NO: 49440 - DNA, 1563 bp, Microterricola viridarii
atgagtgacatcgcgggcgaattggcgcgggtgcgcgaggcattcgataagccgacgctgcgcctgctcgaccgcaagtgggcgccctttgtgctggccgtcttcaagagctctttcagccgtgatcgagctgccgtgcagtgcgagcgcctgcacgcccaggtcgacgcctacctggccgacctgcgcagcatcggcaccgagacgccgaacggcaccggccgcagcctctgcgtgcagtggatgaacgaccagtggctctaccgcgacctcggcgacgacggcgagggcggcggcacgtcggccaacgcagaggagcagtactcgctcacctcgcacgccctcgaggcgctctcattggtcgagagcctggcccgcgaccgcgctctgatcagcgagtcccggctggccatgatcgtggatgccgtgcgtcaccgtgccacgcaggccaaccccgaccgcgacgagcgcctgcgccggctcgacctgcagattgccgagctcgccagcgagcgcgaccgggtcgccggcgggggagagattgccgcggcatccgtcgaagagatgcgcgagggctacgcgaacctgatcgacctgatcggccagctgcccggcgacttcaagcgggtcgaggaatcggtagcggcgatgcaccggcagatcgtcaatgacttccgggctgaggagcgcccgatcggcgaggtgctcgatgagtacctggccaagaccgacgcactcatgtcgctgaccgccgagggccgcgccttcgagggcgccttcgagctgctgcgcgacgacgccctgctgcacgacctcaagggcgacctggagacgatcctcgggcacccgttcgccgcgggcctcaagtcggtcgagcggcgcagcttcggggcgacggtcggcctgattcgcaccggcatcgacgacgtgctcacccagcgcaacggcctcaccaccacgctgcgcgagcacatcgtcaaccacgacatcgtcaaagaccgcgagctcgagggcctgctccgcgagatcaacaccgagctcgccatctggatgcagaccgctggccccaaggcccgggtgcgcgccgagatcatgcccggcaacctcgacgccccgcacctgcgcgagcgcttctacgatccgcagtcgcacgtgccgccggcgcccctcgctgacgtctcggcgcaggcacccgccgctcccagcctcgacgccatgcgccgccagggtggcccgcagctgcccgagatgcgcgaggcgttgctcggcgcgcttgccgcgctggacgcgagcacggatgccgcggatgcctcgatcggcgacgtcttcaacgccctcgagccggccctccgccgcccggtcgagatcctcggactcatgcagctggccacccagctcgacgccgtcggccatgccggatctgtcgaacagcctgagttcgaccagtacctgacggtgcgccccgacggcacccagcgcaccttcgaggtcgcgcgcatcaccctcaccgacgacgaaaccgcggccctcgccgccctgaactccggagccaccagtgactga

SEQ ID NO: 49441 - DNA, 1005 bp, Microterricola viridarii
gtgactgacgacgggcgcgacgacatgacagacaccagcacaggcgatgccgctgcactcggcgcgcaggcgttcgggcacaagtccgatattgagcacgtgccgcgcggtgagtacagcgcgcgagacgaagacagcacgcccgccgagggcgagagcctctcgctgttcgagggcgacgagggtggactctccgccgcgcagcgccgcaccctcgtgctgctgctgaagcaccggtacatctccgccgccgaccacccggccgcctggcgcaccctgctcgcctccaccggccgcatcaagtcccggctgaacgacctcttcctcgacctgcacatcgacaagcactacgaggtcgcgttcaagcgccaggcgcacggcgagggcggcgccgtcttcccgaccgtgctgcacgacacgtcgtacacccgcgaggagacgatcctgctcgtcgtgctgcggcagcgcttccgcagcgaccgcgccaacgggcacgagttcgtcatcgtagaccgtgacaacctgctcgagaaggtcgcccacttccgccccgcgcacgccaccaaccgctccggcgacgccaagaaggcctccgccgcgatcgaggccctcgccaaggcgcacgtgctgctgcgcaccagcgaccccgaccggttccgcgtcgcccccgtcatcgaggtgttgctgccggtgcagcggctcgccgagctgttggactggctgaaggccgagaacggcaaggccagcgtcgagatggcggatgccaccatggccctgctcgagcgtgagacggatgccgccgatcccgctggtcgagtagagaggaacgagcgtatcgagacctcgcaacccgaaacatcggattccgcccatcccgttggtcgagtaacgaggaacgagcgtatcgagacctcgtcgcccgaagactccgactccgccgaaacgcccgctgcggcatccgcacccacgaatgacgtcgcccccgaactggagcccgcagtatga

SEQ ID NO: 49442 - DNA, 3414 bp, Microterricola viridarii
atgagcgattccccgctgttctacatcgacggtgccaccgagggcaccacgcagtggcgggccgagacgttccagatggtcaactggggcggcttccacggccaccactccgtcgcgctcgccccgacggcgacgctcgtctccggcgcatccggcaccggcaagagcaccctgctcgacgcctacctcgccttgatgatgccctcggacaccccgttcaacggtgcatccaacgacgccggttccggccgggcccgcagcgcagagcagcgcaacgtgctcacctacctgcgcggcaagaccgacgacaaccgcgaggccgagaccggcgcgctgcaggaccaggtgctgcgcggcgccgccgaacccacctggggcgccatcgcgatgacgttcgtcgacgacaaccagcgccgcttcaccgtgctgcgcacctactacgcgccgcgggccacgaacagctactccgaggtgtcgatgcgcatggcgaccttcgacggcgccctgcacctcggcgagctcgaagacgtcgttgccgccaagttcgagaagcgtgcgctcaaggcgcgcttctcgggcatcgaggtgttcgacacctacgccgccttcgcccagaccctgtacacgcgcctcggcatcggcgccaacggcgagggcggcaaggcgctgcgcctgctcgcccgcatccaggccggccagcaggtgaagaccgtcgacggcctgtacaagtcgatggtgctcgagcgtccagccacctacgcggccgccgacaaggccgtcgctcacttcgaagacctggagcgctcctacggcgccatggtcaccgagcaccagaaggcgcaggtgctggagcggctgcccgagctgcagcggcagttcatcgaagccagcgaccgggccgacctcgtcgacaccttcggcgtgacccgcagcggcgacaccccgttgcgctactgggagctcggcaccgagcagcgcctgctggcggatgccggcgacggcaaccgcagcgagcggaagcgtgtgcaggcagagctcagcgcggccagcaccgccgagaaggagctgaaggcgcgtctggccgagagccagcgccggcagcgcgagaacggcggcgacgtgctcgccgaactgcaggccgacctcgccacgctcaccgatagccgcgacgagcgggtgcgcacccgcgcccgcttcgacgatcgcgtcgcggtgctcgcgcagcccaccgcctccgcagcggagttcgccgcggcgcaggccgccgccgcggacgcgctggccgccttcccggccgagcaggagaaagccgaggcgctgcacgagacgctgcgtcgccagcagtacccgctcgaggagcagatccgcactctgaagaaggagcgcgagttcctcgccggccggcacagcctggtgccgcagcacctgcacaacgcccgcctggcgatcgccgaggcggccggcatggcccccgacgagctgcccttcgcggccgagctcatcgacctggccccgggcgaggatcgctggcggcaggccgccgaggtcaccctcggctcggtcgcgcgcatcctgctcgtcgacgagacgaagctggccgcgctgagcaaggcgatcgacccgctgcagctgccggtgcgcgtgcacttcgagggcgtgccgctttcggtcgcggatgccggcagcagctcgcatccgctcgaccccgccttcgtgtccggcaaactcgtctacaaggagtcgccgttcagcggctgggtgcagcagcggctgcggctggcctcgctcgacgcccgctgcgtcgagaccccggcggagttcgacggtgacgggcctttcgtggcgctcagcggccagacccgcaacggcagccgcggcgcacacggcatgaaccgcgaccagaagccgatcatcggcttctccagccaggcccgacaggacgagatcgagcaggagctcggccagctcacctcctccgtgcagcagctgtccggccaggcacacgcgctcgcgaacgagctctccgccctgcgcgcccgccgcgacgccagccagatgctgacggatgccgtctgggagctcctcgacgtggccgccgccgaggccgcgctcgccgcgaagaacgccgagctggcgcgcgtgctggccaacagcgatgtgctgcgcgcgctccaagaggaggagcagcggctcgagcttgagctcgagatcgcccaggggcagcgtcacgaggcgtcccgggtggcgcaggagctcgccgccgcgcaggcggagattgtcgagcgtgaagacgccgtcaacgaccagttggagcgcatcggcgccgagcagcaggtgacgctgaccgaggagcagggcgaccacctcgacgccgagttcgccgccgtcggcgaccccgacaacctcgaatccttcgccgccgggctcaagcgcctgcgcgagcgcctcaccgagcagtccgccagcgagcgggagcgcgccgagcagtcggccaaggcgatgctcaacatcttcgagtcgtaccagcgagcctggcccgacccgaccatcggcaccggcctggactcctaccagggctaccgtgacatcctcgactcggtgctcaccctcggcctgcacgagcgccggcaggagtggaagcgtcgcctcgccgcctggagcgggcaggatctggtgccgctggccggcgccttcgactcggcgatctcgcagatcgaggaccgcctcgacccgatcaacgacatcctcgccacgctgccgttcggcgccggccgcgaccggttgcagatcacgctgcgccgcctgcaccgcgacgactccgtcgcgttccgccgggagctcaagcagctttcgtccggtgcgaccgagcagttcaccgacgagcagacggaggagcgcttcctcaggctgcaggcgttcatggccggcatccgcaggccggaggacgagtcgaagccgtcgccgacccgcgacctgctgctcgacgtgcgtcggcacgtggaggtgaccgcgtcccgcctcggcgatggcgacgaggtgctcagcacctactcgtcgctcggcggcaagagcggcggcgaatcacaagagttggtggcgttcgtcgtcggcgccgcgctgcggttccagctcggcgacgagagccgcacgaggccgcgcttcgcccccgtcttccttgacgagggtttcgtgaagtcggatgccgagttcgccggccgtgccgtcgcggcgtggaagggcctcggcttccagctgatcgtcggcgccccgctcgacaaggtgaccgcgctggagccctacatggacctcgtgctctcgatcacgaagaaccacgccgccggcttctcctacatcaccccaatcgccgatgccgcagtttcgctggttgagcctgtcgaaaccgcgctcgcctaa

SEQ ID NO: 49443 - DNA, 1593 bp, Hydrogenibacillus schlegelii
atgaaactctttgaagtgttgccggagctctttttttcgccgctttccggtccgaacaagcacatctacgccgaggcggcgctccttctcttcgaggagtcgcggaaagcgcggttcggcattccgctcgaggcgctccgcgactcgtttcaagaactgtttgagtcatggatcgaacagggcttaagcggcgcgctggacgaattcgacgaagaagcgaacgaaggcgctccggagacgccgaaaagttcggtaacgaacccttcgggcacgcccgaaaaccttttgggcatgaccgaagatgcgcgtcagaaggcgaacgcgctcatccgccgtctggcggaaatcggctggatcgacatcgagacgcgggagtcgttccgcgattacgtcgtcctgcccgcctacacgaaccgctttttggcgctcctgaacgaacttgcggatcccaaggcgatcgaatatcagcgctttgccttcgccacgtacggcgtgctcaccggcgaggaagccagacgccgcccggcgctcgccgtccgcgaagcgcgggagataacgctttcctttgaacgggagcttttgacgctctatcagaacatgaagcaccacatggaaacggtcgtaaagcagtcgtcgctgggagacgtgctcgcccaccattttgaggtgtaccaaagcgagatcatcgacaaaagctatcatcgcttgaagacgtccgaccacgtctcccgctatcggctgcagatcttaaataccgttcgggagtggcgcctcgacgccgagcggatggagcagacgatccgaaacggtctggaagagaaattttacgcttcgcgggaagaggccgagcgggatcttgtatcggcgctcgatacgatcgaatcggtctacaacgacatggacgagattctttatcagatcgatttgcggcatcatcaatacgtgcgggcctcctacgatcgggcgcgatacttaagccgccagcacggcgggctcgatcaggcgctggcgcaaatcctggacgccctggcccgggcgccggaagggggcgtcttcggggcgtcttcggaggacgaaccggcgttggcgccggaaggcgcgtcggcgcgtgcgccggaagacgtcccggggagcgctccggaaggcgcgtcggcggtgtcgctgccttcgctgtttcccttcagacgcgcggaagcggccgttccggattcgctcatgacgcccagaaaacgcgcccgtgcgcatcagatggcgccgcccgtcgtttcgcccgtcccggacgcgcttcggcaggcggttcaggccgagtacaggaaacgtcttgaggcggccatcacgcgggccgaagtcgaggccgccgtccgggagcgtctcggttcgcgtcaggcgatggagctcgccgaatgggcgccggaacgcccggaggaagcgctccttttgctatacctttatgtttacggccaagacggcggttcgtcttttcttctggagcggatcgaaccgcgggagatggtcgcgtccggaccgtatacgttcgccaaccaccggctcgttctccggcgaggggggcgggaaggcgacgcgcgttcatga

SEQ ID NO: 49444 - DNA, 579 bp, Hydrogenibacillus schlegelii
atgatcaaccggttgatcgcggtgaattttctcgtacgggacaaggagcgcgaacggtatgcgatcattcgccgcgagcgcgatcggctggaacgattttttcgtttcctcggctgggatttcatcatcgacgaaagccacgaggtcgtcttcgtcgcgccgccgggcgcggcgctaaggcggaatttcaatcgggaggagacgatctggctcctcatcctgcggctcatctacgaagaaaaacggcatgccttatcgctttcccgtcagccggtcgtgaccctcgccgagattcgcgccaagtatgagacgtttcgcctgccgcttcccgggcggacggcgctcgagcggctcgttcgcctggtgcgcggttaccagcttttagatcccctcgacggcgagggccttaccgacgacagccggtatgtgctgcaccacacgtggctgtatgcggtcgacacgcaggagattctcgcccttcaggaaaaaatcgcccgctttgcccaatcgacggatcgggagggcgaacccggcgaaggcgacgacgaagacgcggcggatcgcgcggaaagacgatag

SEQ ID NO: 49445 - DNA, 1266 bp, Hydrogenibacillus schlegelii
gtgttgaagtggctcaccgccctccgtttgatcaactggcattattttgacgacgaaacgttgaccttcggccgaaggacgctcatcaccggcaaaaacgcgaccggcaagtcgacgatcatcgatgcgcttcaggtgctcttcatcgccgatcagcgccaaatccgtttcaatgccgccgcccacgaagacgccaagcgcaagatgatcgactatctgcggggcaaagtgagcgatgaggaccggcatgcgcttcgagacggcgattttacgacctacatcgtcgccgaatttgacgatacggacaaggcggagccgttcgtcgtcggcgccgtgatcgacgtgtttgcggatgaacaatacgagaccgagtatttcatcctggcggaaacgcgtcttcaagaactctcctttcttgaggcaagcggcgcgctcagaaaccgcgagtccttccgtcgcgcgcacatgggattcggcggacggcgggtcatattcgaacggaacaaggacgaataccgcaggcaactcttaacccgcctggggagtctccgcgatcgctttttcaatgtcttctccagggcgattgcctttcaaccgatccgcagtgtgcgcgatttcgtcgaacagtatttgttggaaccgaaaccgctgaaaatcgatctgcttcgggaaaacttccagctctatgaacgctaccggcacgagctcgaggggctggaagcgcgtcaaaaagcgctccgttccatccgcgggacgtacagggagtatgaaaaatggcaccggacggccatcgaacaagactatgtcgtccgcgaactgaggcggtttttggccgaagcggactggaaggcgcatcaggaacggctggagaagcttcgcgcggcgcatgaagaggcgatcgaacgacaaaggcaggcggaagaaggcgaaaggcgggcccgggaagcggccgaggcggcttacgagcggtggaagggccatgaagcgggcgtgcgccttaaggcgctggaggagaagatcgccgcgcttcgccggacgcttgaggaaaaagagaggacctatcaagcgcttcttcacgggttggacgatctgatcaagtccagtatcatgtgtaaattgccctcttcggcgaatgaaaggacaggtcactcaggcattcacaacgtgcagcatggccggctcagtggatttctgttgttccttcttccactgccaatactcatccatattcaggtagcggtgcccagtggtccacgtctcgtctat

SEQ ID NO: 49446 - DNA, 675 bp, Burkholderia sp. LMG 29324
ttggacgaagtgacgagccggccctttgcgcgacagttggaatcgcacgaacgcaaattcctgcatacgctgacgggcgctctgctgaccgaaggacgaggggtgcacgacgtgttgcagcactttgcacgaagcctaaagagtttcgtgcagagccgcgaatttcttgagcaccggcgcctgcacggcctattgaaagaagcaacgcaggcggcgctgaccgccaagaatgcagttcgccctaatgagcagattggtttcgaactcatgcagtccagcggtcgcatccggtcagtagcacagtgggtactctatgaccccgcgcaacgagtgaccgattcgtcaatgcggattgcagaaccctctgagctggacctggaaaccgtgagcgagctcgtccggcagtcggaaatcgactttcgaacgctcaaagcgcacttgcggaccattctcgaacgccagtcgcaggtcaccattggtcagatactgaccgagtttccagcggaacaaggtcttggcagcgtcgttggctatgtggcgttgggtgccaagcacggcgaggtcacggacggcatcgagctcgtcacatgggaaggcgacgacgcgacccggcgtcgcgccaaggttccgaccatctatttcatgaaggagcgctatcttgaactcgttgactga

SEQ ID NO: 49447 - DNA, 738 bp, Burkholderia sp. LMG 29324
ttgaactcgttgactgacctcaccgacgaaagcgtcgccgacgagcccgcgcccgatacgacagttgctgatactgcgacgttccgaggtgacaccggttcgcttccaatggataccaggcgggtgcttgtgcaactgcttctcggcccatcggtggacgcccggcgccagtcaaagctctggcccgtgctgcttcgcgatgaagccatcgtccgctctcgcatgcatgagctctttctcgaggtcatcattgaccacgaacagcgagtcgcgttcacgcggcaggtcgtatccgaggacatcgatgtccccatccttcttcgcaaggcatcgctcaccttcttggatacagcgttgctgctcttcttgcgacagcgcttgacccaagccgatgcgcagggcgaacgagctgtcgtgtcgcgtgatgacatgcaagaacacctgtcggtgttcgaacgggggagcaaccccgaccacgcaaaatttgaaaagcaaatcgtcaacgccgtcgacaaggccaagaagctcagcctgctgcaattcgttcgcggctctggtgagcggtacgaagtttcacccacgctcaagctcctcttttcggccgaagaaattcaagacttgacacgaacttatgccgctctggcgtcctcgcattacgcgataaacacggacgaaggcaacgccgctgaagacgatgcatcggccagcagtgccgaaaacgaggaggactcgctatga

SEQ ID NO: 49448 - DNA, 3354 bp, Burkholderia sp. LMG 29324
atgaacatcgaccagcccgtgttgttggacggcagcggtgaccagttccgccttacgcgcctacagacgttcaactggggaaccttctccaacgtcttcgacttccccatccccaaggagggctacctcttcgtggggccgtctggttcggggaagtcgacggttctggacgctcacgcggcgctgttgacgccaccgaagtggttggacttcaacgttgccgcgcgtgaagcagagcggcatgggcgcgaccgcagcgccatgacctacctcaggggtgcttgggcgcagcagacgggagacggtggcgaatacgtttcacaataccttcgcagcggcacaacctggtccgccattgcagagacctacctcgatggacaaggtcgggtggtcgtgctcgctcaagtcctatgggtcaagggcaacaccacggcgtcaagcgacgccaagcggctgtacctcacgctcgagcgtgagttcgagattcaggagctggagttcttcgccaagaacgagttcgacacccgccgcttcaaacacgacctgctcgatgcgaaggtgtataccgaattcagcgcatatcaggaacgctttcgtcgtatgctggacatcgacaacgagcgcgccctccgccttctgcataagacgcagtcggcgaagaatctcggcgacctcaacgtgttcctgcgggacttcatgctggatgagccagagacgttcagcatcgccatcagcctaatcaaggagttcggggagctgaacgaggcacaccaggaggtcgtagctgcccggaaccaaatcgaaatgctcaagccggcgcgggaggagcacatggagctcgaacgtggcaacagcgaccgcaacgggctgcaggcaatccagaccgccattgaccagtatcgagagcaccgtcgcaaggtcctcgtggacgagcggattgcagagctggaggtcgacaaggaagcatcgcggcaggaagtccaacttctctcgcagattgtcgatgacgagttcgtcaagctgacggacctacaacgtcagaagctcaaaatgggggctgatgtcttggtccgtctcgaagaaaatatcaaggcggcggaggcagataaaatcgtccgcatgaacaagcgtgaccaggcggcagccgcgtgcaaagtcatgggatgggcgatgcctgacagtgtggtctggttcgtccaccgagtcgaagctgccaagcagcgtgtcctcagggctcacgacctgacgaaggaagtagaagaccgtaaggaccagctcaaggcagaccatcggcaggccagcgaagaattcaccacgacggtggccgaagtcaaagctctggagcgtcaaaggtccaaccttccggcacggctcgtggacttgcgtgagcgcatggcccgtgacctttcgatacccgaggcgaagctgcctttcgcgggcgaactggtggaagtgcgttctgattcgaccgaatggcggggcgccattgagcgcgtcctcggcggtttcgcgcgctctatcctcgtggatgagaagctctacccggcggtctcggcttacctgaacgagcgcaacattggcgagcgactggtgtactttcggactgtccagcagacatccggacgcacgcctggtcccaattctctggtgcgaaagctgaacttcgcgcagggaagctttggtgaatgggtgcgggaggagctaaagcgctcatacgaacttgagtgcaccgacacgctgcaggcgttccgcaatgcccctcgtgccgtcacccgtgagggcttggtcaagcacaacacggtgcggcacgagaagaacgaccgccactcagtcaacgaccgcagccagtgggtactgggctttgacaataaggacaagctcactctgtacaggaacaaggcagcggagcttggcggacgcatcgctgaactgcggatggcgctggacaagattggggatgaagaagtcctccagcaacaacagctcttgcactgccagaacctgtcgaacctgacgtggaacgacgtcgacgtcggcgcacttctggcccgcatcgacgacttgacgacacgcctcaacgcggagcgggacgccaggccggaccttgccatcctggatgaccgcattaagacgcaggaggacatccactccaaggccgttggcaagaagaacgaagaggatgtcaaaggtcgctccatcaagtccgacatcgagaagctaaatgtcaagctggccgagctggctcgtttgtggcccgcctctgacaggccaccggcgttcgccgcccaaatcgaagctcggtatgcggccaccggcaaggagattactctcgagaaccttgacccggtgaacgggcaggtggaccggggcctcagcaacgaattgcgtgcgattgagagtcgcttgagcgagttgcgcaatgctatcgtccagcgattcgtagagttcaaccgcttgtggccttcggttgctggtggtctggacgctacgctggccagcgccgacgactatctggcaaagctcaagcggctggaggacgacaaccttccagcgtttgaagaccgattctttgggttgctacgcgagcagagcgaccaaaacctgactcttttggcgaccaagctcgacgaggagcgctcggcaattcgctcgcgtatggaactggtcaatgagagcctggagactgcgccgttcaacccgggaacgcacctcgtcatcgaaacgaccgacaagtcgctcgaggatgtgcggctcttccgcgcgagcttgagggagtcgctcagccactcgttctcgaacgaccgagacctggccgaagagcgcttcaagacgttggctgccttagttaagcgcctcgccagccaagaaactgcggacaagaactggcgaaatctggtgctcgacgtcaggcagcacgtggagtttgttgctcgcgagcttgacgagggcgacgtcgaggtggaggtctaccgcagtggagcaggtaagtcgggcggacagcgccagaagctggctgctacctgcctggcggccgccctgcgctatcagcttggcggccaagaccgtgcgcttccgagctactccaccgtggtgctcgacgaagctttcgataaagccgatgcagagttcactgcgatggcgatgaacatcttcaaggcgtttggtttccagatgattgtggccacccctctgaaatctgtgatgacactggaacctttcatcggaggagcatgcttcgtgcatataaaggaccgcaagaaatctgccgtcatacccatcgagtacgacagcgagtccaatcgcttgaagttgactcaggacgtacgcaatgccgaagaaactgctgtctcctga

SEQ ID NO: 49449 - DNA, 1254 bp, Burkholderia sp. LMG 29324
atgccgaagaaactgctgtctcctgagtcggcgcgcgacttccttgttcgtcgcttcaataaccagcacgagaactggcttgctggggagggagcttggcctctggtcgtctcgctgggtgctcccaccgacaaggacatcgccgaggatgcttcggcggtccgtacatgggctttcgcttggcagtcgagaggcggtccgggtgaagttgtctttgaagagcggcaattcgcgcggtttggcaggcatcgccttcctgtcagcctgagcttcgcaaatgcgactgccgttgcgactgccgtgggtcagactaggcgctgggaaacggcaacggagcgctaccagcagatgctgaatcgctggccagtgctcgcacaaagcaaggtcttggcatcgaagttcgatgtgctagccgactacactccggaagacttcgagcggttggtaacgctcttgacgtggctggaagcgaatcccgattccggactctacctccgacaacttcctgtcgaagggctcgacacgaagtggttggagaagcgaacgggcctagtggcggggctccttcggtcgttgcgcgaagttactgtcgacgacagcgacttccataccttgtgcgggctgaggaagcctgcgcacagggtccgaatccgactgctatgcccagccttgcgcgaacgagtcggcggcctctgtgacatcgaggcacctataggtgaacttgcgacgctgcctattgagcccaaggcagtggttatcgtcgagaatcttgagacgggcgtggcacttccggacgttccgggtaccgtggcaatcatgcgccttggcaatgcggtgagtgcgttgcatgtcctgcgatggttgcgagggccagagattgtctactggggtgacatcgacacccacggttttgcaattctcgaccgcgcccgcagggtcatgcctcagcttcggtcggtacttatggacgaagcaacactgatttcgcaccgcccgctgtgggtggaggaatcttcactgtgtcccaatgtcccgtttgatgaactgacggctgaagagcggcgcgtctacgacaacctacgcgctggtagctgggggcagcgcgtccgtcttgagcaagagcgtctgtactgggctacgtcgatagaaacgctagtgcatgcgcttgagggtcagactaacgtcgaggaaggcgtggggctatccgtttctccgaacgggctttgccgcgcggcgcagtcaaccgatggttag

SEQ ID NO: 49450 - DNA, 1341 bp, Erysipelothrix sp. LV19
atggttaacagaatctttgaatcaatccaaccgaatttctttcgtattctttccaatgcttcaaagtttgagtacgcagagtgcttagcactgttgtatgaatccctctcagaatctaatgagtataccatgctcagacacgatgctgttttaatcttacaaaactacttcgaacagattcgccttaaatcagatgagactttggttcaaacaagtcgagatcgtgcgaataattatttgcgtgaaatgaaggaaaccggatgggttgaagaagatatcggcgcaaactatcaacaaatgctctccctatcagaaaccgcagtccagtttctgatttttatcgataccttgaagtatgatacagagctcaaatactccagtcaaatttatgccatttaccgcagttttaaaccatttgatcttgagaaaggggagcttgtacttgaagaagcctacaaaaataccgtctctttttttgatagtttaagacgactcaatacaagtatcaagaaatacattcaaaaaatctttgatgaatccatcaccaatgacttatcagaactgtttcaactgctgacgggagagtatcaattgaaaattgtggatgcagcctattaccatttattaacgaaggataatccaagtcaatatacctttacaataaccgatagcattgaacgcattctttcagattatgatgcaatgcatgaaatgagcctcagaaatgcagtagataatgaaagttatgaacggaattaccaagaccttcaactaaaactgacctatatgttggagaaattcttaaacatccaaacattgatccatgaaatcaacaagaagaatcaagcctttgtgacctcggcaattggccgtatctattttttaatgaacgaatcaaccgatatcacggggagtatcaatgaactgattaaaaacatggcactatatccagactttgaagtggaaggcttattaagtgatgtcagtattctcgatgatgcctccttggcttcaccgcgtaaacgcaccctgaaagaatcgtcctatattgaagaaatggatgaaacacaacgggatatcagtggaatccaagataaactggttgaattaagcaaatactcgaaacaacaagtcgatcggattgtgcttgaactcctaaaagggaagcagtggatccatgttaaggagtatgacacccttgacgtcaccatggttacgctcatcttcttatatgggtacgcatatgatgcgtcctacacgattgaacaaacacccgacacctacatcaaccaagaaggcaaagtactggggaattatattatcagaaggagacctgtatga

SEQ ID NO: 49451 - DNA, 639 bp, Erysipelothrix sp. LV19
atgaacaaagcagaagaactcaagaacttttcaatgaagttctcacgacaaaccgaaaaggaacaagaacagttttctgaaatcgtcaacaaactgttacgctgtaattatctatgtcgcgataatccgtccgatcgctcccactattttgacgctctgattatccgtgaagacatgcgtgcttatttatccatcatagataccgatatcatcatcgatgaactcaatggtgtaatcggacttaaagtcaacggtgaatccagtcaccaccgattaagactgcgtgaaacgattattcttctgtgcttgcgtaaacttttcttcattaagaaacaatccgtgtcgatgattgatacgatcgcggtaacccttgaagaaatcatgcaagaactcctcaatacgggatactttgaaaaaggggttgggaaaacagaatttgaaaccacccttagaaaacttaaatcctatcatctcatcgactactcattcacccaatcacccgatgtcattatcctatggccatccttgctgcatgcagtaaatgccaataccttagaagaaatccaaaagaaactcgatgtatacaaagacaatatggaggtagacgatgaaaatactgaagaagataaagctgattaa

SEQ ID NO: 49452 - DNA, 3213 bp, Erysipelothrix sp. LV19
atgaaaatactgaagaagataaagctgattaattggcatattttttccaatgaaaccattgaattatcggggaatacgttaatcacgggtgaaaatggcagtgggaagtcaaccatcctggatgccatgcaatacatccttacggcaggctcaacgaaattcaatatggcagccaatgaaagcagcactcgaactttagtctcttatgtccgtggaaaactcggggtagaaggcaaggaattcattcgaagtggtgatgtagtcagtcacattgccttggaattctataacgaagaatccgatgtaattcaagtgttgggtgtggtccttgaagttggtgcacaatcaatggcaaaaccccacttctataaagttgatcaaccttttgaagatgcatggttcctagaagatcgaaaagtccggaattatgcggagttcaaacaaaccctaaaaggccttcaaatcgagttggatacacccactaccgctacccaaagacgcactctatttatgaacacaatgggtttagatctaaaataccgtgaactcatacccagagccttagcctttcgccccgtcaatgatatccaagactttatctaccgctatcttctgaatgaacaaaacatcgacattgatgctttacgagatagcattcgcgagtaccgccgcttagagaaacaattggaacatgaacaacgttacttccaaaaacttgaaattattgatgcgaaatacacacaattaaaaaaacaggaatatgaagtttcggtcaatgaaagtgcgattcaattgttaaggttgaatctatataagaacaccattgaagtaaatgagaaacagatctatggggaccaacaacgcttaaaacaacttgccaagtcaaaagagcaagccaatgagcgtttgggaatctatcaagaagccctggcggatatgcgaaagaatccaactctagagcgcttagaaaaacttaaactcgcactggctcacgctaaaaaagaatatgaatcaaatgaagcaatcttaaaacatgtcgaaactgaatatcatcggttaataaaaacactgaagtccgtggattttaaagaaaccattcatgatggtaatgatgttcaagcaatccaaaaccaacttgcatccattaagaaagcagtggatcaaaaactaaagacgacctatcttcaaaaaattaaatatgaggaagagatcgaagcgacgcatcgcacacgcttggaactcgaacatgacattgaacggctcaaacgccaacaacaagtttatccagagaacgtcaaaaaactcattgtcgtcttaaaagaacgcttgagtgagttttaccatgaaagtgttgaagtccgtccactttttgaataccttgaaatcaaggatgaatcatggcgtaacgccattgaagggtatttgaatacacaacgctttaatatcattgtggagcctcgctattttgatatggcagtcaaaatatatgaccaaatcaaacacgacatgaatatttatggtgtacgagttgtggacgttttaaaaacacatggcaaaaaagctctggaaggttccttagcacaacaccttacagtcatggacgaatatgtgttgggttatatgaactatttattagggtcagtaatctgtgttgattcagtatcaaacttgaaagaacatcccatttccataactcaagaagccatggtttacaaaggctatgccgtgtttgccattcgacctgagatttataaacgcccttacataggtcaagctgcgatccagatacaactgactcaacgtcaagaagaacacaaagcgcttatgcaaaccttgattgaaaaacggcaacacaaagatgctcttgaagttgttgaaaacacgctagagtccattaatatcttaaatcttgaagtcagcatctcaggtttaaaggatcgaaaaacactctttgaaacttataaactgaatgaagatgccgtgaatcaaatccaaagtaatccgaatctcacacttcaacttcaaaaagcacaagagcttgaagtcaacatcaagaccttacaacaagagatatcaagaagtgatcaagcaatcgggggactgaacaggaatattgctgccacaactgaaaagaatgaagatgttaaggcaacctatgaaatcctttatgatgcgtatgagcgtaccaaagatgacaatccaagccttctatttgatgcagaagccaccatgaaatccagtttagatgcgtcaagtcacaatcaccaacgtgccatggatacgcttcagacacaaaacaaagccttgagtgcgaactttgtagatcaaaaattgtctttacaacaagatatgagtgagtataaccacatgagtaacagtggctatggtgtgggtcttgaatgcattgatcaataccttacacgatattataaacttcgtgatgttgatttgattgcatcacgcaacagttgtcggcaagcacgagaaaaaagtgaacaacaattccatgacagcttcattcaccagctctcacaaaatatcaaacaagcacgcagaaatattgatcttctaaatcgccaattgcgtaagcatacctttagggatgagcaatatcgctttgacatctcagccagcaaatcaccgcactttgcacaatactataagatcataacctctgataaagaagcattcccaagtaatctgtttatgcaaatgctgtcgcaacaagaaagtgaagtcatgaaggaactattcagacgcattactgcctttgatgatgatggtaaaaatgaacaagaactcagacgctatacggattatcgaaactacatgagttacgatattatcacaaccaaggagaatggtgatattacccgcttatccacagtgattaaagagaaatcagggggtgaaacccaaacgccattttatgtgacgattgctgcatcctttgaacaacttatctcaaagatatcaatggttgattcagggtgtgtcgtgctttttgatgaagccttcaacaatatggactctcaacgcattcgtgccatgttagagttctacaataacctcaatattcaaattgtgattgcagtaccacccgatcgcatcgcatcaatcagtgaacatgtggatacggtccttgcagtaggacgcagtggaaacagcggattcacgcaaaggattcaatatggaaaaaacgacacccaatag

SEQ ID NO: 49453 - DNA, 1212 bp, Erysipelothrix sp. LV19
atggaaaaaacgacacccaatagcatacttaacgtgcttgtggataagtacgaaagctctgaaatctcaaaaaagaaatccaaccgtaacatcgccatcaagataaagatggtaaactacgacgaagaatactatgattcacgcgcgtttaaacggtaccaagcatatcaagataccttcaacttactcacgagccttgattttgtgagtgttgaatctgaaggggaatacgtcctttcaatcatgctcaatctcaacaaaattgacgcgatttatgaatggttaggacgtacgaacatcaaagtattccgacaggaacgcttagaaatcctcagaaaccacaacacacaccgtgaactagcacccgtctgtacctttctcatcgagcgtgaaatgagctttaaatccaacaagcaatactttaaagatgctcatgagctcaaagaaatcttaaaagctatcgcttacttagaaacacaaagagattttgaatgtacgcttcgccaagcatcacagattatctatggcaataccaaacgactggaagcacttcaaggaaaagtcagtaaactgttgcgtgcagtggaaccaacacttgaagggcaaaccgatcaatccatatttgagttgtatggcattgtaagaaatccaacatatatctatctaaaagggtctatgaacttaaccattaaaaaccaagtcattcaattaggtacattgggaggaagtctgggattttcatccgatcttcttcaagatttatccatcagtggtgaaggaccacggtatttgatcacggtggagaaccttgacacctttcacaaaatccagccaacacagggtgtgattgtatacttaggcgggtttcacaatgcagcaaaacgaagttttctacaacgaatttatacacactccccaaacattcactattatcactttggggatattgatgcaggcggattctcgatttttcaagaccttatcaaaaagacaaccatcccatttgaacccatgttgatggatgtagaatgcttacacacctatcataacttcacacgccccttaacacaaaatgacaagactgcacttgaagcaatgcgaaatacgtcattttgcgcagtcattgattatatgttacgtgaaaacgttaaacttgaacaagaaatcgtggatgctagtgtgtttatctcaaatcttgataatcatcaataa

SEQ ID NO: 49454 - DNA, 1467 bp, Mycobacterium wolinskyi
atgcagcacgctgacgtgggtcggccgtcgttggagcggctctacgagctgaaccggaccgtcgcggactccaggtccatccgcctgctcgtgaccaacaacctggccggctacctgacattgatggagcgccatctcgatcgcggtgccaagctcaccgagaccgagctcgtggttcggctggagcgcgacctggccgcgatgggatccgacaacgaacagtcgggcctgcagctgatcaagtactgggccagtcaggggtggttgcaccggatcaccgagcaggccggcgacggtgaacgcaacgtctgctacctgacctacgaggcccgggcggtgctggacttcgcccgaaggatgcgacgtgaggacaccatcgcgaccggtggttcgatcgccggcgtagcggcggggttgcggcgcgtcgcgggccaggtcagcaacgatcccgagcggatccgggccgacatcgagcaggagatcgagaagctgcaggccgaactcgacgcgctcgacgagggcaggcggcccgaacccaacccgctcgacgtcgaggacgaggcccgtgcgatcgctctgcagatggagcagatcatctccgacatcgggcagtacggcagcatgctgaaccgcatcaccacgcggttgctcgattcgtcggcagacaccgatctcggctaccgggagcgtcagcgtcagctgttcgacgactacgagtcgctgttcgcgtcgcgcgaaagcgcgtcttacaccgcgttcacacgcatggtccaggatcccgaacagcgggccgggctcgtcgccgacatcgagatggtgaccagtcagctgccccatctcgacccgggtctgcgagaggtgatgaccgggttcttcacgctcgtgtcggcgcagaccgcggaggtcggccggacccggcagcggtgtgcgcggcgcatcaagcgcttcgtggcatcggggacgctcgaggagagccgcggcgtcacgcgtcagctcaacgatgcgctggccagcgctcacgagctgctcaaggtctcactggcggacagccgcgtcggtcttgaggtaccgctggcacgtgccgacttcaactcgatcggtgcggtggcgttcaagattcgcgacgcggttccaccgacaccggccgaaccctcggacggcgaggtgaacctgtcggcgttcgcggcgttggccgcccaggtcgacgccaccgagctcgccgacctcgtcaacgccgccgtcgagcgtggaccgctgccgctgcccgcggccatcggcatgctcgactccgcctacctcggccacgtgatcgtgctgtggtcctgggccctcaaacagccgcacgacgacggcatcgaaacggtacgggtgcggttccagtcgcttgagggggctgaccgtgaaatcgaagtccccgcactggtcttcaccgaaccgatccctattgtcagcgagagtttgttatga

SEQ ID NO: 49455 - DNA, 720 bp, Mycobacterium wolinskyi
atgagtgacacgtccattgacttcgatgcgctgcccagcatcgacgcggtcgaacggtcgacaccggagcggcgcgcgccgcgtttcgacggcgacgccagtgaactgcccgaccgcgcgtgctgggcgctgcagcacctgctgtcacgccgctacatccgcaaggacaaccacgccgaactgtggtcgtgggtgacccggtaccgcaccgaactgacggtgcggctctccgagctggatctgcgcctgtgcatcgccgacgaccacgacatcgcctacgtcgagcaggcggagtatgaatctcagtggcgccgtaagcttttgcgacgcgaaacgctgaacacctacgactcgatcctggcgctgcacctggccaaactgatgcgggcggcggcgcgcgacgaggatgtcctgatcagccgtgaggagatccacgagctcttcgccggggtgaacaacgacaccgaccgcgatgccgcatcgttcgacaagcgcatcgacaacgcgatcgagcggttgaccgacatcgagatcctcgtccgcaatcgcgaagacgagggcagtttcacagtcagcccggtgatcaacgcgatcatgaccgcctcggtgatcaccgaactcgcccagcagttcgaccagctcaaacgagcggccggacgaggtgccgacgacgccgacgccgatgcagtcgaggatgaggtggacgcccatggtcgctga

SEQ ID NO: 49456 - DNA, 3354 bp, Mycobacterium wolinskyi
atggtcgctgaaccgaccaatcagttctatctgtcgcgccttcaagtcatcaactggggcgtcttcgacggttaccactcgatcccgttcagcccgcagggcacgctcatcaccggatcgtccggcagtggcaaatcatcactgctggatgccatttcgctggctttcctgccgtcgcaccgacggaacttcaacgcgtcgggtgacaccaccgccgcgggttcgggcaccgggaaacgcacggtcgacaagtatgtgcgcggcgcatggggtgagcgccgcgacggcacgagccgccagatcatgtatctgcgcggcaccgggccggcctggtcggcggtcgcggtcacgtattccgatcacaccgggcgcgccgtcaccggtctggttctgaaatggcttgctgccgagaaggtttccgatccgggtagtcgctactatctcatcgacgccgaccgcgacatcttcggcctgtgtaaccgctgggccgccaacggttacgacgcggcggtgttccgcgacgacggatggtccggcggcagaagcgaaagtcagtatctcgcgcagctgtactccatcatcggtatccgggcctcggaagccgctcaacagctgctcggcaaggcgaaatcgctgaaaagcgttggcgggctggaacaattcgttcgcgaattcatgctcgacgagccggcgagcctcagcggggtcgaggaggcgctcgagcagatcaacccgctcgtcgaggcacgcggtctgctcgacgtcgcgcgccgtaaacgcaacacgctcggcaacatcgaggccgtgcaggcgcgctatgccgacgaggcggcaaagttcggcgtcatcgacaccgtcgacaacgcgatggtgcgtgactacgtcgaccatctgcggctgcagcaggccggccccgagatcgacaacctcgacgaccagatcacccaactcggcgcacagcgcgacgaattcggcgcacagcaacgacagctcaagaacgagcacaactcgctgatggcgcagatcaacactgtcaccgtggacctggtgccgttgcagcaacggctcagcgaagcggagcgcgtgagcgaagaggtcgccaggcggcgcagcggctatgaggacaagatcgtcgcactggggttcaccgcacccgacactgccgaggacttctggtcgttgcgcgaatccctcatggaggaagcggaccgtctgcaccgcgaactgtccaccggtaacacggcttacgtcgaagcgtcggcgaaagaagtacgggcccgtgaggcgcgtgaggctgtcgaggccgaactggagcgggtccagcgcctggggtcgccgctgccgcgcaccgagtacgagatgcgggcccgcatcgcccgtgcgctcgatgtcgccgagcgggatctggtgtatgtcgccgagttgatggagctcaaacccgacgaggcccgctggcgtctcgcggtcgaaaaggtgctgcggggggccgggttacggctgctggtgcccgacgagcactgggatgccgcgctgcgcttcgtcaacgagaacgacatgcggggccggattcagctccagcatgtcaggcacggcgcgcaactgcgtgagccggcgcccgagacgctcgcgaccaaggtccgggtcgccgacccgacccatgacagcgccgtcgaagcactcaacgtcatcgcgtccgtcggcgactacgcgtgcgtggaccgtccggaggagttcgccgagcatccccgcgccgtcaccgatcagggcctgcgcaaggacagtggccggctctcgatcaaggacgaccggtccaagctgcggccgtccgactacatcttcctcggtgactccgaggccaaagtgcatgccctgcaacatgatctggccaacgcgcacgacgcctacagtacggcgcgcagcgcgcgggaacgcctcgacgaacaccgcgcgagactgcaggcgcgcgagcgggcgtgccgggccctgtgtgaccagtacatgcagtggagtgacatcgacaccgactcggtcgacgaactgctcgagcgtctgcaggacgagcacgatctcctcgtcacggagaaccccgacgtcgagcggctccaacaacgcgccgacgactgctgggaacgtgtcgagaaggtgattcagcagatcgggtcgctcaacgagcgcgagaccaacctcgatcgtcggcgtaccgcgctgctggagctcgtcgaacgcctcgaccccggcgaggttccccaacatgcccgcgacacgctcgacagctacgcggccgacatcgcgctgccactggaactgctggagtccgatccgttccgcaacgagctgatcagggtgatcggccgcgaacgcgaccggctgcgcggcgaccgcaaccgctcgcacgacgagctcgcaggaatcatggccgcgtacgacagttcgttccccgatgcgatccccaacgacagcgacgatttcgacgaacgcgtccacgactatgtggcactgtgccggcgcatcgacgagcgcgaactgcccgacgcctacgagcgcatgcagcggctcatcaccgaacaggctcccggcgcgatcctgaacctgcacatgatcgccgacaacgaggcccgccggatcaccgagcagatcgcccgcgtcaacaccgggctcggtgcggtcgagttcaaccgcggcaccaggctcacgctgcacgcaggcacgcgccacctcgcggccgtcgatgaactcaacgagaaggcccagcgcatcgcggcccgggtgtcactcgtgagcttcggtgacgagacggcgatgttcgagcagtacaccgacatcctgcaattacgaaagctgttggccggcaacacgcctgaggatcggcagtggacccgcgacgcgctcgacgtgcgcaaccggttcgtgctgtactgcgaggagcgtgacgccgaaaccggtgaggtcatccggacctacagcaactccggcgacaactccggcggtgagcaggagaagctcatggcgttctgtctggccggggcgctgagcttcaacctggccagcccggacagcaatgacacgcggccgatgttcgcacagctgatgctcgacgaggcattctcgaagtccgacccgcagttcgcgcagcaggcgctgtcggcgttccgcaagttcggcttccagctcgtgatcgtggcgacagtgcagaacaccacgaccatccagccctacatcgacagcgtcgtcatggtgtccaaggccgacgccgcggtgcccaacgcccgtccggtcgcatcggtcaccgccgcgtcgatctccgaattcaccgatctacgacggaattcgggggatgtggtcccggcgtcctag

SEQ ID NO: 49457 - DNA, 1452 bp, Mycobacterium sp. NAZ190054
gtggggattacgtcgtcggttctgcgctatcggcgcctgcagcaggaggccccggagtggtcgctgctgcgtgcccgaaccgcagccctgatcgtcgccgtggtacaggactactttccaccggaacgacgcatccggtccgctgccgaagtgatcaccgaactcgaccgggatctggagagactccgtgagtcgggcgccgagttcgaatccaccgcgacggcgtacgtcaccggctgggtgagtgcgggctacctgatccggcgcccgggtgaagcgcgcggcagcgagacgctcgcgccgtcggcggcagcgctgaacgccgtggcgatggtgagcgggatcgaggcgcctcagcgcgcggcctcagcatcacgactcggctccatagcggcgaatctcatttttctacaacgtgattcggatcccaactccgcaaccaggctggccttgctggaggccgagcgcaccgctgtcgaaaaccggatcgcagaggtgcagcgcggggagttcccagtgctggacacggaggccgccagggaacgcgtcgccgagacgctgggactggcccaggaggtgcccgtggatttcgctcgggtgcgatccaccatcgaagggctcagccgagagttgcgcgccaagatcctcgacgacagcgcggaggccggcgcaacgttgggcaacgtgttccgcggggtcgacttgctggccgaatccgaggccggccggtccgtgaacggcttctacgacgtgatcctcgacgccgaacagtcgagccgcctgcaggaagccatcagcgcgatcctgtctcgggatttcgccgccgaactctccgcgcagcagcgttccgagttgcgaggtctgctctcccgactcgaagacgaagccgcgaccgtgcgccagaccatggtgctgttgtcgcggtcgctgcgccacttcgtgctgtcccgtcagtacgaggagcaccggcggctccgtcaactgatccagcgctgccagtcgctggccgtgcaggtgagcgcgcaccaccgccctgagaaaccgttgagtctggagctcacacggatcggcatgcagatccggtcgatcgccgcactcaggctgcacaatcccggcgagggccgggtgcccaccgacttcgaacggcacgacgccggcgaagtcgacttcgctgagcttgccgcccaggtccgcgaatccgaaatcgacttcgaagaactccgcaccaatgtcatcgcgaccttgtggagcacggcagggcccgtgaccatcgggcaagtcctgcaggagcatccagccacccagggtctggccagcatcgtgggcctgatggtgctcggcgccgaacatggtgacaccgccgacagcaccgagcgcgtgacgttcgaacggcgcaccgtccgcttgccgaccataaccttcgcacccggtagcttcgaggatcatcggtga

SEQ ID NO: 49458 - DNA, 597 bp, Mycobacterium sp. NAZ190054
gtgaacgacgacgacgaagctttcccgttcgacgcccggcgcgcgctcgtccagttgctccgcggccccgtggtgactcacgacgcgcatcgtcagcagtggtcggcgattctcacccatcgcgccgagatcgaacgacgcctcgccgacgtcttcctcgatctggtcctcgacgaggacgacggcatcgcattcacccggccgcagccggcccccgacgatcccagactcgctccgccgcaggtgctgcgcacagagaccctcacattcatggacaccctggtggtactggcattgcgctacgagttgttggtggcgcagcccggccagcgggtgatcgtggagtatgacgacatcgtcgccggcatggacccctatcgtggccgctatacgaccgacgacgccggattccgaaaacggatcaacgcgtcgtgggagaagatgaagaagtactcgctggtctcccaggtcgacaccccgggccggttcgaggtatcaccagtgctccggcagttgttcgacgccgacgaggtggccctcgtcgaagccgagtaccggcgtctcctggacatccacgcagaggtcccggatggctga

SEQ ID NO: 49459 - DNA, 3279 bp, Mycobacterium sp. NAZ190054
atggctgaggatctactccggcacggccagcatcggctcgcccgcgtgcaactcttcaactggggtaccttcgacggctaccacgacctgccggtcgcacgtcgcgggttcttgatcaccggcccgtcgggctctggcaagtcgacgttgctggacgcgatctccgcagtcctcgtgccgccgacgaaactaagtttcaacgccgccgcgcagggccgcggtcgcaccgtggcgtcctacatccggggcgcgtacgcccgcggatccgatgccgagacgcgtgagctaagggtgcggtatctgcgcgacggtgcgacctggagcgcggtgggactcaccatgacgacggccggtaccggcgatgacacggtcaccacgctggtagcgctgttccacctcaagcgaggcagcaatgatctcggggaatcaggccgcgcgttcctgctgttcgaccacgacctcgacatcaccgacctccggcacgtggtcaccgacggcatcaacgtgcgcgccttgaagaagcgctggccggaagctctctacaacaagagttacccgcagttcggtcaacgcctacgtgcccggttgggcatcgccgacgagaacgcccagctgctgttgcaccgcgccatgtccgccaagggcctcgacagcctggaccggctgttccgcgattacatgctcgacgagccggacacgttcgccgaggcacgccgcgcggtggagttcttcgccgacctcgacgaagcgcaccgccgggtggttcagacaaggaaacagatcgccgcgctgacaccgttggaggagttgaccgtggcgcgggaccgcaccgatcaggaggcccgggaactcggtgaggagctgaccgcgcttgatgggctctccgcgcgattcgagctcgagctggccgagagctggcgcggtgacgccgaatccgcgtacgccgacgcggtcacgcgcgaggaacaggcaggctcgcgacggcaggccgctgccgtcaccctgagggaggcagaacgcgcccgcgacggtaatcggagtttgcgcgaactcaccgatgcactcgaccacgcggaggaacgggtgcagcgcgtgctcaccgcccgccgccggatgggcgaggcactgcgatcctggaatgcgacagtgccggacaccgccgaggagttcgcgaccgttcggtctcagatcaccagggagacagcagaactcgtagaaaaatccgatcagcacgatgccgcctacggcgccctgatgctggcctcctcgcgcgccgacgaccaggtcagcgacctcagacaacagatcgccgcgctggctcgcgagaagtcgaacctcgatcacaaactactcaaggcgcgggccctgatcgtggcaaccgctggactgcccgcgcgctcactgccgttcgccggcgaactgatcgacgtcaccgcccccgattgggcaggcgcggccgagcgggtgctcggcggacttggtcgcacgatgctggttgccgaagaacacgccgacgatgtcgccgccgccgtcgatgccgcacatctgggcacacgactggtatggcggcgggtgaacctgagccgcacacaccgggtgccggccgtcgatgccgggtccatcgtcaacgtgctgcgggtcgccgaatcaccttggcagcactggcttcatttcgagcttgcgacccggttcgattaccagcgggtcgacgacgcgagcgaactgaagcggtatcaacgcgcggtgacacgcgccggtcagacccgaaacggtgaccgccacatcaaggacgaccggcacagggtcgacgatcggacccagtacgtgctgggtacgaacaacgacagcaagctcgagattctgcgcgatgcgctgcgtaagtccgagatcgccgctgattccgcccggaagagggccgacgcggcgcgcgtcgaatccggcaaccgccgtgatcgcatcgcgtccgctccgagcatcgttgccgtgcagtgggacgagatcgacctcggcagcgccgaagcccaccgcctgggtgtgaccgaacagctcgctgcgctgcgcggcgatgccgaggtcgatcggttggaaggagccgtcaaagaagcccagcacgtggccgacacaactgaggcggcataccaggacgcacgcgatgctctgcacaccgcgcgcgagcacgccaatcgggtcgaagcgcggatcgaagaactgtgcaggacggcggtggagtctgccgcgccgcccgacgcactgacggcgcgttaccgggcacgttttgacgacggacggcgggccaccttgcgactcgatgggttccccgccgcggaaaaggccgtggcgaaccagattcgggccgcacactcgcaggcggaaaagtcgcttatgcagacgcaacacgccatcgaatcggtgttgcaacagtatctgcacgactggccgcatccggagctggcagcggagtccggctacgcggatgacgctgtggcctttctgcggcgcctgcgcgccgatgatctaccgagcgtggagaatcggttcttcgagctcaacgaccgtcagtcgaatcaaaacttgggcacgctggcgatgcggatccgccgcgccgcgggtgagattcggcgccgcatcgacgaggtcaactcatcgttggcccgctcggaattcgaccgcggtcgattcttgaagatcgacgttcgcgactccccacaccccgatgtgaccgaattcctcgccgctatcgcacgtgtgcaggagcgatcgctgctcgccgatgaccgtcgatcccaggagcaacgattcgaacggatgcgggagttgctcggtcggctcggttcgtcagatccgggcgacgtcgcctggcgcaaccggtgtctggacacccgccgtcacgtcacgttcgtcggtgtcgagatcgacaccgacggaatcgcggtcaaccaccatgattcgtcggacgccctgtcgggcgggcaggcgcagaagctcgtgttcttctgcctcgccgcggcacttcgttaccaactcgtcggacccgacgccgatctgccgatgtatggcacggtgatcctcgacgaggcattcgaccgctcggatcccgagtacacacgccgtgccgctgatgtgttcgaccagttcggttttcatctcgtcctcgccacaccgttgaagatgatccggacattgcaggagtacgtgggcggcgtcgccaccgtgtcgatccgtgattcgaaggcgtctcgcctggcagtcgcgtcgatcggcgaggccgacgatgggtga

SEQ ID NO: 49460 - DNA, 1170 bp, Mycobacterium sp. NAZ190054
atgggtgatccgcccaaactcgtgctgcccgccgacatcaccgagaaagcgcggcgcgtagtcgaccgcaacctcaagtcgtggttgttcggcgggacggttgctccgctgataacccgactcggaagtccgacggaggcgcacgtcgctgctcaccgatcggcggtcgaggcgtgggtccgcgcgtggcagagttccgggctcgacgtcagctgggaggaacggcgctggcccagcttaggccggcaattgttgccgggaacggtcacactcgaagacgtcgacgcgatcacatcggcggcgggcgctaccgcacgctggcacagggcgcaggagcgctgcgcccgcctgcggagcctggctgatgaaccgacctggcgggatgtgctcgtcagaacattccggcgctggaattcgatggcagacagcgattttgatcgcttgcttggcgtcctgcagtggctgcgacagcacccggactcagggctgttgatacggcagctgccgattccgggtgttgacagcaaatggttgggcacccaccgtgccgccgtgggatcgctcgcggtgccgctcggaataccggagcacctggggctgcgggaacgcgagcttctccgcgctgttgccatcctcgatcctgcgctgcggcacggccttccacgcctgttcgcagcctcggacgctgagctggcatccgttgacctcgcaccgccgctggtcgtcgtggtggagaacctgcagacgctggaagcgatgcccgacctgccgaacaccgtcgccgtgttcgggtggggagacaacgtgatggcggtcgccgagttccattgggtgcttgcggcacgaacggtgctctactggggggatctcgacacgcacggcttcgccatcatggcccgcttccgggcgaaccgtccctgcgacagtctgctgatggactacgccacactgcagacatggcgtgatctcgcagtcccgcacccagccacagagttcgtggactccgaattgctgacaagagacgaactcgcagcgctggatctgctgcgccgtgacggtctgcgactggagcaggaacgaattccgatggccgccgccggtgaacagttgcggtctcggctgtcgcgaattgatctgagcgagggctccattccacgaaatttctcgtaa

SEQ ID NO: 49461 - DNA, 1443 bp, Mycobacterium sp. NAZ190054
gtggacgacaactcaaccttgtctgccgtcgacctgctcgaagtcaatcgcgacctgcagtcctcccgggccatccggctgctggccaccaccaacctgggcctctacgcgacgctgatggagcggcatctggccgacggcgtcctgcccgagaccgagctggtggtccgcctggaacgcgacctcgacgacctcggcgacgcacagtccgggctggcgctgatcaagtcgtgggccagccagggctggctgcaccgcatcgtcgacgtgcgcagcgaccagaacgtctgctacctgacccaggacgcccgccgcgcgctggacttcctgcgcggcatgcgccgccaggacaccatcgccaccggcgggtccatcaacggcatcgcctcgcggctcaagcaggtcgcgatccgcgtcggcagcgacccggcccggatccgcaagaccatcgaggccgagatcgcccagctgcagcaggagctggaggaactcgaccgcggtgagcgcccccagccggatgtcaccgacgcctacgacgaggcccgcgccatcgcactgcagatggaacgactgatcaccgacatcggccagtacggctcgatgatcgagcaggccaccgcggccctcgacgagccgatcgactccaatctcgagtaccgcgaccggcagcgccagatgtacgccgactaccaggccgcctgggactcacagggccgcgacagccaccgcgcgttcctgcggatgatcaacgacccggatcagcgtgccgagttcgaggccgacgtggccgccgtcgccgacgcgctgcccgcgctggacccggcgctgcgcaaggtgatggccgggttcttcgagctggtcggccatcagatcgacgaggtcgagcggatccagcagcgctgcgcccagcgggtcaagcggttcaccgcattcggcacgctggagcagagccgcggggtggcccgccagctcaacgaggccatcggcgccgcgcgcaacctgctgaaatcgagcctgatcgactcgcggctggacatcgagctcccgctggcccgccacgcgatcagctccgtcggcgcgctgagcttcaagatcggcgacctgtccgacccgaaaccggccaggcccgccgacggcgaggtcgacctggccagcttcgccgcgctgaccacccaggtcgacgcgccggcgatgtcggacatgctcaacgccgcggtcaccaagggcccggtgtcgctaccggaggcggtcgcgatgctggacaacgcgtacctcggtcacgtgatcgtgctgtggtcgtgggcgctcaagcagcccaacgccgacacgacgacgtcgaccaccgtgcggttccggtccctcgacggcaaggaccgcgaaatcgccgttccccatttgatgttcaccgaaccgatcaccaccctcgtcggagccgcgcagtga

SEQ ID NO: 49462 - DNA, 690 bp, Mycobacterium sp. NAZ190054
gtgaccaccgaacacgaagccgacttcgaggcgttctcgcagctgccgcaggtcgaccagaccgcccgtcccccgcaccagcgcagaccgcgcttcgacggcgatgtctccgagctgcccgaccgcgcctgctgggcgctgcagcacctgctgacccgccgctacatcagcgccgagaccgacagcgacatctacgcctgggtgctcgaataccgcggtcagctcgccacccggctgtccgaactcgacctgatcctgcgcgtcgtggacgggacggacgtcgcgttcgtcgagcaggcccgctacgaatccgccaagggcatcaaacttctccggcgcgaaccgctcggcacctacgactccatcctggcgctgcacctggcgcagatgatgcgcgcggccggcgggcagagcgtgctgatctcgcgcgaggagatgcacaacctgttctccggcgtgctcaacgacaccgaccgcgacgccgtcacgttcgccggccgcatcgacgccgcgatcgcgcgcctgaccgggctggagatcctgcgcaagagccgcgacgacgaggacagctacaccatcagcccggtgatcaccgccgtgatgacggccagtgtgatcaccgagttgcagcagcagttcgagctgctgctcaatggcggcaccccggaagcagaggtcgaccttgactga

SEQ ID NO: 49463 - DNA, 3363 bp, Mycobacterium sp. NAZ190054
ttgactgagcagttccacctgtcccggctgcaggtcatcaactggggcgtgttcgacggctaccacgacatcccgttcagcgagggcggcgcgctgatcgccggcgcgtcaggcagcgggaaatcgtctctgctggacgcgatctcgctgggcttcctgccgttcaaccgacgcaacttcaacgcctccggcgacaacaccgccgcggggtccagcgcgggccggcgcaccgtcgacaagtacgtgcggggcgcgtggggacagcgcagcgacggtggcaccaaccgggtgatgtacctgcgcggcgacggcaccgcgtggtcggcggtggccgtcacctatgccggcgattccggacgcaccgtgacgggcctggtgctcaagtggctgaccggtgagtcgcgcagcgactcgtcgagccggttcgtgttgggcgacggcgatttcgacatcgaggacgtctgcaaccgttgggctgcagggcgtttcgacaccggcgtgttcaaggagcatggctggcggttcaccaccaaggtcgagtcgcagtacctcgcccagctgtacgccaccatcggcatccgcgcctcggatgccgcccagcagctgctcggcaaggcgaagtcactgaaaagcgtcggcggcctggagcagttcgtccgcgagttcatgctcgacgaacccgagagcctgtcccggctgccggaggcactcaagcagatcgacccgctggtcgaggcccgcgagctgctggccgtggcgcagaagaagcgcaagatcctcggtgacatcgagaagatccagcagcgctacgcgtcggagtcgaccgatctgggcatcatcgacctggtggacctgccgatggtgcgggcctacaccgaccatgtccggctcacgcagtgccccgcgcagatcgaccagctcgactccacgatcgatcagctcgacaacgagtacgaggacgtcacccggagcctgaatctggccaaggccgaagcggattcgctcaacgcccagatcagtgggtccagcgcgagcatcggtccgctgcaatcgcaggtgaccgccgcggagaccgaggccgagcaggtgtcccgccggcgcaacgcctatgaggacatgctcaccgcgcagcagctcgacatcccggagaccgccgacgatttctggaacctgcgcgaggagctgctggccgaggccaccgagttgctggccaaggtggagcgcaaccgggaggcgtccaccgatgcggagtacgcgcagaagtcggcgcggatggcccgcgacgaggcggccaaggaactcaagcgggtcgagcacgtcgggtcggcgctgccggaattcgcgctcgtgatgcgcgagcagatctgcaccgccgtcggcgtcgacgcggccgagctgccctacatcgccgagctgatggatctgcggccggaccagacccgctggcgcaccgcggtggagaaggtgctgcgcggcgtcgggttacggctgatggtgcccgatcagcactggaccaaggtgttgcagttcgtcaacgagaccaacatgcggggacggctgcagctgcaccatgtgcgggcgaagttcctcggcgcggagccggtcgacccggagcagaacacgttggcgggcaagctcttcgcggtggacccggcgcatccgtgcgcggccgaggcggtcgacgtggtcgcctcggccggtgaccacatctgcgtcgacacccccgaggtgttcgcgcggttccgtcgcgcggtcaccgacaccggcctgtacaaggattccgaccggctcgcgatcaaggacgaccggcgcccgctcaagcagtccgagtacctgtatcagggcgacgtgtcggcgaagatcaacgcgctgaccgtcgacctggccgcggccgaggaggcctatcagaaggcgcggcgcaccgccgacgacatcgccgcccagcgtcagcggtggcgggaccgggccgcggcgtgcaaggcgatctgcgaacagttcccgcagtggagccagatcgacaccgagaccgccgacgggcacgccgaccggctgcgtgaacagtacgagctgctgctggccgatcatcccgacatcgaggcgctcaatgcgcgcgccgacgaatgctggtcgcagatccagaaattgatgacgcgccgcggcgcgatccagacccgccgcgacgacctcgacgagcggcgcacccgtctgctggaactgcaggaccggctgaagcccgcgttcgtgtcggagccgctgaccgagctgctcaaccggtatgcggcccaggttccggtgagcctggagctgctggagcccgagccgcaccgcgacgcgttgttctcggcgatcaagaaggaacgcgaacagctgcgcgagagcaggcgccgctcctacgacgagctggcccgcatcctcaacaccttcgacacgtccttcccggacgccatcccgaacgactcggacaacttcgacgagcgggtgcacgactacgtcgcgttgtgccggcacatcgacgagcgtgagctgcccgaggcctacgaacggatgatgcgtctggtcaccgagcaggcacccgatgcgatcctgacattgcaccgggtggccgagcaggaggcccgtcgcatcagcgaccagatcgaccgcgtcaacaccggtttgggcgcggtggagttcaaccgtggcacccggctgacgctgcgcgccacaccgcggacgctgacggcggtgtccgagctgaccgagatcgtgcgggcgatctcgcggcgcatcgccgaggtcgggctcggtgacaagcaggcgattctggaccagtacgccgacatcctgcggctgcgcaaccggctggcgtcgacggcgccggaggacaaggcgtggacgcgggacgccctggacgtgcgcaaccggttcaccttcgactgcgcggagtgggacgtcagcaccgaggagctgatccgcacgcactccaacgccggcgacaactccggcggcgagcaggagaagctgatggcgttctgcctggccggcgcgctgagcttcaacctggccagccccgacagtgacgacaacaggccggttttcgcgcagctcatgctcgacgaggcgttctccaagtccgatccgcagttcgcacagcaggcgctgcaggcgttccgcaagttcggcttccagctggtgatcgtcgcgacggtgcagaacgcgacgaccatccagccctacatcgacagcgtggtgatggtgagcaagaccgaggcgacgggccgcaatgcgcggccggtggccacagtcgcgacccgcacgatctcggagttcgggcagctgcgccgcgagatgcgggcgaccgcgaaggtgcccgccggggtgtga

SEQ ID NO: 49464 - DNA, 1500 bp, Bifidobacterium bifidum
atggaacggctgaggccggtctatgaaaccggcgtgctgagactgctgctccgtcagaattcgatgatgtacgtggcgctgctccgcgcggccttcgacccgttgaccggcgagctgccccgtgagaccctggaggaaagcttctcgcaaagcctgtcccggctcgtcgactccggcgaataccagctcagggaggatcagaccatcgcggacgcctcccggcgcatcctcgccgacctgacccgtgagggcgatgacgattacgcatggctcgccaactcgcatgacgccgcatcgcaccggttcctgtaccgtctcaccgcccgcgcccatcgtgcgatcgaggcgctgtcgcggcttgaggatgactcccgcacgctgtcgggcgcgcaggcgaactcgatcatcatggagatcgagcatgcgcgcatgcagcttaccgccgaccccggcgagcgcgtggcgttgctcaaccgggagatcaaggcgcgcaaacacgagatacgtcagatacgccacggtcagcggcaggcggcgctcaccgaatcgcaggtcgaggacgtgattgcagtgattcacaacacgctgcgcggcgtgcccatagacctgcgtgaactcgtgctgaccgaacgggacaacggtgacgcgctccgccgccgcatgcaggcgggcgacatgagcgtcgacgacatcctgacctcgtaccacgacgaataccgcaggtccttcagcgagtccgacagcggaagacgcttcgaggatgcgttccaggtgatcatcaccgacgagggacggcagcagatcgacgcggccctgcgcgacatcgcccacacgccgtatctggccggcgagtccggcgtcctgctcgatcaggtgcgtgccgagctttcgcgcatctatgacggcatcgaggcggtgcgtcgccagatgcgcgtatccgacgaggcgatcagccgtctggtgcgacagcagaccgatacccgataccgcacgatgctcggcaagctcaaccgtctgtatgcccacatcaacgccgacgcgaaggcgcatcagggcgacgatgcgagaccgtaccggaccgataccgcggccggcaggttccctccgctgccgtcgcgccccgcgcgcccgatggtacgaacgaccaccccaggattgtccgtaccgcagacaccgggcgatgcgaccgcgcccgacctgcgttcgatgatcgacaacgggggaccgcggctgcggcgcatggccgcgctcatcctcgaatcgcccgtctacgcggacgacgggaacggcgccatcgacatcgtcgccagcttcaacgggctgccgaaagccgagcggaaggaaagcgagctcgtcggtttcctgggagagctcggctgcggggacgaagccggcgtcgcatggcattgcatatcggcagacggaagcccgagggactggatcaccggcccagtgctcgcacaagaggatgaattgcacgacatcgtgaaggaggactga

SEQ ID NO: 49465 - DNA, 1038 bp, Bifidobacterium bifidum
atgagcgacctgacgaacgacaccgcccagccggacgcggacatggacatgattgacgacgacatgaccggcaccggcagtgccgataccgacagtgccgataccgacagtgccagtaccggcgcggatgacatgggtgcggcggacgtcgaatacgatggcgcggacgcggaaggcgcggtcaacccatacgccctgttcgagggcgacacgggcgacatgaccgccgacgcgcgcatggtggcgatcatgctcaaacgcgagcgctacatcagcggacgtttctatgacctggcgctcgacaaccgcgcggcggtcatccgttcgctcaacaacgacctgctcgatctggtcgtcaacgagcactaccgcgtcatgtacgccaccgcggtgagcgggccggacatgacgctgcgcgcgctcaagacccgtgcgagcctcaaacgtgaggaggcggcgctgctggcgttcctgcgcatccgcgtgctcgaatacgagaacgcccacgtcgcgccggacgaatggctggtcagcttcgaggagatccgagcggcgctcgccaccggcgccgggtacctcgcctcgcgcaacgacgaggagggcgtgctcaggcaggtgggcgcgatcgtgtccgtcatgtgcacgtacggctatctcaggcagctcgacgatgacgagacgatgtaccgcatcacgccgctggtgccggtggtgctggaccgtcagctggcggacagctggctcgcagtcgcggaccgggacgacgatgacgagccggccggtgacatggccccggccggctcgcggtctgcagccggcgatacgtcgaacgccgatgcgagcggcgccgatgacgatggcgattcggacgatgcgggacccgacgccgaactgttcgaggctccgctgttcgatgatgacgccgatgcggacgccgccgagaacatcaagggcgccgatgatgccaatggcgcgaacgacagcgacattgacgacgagaccgcctcggacggcggcactgcacgggaaggggagtga

SEQ ID NO: 49466 - DNA, 3585 bp, Bifidobacterium bifidum
atgagcggcaaggacatgcagatgatcgccgaccgatggatgatggaaagcaggaggctcgtcaactggggatcctatgagggttaccatgagttccgtccctccacggactcgcaactgccggtgacgttgctcgccggcgcgagcgaatccggcaagtcgacgctggtcgacgcgcagatatcgctgctctacccgaccggcacgcccttcaacaaggcgtcgaattcggggcgttcggaacgaagcgactacacctacctgcgcggcatgatcggcgtgggaggctccgacggcgtcgacgaaccgatgtacctgcgcggccgggacgagtccggcgcgccccggtccatatggggcgcgatcgtcgacacctaccgcaacttcaccaccggtcagatactgtcctgcggcaagttcctctatctgatgcccggcgacgggcgcggcgacgtccgacggctgtacctggcatgggacaagccgatcgacccgcgccgcatggacgtgttccgcgagtcgtcgttcacgcccacgcagctgaaatccacgtatccggggtgcgtcaccttcccgaacgccgaggcgttccacacccacatttgggatgtcatgggcctgagcgcggaggcatgccgtctgctggcccgcatccagtcggccgacgccccctcccgccttgacgacatcttcaaacagggtgtgctgggcgtgcccgaggcgctggacctggcccgtgcgaccgtggaggattacgagcgttacgacgcgaacttccgaagcatggaggaaaagaccagacgcatgggcaagttgcgtgccatcaccgccagctatggcgactacgagtcggcccgtgacgcggtccactcgttcgacgcggtgaacccggccacgaagtccggctcggcgacgatccgagcatgggcgatccgccgcatgatcggcgaggtcagcgaacggcagccactcgacaggcgtctgcgtgacgagcgacgcagtgaggcgcgggctgccggcaagcgcatcgaaagcctgcgcacccgcatcgacgcggtgcgcgagcgcatgcgaggcctcgacggcggcgacctgacacggctcgacgcggaaatgcggcaggcggaacgcgcgctggcggacattaccgccggcagacagcgcatcgggcgcatgttcgaggcggccggcgaggagttccccaaagacgagcacgcgtgggacgagcggcgcatcgaggccgtgacgttcatgcgctcatatgagcagcgcaagggactgctggacgacatgcgcaaccagacgtacgccgcgcacgcgtccgtcaagcagacgctgcagcggctgaacgacgattacgaacgccagaaatcgcagcgcacccgcatctcccgccagatggacgagacccgcgccatgctgtgccgggccaccgggctgggcccgagcgaactgccgtacgtcgcggagctcatggacgtgcgcgaggatcaggagcattggcgcctcgccatgaacgccgcatacggatccatggcccagaccatcctcgtcgacaagcgccatgagcgtggattcgcagccaaggtcagcgccatcgacccgcacgccatggcgcggcgcacctggcagttcgtcgacaccgaacgcgggggagcagggaacgggcccggcggcgcgaacacgggtgcgaccggcgggacggacggagaggtgtggctgtcctcgaagctgcgctaccgcgaggattccccgttcgccggctggctgcgcgagcagaccagctccgagcgtctcgacgccctgtgcgtcgacggcatcgacgactccgaccatgccgtgcggcaggtgcaggccgacgggcagatcaaatccggcaaacgcggccagcatggcatcaaggaccgtcagcaggtcatcggattcgtcaacgaaagctatttggcgcaactgcgcacgcgcatccaggacgcgcaacgccaatgcgacgagaccgcgcaatcgtacgcgagcgcgaaggaacaggccgaccgcctgcagcgagagcgcgaactcgccgaccagctcgcatacaccgcatgggagaagatcgacgagaacagcgcgaaggcggcgatcgccgacatcgaacgcaccatcgcctcggtcaggaacaatcccaagctcgccgaactcgacacgttgcaggagtcgctgtccaaggagctcgaccgctcgcagcgccagcgcatcgacatcgaacggcaggccgagctcgccgatcaggcggtgaacgcagcgcaggcatggctcgacgagcatgccgcgcagccgcagccgcagacgcggccgctcgacggggaagcggcggacatttcgccaaaagccgtcacgaacggacggactctcctgacggacgaggtggaggaggcgctcgccgaatcatatgagcagcgtctctccggtctgggggatgcgacgacccgcgcccacatgatcatcggcgcgggggcgccgcagcgtatggctcagggggataccttcgccgaccgtgtcatcgccggcatcggcaaggacctggaggcgcgcgtctccatgctcgaaggtcgtgcggcgtcggcccgcaccgccgtcgaggcgcggatgggcgcctatatcgagatgtatgcgggcggtgacgatacgatcgccgccagcgtggacgactaccggtattaccaggacgagttggaaagcctttcgaagctcgccaccgtcgaagccaccgccgtcgaataccacaactgcctcgacaagctgctgatgagcttcctgaccatcaaacgcgcgatagacaccgacgccggagacatccacgaccagctggaacgcatcaacgcgatgctggacggccagcagttcggcccgcgccacggcagcctgtccctgcacgcggacgtgcggcgccccgagcgcgcgttctggtcggccctgacccgcgtgatcggcaccctcaacgaccgcaaggcggcacagacggacgacgatcttgacggggcccggtgcgcgttcgcgtcctgcgccgcgatgatcgacatgctgcgccgcgagatcgggcagatcagggacgtcaacggcgtgaaaagctacggcgcccgcaacctcgacccgcggtgccgatcctcgttctacgcgctcgtgcgccactcggacgggcaggtcgaacgcatcacctcgaccggcggacggtccggcggcgccctgcaggagctgacctcgttcgtgtacggcgcggcgctgatctacctgctcggcggcggaatggacaacaagctcaagccttcctacacgacgctcttccttgacgaggcgctcatcaaggccgacggccggtatacgcggcgcgcgctgtccgtactgccgagactgggtttccaggtcatcgtctccgcccctgaaagcaagacgggcgagatactggaggtctccaccaaggcatacgtgacccgcaaggaccccgacaccggctacaccacgctgcacgaagccagactggacggcatcgatgagacggaaggcgcagatgagccggaaggtaccgtcgagtcggatgacgccgccgaatag

SEQ ID NO: 49467 - DNA, 1620 bp, Bifidobacterium longum
atgcgggagctggaacggctgcgaccggtgtatgagacgggcgtcctgcggttgctgttgcgccagaacgcgatgctgtacgtgtcgctgctgcgttccacgttcgacccgctcaccggcgagctgccgcgcgagaccgtggaggagcggttcgcgcaaagtctgaacgctctggccgacgccggcgaatatgcgccgcgcgaggaccagaccttcgccgaggccgctcatcagatcctcgccgacctgacccgtgaaggcgaaggcgactacgcctggctcgccaactcgcatgatgcggcctcacaccgattcctctaccgtttgacggcccgcgcccaccgcgccatcgaggcgctgagcaggctcgaagacgaatcacgcgccctgtccggcgcgcaggccaacagcatcatcatggaaatcgagcacgcgcgcatgcagctgaccgccgaccccggcgagcgcatcaaactcctcaaccgtgaaatcaaggaacgcaagcacgagatcaaacgcatccaacagggcaagcagcatgccacgctgagcgaagcccaggtggaggacgtgatcgccgtgatccacaacacgctgcgcggcgtgcccatcgacctgcgcgaactcgtgctcgacgagcgggacaacggcgacgccttgcgccggcgcatgcaggccggcgacatcagcgtggacgagaacctgacccgctaccacgatgaataccgccgctcgttccgcgaatcagacagcggccgccgcttcgaggacgccttccaggtgatcatcaccgacgagggtcgccagcaaatcgacgaagccctgcgcgccatcgccaaaaccccgtatctggccggcgaatccggcgtgctgctcggccagatccgcgacgaactggcccgcatctacgacggcatcgaagccgtgcgccgccagatgcgcgtctccgacgaggcgatcagccggctcgtgcgccagcaaaccgacactcgctaccgtacgatgctcacccgcttgaaccgactgtacgcgcgcctcaacgcggatgcgaaaacccatatgggagacgcctcgcgcccgtacgacacggccacctcggacgcgctgttcgcgccattgccgatgcgcccggccaaatccatgacccgcgccaccgcacccggcctgagcgacctcgccgccgaagccccgcagtcgactccggtggccgatctgcgggacatggtcaacagcggcggcccccgactcctgcgcatggtcagcctcatccggcgcaacccggtgaccgttgacaggtccgatgacaggcccggcgcaaccctcgtggacatcgccgccagcttcaaccggctgcccgaaagcgaacgccgcgaaagcgagatcgtcggcttcctgggcgggctgggagccgtaagcggcaacgccatcgccgacgagccgtccactgacggcgtcggcgtcgggctcgacagcgacatcgccaccgagccggccccggcgcagcgcggcgataccgcgacctggcattgcgtatcgatcgacggcgagccccggaactggatcactagaccggtgctggccgacatggacgagctgagcatcattgtggaggaaggatga

SEQ ID NO: 49468 - DNA, 675 bp, Bifidobacterium longum; identical to SEQ ID NO: 48172

SEQ ID NO: 49469 - DNA, 3549 bp, Bifidobacterium longum
atgatgcaggcgacagacgtgcagatgatcgcggaccggtggatgctggaatcccgccgactcatcaactggggctcctatgagggctaccacgaattccgcccctccacggaccacaagctgccggtgaccctgctcgccggcgccagcgaatccggcaaatccacgctggtcgacgcgcagatctccctgctgtacccaaccggcacgccgttcaacaaggcctcgaactccggccgctccgaacgcagcgactacacctacctgcgcggcatggtcggcgtgggcagcaccgaaaccggcgacgagccgctctacctgcgcggccgcgacgagaacggcgcaccgcaacccgtgtggggcgccatcgtggacacctatcgcaaccagaccaccggccaggtgctctcctgcgccaaattcctctacctgatgcccggcgacggccgcggcgacgtgcgccgacagtacgtggtctggggcaagcccgtggaccccaggcgcatggaccaataccgtgacgccccgttcacgccggcccagctcaaagccacctaccccgactgcctcacattccccagcgccgaagcgttccacacacacatctggagcgcaatgggcctgagcgaggccgcctgccgactgctgcacaagatccagtccgccgacgcgccctcccggctcgacgacatcttcaaacaaggcgtgctcggcgtgcccgaagccctggacctggcccgcaccacggtcgaggactacgaacgttacgacgagaacttccacgccatggacgagaagacccgccgcatggacacgctgcgcggcatccaacaggcctacggcgaatacgccgccgcacgcggcaaggcccgcgccttcgaaccggtcaagccggccgtcgacggcacggtgccggccgtgctgcgcgactgggcattggcccgcatgcgcggcgaagtcgccgtccaactgcccgccgaccgcgccgaacaacagaacagcgaggcggaagccaagctgctgcgccgccgaaccgaagacctgcacacccgtctcgacatgatccgaggccagatgcagggtctggacggcggcgacctgacccgactcgaactcgaactcgaccaggcccgccgcaccctcgaagacgtgcaagccaaccgaacacgaatcgaacaaacgttcgcatccatcggcgagacgctgcccggcgacgaacaggcctggaacgaacgccgcatcaacgccgtgaacttcaaacgcgaatacaacaaacgagacggcgaatgcgaggaagccctcaccgccgccatcaacgcgcgggccggcgcacgcggcgacctcgaacgactgcaacgcgacttcgaccggcaacgctcccagcgtacccgcatctcccagcagatggacgaaacccgcgccatgctctgccgcgccaccggactcacccccgccgaactgccgtacgtggccgaactcatggacgtgaacgaacacgaggaagactggcgtctcgccatgaacgtcgcctacgcgcccatcgcccagaccatcctcgtcgacaagcgccacgaacagggcttcgccgccaaagtcagcaccatcgacccgcgcaccatgccccgacgcacctggcagttcgtggacaccgcacgccactacgacgacaccggcgcgcacgcgaacatactcaccggagaacaggacggcgactggctgtccggcaaactgcgctaccgcgacgactcgcccttcgccgactggctgcgctcgcagacccaggacgaacgattcgacgccctatgcgtcaccgccatcgacgacaccgaccgcaccaaccgtcaggtgcaggccgacggtcagatcaaatccggcgcacgcggccagcacggcaccaaagaccgcgcccaggtcatcggattcgtcaacgaaacctacctcaacgcgctcgcagcgcaggtcgacgccgcccgcaacgcgctcagccaagccgacaccgactacacggccgccaaaacacagtccgataacctccaccgcgaactcgaactggccaaccagctcgcctacacgtcctgggagcgcatcgacatcgccggcgcgcaacggaccatcacggacacgcaggacgccatcgcatccatcaaaaacgatcccaagctcgccgaactcgccaaacagcgcgacgaactgaacgccgaactcgaccgtgtggaacgccagcgcatcgaatccgaccaggccgcggcccgcgccggcagcgccgtcgaagcggcgctcatctggctgcgcgaccatgccgacaccggcacgacggacgccgccggtgccaccgccgacaatgacgatgacgccgcgtccggcccgctgccggacgaagtcacggcggcgctcgccgaatcctacgacaaccgattcgccggactggcggacgccgccatgcgcgcgcacatgatcatcggcgcgggcgcggcaggaacgcaggcaccgggggagagcttccccgaacgcaccatcgccggcatcggcaaggacatggcctcccgcatcaacctgctgaacggccaggccgatgccgcacgcaccggcgtcgaatcgaaaatgagcacctacatcgcgctctacgcggccgacgatgattcgctgaccgccagcgtggaggactaccggtactatctcgacgaactcgccagcctcacccagctggccgcggtcgccgccaccgacgccgaataccggcgctgcctcgaacagctgctcaggagcttcctgaccatcaaacgcgccatcgacacggatgccagcgacatccacgaccagcttgaccgcatcaacgccatgctcaaaggccagcagttcggtcccaagcacggcagcctgtccctgcacgcggacgtgcgccgtcccgagcgcaccttctgggcgcagctcatccgcgtcatcggcaccctgaacgattggaaatccgccgacgtcaacgattccgacgcctcgcgcaaggctttcgcggcctgcgcgccgatggtcgggctgctgcgcgccgaactcgcgcaggtcaaggacgcgaacggcgtgaaaagctacggcgcccgcaacctcgacccgcgttgccgctcgtccttctacgccatcgtgcatcatgccgacggcccggatgaacgcatcacctccaccggcggccgttcgggcggcgccttgcaggagcttacctcattcgtatacggcgcggcgctcatctacctgctcggcggcggcctgaccagcgagccctcgtacaccacgctgttcctcgacgaggcgctcatcaaggccgacggccgttacacgcagcgcgccctcacggtgctgccgcgcctcggattccaggtcatcgtctccgccccggaaagcaagaccggcgaaatcctcgaggtctccaccaaggcctacgtgacctacaaggaccccgacaccggcctcacctccctgcgcgaggccgtgctgcatcagaatgacatggacgatgaatcatcgtcggatatattgaaggatgacggggttgccgaatga

SEQ ID NO: 49470 - DNA, 1194 bp, Bifidobacterium longum
atgggaactatggccggcatgaaagacatcgctgcgatcaccacatgcgtgaagaaacatatgcgttcacatatgtacgacatcgaaccggcatggccatttcccgtgccggtgggattgccggaccaagcatttttggaaaccaatgcgattgcggtgcatgacaacaacaatgagatacggcaatgggcaagcaagaatggttgcgaaatcataaccaagcatcgcaccataggcacctctgtcgagctgatctccaaagtcgtcgttcctgacgaatcaatagccatgcgtgtggttggtcgtacgctggcggcggaatgtcgcgaagcgcgccgccgcatagcatgtctggttgctgcttgtgacgttgctccggaaacaatcgaatcggccgctcgcatgacaggccatgaacagcctgacgacttcgatctgcttgtcagcgcagttcgatatttcaggcatcatgacgtgaccggtatgacgccgcgacagattccactgacaggattcagcggcaaatggctgaatgagtcaaaaaccaatcgtcgtaaggccatttgccgactgctcggtgtcgaaacgttgggtctgtcaaaacggccgaccgaactgcggttccgttatctcgatccggtccgcgacgatgctgagctcgaacgcatcatatggtgtccgtgggaaggcgaagcgttatccggcattaaatatgctgtcatcgttgagaacaaagacacgtatcagactatgccgccgattgcgcagggcatctgcatatggggttctggtcgcgctgtaagcgatgctgtacctgcggttcctgcactgcgtgacatgcgtatcgtgtattggggtgatatggatgcggatggactggaaatactttcgacattacgtgaatcaggtatcgaatgcgactccatcctgatggattgcgatgcatacgatcggtaccacagatttggtaccgatcgtactgaacgcagcgcgaagattgctatgcgggagcctaagccgacgcccggccttcaatcggcggagcgacgtctttatgaacgactgtgtgctgacaaaacaatcgcttatcggcgtatcgaacaggaacgcattcccatgcgtgatgcagttgacgaattacgcaagcttggcatccccgtggagtccattgaaaatcaggatttgccgatttag

SEQ ID NO: 49471 - DNA, 1434 bp, Klebsiella pneumoniae
atggaagaaaacactaggcagcgtacggaaaattatatttcagccaaaaaccagcatcccgcatggatacttctggcttcccgccgtgccccgttggtgctgagttgcctgaaaacgttgtttgaaaaagctcatgatggtatcccccttgaggacgcgattcagtctctttccggcattctcatcgagcatgtgagtcaggaacagtatgacattaatcaggacaatccctctcttcaggccagtcgtgaactgcgggaatggattaaacgccgcttaattgtagaacgggatggccgtatcttcgccaccgatgcgcttgaggttgcgattacgtttgttgagtcgctggataatcgtttcatgacctctacggcttcccgtttgtctaccgtacagcgagaaattgaaaacctggaaacccggcttaatcctaatccggcgaaccgggttgcaaccttacgtcgtcgtattgctgaactggagcgtgaattacaggaggcggaagccgggcatattgaagtgctggaaacgcatcaggcggttgaacatattcgagaggtcttcaatttagcttccagcctgcgggctgactttcgtcgcgttgaagactcctggcgtgaggccgaccgtgcgcttcgtcaatccattattggtgagcagtatcatcgcggcgatatcgtagaacgcttgcttaacgatcaggacgcgctgcttaatacccccgaaggaagagtcttcgacagttttcagcaacagctacgccagtcagttgagttaacggcaatgagcgagcgactgcgcgtaatccttagccatccttctgcttccaatgcgcttaaccgtctacagcgtcatgatttacgctggctggttaaacgcctggtcgatgaatcgcaaaccgtactccaggctcgtgcccgaagcgagcgagatgtccgcggctttatgaaaaccgggcttgctgctgaacatcaccgcgttggtcatctgcttaacgagtttctgaatctggcgttaaaactcgactggcagcgccagatgattcgtaaacaagaggttccgcttcctgccgttggtgtggcggtgacgggagtccccgcaattgagcgtttacgttttaaagaagtggatgatgaagcggaacaaacgttggatctcagtaatcatgcggcggatttgacgcagattggcgatgatttctgggatgctttcaatggccttgatcgtgaggcgttgattcagcagacgttgcagcttctggcaaaagaaaatcgccccgttggtctggctgaactggcggcgctgttgcccccggctcacgatctcgaaaccttcgccgtctggattggcatggcgagagaagcaggcattgaggttattgattcacagcgcgaatttactgaacttagtgatggggaaggtcgccgctga

SEQ ID NO: 49472 - DNA, 750 bp, Klebsiella pneumoniae
atggcgggcttttttgacaaactgattaaccggagcgtcgctgcaaatgcaggtagtgaaccagaaacatcggacgaagaaattactgatgagttggttgaagacagtgcggccagtggcgaaacgcggaccctgaagaaaatacgcgaagcgattcaggaattgctcaaatacggcctgctggaagaggccagtaaacccaatctgtaccgtgtcgtactgacccatcctgaagaggttactcgcattctggaacctcttgatctggatatcggcattgatgagatccgcggcctgctgtatgtcaaagtcagacttgacgaaacgccagagcaggatgaatggtcccatcctctggtgaggcggcaacggcttaatctggaacaatcattattagttgccatactacgccagcattttgttgcctgggagcaagaaagtggaactggtgccagccaggcacagatcgctatcgacgatctcctccctcagctccagatttaccttggcgatccgggcagcgaatcaaaagaacgcacccggttgctcaccctgttggatcaattaaaggggcatgggctggtcacgtcgccggatgcgcatgagcggatcgtgattcggccaattattgctcatcttgccgacccgatgaatcttcaggcattactggcatggctgcgggaacaaattacgcaacaaacttccccggatgattcgtcagcaaaggagagtagtgaggaggacgtatga

SEQ ID NO: 49473 - DNA, 2676 bp, Klebsiella pneumoniae
atgaatcaaatagcgcgtctggctggaaaggaatcctttattctcacccgtatcgagttgttcaactggggcggttttcatggattgcatcaggcagcaatccatcaggaaggtaccgccgttattggtccaaccggaagcggaaaaacgacgctggtcgatgccttaatgacgctactctgtgccaatccccgttacaacctggcctcaaccggggggcatgaaagcgacagagatcttatctcctacgtgcgcggtgtatccggacccggcgatggcggggaggggcaatcgcatattgccagaccggggaaaaccgtgaccggcattgccgcgacgctggagcgtgaagggcagcaggtacgtctgggggcgctattgtggtttgattccaccagttccagcgcggcagatttgaaaaagctttgggtgtttagtgataaccctacacagacgctggatcattggctgaatatctggcatgacggtggcgcacggtcgttgaagcaaatggaaaaagagacgaccggaatctggatttggctgaacaataaaaaacagtatctggcgcgcctgcgggacttcttcgaagtgggggaaaacgcctttacgctgttaaatcgggcggcaggattaaaacaactcaacagtatcgatgagattttccgcgagctggtactggacgatcactctgcttttgatcgcgcgacggaagtagctaatagttttgatggtttgacagaaatccatcaggaactggaaacggcgcgtaaacagcagcagtccttgcaacctgtagccctgagttgggataagtatcagaagcaagagcaacaacttgctgacaggaaggcgctggagtcgctgttaccaatctggtttgcacaacaggcaagccagctctggcgagaaaaggtcagccatattgaagtcgagcttggtgagtcacagactcgcgaagaacagatccagtcgcagctcgagttgcagaaaaaagtggtgacggactgcttacagcgctatctccaggtcggcggcgccaatattgatgaactgaacgagcgtatcaaggactggcaaaaaacgctcggcagtcgggagactctggcgcaccagtatcaacagctgacccgcaatcttggattgccgcctgacctgagccaaccacagctggaggcgaatcagcatgaagccgaggcccgatgtgagcagtttgctgatgatataaagttgaaacaggaagaggtgtatcaaaaaggcgtgctcagccatcgcatgaccgaagaacttcgggaacgggaaactgaacgcgccgagatcgcgcgtcgtccggattctaaccttcccgcccattatcaggcatttcgcagcgagctggcagaagcgctgaacgtcgatgagtctgaactgcctttcgttgctgaactgatacaggttaaaccggaagaggcgcaatggcgcggtgcgattgagcgcgctgtcgggagtaacaggctacgtattctggttgctcctgaatctgctcaggaagcgcttcgctgggtaaaccagcgcaacaatcgtctgcacgtgcgcctactggaggtcaaattaccgcactctcccgctaggttttttgatgatggttttacccgtaagctgttgtggaaagatcatccgtggcgagaggccgtcaaagcattactggccgagaacgacaggcattgtgttgacagccctgaacaactgcgtgacacacctcatgctatgacggtgcaggggttaatgtctggtaaacagcgtttctatgacaaacaggatcagaaacgtcttgatgaagactggctaacggggttcgataaccgcgatcgcctgaacttccttgccaaagaaatcgccgccctccaggagcaggttaaaaccgcaaacgcagcgtttgagtttgcgaaaggcgaggtggggtttttgcaaaatcaggccatttcattccagaaaatacaacaaattgattacgatagcatcgatgttcccggcgcaaagagccaactggacgcgctcagggagcggctggagaatctgatccgcccggattctgacgccagtgtagcgaaagcaaaacttgatgaggctcaaacggttgaatctgaactcgataagcagctcagagccgccaataaagtcactaatgggctggatacagaactcacctcagcccgggcagcagaacgtaaggcccagcaaactgcgcaacaaggtatgcaggatgaagagcgagagttgtgcgcgtcacattttcctgtggtggctctggttcaactgcctgacattcgcgatctggaacgtcaacatgagcggggaattcaacaagaaattgagggtattaaaggtgaactgcatcgactgaacattgagttgacgaaacgtatgtctgaagccaaacgtgtggatactggggcgctcgttgaggcaggggctgatttggacgatattcctgtctatttacagcgtttgcaggaactgaccgaagaagccctgccagaaaagctcaaccgctttcttgactatttgaaccgttcatctgacgacggcgtaacgcaactgctcagccatatcgatcatgaggtgctggtgattgaagcgcgactcagcgaactcaatgaaaccatgtttagggtcgattttcagccggatcgttaa

SEQ ID NO: 49474 - DNA, 1401 bp, Pseudomonas aeruginosa
ttgggctgcctgcgcacgctgttcgagcgggcgcacgatgggattcccatggaggatgcgctgcaagcgctgtccgaaatgctggctgcttatgccagccaggagctttacgaaatcgacccggatgcaacgcatctccaagcaggtcgtgaacttcgtgaatggatcaagcggcgcctcgtcgtagagcgagagggccgtatctacgcaaccgacgcgctggagtcagccatccagttcgtagattcgctggatagtcggatcatgacttccacagcatctcgcctttcggtggttcagcgcgagatcgaaaacttggaaacgggtctgaaccccagcccaactggccgtattgccagcctgcgccgccgaatccaggatttggagcacgagctagcgcgggtagaaactggccacgtcgtcgtgctggatgaagcgcaggcgatagagggcatacgcgaggtatataacctggccaccagcctgcgcgcagactttcgacgagttgaagactcttggcgcgaggcggatcgcgcccttcgacactccatcatcagcgagcagtctcaccgtggagaaatcgtcgatcggttgttggacgggcaagatgctctactcaacactccggaggggcgtgtcttcgaaagtttccagcagcaactgaggcagtccgctgagctggaaaccatgcgtgagcgcttgcgcaccatccttcgtcatccagcggttccaaaggcgctgaatcgtccccagcaacgtgagctgcgctggctggcgttacgcctggttcgggagtcgcaggctgtgctccaagcgcgcgcccgaagcgagcgcgatgttcgtggcttcatgaagacggggctggccgccgagcatcatcgcgtcggacagttactcaacgatttcttcaatctagcgctcagcgtcgactggcaacgccagtcagaacgccgtaagcctgcatgtttaccaccagttggcgtagccattaccggtatcccggcaatcgagcgtctacgcttcaagaccctggatgacgatgatacgggcgagctggatctgagtttgaagcctgcggggttggagcagattgatgatgacttctgggatgccttcgacgggctggatcgtgaagcgctgattcaggacaccttggctgtgctggcggagcaggggcgccctgtgagtctcggggagcttgcgtctttgcttccacctgctcacgacctagaaacctttgcactctggctggcgatggcgcgcgaggcaggtatcgaggtgctgacagaggagcgtcagcttgtggagctagttgacgaggatgagcaacgctggcgcttcaatctgccttatgtcggactcgaccacgaggcactcaaggacatcgattgggagttgtga

SEQ ID NO: 49475 - DNA, 642 bp, Pseudomonas aeruginosa
atgagcgccgctgttcaggtcgatgagcgccggacgccgcaacgggtacgtgaggccgtacaggaaatgctcaagtacgggctgctggaagaaagttacaagcccaatctgtatcgctcggcgcttgccaatatcgaggcggtcgacacaatcctggagccgctcgacctggccatgggagtcgacgaggttcgcgggctggtgttcgtcaccgttcgccagggcgaggtggccgagcaggatgactggtcgcacccccttgtgcgcaggcaaaggctgaacctggagcagtccctgctgatcgcgattctgcgccagcatttcatcgcctacgaacaggaaagcggtacgggcgccactcaggcactggtagcggttgatgagctgattccgcaattgcaggtttacctgggcgagctgggcagtgaggcgaaggagcgcaatcgcgtcatcacgctgctggatcagctcaaggggcatggtttggtgtcggctctggacgcccatgaccgcgtcatcatccgccccatcattacccacttggccaacccggagaacctgcaggcactggtggtttggctgcgcgagcaggtggagggagcgactaccccggctgccgctgctgaggaggacaaggcgtga

SEQ ID NO: 49476 - DNA, 3306 bp, Pseudomonas aeruginosa
gtgaaacaagcactgctctggcgtgacagcgagaccttcattctcagcagcatcgaactctataactggggcggctttcagggctatcaccgtgccgagatcgatccttccggtaccgccgtgatcggcccgacggggagcggtaaaacgacgctggtggatgctctgatgaccttgctgtgcgccaatccgcgttacaacctggcatccacgggcggacatgagagcgaccgcgatctggcgtcctatgtgcgcggcgtcaccggccccggggacggaggtgtagagcaatctcatatcgcgcgccagggtaagacggtcaccgccattgcagccacgctcgagcgtgatggcacgcaggttcgactgggcgctgtgctctggttcgagggcaccagctcctcggcgtccgatctgaagaaactgtggctgttaagcgagtccactgagcagacgctggagcattggctgagccagcatcacgcaggtggcatgcgggcgctgcgtcagatggagaaggatgggacgggtatctggccgtatcccagcaaaaaagccttcctggccaggctcagggattacttcgaagtcggtgaaaacgccttcaccttgctcaaccgcgctgccggcctgaaacagctcaatagcatcgatgagatctttcgcgagttggtgctcgatgaccgctccgctttcgggcgggctgccgaggtcgccagcagcttcgatgatctaactgacatccaccgagagctggaaaccgctagaaagcagcagcgctcattgcaaccggtcgccgaaggctgggagcgttatagggccttgcaagaacagctgcaggataaacaagctctcgaaggtatcctcccagtctggttcgccgagcaggggtatcgcctgtggttggctgaaaccaacaggctggagacggagcacaagcaggccgaactcgatcaggagcaatgcaggagtcagcttgagatccagaagggcgtggttgatcaacatcgccagagctacctgcgagtaggtggcgcagggatagatcaattacgcgggcgcattgctgattgggtcagggagtgcgataagcgacgcctgaaagccgagcaataccaacgtttggccaaggggcttggactagcggatgagttatcggccgctgctctcaaggagaatcagcagcagatcgcggcacgcctggaaatactgacccagcaaattactgacgcgcgtcaaaaggcgttcgatgcaggtctcgttcagcaggaactcaatggccgcctgcagcgcttacagcaggatcgtgctgaggttgagagacggccaggctcgaacctgcctgggcattttcatgcttttcgaggggaactggcgcagatgcttggcgtcgatgaatcggccctgcctttcgttgccgagctggtgcaggtcaagcccgaggagctggcctggcggggggccatcgagcgggcaatcggcagccaccgcctgcgtatcctggtgccgcagggtgcgtccgaggctgcactgcgttgggtgaaccaacgacacaaccgcttgcatgtgcgcttgttggaggtcaaggaaccgtcgtcgcgccctgtgttcttcgacgatggttatacccgcaagctgaccttcaaggagcatccgtaccgcgaagcggtaaaggcgctactggcggacaacgaccgacattgcgtggagagcacggagcaattgcgtcataccccgcacgccatgacggctcaggggctgatgtcgggtaaagaacgcttcttcgacaagcaggaccagaagcgcctcgatgaagactggctgaccggcttcgacaaccgcgaccgtctggccttcctgactgaacaaattcgcgaggtcaatgaacagctcgcgcctgccaagctggccttggatgctgcccagggcgatgtccgcaagttggaggatcaagcttcgctgctgcagcgcgtcgaagaactgcagttcgaggagattgatctgccgggcgccgagcgtcagctggagtcgctgcgtgctcagctggacaccctgacacgtcccgactctgacctcgcccttatcaaggctgagctggatgaagctgaggcattgctggactctctggatcgacagaggcaacaacttatcgagcagtgcggtcagttgaaacttcagttcgagcaggctgcatccgctacccgtaaggcctatcgtggtgccgaaaaagggctgaacgatacgcagcgtgaactagcgcaaacgcatttcccgaccctgacggcagatgaccttggcgatattgtcgagctggagcgccagcatacgcgtgagctgcaagggcagctcaaagcgctcggcgataaactcggcgatcagaaaacagagcttgccaaacgtatgtctgacgctctgaaggtggacaccggagcgcttgcggaggtcgggcgagaactggtggacgtacccaggtatctggagcgtcttcgcgtgctgaccgaggaagccctgcccgagaaactcaagcgctttctggaatacctcaatcgttcctcggatgatggcgtcacccagttgctcagctatatcgaccatgaagtctcgatgattgaggagcgcctggatgacctgaacagtacgatgcagcgtgtcgactttcagcccggacgctatctgcgcttggtcgcgaaaaaggtcattcatgaaagccttcgcaccttgcaacaggctcagcgtcaactgaactcggcgcgtttcatcgatgatgaaggcgagagccactacaaggcattgcaggcgctcgttggcctgctcaaggatgcttgcgagcacagcaggaatcagggcgccaaggcgctgctggatccgcgcttccgcctggagttcgcggtctcggtgatcgatcgcgaaagcaggagtgtcatcgaaacccgaacaggttctcaggggggtagtggtggcgagaaagagatcatcgcctcctatgtgctgaccgcttccctcagctatgcgctctgtcccgacggcagcagccggccgttgttcggcaccatcgtgctcgacgaggcgttctcgcgcagctcccatgcggttgccggtcggatcatcgcagcgctgagggaattcggcctacatgctgtcttcatcacgcccaacaaggaaatgcgcctgttgcgccaccatacgcgttcggcagtcgtcgttcatcggcgcggcgtggaatccagtctggtttccctgagctgggaagctttggatgagcatcatcaacagcgcatcaaggccatgcatgaagtcgcccactga

SEQ ID NO: 49477 - DNA, 708 bp, Pseudomonas aeruginosa
ttgtcgctaggctgtgcccgaggccgtccactgcgcctgcttgccgagcacggcgtagacaccaagtttttcgagcgtaacgccagcttgctgacccggctcctcgacgagcgtttcgaaggcgcggcgtccgagcaaggcctgacgacgtttctggatgcctttgaagaaagcagtcattgggtactagtcgttcctcttcagcctgagctgctgcccttcaagcggcttaggctcacgactgcggaactggctgaaaccccgcttcctggttcgcggttgctggtggtggaaaatgagcaatgtgttcacttgctgcccgaaaccttgccggacaccctggctgtgctgggtgcaggactcgatttgcagtggttggcgtctgcgcacttagccgggaaacagatcgcctactggggcgacatggacacctggggcttgttgatgctggcgcgagcgaggcttcatcaaccagcggtcgaagcactattgatggagcaggagctgtttgaacagcactcaccgggtaatgcagttgttgagccggccaaagcgcgggagtcggccccacctggtttgctggctgacgaagcggatttctatcggtatctgctggtgcaagagcgaggacgtcttgagcaggagtacctgccaaaggtacaagttgagcgcgctatcgagcagtgggctcgggcggtccctgtatag

SEQ ID NO: 49478 - DNA, 1530 bp, Bradyrhizobium diazoefficiens
ttgaccttgttccgccatttgcatgacgacgcctttttagctttttcgcgcgatcacaagcacctgtacgcagcgtgtctgccggatctgcacgaacgcttcttttcaggcgcgccgtcgttcccgacgccgcagcaggtggtccacgccatctacgacgtcatgcgcgccaaccccgtcctctggaacgagggcgatgatttcggcagcctgccggaaatgatctccgcgagacgccgccggatccggaaggccgacgtcgcgctcgcttccgagaagggcgacaaggcgctcggtcttgcccgacaactatacgcccggctgctcgtctggggatggcttgaagaggaggaatacgggcttcgcgtcactgtggacatggctatgggaccgctgctcgtgctgcaacggctcgcgagcctcaacaaggatctctcgcagcgattcggcggcttgatcgtgcaaatccgcctcaacctggaggccgtcgaaaaactgaggcctgagatcaccgaccgcaagcagcgcgaagccgcgctcgccgtccgcgaggcgcgcaatcaggccgaccagttcactaagagtctgcgggccattctggccgacctgaagcgcgtccgacggaccgtcatggagtcgaaaacagtcgctacccggctcgaagcctttttcgaggagttcatcgaacagctcctgctgaaggatttcgagtccatcctcaccgtcaaccatccataccgcttccgcgacgccatcgtcgatctcgcgcggaggatctcctacagcccggaaaccatgcaggtcctcgccgaggagtacatagcttccagcatggcagccgacatcgaggacggtcgaatggccgcggccgacgacctgctggctatcgaaagcatcttcgatcagatcggggagatgttcgacaggatcgaggccttccgcaggcagctcgaagcccgggtccgcaacaccattaagtacgccgagcggggcgggcagggactcgtcggccgggccggcgacctggtgcggcgcctggatgccttactgcgcgacggcaggcaccacaaggcgacaatcgaatggagcatcgagccgctgcggtcgccctggtcggagcaccatcaggcgccggccaggcagccgcgccgtcccgtcgaagcaagggagctcgccgagccgccgtcggatccgttgtatgaactgcgcaagaagctccgcctcgagtacatcgctcgcatcgcgccccgccccgaggatgtcagacgattcctcgagggccaggtgccgccattcgcgaccagggaagcccgcttcatggaaatcgataccgtggacgactttctcgccttcgattgcgcccgccgatatgcgctgacaggcgaggttccggcgcaggtcgcggccgggttcgaactcgaaccgtgccccgacacgcccccacacgacagcgaatggctccgttgcgccaacttcctggtcaagcgatcgggcgcactccggaaggcgagggcggctcatgctcagtga

SEQ ID NO: 49479 - DNA, 639 bp, Bradyrhizobium diazoefficiens
atgctcagtgagttcgaaaacgtcgagcgctccttcggcgcggaaaaggcagccgacctccgcaaagcgcagcacttcctgctacggcggcagttcgtgttcgcgggagacccccggaccgggacagtctacaacacgatcatggacggccgcttccgcgacgtggtcgacggcttcttcgatagttgcggataccgcgtccaccgcgatccggaggcgcagtgggccggcatcgtcgccatggacgaggacgtgccgctgccccggatgaagctcgacgaaaccatcgtcatgctggtgctggcggcatactggcagcaggaggtgaacgtcggagcagtcgaggaccgggccgtcgtagtggccactttgaacgacctgttcgatcgctaccgcgagatggcgcaacacggcggcggtggcgcgatctcggctgcccggttccgggacatcctgcgcgaggtcgcccaacgcagtttggtcgagatcggtgattttgacgacgagcagcaggactgcgagatcaggatccgtccgatgattaagctgatcagtggcggcgatgccctccaacggctcgagcgctacgtccgtagcgaggaggcgcggtttccgcagcccgcaggagacgaggcatga

SEQ ID NO: 49480 - DNA, 3093 bp, Bradyrhizobium diazoefficiens
atggcgctcgaggcgcgcaagtccgacagcagggagaccgtgctggcactcttcgtcgccgtcgggaccgttctgagctccaaggacttcatcgagcagcgaggaaagtcgcaattcccggcgcagtgggaggacgtgcgcgcccggatcgtcgcagcggtcggcgaaggcaacttcgtcaatcatcgcgaccgggcgagcgactatgtccgcgagtacatgcgccatcttctgccgcattcgtcctttggcgaacagaacgccagcgccctgcagaaatcaatcgtcaacgcgatgacgctcgatcacaaccagacggcgacgcagttcgtgcggaactacatcctcgaggacagtccgatcggcatcaaggagctgcgcgagtcgatccagacataccgcaacatcagcgagaccatccggaaaatgcgcctcaggctcgaagccctaagggcgcttcggggcgtcctcgccgcgcttgaagaggcgctcgagaccaagttcagggaggaatgggtcgcaaaacgcgcgacttggctcgcggcgcgcgcgacaaacctggacttcaagaccaagcggcgtaccgagatggcgcgccgggacgccgcagcaaaagaactcgaattcatcgacgacgacgtcaaggccatcgataaggagatcgaacgcctcacggccgcgatcgccgagcacgatgccaagaccggcagaaagtccctgcagcagaccgccgatgtggccgggcaggcggcgcaccgcgcctcggcggacttcaaggctcgcatggagaacatccgtcgcctggagccgctacgcgcgatgtgcgcggacggtttcgaggacttcgttcctgcgcttgagcgtcttctgaccgccaccgccggggccgacatcgggggcgtctccgacgaggtcaccgcggccgagaagtccttcgcggcaagcggcgccaaatggctgccgaagatcgacgaagcgcgtcaaaggatcatcgcggagctttccggcctccgcggcaggcgcgacgaggtgctcgaacggatccgacagcacgccgccggaggggcgcgcgcctatctcggcgacgacactgaactcctctgccgcaggctgcggcagggtggaatggtcccgcgcgtactctgcgacatcatcgaagtcgccgaacccgagtgggtaggagccgccgaggcgctcctcggtcgcgaccgggaagccgtgttcgtggacagagcggatatcagcgccgccacgtcaatcttcaaggaaggtcgccgcgagtttcgccatgcatcgctcgtgagcctaaacaagctcgagcagttcagggccaagccggagcgcggcactttcccctcgatcttccggagccaggatccggacgcgatggccttcatcatgcgccgctacggcaacgtccgtctcgccgacacgctcgaccagttcaacaggcccggccgggcgattatgaaggacggcctctacgacgacggactcgtccggagccatcgctggatcgaatcctcgcagtataagatcggaaaggcagcccaggcgaacgccctgcgatccctgcaggatcaggccgaggagctgggtcggatcctgatcgacaaggggaaggaggcccatgccgcggagcaggcttttgccgctctgaagaacatctgcgagggacgtaatgatctgggggcttgcgcggccgccttcgcggccgcgcagactgaggtcgctgaagctcaggccaggctcgatgccctcgacggcgcgggggacggcgggcttcgcgacaaaaagagggcgcagcaaaagctgaaggagaagaggctggaggagagaaaggcacagcagaaggcgttcggcgagcatgacggcgaggtcaggtcggcggagaggaggctcggagagggcgagaacgtgcccggctccgaactcaacctcagggtcgcccggtcgatataccgcaagttcttcccactctactccaccgcgaaaggcagggccgtctaccgcgaccgcctcgatgccgcagcccaaaagggcttcgctgagaaacaccgggccatcgccgagaaggccttgaaggatgcgaatgtgtccgacaacgagcgcgcccggatcgagcgacgggtccgcgagcttctttacgattacttcgaccagttcgggatgagttcgcaggtcggtgcggaaagcgagccgctgcgggaggtgaagccatggatggagcggctgatctcggatatcgaatccaatgagctgcgccagtacgaaaggcaggcgcgggatgcggcggaaaaggcctctaccctgctgcgcggcgagttcatcaacgcgctcacggcccggatcggaaagatggagcgggagctgcaatcgttgaaccgtagcctctacgcacatccgttccataacgagcgatattcattccatcgcacccagatggtggaattccagcccatcctgaagatcatcgagatcgccaaaacctctccggaggcgctcgatatactgttccggggcgacgtgcccgatgacttcccgcacaaggatacgatcgtcgcactcgaggcgctgctcgaggaccccgacaaggatttcacccagttcgaggactaccgcaacttctacaccttcgagatccacatggaggatgttgccaccggccgctcgacccgctgggagcagcggcgcggcaccgggtctggcgccgaacaacaggtgcctatctacgttgccatcggcgcttcgctggccgccgtctacggcagcgcggagcgtcgtgccggcaagcccgccggtttcgcgctcgccatgttcgatgaggccttctccaagatggacggcaagaaccagcggcagatgatgagcttttacaaaaacctcggcctgcagttcgtgatcgcggcgccgttcgagaagcgcgtcgccgtgctcgagcacatggacaccatcgtggaggtggaccgcatcggcgagcagtccagggccactgtggtggaactgaaagagaaggccaagcgcgagctgatggccatcgatccggacctgatgtccgaagatgagctcgccacccgtctggccgccgagtag

SEQ ID NO: 49481 - DNA, 639 bp, Bradyrhizobium diazoefficiens
atggctcggcgtttcacggatgcgatcggcctgctgaacgacctgctcaaccgcttcgaggcgggggccgcaagcccgatcgcccacccggactaccccgctttcccatcagtagtcgcggcggacgccttcctgaaacagatcagggaagccgaaagcgccggcgcggtctcccttggttgggggcggggccccatgcgcgaccaagtggcacatgtgcggctggcctcggcggagatcctataccgatatctccgccgtacccccgcgtcgcgcatcgcggaggatgccgctgtgcggcttgtcgccggggcggcgatgcacgactctctgaagaacagcgcttcccaagtcgccgaggtatgggggcgggggaaaacgtggcacgggttcgcttcgtccgatgtcgagacactgcgcgacgcgttcgttctcgcccaggccatcctggccaacaaacatcttggcgtcgactacaagaccttctcgagacgaacggtggggcacagcaaaacgctcgaacggatcgaaggcgcggtcgtgcggctcctgagcggcatcctggagtttcccccggcgcgcggccacgcgaggcgctccgggcaatcggccttgagcgcttcgcgccaccgctgctga

SEQ ID NO: 49482 - DNA, 1533 bp, Xylella fastidiosa; identical to SEQ ID NO: 45320

SEQ ID NO: 49483 - DNA, 705 bp, Xylella fastidiosa; identical to SEQ ID NO: 45321

SEQ ID NO: 49484 - DNA, 3435 bp, Xylella fastidiosa; identical to SEQ ID NO: 45322

SEQ ID NO: 49485 - DNA, 1218 bp, Xylella fastidiosa; identical to SEQ ID NO: 45323

SEQ ID NO: 49486 - DNA, 705 bp, Xylella fastidiosa; identical to SEQ ID NO: 44315

SEQ ID NO: 49487 - DNA, 3432 bp, Xylella fastidiosa
atgcgtgagacctccacactcggcctaaatttcgttgccgacgacaagcgcgtcggcttccggctacagcacctagaagtagtgaactggggcaccttcaacacccgggtgtggtgctacaccctggacgggcgcagcggcctgctcaccggcgacatcggttcgggcaagtccacgctgattgacgccatcaccaccctgttggtgccagcgcagcgcgtggcctacaacaaggccgccggggccgatgcccgcgaacgctcgttgcgctcctacgtgttgggctactacaagagcgagcgcaacgatgccaccggcaccgctaagcccgtggcactgcgcggtacgtcggactactccatcatcctcggcgtcttccacaacgtcggctatgacaaggtcatcaccctggcccaggtcttctggctgaaggactcgcaaagccagcccgcccggctgttcgtagtggcagaacgcgctcttggcatcgctgcggacttcaacaacttgggcggcgacatcaagaccctacgtaagaagcttcgcggtgcagggtgcgaggtgttcgacagcttcccaccctacggggcgtggtttcgccgacgcttcggcatccaacacgagcaagcgttggagctgttccaccaaaccgtctcaatgaagtccgtgggcaatctcaccgacttcgtgtgcagccacatgctagaaccctgtgatatgggcagccgcattgaggcgttgatctgccacttcgacgacctggaccgggcgcatcacgccgtgctcaccgccaagcagcaggtgaagttgctgctccccctggtcgacgacggccagaagcaccagacgcagctaggcaacattcaaaccttggaggctggacgcgacacactgcggccctacttcgcacagctcaagggggaactgctgaagcaccgcctggacgcactggcagccgaagcggcccagctagctgtggagatccagcgcctggaagaacagcgcaagaccgcagacagtgaagtcacccaactgcaacaggatctgcgagacaacggcggcgaccgcctggaaacgctggcaacagagattgagcaactggagcaagccaaggcacaacgccacaagaaatccgaccgctaccaaacgctgctggccaacattggcgagacagcgccagccgatgcaataggcttcctcacccagcaacagcgctttgcgcaacgtaccgaggaattaaacgcagccattgcgacgttgcataacgacaagagcgagaaggactttgcgctccgcaatgctcggaaagatcacaccaccctattggcagaaatcaacagcctgcaacagcgccagagcaacatcagcgccgcccagatccgcatccgtcatgatctgtgtgtggcattgtccattgatgcggaggcattgcctttcgcgggcgaactcatccagatgcgtgaggacgcacgcgattgggaaggcgccgccgagcggttgctacacggctttggcctcaccctgctggttccggacgcgtactacaaggctgtcgccacgtgggtgaaccacaaacagttggatggccgactggtgtatttccatatgcgtccacgcaatacgacgcaggaggcggcgttacatgcgcaggcgctggtacacaagctcatcatcaaaccggagtcaccacactacacgtggctgcaacaggaacttcagcggcgctgcaacgtcgtctgctgtgacaccatcgagcagttccatcgtgaggtccgcgccatcacgcaggccggccagatcaaagaccccagtggccgccatgagaaggacgaccgccatcgcattgacgaccgcagccgctacgtcctcggctggagcaatgccgacaagctgcacaccttgaacgcgcaacggcaacacctggaagacagcatgggcatgttgggacaagacatcggcaccattcaacgggaatgccagaaacaacaggaacggctggatgcactcaacaagctgggggagtacccggagtttgcggacatcgactggatgagcctggtccgccagattgccggacgcaaaaaggaacaggaacagctccaagccacatctaacattttgcaaaccctgcaacagcaactcacagcggcgcagacgcaagtcagcgtgctggagcgcaagtgcaagaacgcgtggcacgagcagggcgaggtcaagagccaacaaaaaacggcgcagcagatgtggaatcaggcccgtagcgtttgggatgatgcgccgctgagccaagcgcagatcacgctattggctggctggcgccagcaagcgctgggggagcacgtgctatcggtcgaatcttgcgacaaccacgagcagcaagttcgccaatggctacaaaaacgtatcgatgcggagaacgctcacctgagacaactaaatgaccgtattacaggcgccatgcaccgcttcaagaatcagttcaaggctgagaccgtggagatggacgcagacctggcggcgctgccagagtatgcgcggatgctcaacgacttgcagaaggacgacctgccccgattcgaagcgcgcttcaaagcactgctgaacgtgaacaccatcaacgagatcgccagctttaacgcccaactcaaccgtgagcgggagacgatcaccgagcgcatcaaggacatcaaccaatcgctgcacggcattgactacaaccaggatcgctacatcaaccaatcactgcacggcattgactcccaaaaggggcgctacatcacgctgctggcacaacccagcccagacgctgagatccgcgacttccagcaagatctacgggcatgtaccgaaggcacgttgaccggttcggacgatgaacagtattcggacgccaaattcctccaggtcaagcgcatcattgaccgcttccggggccgtgaagggctgtcggatgccgaccggcgctggacggccaaggtcaccgacgtgcgcaattggtttgtgttttcggccagcgagcgctggcgcgccgatgaaagcgagtacgagcactacgccgactcgggcggtaaatctggcggccagaaagaaaagctggcctacaccgtgttggcggcaagcctggcctaccagtttgggctgaagtgggatgaggtgcgttcagaatcgttccgcttcgtgattattgatgaggcgttcgggcgcggctcggacgagtcagccgagtacgggctgcgcctattccaaaagctcaacctgcaattgttgatcgtgacgccgctgcagaagattcacatcattgagccgttcgtctccagcgtggggttcgtgcacaacaagggcgggtgtgactcgcagctacgctgtctgtcgattgaggagtaccagacggagaaagccaatggaagcgcggcgggaggcgccgcccgatga

SEQ ID NO: 49488 - DNA, 1206 bp, Xylella fastidiosa; identical to SEQ ID NO: 41634

SEQ ID NO: 49489 - DNA, 1533 bp, Xylella fastidiosa; identical to SEQ ID NO: 45320

SEQ ID NO: 49490 - DNA, 705 bp, Xylella fastidiosa; identical to SEQ ID NO: 45321

SEQ ID NO: 49491 - DNA, 3435 bp, Xylella fastidiosa; identical to SEQ ID NO: 45322

SEQ ID NO: 49492 - DNA, 1218 bp, Xylella fastidiosa; identical to SEQ ID NO: 45323

SEQ ID NO: 49493 - DNA, 705 bp, Xylella fastidiosa; identical to SEQ ID NO: 44315

SEQ ID NO: 49494 - DNA, 3432 bp, Xylella fastidiosa; identical to SEQ ID NO: 49487

SEQ ID NO: 49495 - DNA, 1206 bp, Xylella fastidiosa; identical to SEQ ID NO: 41634

SEQ ID NO: 49496 - DNA, 1533 bp, Xylella fastidiosa; identical to SEQ ID NO: 44321

SEQ ID NO: 49497 - DNA, 723 bp, Xylella fastidiosa; identical to SEQ ID NO: 44322

SEQ ID NO: 49498 - DNA, 3435 bp, Xylella fastidiosa; identical to SEQ ID NO: 44323

SEQ ID NO: 49499 - DNA, 1206 bp, Xylella fastidiosa; identical to SEQ ID NO: 44324

SEQ ID NO: 49500 - DNA, 1533 bp, Xylella fastidiosa; identical to SEQ ID NO: 45320

SEQ ID NO: 49501 - DNA, 705 bp, Xylella fastidiosa; identical to SEQ ID NO: 45321

SEQ ID NO: 49502 - DNA, 3435 bp, Xylella fastidiosa; identical to SEQ ID NO: 45322

SEQ ID NO: 49503 - DNA, 1218 bp, Xylella fastidiosa; identical to SEQ ID NO: 45323

SEQ ID NO: 49504 - DNA, 1458 bp, Arthrobacter sp. Hiyo8
gtgtcccgctcagcaatgtcctcagccgacgccatcagtgcgcggctcagggatctcgaactcctgaccaaaggccccgcctgggccctcacgcgctcggcgccctgggtcatcgcggtgctccaggcatccttcacccgaacgaaacctcagctgccgctcgaagagttccatgccgacgtcgacgctttcctcgagcagctccgcagacaggatcccgggctgggcggccaggggagcggcaaggcctttgcggacgaatggacccgaaagcagttcctgacccgacgcagccagtccggccagatcgtctacgaaatcaccgaggccgccgctagagtcctggcattcctggacagcctctccagcgaacgttccacgctcaacggttccaggctcgggacgttgctgggcgacgtcgaaaagctcgccaacgagacgaacccggaccagagcgcccgtttggaatcccttgaagaggagatccaggagcgccagcagctgatcgaagacatcagttccggcgacttcgacggtcttttggatgatgaggaagccgtcgaagcagccgggaacatcctggaccttgcggcaagcctgcctgccgattacaagaagatgcgtgaccgcatcgaagaactggtaggcgagctccgcaaccagatcatcgaggagtcgctcagcaagggtgcaacgatggcgcaggtcctggaggcggacaaacgcttgcggcagagccccgaaggccgtaccttccgttccttcacggcgttccttgaggacccgcagcaacagttgcgcttccgttcggcgatcggcgacgtgctgagccgccaattcgcggatgacctcagccatgaggacagggaaaccctcaagaacctcgtggcggaactgcgcacgcagcacagccagatccagcgcatctacggccggctttcggagagcctcaacaactacatccaaagcgacgatatccgccagtccgtccggctccggcaggtcttgcgcgaagccgaacaggctatccgctcgatgccgtacgagcgcgaccgtcccggcctggtccgaggcccggtgttgttcaatgcgggattcgaatccctcgccatggtcaagctcttcgacccggatgagttcgcggcgccgccaaagctcgccgaccccatcgccttcagcgattcggaccgcgtgcgttcacttcgctccgcgaaggcaaggcccgacgtcgtccgctccgccatggcgggcgcagccacactggcagaggcctgggcgaacctcccggagggtgaacggcacatcaacaccgtccgggccctcctgtccgaagcgctgcacggtggtgcggcgttcgaccgggccgcctgggaaaacatcgacttcgaacaaatcgatggcagcacacgcaccgcgtacctgccgctcgtgaccctgactaaggattccgatgactga

SEQ ID NO: 49505 - DNA, 696 bp, Arthrobacter sp. Hiyo8
atgactgacgcccaccccaccgagcatgccccctcttcggaacaaagagtggacatagcgcagcatgtccactccgatcccttccgcgtcacgccgcgcgacacattcgtagacggcgcggcgttgttcccgggcgacaccggcgtgctgcctatgaaggtccgccaggctctcgtgcggctgctcaagggtccgtatgtcgacggcggccgcgacgaaaagctctggaccacccttctggacaaccaagtgatcctccgcagccggctttcggagcttttcctgaacctgcaactggatcacgagcgcaagatcgcggtgctccgtcccgtcgatcccgaagccatcggaggaagcacccgctcgagcatccttcgtcagcaacgtgcgttgagccgggttgaaaccatcgtgcttctgcgcctgaggctccttctcgaccgccacgtcactgcccagaccgagcctgtgatcacccgcgaagaaatcgccgaactcgtggcgcactaccagccatccggccaacaagacgccctccgcgacaccgacgtcgtgaaccgcaccatcacgaagctcctggcccgccaactcctcctgcccacgggcatcgaggacacgttcgcgatctccaaggccctcccctggcgctccccttcgaaaacatcggcgacatcccggcccaaatcgaggcactga

SEQ ID NO: 49506 - DNA, 366 bp, Arthrobacter sp. Hiyo8
gtgaccattgcgacgatgcttccgatcggcgaactcaccaacccgggccagatgcgcctcgccttggtccaggtggtcaactggggcacgttccacggcgcccacacgatgcacgtggaccgcaacggcaccctgctcacaggcaactcaggcgtcggcaagtccacgttgttcgatgccatgctgcgtgtcttcgatgcccgtccacgctccaatgaggctgcggcgcagcgggccggcggggctgtggaggacaagaggaccacgttcacgtacatgcgtggaaaagtgggcgacaaggccgtgggcgagggttcggcgagtgccttccagcgcccggtgccacgtggtccgccgtcgcgctga

SEQ ID NO: 49507 - DNA, 1455 bp, Dechloromonas denitrificans
gtgacccttgacttcgccaccctcgacaccttgcgtacccaccaccccgcgtggcggttgttgcgttcggaccatgcgccgttggtggcgagctttctgcatcgggtgttcgtgctacctaatgtgcgggtgatggcggcagcggatctggctgaggcgctggaagacgagctatatgccctgcgtttgcacttgggcgaagccgctttcccgaagccggcgctcgattacctgaatgactgggcggcgcccgacaagggctggctgcgcaagttctaccgcccgggcacggacgaggcgcagttcgatttgacgcccgccaccgagaaggccattgcctggctggcgcaattggccgagcggcagttcatcggcaccgagtcgcgcttgctgacgctgtttgacctgctcaaacagatgagcgaaggcagcgaggccgacccggccaaacgcattgctgaactgcacaagaagcgcgatgacatcgatgccgagatcatgcgggtgctgtcgggcgatgtgccgctactggacgatacggcgctgaaggatcgcttccagcaattcatgcagggggcgcgcgagttgctcactgacttccgcgaggtggagcacaacttccgccagctcgaccggcgcgtgcgtgagcgtattgcgctgtgggagggcagcaagggcgcgctgctggaagacatcatgggcgagcgcgatgcgattgccgattccgatcagggcaaaagcttccgcgccttctgggattttctgctctccagtcgtcggcaggaagaattgaccgaactgctggatcgcgtgctgggactgcctgcagtgaccgatctgaagcccgacagccggacacgccgcgtgcactacgactggatggaggccggcgagcacacccagcgtacggtcgccgctttgtcgcagcagttgcgccgctttctggatgaccgggcctggctcgaaaaccgccgcatcatgaacatcctgcacggcatcgagagcaaggtgctggcccttcgtgatgcacaacccactggcaacgtgatggaaatggccgaggcctgcgccgctatcgagttggcgatggagcgccccttgttcaccccggccatcaagccggtgattgccgacctggccttgcaggccggtgatgaggatatcgacccttcggcgctgttcgatcaggtggtggtggacaaggcacggctcacccgccacatccgccacgccttgcaggaccgggcgcagatcaccttgggcgagctggtgtccagccagcccttgcaacaggggctggccgagttggtggcctatctgcaactgggcagtgagaccttcagcaccgtggtggatgaggacacgcccgagccgattcgctggccgacggtggccgcggacggccaagcaatcacccgtagcgcacgcctaccacgcgtgattttcatgcgttga

SEQ ID NO: 49508 - DNA, 678 bp, Dechloromonas denitrificans
atggaagaagaattctcgaacacaacacccgcagcacatttgatggtgacgccggccgcagatttgtcggtgttgctgatcagcttgctcaaaagcgtgctgtaccgtgatggtgacgaacgccaatgggcagcactgctgaacctgcaagcgcgggtgcgtgactacgtcgcggtactgaatctggatctggtgctggatgaggcagaaggctatgccttcttgaaaagccgccccgagcctgccgacgacgatccggctccccgcttgccccgcttggtcgcccgccggccgttgtccttcgcggtgagtttgttgctggcgttgttgcggaaaaagctggccgaattcgacgcgggcggtggcgacacgcggctggtgctgagccgcgacaacatcgtggaactggtccgggtgttcctgcccgatggcccgaatgaagccaagctgatcgatcagattgaaaccacgatcaacaaggtggccgaattgggatttctgcagaaactcaaacctgccggcggcgcttcggccggactcgccacttacgaggtgcggcgcatcctgaaggcctttattgatgcccaatggctggccgaattcgatacgcgcctggccacttaccagtcgcaactggcaggtgtgaccaatgccaaggagggcgcaggccatgaatga

SEQ ID NO: 49509 - DNA, 3393 bp, Dechloromonas denitrificans
atgaatgacccgcaatcactgggcctggacttctgtgccgatgacacgctgtccggctttcgcctgacccgtctggaggcattcaactggggtaccttcgacagccgggtgtggacgctacagctcgatggcaagaatggcctgctcacgggcgatatcggctcgggcaagtccacgctggtggacgccattaccaccttgctggtgcctgccaaccggattgcctataacaaggctgcaggcgcggacagcaaggaacgaacgctgcgttcctacgtgctcgggcattacaaatccgagcgcaatgacgtcacgggcgcggccaagccggttagcttacgcgaccagaacagctactccgtcattctgggggtgttccacaacgcaggttacgaccagacggtgacgctggcccaggtgttctggatgaaggaagtgcaagggcagccggcacgcttctttctgggggcggagcgcgggctatcgattgcctctgacttcgcccatttcggttcggacattgcccaactgcgcaagaagctgcgcggggtgggggccgaactgcacgatagcttcccgccctatgcggcctggttccgtcggcgctttggcattgagaacgatcaggcactggagctgtttcaccagacggtgtcgatgaagtcggtgggcaacctcaccgacttcgtacgcagtcatatgctggaacctttcgaggttggcccacgcctgcaggccttgatcggccacttcgacgatctcaatcgcgcccatcaggcggtgctgaaaacccagcagcaggttgaattgctcacgcccttgattgctgactgcggacgccatcgtgcgttggtggccgagatcgaaagtttgcgcgggtgccgggaaaatctccggccccacttcgctggcctgaaactcggcctgatcgacaagcgactgggtttgctggcggaagagtgggagcgcgtcgatgctcaggtacaaaagctcgatgctgttcatgaggagcaacgccagcaagtcgatgagctgaagcaggccatcaatgacaacggtggcgaccgactggaacgccttgccgcagagattcacaagaaagaacagttgcgggatgtgcgcaaaaccaaggccgggcgttacggggagttggcaaccgtgctgggcgagtcggtggcggcagatgcctccaccttcgccgcacagcgtggcaaatatcaaagctggcgagacgaggcgcgcaactgcgatgccgatctacagaacgcactgactgagcacggcgtgaccttgcgtcagggcaggcaggaacacgatcagcaaactgctgagatcgacagcctcaagcgtcgtcgcagcaacatcgatgaccagcagatccagatccgcgccgcgatgtgtgctgcgctggagctgaacgtggatgacatgcccttcgccggtgagttgatccaggtgcgcgacgatgagcgtgattgggaaggtgctgccgaacgattgttgcgaggcttcggcttggcactgttggtgcccgatgcccattacaaggcggtggccgaatgggtggatggagcccatctgcgcggccgtttggtgtacttccatgtgcggccacgtaaggctgcagaattgccagatctgcaccgcgattcattggtccgcaagctggccatcaagcccgattcgccacattacgattggctggagcgtgagctcgcccaccgctttgacgtggcctgctgcgccacgcaagaacagttccgccgtgagacgcgtgcaattacccgcgcgggccagatcaaagacccaagcggcagacacgaaaaagacgaccgccaccgcatcgatgaccgcagccggtatgtactgggctggagcaacagtgccaagatcgcggcactggaaagcaagcgctgccagcttgaaacgcggctgggtgagctcggcagccagatcggtaaagttcagaaggagcgcgatggactcacgagccgtctcgatgcgctgacccgccttgaagagtttacggcgttcgatgaattggattgggccagcgtcgccaccgagattgcgcaactgacagacgagcgcagtcggctggagtcggcatcggatgtcctcaagcagttgaacgaaaacctgcgcgcattgcagaaggcgcagaaggagactggcagcgagctacagagcgcgcgcgaaaagcgggccaaggtggaacagcgacaggcagacgcgctggagcttcgtcaacaaacggagacgctgctgcagggagctgtcgtcgacgatggtctggcatcaacgctcgaatccatgcgtgcggaggcgctgggcgagcatcaactaagcgtggaatcctgcgacaaccgcgagcaggaagttcgcaaatggctacaagacaagatcgatgcagaacagaagcgactcgaacgcctggccgagaagatcatcaaggccatggcttcgttcaaggaggctttcaagctggagacggccgagatggatgccagccttgaggcggcgtttgagtacgaaaacctgctgacgcagttgaaccgcgacgacctgccgcgttttgttgagcggttcaaagaactgctcaacgtcaacacgatcaacgaaatcgccaacttcaatgcccaactggcacgcgagcgcgaaaccatcaaggagcgtatcgcgcacatcaacaaatccttgggcgagatcgactacaaccccgggcgctatatcgtgctggagtcgcagatcagccctgatgccgagatccgcgacttccagcaagaattgcgcgcttgtaccgaaggcgctgtaaccggttcggacgatacccagtactccgaagccaagttcttgcaggtcaaggccatcatcgaccgcttccgagggcgcgagggattatctgaacaggatcgccgctggacgaccaaggtcacggatgtgcgcaattggttcttgttcgccgccagtgagcgctggcgagaggacaacagcgaacacgagcactactcggactctggcggcaaatcgggcgggcagaaagagaagctggcctacaccattttggcggccagcttggcctatcaattcggcttggagtggggcgcagtgcgttcgcgctcattccgcttcgtggtcatcgacgaggcgttcgggcgcggctcggacgagtcggcacaatacggtttgaagttgttccggcaactcaacctgcagttgctcatcgtcacgccgctgcagaagatccacatcatcgaaccctacgtctccagtgtgggcttcgtgcataacgagggcgggcgggcctccaagctgcgcaatctttccatcgaggaataccgggcgcagaaagcgttgatgccgacccaagctgcgcaggagttggcgcagtga

SEQ ID NO: 49510 - DNA, 1212 bp, Dechloromonas denitrificans
gtgacgtggaccggttcgaaggaattgaaagcgcaattgatgcggtggtgggagcgcggtgagttcttgcgagacgtggtgacgggcaattcacgtttccctgtgcgcctgtcgctcaagtccccaagttcagctgacatcacggatcgcttcaatgctgttcgcacttgggcctctgaattggcggctatggattcagtccgtgtggagtggcaggaggttcgacaccgcgtccaggggacacaaaaactgccgaccagtgtatggattgagaccattgatgatgccttgacctggctgggcaagcgtcgagactgggatcgtttcttggctcaggtttccgccacccggaaaacgcaccccgccttactggcttggcttgaaaaacgccccctgcaggcactggaactgtccgccgaatggccacgcttgctggccgtcgtgacgtggcttgtcgagcatcaacgccccggtatttacttgcgacaggtggacttgccgggcgtgcacagcaaattcatcgaggcacatcgcagcatattggccgagttacttgacctggctctgcctgttgacgcggtggacatcagtaaaaccggtatcagccagtttgctgcccgttatggctttctggaaaaaccgacgcgcattcgcttccgtgtgcttgaccctgcgattcgggcagtgcctggttcggcatgtcccgacgtgacactgaatgccgacagcttcagtcgcctggaactcgccgtgaagcgcatattcatcaccgagaacgaaaccaacttcctggccttcccgccggttcgtgatgccctcgttatttttggcgcgggttacggttgggatgcactggcaagaagtcattggatgaagaattgctcaatcctttactggggcgatatcgatacccatggttttggcatcctggatcagctgcgcggctactttggtcacgtagattcgttcttgatggacagggccacccttgatgcgcatgccgccgtctggggggacgagggcaaacccctgttggcggacttgcacaggctgacgccagaagagagagccctctacgacgacctgcgcgacaaccgcatccgcacgggactgcggctggagcaggaacatattgggttccactggctggcccatcgccttcaacagctccttgacggcagcacgggcctcaattcagttactttgccatga

SEQ ID NO: 49511 - DNA, 1407 bp, Lachnoanaerobaculum saburreum
atgaatatttttgatgagatagatgaaaatctgttcagacctctgaccggaaccaataaaagaaaatatgccgatatactggctttgatttgggataaatgtaagagaatgccgatgtattctatagaaaaaagcaccgtcttcgatatggcggaggaatatcttctgggcttgggagagagtgtggaacttgatattgaagagcaggaagagattagcggaaatatctcggatatgcgagtagtggcaggtactcttataagaaggcttagagatacaggctggatcttggaaaaacccggtgaatatgaggatgaggacaagctggctctacagtataaggttgtgcctatacttaagtcatttaaagaggttgtcagtccgacgattgtcacatataagggtaagcttttcaaaatatattcaatgtttgagcatatatccgagcaggggagtccgtatgaaggtgtattaaaagaggcgtcggaagactttgacaatctgaatcaggcgcttagaaccttgtcggcttcaatagaagaccatataaatgagctgactatgggtaagagtccgcaggagatattggaattttttgaaaaatatgaagagaagatagttgtgggctcatatcacaggtttaagacaaatgacaatctgttttattacaggtcaagtctgtatgaaagtcttgataaatgtgaggacagtttgtttgatgcactggtgcttgactgtatggatacggaacgtgtagaaaaagatgaggccgaagttaagataagagaactgataacgaaggttcgtatggacattgaagagatggaaggccttatgagggctattgacgacagacatataatctacaggacgagagccgtacaaagagcgcagtttttgttactgtccgacggaagcagtaagagtaaaatcaataatatactgaggttttatgcaagtaccatagattcaaaggaagacggatataaagacgatgatactgtaggaagtgaaatctttcagatattttgtcaaaacttttttgacagcaattctattgcaacacctgtgaaaaaaagaaagcctacacctattgaacttatgagtatatttgaagaaccggatatggagcttgtggaagagaaaaacaaaaagatgatggagtatataaagaatgctttgacatctgagaatgtaaacaggtttgcaagggatattcttgcaggaaatcatgccgtgcagataagttcggtatttgaaaaggaccctgatacatttacaaagattataggattgtatacatattcaaagacatctgaaagagaatacgatataagactgaaggacaatgtggtggaaataaacggtgtaaggttcaaagattttattgttgaggaaagaagataa

SEQ ID NO: 49512 - DNA, 576 bp, Lachnoanaerobaculum saburreum
atggcggttgatataaaagaggagatagccaattacctgttgaacaattgttttttgatgggaactgtggatactacaagagagaagtactactatgttataaatcatgaagaaagcttcagacagatttttttacctataggatatactttggtagttcacagaaatttgagggtgattcagcttatcaataatcacggtagcggcagagttatattaaaaaaatacgagagtattattttgcttatactaagacttttgtatgtagaaaaaagagaaagtttatccacaagcgaagacagagtgtttgcgacggttgaagaaataaaaaatgaatatgagaagctaaatctcccgagaaaatttgacagagtattgttggaagagtctttaaggaatataaaaagatacaatcttttaaaggttgaggacagactttcggatatggatgcaaagatccggatttacccttcagtgatgcttgccatgcctgatgtaaatataaataaggcctatgaggagaccgccaagcttttggcacagtatgaaaacagcgaagacggagatgaagaatga

SEQ ID NO: 49513 - DNA, 3330 bp, Lachnoanaerobaculum saburreum
atgattagaatgacgaggcttcatctgataaattggcataattttcaggatgatataatagatttcaaaaatatcacctaccttttgggggtgaacgctgtaggaaagactacaataatggatgccgtaagatattgtcttactacaaataaggatttcaacacggcgggaaataaaaagagcggaagaactcttttaggttcggtacatcaaaagcaaagggcggaggattcatatcttcgtccgggacatacggtttcatatatagggatagagtttttggatgaggctataaaaaagaactttgtaataattgcccgtatagaatccgagacgccgaagcaggatttaaagggggtatatcaggactggtatattacaaaaccgggatttgttcttgagaatattcctttttttacaaagaaaaatgatgccaagagacctacttcaagagatgccttcaagcttgagaataagggtatggacagggcgtccaatcagtcggatgcaaagataaggatctgcagagtgctgggtataggcgaggcaaactcacctatcggaaagaagtttaatgaggttttccacatgggcacgggacttgatgatataaaggatatcagagagtttatctatacatatattttgcctgagcctgaagtgaatatagagtttttacaaaaggatatgcttgaacttgagagattgcaggagatactgcaggaggcaagtgacagagaagaacttttaaaagaaatcaatgaaagaataaaatcggcaaaagaactccttggcaaagtcaaaataaatgagagcttggtcgcttatgcaaatcttcatgggaatatcgaagagacaaatgagaaaaagtatcttatagaggaatggaataaaagtcttgagatgcttgataagagattacttgaactttcagagagtgagaataaggcatcagctcttttgtatgaagcacaaagagcggcggaagaaaatgtggaaaataaggaaatgctctcacttgaaagtgaaaataagaacaataaacttgagaatgagaagcttatattggaagcaggtatatttgaagatgtgcttcaaaagctgtttttgcttgtagacaggctgaataaggtaggattttatgtcaaggtagccgactcaataaaagatgaaaatgctgaaacggacgacaggataagtgaaattaaaaacagtgcaaagctttttgcggacattgaagaagaaatcaaaaatcgtgatgcgaagataagaaatgatattgcagagcttaatgagaaaagtgatgtactttcaaaaaagataaagagtctggaagcaggtgttatgtgttatcctgatgaagcgatatttgtaagagataagataaattcattcttgagtgagcaaagcaaaagggctgatgccaagttgctttgtgaacttttatatatgacggataacagctggcaggatgccgttgagagctatttgaatactcagaggtttaatattattgttgagcctgaaaattaccttgcggcaaaaaaggtctttgtatctctgggagataaagttaagggcatagggcttatagatacaagaaagataaaggagcctgagtacaagtctttgaatgagtcgtatcttggagataagattgattctgaaaatatctatgcaaagtcatatgcaagatatgttatgaaaaatgtcatttgctgtgagtcgtcagacgatttggagaatttttcaaagagcgtaacaagagacagactcagattccaaaacttctgcttacagaggatggcaaaaaaagaacatttcataggtgtggatgccatagcaaagcaattaaagagtgcaaaagaagagtttgcaggcgtcaaaaaagaacttacaaaacttgaagaagaaaagaaaaactttgactctatttataacggatatacaaagttcagagcgggtgacaacttcggaaagcttgaaaactactgtgagtcaaagtcaaagtcaaaagcactctcagctaagatagaagatatagcaaagaagatagaggagtttaagaaaaatcctattttacttgctatgtatgacagagtgaaagaatgtaagaagaacttaaacgctgtaagagatgagataactgataacaaggcaaaaaaacaaaatcttaactccgatataaacggggcaaaaaatttgcttgaggagcttgaagcgaacctttcaaatttgcaggctatatacgagaaaagtgtggaggagtatccggagtttataaatgacgttgagaagaagtatcaaaatgaaagaaagtcaaagaaggcttcagtcattgcctacaatttttcaaatcgtgtaattcaggacaatattgcgtttaacaactacttaaatcaggaacttataccgctgcaacaaagatacatggcgacatatacctgtgattatgctacagggcttggaggagcgaacaggtatatgcaggagtttctcacattgcagaatatagagcttgaaaggcataagagcgaacttgtaaatgcacagataagatgtaaggacagattccgtaaggaagtactgtttagaatgaaggatgatatcttaagggcaaggcagcagtttaagcagataaatcgtgttatggaaaatctcgagtacggtgaagaaagctacagattcggaattgacaagagtaaggacagggagcttggaatgttctatgatattatcatggacaaggataatatgcagattgacagagacaatgaaatgcttatgcttattgcagagagtaacaagtctgaaatatttgaaagtcagatcgatgactttatgcaaagaattatgattgatgttgaggaacatgcaaggcagaatctttcgggtcaaaagtcaggtgccaaaagtatgggaatgtatgtggattacagaacatatctggactatgacataattgtaaaaaattgtgtgacgggaaatgaggtgggactttcaaaggtcaacgcggaaggaagcggaggtgagaatcaggctcctttttatgtggctatatgtgcatctcttttgcagatttatgagaagagcaaggagggttctataagacttatactgcttgatgaagcattcaacaatatgacaagtgacagaatagagccgatgatgaatatgtttaaaaagcttaatttgcagcttgttctgatagcaacggctgaaaaggctacagccatattgccttactgtgatattacatattctattgtaaagtccggaaacaggaatgcgataggagtgtttgagaggattgaggatggactacattaa

SEQ ID NO: 49514 - DNA, 1206 bp, Lachnoanaerobaculum saburreum
atggactacattaaggatattttgaacagattgatagatatgtatgaaagaagagaaggctttaaaaaagagccttcttctttgcgtgtgatacaagcggatataaaaaagatctaccctgaatatgcggacagatacaatcacaatgtgtataaggatatcaatacggcaatagaaaagttgataaatgaaaatcttattgaatcaaaggcggatgagaccggaaaatatgaaaaggtaaaattaaatgtcgaaaatatctcagaatgctataagagagtaaaaagaattgatataccgaaacagtgtgagaaaataaaagatgttttggatttatttaaagataagaatatgcctgtactgtgcggtattgtatccgattggagtaatcttgtatcaaactataaaaagctgccgtatgatataaaatatgacaaagaaagactttttaacatactgaaaatacttgaagcaatacttgagcttggtcgtgagagttatataagaaatttttcaaccgcaatgtttaaggactccaagagatttcaaagggagtttaaatcaactgtggagagcatactttttgattatacggatgaggtagtggaaaaagataagatacttgagtactacaacctctatgagaatacgacatatgtgtatataaagggtgatatagtaattaagtttgaagattcggttattcatgtaagggaaattaacggaggtattgcactctcaaattcatcacttgaaaagatagttgagataaaggtaattgcaaagtctgtaatcactgtggaaaatttgactacctatcacgatgaagatgagaaagacagcgtatacatttatcttggaggttatcacaacagatcaaagcaggtaatattgaaaaagatatatgatgagaataagcactgtgaatatctgcatgagggagatatagatgtatacggatttttgatacttgaaaatctgagagaaaagacagagataccttttaaacctttgaatatgggagtggatactttaaagaggttttatgatgcgaaaatatataaagagcttacggcttcagatatcaatatgatagagaaaaagaaaggaaagcttggagagtataggcaagtgttggaatttatgctcttacataactgtaaggtggaacaggaatccataagggcggttgagattttaaattag

SEQ ID NO: 49515 - DNA, 1419 bp, Selenomonas sp. oral taxon 136
atggagctattcgatgtcttaccggagcgcttcttcgggcttctcgcggggaaatgtcgccgtatctatgcggaagctggactttgtctctatgaacagtaccgccttgcccagtttggtatcgagcaggagattctacgggacaagtttcaggaactcatcgagagctgggcagaggcgggcgtagcctatgaggacgatgttttttcggaaaaggacaatgccatagaggagtcgcgtgccaaagctaaccacatgattcgccgtatgaaggaattcggttggctggattacgaacagcgcgaaaacttcaaaatctttattttgctcccacactacagcagtcgtttgtgggggctttttgcgaatctgtgcgaaggacgagccgttgaataccaacgctttgccttcacgacatatcaggtgctttcaggtgatggagcaaaggtacagccaagcatggcagtactcgaagcggagcgcttggcagaggagtttgttgaagagttgcgcattctgctgaacaacattaaaagcaaaatggagcaggtatcttcccaaacgagtctacaggatgtactctctcatcattttgtcgaatatcgggcggatattgtcgatcgaagttatcaccgccttaagacctcggatcacgtttcccgctaccgtatccgtatcctgcatgaggtgcaggacatacggcagaatacggagcgttttcgctcgctttgcgatgatgctgtgcgacgtctgcttgccgactcgatggatgcggcagaatatcgtatgaaagcctcacttcaggcaatcgaggaaatctatcgaggacttgatgatatgttcgcgcagatcgaccgacgacacaatcagtatgttcgtgcatcctatgaacgtgcactctatttgcagcaggagggaagcgctcgcacagagagtatgatcgcggggattctcatggcagtcgctgaggcacgcgatcagagatgggatattgatgagcttccatgtatttttcgtctgcaaacaacgaatatgcttcttccgtcatcacgttacgtgccgcgcaaaaaacgcgtcctgcgcccaaatacggacacacccgtacgcagtgtctatgaaacactgcgtgagcgggtacgccgcgaaagtgcagagcgtgtcgcacgcagtatatcacggcagaaaattgaaacgtggattttgaatgttcttgggcaacggagttccatggagattggcgaattgctcgcgttgctgagggaaactgaatctccggatctcctccaactgctctacgtttatctctatggatatgatgattgggcaaagtaccggctaggcaaaaataaggagatcgaggagcaagatacggtacgatacagcaatcgcaccgtcaggcgcaaggggaaaataaaatga

SEQ ID NO: 49516 - DNA, 600 bp, Selenomonas sp. oral taxon 136
atgagacttgagctgctgaacgaggaagaacgtactcgtattcggagtgtcatacaggcattgttgtcgtgcaattttttgacacgcgaacacgatactgcactttatattgcagcacgtcgctatcgggaagagattgcggagtactttcaggtcatcggctgggagtttcgtgtagacgaacgttatgagatcgtatggctgctctccacgggcatggcgcacagacgggctctgaccatggaggaaagtatatggctgcttgtactgcgactcatctacgaggaaaagcggacgagtctaaacctgagcgcgtttccaatgacgacgctcgcagagatccgcgccaagtatttggcacttcatctgcccgatctcaagaaaacggcgatacagcgcctgacccagctcacgaagcaatatcgtctcgcggatgtgttggatcgggatctctccgaagagtcacgtattcgccttttccatacactcgcccttgccgtagacggggaagagctttcagacctatataacagactttacatctatcgacagaggaaggaggaggacaatgaagacgctgcggaaaatgaaggtgattaa

SEQ ID NO: 49517 - DNA, 3321 bp, Selenomonas sp. oral taxon 136
atgaagacgctgcggaaaatgaaggtgattaactggcattattttgatgaggaagagatcgccttcggcgcggcaacaatgctgtcaggacacagcggtgcaggtaagtccacattgctggatgcgctgcagtatctctttatcggaagtcagacacagacgcgcttcaacgctgcagtgacgcaggaggcacggaggactctgctgcactacctgcgaggcaaaattaaggcagagggcgtacagtatctgcgtgcggacgaattcacctcctatattgcacttgagttttatgatgacgtcaagaaaaactccttcattgtcggatatgtggtcgatgtctttcatgatgacaggatgcaggaggaattctttctcatcgatcagcatacgctctcggatcttgactttcgcaatacggacggcacactctatacgcaggagacatttcatcgcaggtatgcgcacggcaacagtgtgtttgagacgggaaagaaacaatggcaaaaacgattgatgaaccggctggggcagctgtcctcgcgttttttgccggcgttctctcgtgcgattgccttccgccccatcgaccatgtgcgcgattttatctatgaatatgtccttcttccccgcgatttgaagctagatgttctgcgcgaggtgttctattcctatcagaaattcgagcgtgatctgcaggatctgcgtgctcgaaagcatgaactggagatgctgaaagatcactacgatacctactgtaaattgcgggatacggtgtatgagcaggaattcgtattactgtcttttcggcataagaacgccgaggagaaactggatgtgggacgccagcagagacagacctgtcgtgatcgattggacgatttacagacgaaactgcatgcacaggaacgcctctcaaaacgcagaaaccaggaacagcaggaggcgtatgctgcctggcagggaaatgacgaaaagcgcagacgggatgagctgctggagacacaaaaggaacgggtggaaaaataccgttcgctcacagacgcacgacagctcatgcgtaagaaactcatgtgtgagttcgaggaagtatccgcactcggcgcatatcccgcaggagagttttttcgtctgccagagggaatgccacaggcgttggaggaactcgcgcggactctcaagtatgcggcagaagataccatccagacaacacaaatcgaacagatccaggagcagctgaaggcgggcggcgaaatacttgctgctgtcagcgatctatggcagcgcggcaatcttctcttggagcaggcacagagtgcagctgtccagcggcgggaggaactgtgctcggagattgaaggtctgaaacggaggcaacgcagatatcgtccggagatgatgcgtcttaaggctttgcttgaagagcgacttgcgggtcgctctaaggtctatgtgctctgtgaggagattgagattttggacgaagaatggcgtgatacgttggaggggtatctgaatacccggagatttgacctccttgtggaacgagaattttttcgcgaagcactgcacatctatgaaacagaaaaaagagaacgcaacatagagggcgtcggtcttgtgaatacggaggcggaaaaaaagtatctcggccaacaggaaaacaaatccctcgccgcactcctgctgacacagaaccccctcgcacaggcgtgtatcgaccacctgctcggaaacgtgatgcaggcggacaatgagcaggatatgctcaggtatagaagcgcggcgacaaaaagctgtatgtcctacaagggcttggttgcgcgtcagataccacgacggttctacgagattccatacatcggtgcaggtgctatagaccgccagcttgaaattcgtgagcgagaacttgcggaagtaaggcagcgcctagtcgtacttgctgaaggggcaggccacatgaagcagatctcctctgttcttcatgaaccgctgcatcgatacgcaaacgctgcgaagagcatgaacgttcttgccgaacttgacgcctgcaaagcagaccttgagcgcatttctggagaattgaatgcgatggatctcagtgaggcagtgcgcctgaaatccgtctatgaggaatccaaacgacgcgccgaagaggcagcgcatgattgcgcagagacgatgcggacacaggcacacgctgaatccgagctagatcaagtagaacggtctataccaaacctagagcgtacggcagctgctgcggcagaggccgtcgaatcatggcgggagacttatcctgagctctgtactggcgcagaagcgcgccttgcctcgctcatgcaggaaacacgtggaggacggagcatggaggaacgtctgcagagctatgagataagtcgacgggggaatgagacccggcgtgacaacatgtggcaaaaacttcttgttgcgcgagagcattatgggctcgcgcacggagatacaggacatgtctatgatccggatcacagttattatacagagatccttgagcgactgtctgggacggatataccttcctttgaggagaaggcacgtgaggctcttgctcagtcggagatggagtttaaggctcatttcatcttcagtatgcgtgaggcgatcgaaagcgcacgttatgaatttcgtgagctgaactatgccttgaatcagtttcagttccacaaggataaatacagttttcttgttacgccaagtgcgaagtacaagccgttctatgatgcagtgatgatggcggattgggaaacggcgggcgggctctttgccgatgcagacacagcggcaaacgaacaggcaatggagctgtttgacaagttagtcaaaggaacacctgaggagcaggaagagttttcagattatcggcggtatctggactatgacatccgtatcacagatacggtgggtcagaattatctttactctagagtcctccggcaaacgtcgggcggagagacgcagactcctttttacattgcaattctcgccgcttttcaacagatttacaatgataaaacaatacgtctgactgtctttgatgaagcattcaacaaaatggatgaagagcgcattaaatcatgcattgaactgataaaacggatgaaaatgcagctgattgttgctgttcccgatgagaagttggcagcaatcgccccgctgatggatcagtcaattattgtcaccaatgtggggaatcattgctttactgacgaattaggggatgtaacaacgtgggagaaaggactgaatcatggagctgatgcctctgcagatgcactatga

SEQ ID NO: 49518 - DNA, 1263 bp, Selenomonas sp. oral taxon 136
atggagctgatgcctctgcagatgcactatgaggatattattctaacaactttattggaaaagtacgaaaatagtaaagcagcagttggggaacgggggcgtcgtccacagtttcgtattctgaaatcagccctttccgctgactataccgatgaaatggatgttgataagcgggaagcgatacatgcggcagcgtgtgaacttgagcgtcaaaaactgattgccatcatctgggaacgccatggggcaggacggatagagcgcatccttcttttttctacaaatgtttctactctgtatcaacggatggggaaactcatgcctttgatccgcgtgaaagagtatcagacacagctttcattacttgccagtgaacgtacaccgtgggtgaagaatttttatgccgcgatgatggaatcacttgtagataacgtgattcccgcgatcttaccaaaagaacaggttctttacgcgaatttgatacgagctatccttgctcttccaggcgaaggcgaaagtgccatccccaaacgtgtgtttagccagcgtatttttcgcaacagcaagtattttgaacaaaacatagagctgccgctgctccgtctcttacgtcgatttgccgatgagccatgtgagtcggatgcagagtatttggatgcagcggggattgccgtgacacaaggaaaggcgtggatcgcaggaaatctaacttttctgcttggtgatcgacgatatttcctcgcagattttccgggtggattgatgcttacctatgatacaatcactgccatgaaaatagatgtgcttccccctgaaattctgaccattgagaatctgacaaatgcagaaactctgacacgaacggtagataccaatcacctcctcatctatacggcaggattcccaaaccgtacggtacaagctcttcttttgaaaattgcctccctccatcggacgttccatatacgccactggggagacatcgattacggaggtatccgtatctttgaattcctgcgaggacggtactttccgacactcagccaatatcgcatggacgtagatacatttcgtgcatatttaccatttgcgcagagcctcacccctgcgcagaaaaaacgtctttcggggttgctcaagcaggaagagttttcaatgtggcatagcctcattcgcgtgatgctggacgaagggaaatgggttgaacaggaagtcatgttatggcaggattcgtctgggatggattctctgaacgaagagtaa

SEQ ID NO: 49519 - DNA, 1353 bp, Pseudomonas aeruginosa; identical to SEQ ID NO: 48262

SEQ ID NO: 49520 - DNA, 663 bp, Pseudomonas aeruginosa; identical to SEQ ID NO: 45023

SEQ ID NO: 49521 - DNA, 2940 bp, Pseudomonas aeruginosa
ctgggggccgtgctctggttcgaaggcacaagctcctcggcatcggatctgaaaaaactgtggctgttaagcgagtcccccgagcagactctggagcattggctcagccagcatcacgcaggcggtatgcgggctttgcgtcagatggagaaggatgggacgggtatctggccttatcccagcaagaaagctttcttggccaggctgagggattacttcgaggtcggtgaaaacgcattcaccttgctcaaccgcgctgccggcctgaagcagctcaatagcattgacgagatctttcgcgagttggtgctggatgaccgttccgccttcgagcgggccgccgaggtcgccggcagcttcgatgatctaaccgacattcaccgagaactggaaacggctagaaagcagcagcgctcattgcaaccggtcgccgatggctgggagcgttaccaggtcttgcaagaacagctgcgcgataagcaggctctcgaaggtatcctcccggtttggttcgccgagcaggggtatcgactgtggttggctgaaaccaacaggctcgagaaggagtacaaaaaggccgaactggatcaggagcaatgcaaaagtcagcttgaggcccagaaaggtgtggtcgatcaacatcgccagcgctacctgcgagtagggggcgcagggatagatcaattgcgcgagcgcatcgctgattgggtgagggagtgcgataagcgcagcctgaaagccgagcaataccaactcttggccaaaggccttggactagcggatgagttatcggccgctgctctcaaggagaatcagcagcatatcgcggcacgcctggaaatactggaccaacaaattactgacgcgcgccaaaaggcgttcgacgcaggcctcgtccagcaggaactcaatggtcgcctacagaccttacagcaggagggtgctgaggttgagaaacggccaggctcgaacctgcccgggcaatttcatgctttccgaagcgatctggcgcaggcgcttggtgtcaatgagtcggccctgcctttcgttgccgagctggtgcaggtcaagcccgaggagctggactggcgtggcgccatcgagcgggcaatcggtagccaccggctacgcatcctggtgccgcaggactcatcccaggccgcactgcgttgggtgaatcaacggcacaaccgcttgcatgtgcgcttgttggaggtacaggagccgacgtcgcgccccgtgttcttcgacgatggttttacccgcaagctgaccttcaaggagcatccgtaccgagaagccataaaggcactgctggcggacaatgaccgccactgcgtcgaaagcccggagcaattacgtcatacccctcatgccatgacggcccaggggctgatgtcgggcaaagaacgcttcttcgacaagcaggaccagaagcgtctggacgaagactggctgaccggcttcgataaccgtgaccgtctggccttcctggctgagcagattcgcgaggtcaatgagcagctcgagccagccaagctcgccttggatgctgcccagggcgacgttcgtcagttggagactcaagcttcgctgctgaatcgtgtcaaagaactgcagttcgaggatattgatctgccgggtgcccagagtcagctggagtcgctgcgtacgcaactggccaccctgacgcgccccgattctaaccttgccatgatcaaggtcgagctggatgcggccgaggccctgcaggagtctctggatcaacagctccgccaactgatcgaacagtacgttcagttaaaaactcagtttgaccaggccgcatccgctacccgtaaggcctataacagcgcggagaaagggctgaacgatacgcagcgtgaactggcgcaagcgcatttcccgactctgaccgcggatgacctcggcgatattgtcgagctggagcgcaagcatacgcgtgagcttcaagggcagctcaaagcgcttggcgagaaactgggcgatcagaaatcagagcttgccaaacgtatgtctgatgccctcaaggtagacaccggggcgcttgcagaggtcgggcgagagctggtggatgtccccaggtatctggagcgtctgcgtgtgctgaccgaggaagccttgccagagaaactcaagcgcttcctggaatacctcaatcgctcctcggatgacggcgtcacccaactgctcagctatatcgaccatgaagtctcgatgatcgaggaacgcctggatgacctgaatagtacgatgcagcgtgtcgactttcagcccggacgctatctgcgcctggttgcaggcaaggtcatccatgaaagcctgcgcaccctgcagcgcgcccagcgccaactgaactcggcgcgtttcatcgatgatgaaggcgagagccattacaaggcattgcaggatcttgtggggttgctcaaggacgcctgcgaacacagcaggaatcagggagccaaggcgcttctggatccgcgcttccgcctggagttcgcagtatcggtgatcgatcgagaaagcaggaatgtcatcgaaacccgaacaggttctcagggcggtagcggtggcgagaaggagatcattgcctcctacgtgctgaccgcttccctgagctatgcgctttgtcccgacggcagcagccggccgttgttcggcaccatcgttctcgacgaggcgttctcgcgcagctcccatgcggttgcaggtcggatcatcgctgcgttgagggaattcggcctgcacgctgtcttcatcacgcccaacaaggaaatgcgcctgttacgccaccacacgcgttcggcagtcgtcgttcatcggcgcggcctggagtccagtctggtttccctgagctgggaagctttggatgagcatcatcaacagcgcatcaaggccatgcatgaagtcgcccactga

SEQ ID NO: 49522 - DNA, 1182 bp, Pseudomonas aeruginosa; identical to SEQ ID NO: 44163

SEQ ID NO: 49523 - DNA, 1353 bp, Pseudomonas aeruginosa
atggaggatgcgctgcaagcgctgtccgaaatgctggctgcttatgccagccaggatctttacgagatcgacccggatgcaacgcacatccaggcaggtcgtgaactccgtgaatggatcaagcggcgccttgttgtagagcgagagggccgcatctatgcaaccgacgcgctggagtccgccatacagttcgtcgactcgttggatagtcgtatcatgacctccacggcctctcgcctttcggtggtccagcgcgagattgaaaacctggaaacgggtctgaaccccagcccaagtggccgtattgccagcctgcgccgccgaatccaggacttggagcacgagctagcgcaggtagaagctggccacgtcgtcgtgctggacgaagctcaggcgatagagagtatacgcgaggtatataacctggccaccagcctgcgcgcagactttcgacgagttgaagactcttggcgcgaagctgatcgcgccttgcggcaatccatcatcagcgagcagtctcaccgtggagaaatcgtcgatcggttgctggacggtcaagatgcgttactcaacacaccggaaggacgtgtcttcgaaagtttccagcagcaactgaggcagtccgccgagctggaagtcatgcgtgagcgcttgcgtaccatccttcgtcatccagcggttccgaaggcactgaatcgtccccagcaacgtgagctgcgttggctggcgttacgcttggttcgggagtcgcaggctgtgcttcaggcgcgtgcccgaagcgagcgcgatgtacgtggcttcatgaaggcgggcctggccgccgagcatcatcgcgtcggacagttactcaacgatttcttcaatctagcgctcagcgtcgactggcaacgccaggccgtgcgtcgtagcactgtccgtttgccgccggttggcgtagccattaccggagtcccagcgattgagcgtctacgtttcaagaccctggatgacgatgacacgggcgagctggatctgagtctgaagccagcggggctggaacagattgacgatgacttctgggatgctttcgacgggttggatcgcgaagcgctgattcatgacaccctggcggtgctggtggagcaggggcgacctgtgagtctcggggagcttgcgtctttgcttccacctgctcacgacctggaaacctttgcgctctggttggctatggcgcgcgaggcaggtactgaggtgctgacagaggagcgtcagctcgtggagctagttgacgaggatgagcaacgctggcgcttcaatctgccttatgtcggactcgaccacgaggcactcaaggacatcgattgggagttgtga

SEQ ID NO: 49524 - DNA, 2940 bp, Pseudomonas aeruginosa; identical to SEQ ID NO: 48151

SEQ ID NO: 49525 - DNA, 1182 bp, Pseudomonas aeruginosa; identical to SEQ ID NO: 44163

SEQ ID NO: 49526 - DNA, 1353 bp, Pseudomonas aeruginosa; identical to SEQ ID NO: 44160

SEQ ID NO: 49527 - DNA, 663 bp, Pseudomonas aeruginosa
atggatgatgaacagcctctcatgagcgccgctgtacaggtcgatgagcgccggacgccgcaacgggtacgggaggccgtacaggaaatgctcaagtacggtctgctggaagagagtcacaagcccaacctgtatcgctcagcgctttccaatatcgaggcggtcgacagaatcctggagccgctcgaccttgccatggggggcgacgaggttcgggggctggtgttcgttatcgttcgccagggcgaggtggccgagcaggatgactggtcgcaccccctagtgcgtcggcaaaggctgaatctggagcagtctctgctgatagccatcctgcgccagcagttcatcgcctacgaacaggaaagcggtacgggcgccagtcaggcatcggtagtggtcgatgagctgattccccaattgcaggtttacctgggcgagctgggcagtgaggcaaaggagcgcaatcgcatcatcacgctgctggatcagctcaaggggcatggcctggtgtcggctttggacgcccatgatcgcgtcatcatccgtcccatcattacccacttggctaacccggagaacctgcaggcactcgtggcatggctgcgagagcaggtggagggcgcggcgacgccggctgccgatggcgaggaggatatggcatga

SEQ ID NO: 49528 - DNA, 2940 bp, Pseudomonas aeruginosa; identical to SEQ ID NO: 48151

SEQ ID NO: 49529 - DNA, 1182 bp, Pseudomonas aeruginosa; identical to SEQ ID NO: 44163

SEQ ID NO: 49530 - DNA, 1353 bp, Pseudomonas aeruginosa; identical to SEQ ID NO: 44160

SEQ ID NO: 49531 - DNA, 2940 bp, Pseudomonas aeruginosa; identical to SEQ ID NO: 48151

SEQ ID NO: 49532 - DNA, 1182 bp, Pseudomonas aeruginosa; identical to SEQ ID NO: 44163

SEQ ID NO: 49533 - DNA, 1353 bp, Pseudomonas aeruginosa; identical to SEQ ID NO: 44160

SEQ ID NO: 49534 - DNA, 2940 bp, Pseudomonas aeruginosa; identical to SEQ ID NO: 48151

SEQ ID NO: 49535 - DNA, 1182 bp, Pseudomonas aeruginosa; identical to SEQ ID NO: 44163

SEQ ID NO: 49536 - DNA, 1353 bp, Pseudomonas aeruginosa; identical to SEQ ID NO: 48262

SEQ ID NO: 49537 - DNA, 663 bp, Pseudomonas aeruginosa; identical to SEQ ID NO: 45023

SEQ ID NO: 49538 - DNA, 2940 bp, Pseudomonas aeruginosa; identical to SEQ ID NO: 49521

SEQ ID NO: 49539 - DNA, 1182 bp, Pseudomonas aeruginosa; identical to SEQ ID NO: 44163

SEQ ID NO: 49540 - DNA, 1353 bp, Pseudomonas aeruginosa; identical to SEQ ID NO: 48262

SEQ ID NO: 49541 - DNA, 663 bp, Pseudomonas aeruginosa; identical to SEQ ID NO: 45023

SEQ ID NO: 49542 - DNA, 2940 bp, Pseudomonas aeruginosa; identical to SEQ ID NO: 49521

SEQ ID NO: 49543 - DNA, 1182 bp, Pseudomonas aeruginosa; identical to SEQ ID NO: 44163

SEQ ID NO: 49544 - DNA, 1353 bp, Pseudomonas aeruginosa; identical to SEQ ID NO: 48262

SEQ ID NO: 49545 - DNA, 663 bp, Pseudomonas aeruginosa; identical to SEQ ID NO: 45023

SEQ ID NO: 49546 - DNA, 2940 bp, Pseudomonas aeruginosa; identical to SEQ ID NO: 49521

SEQ ID NO: 49547 - DNA, 1182 bp, Pseudomonas aeruginosa; identical to SEQ ID NO: 44163

SEQ ID NO: 49548 - DNA, 1353 bp, Pseudomonas aeruginosa
atggaggatgcgctgcaagcgctgtccgaaatgctggctgcttatgccagccaggatctttacgagatcgacccggatgcaacgcacatccaggcaggtcgtgaactccgtgaatggatcaagcggcgccttgttgtagagcgagagggccgcatctatgcaaccgacgcgctggagtccgccatacagttcgtcgactcgttggatagtcgtatcatgacctccacggcctctcgcctttcggtggtccagcgcgagattgaaaacctggaaacgggtctgaaccccagcccaagtggccgtattgccagcctgcgccgccgaatccaggacttggagcacgagctagcgcaggtagaagctggccacgtcgtcgtgctggacgaagctcaggcgatagagagtatacgcgaggtatataacctggccaccagcctgcgcgcagactttcgacgagttgaagactcttggcgcgaagctgatcgcgccttgcggcaatccatcatcagcgagcagtctcaccgtggagaaatcgtcgatcggttgctggacggtcaagatgcgttactcaacacaccggaaggacgtgtcttcgaaagtttccagcagcaactgaggcagtccgccgagctggaagtcatgcgtgagcgcttgcgtaccatccttcgtcatccagcggttccgaaggcactgaatcgtccccagcaacgtgagctgcgttggctggcgttacgcttggttcgggagtcgcaggctgtgcttcaggcgcgtgcccgaagcgagcgcgatgtacgtggcttcatgaagacgggcctggccgccgagcatcatcgcgtcggacagttactcaacgatttcttcaatctagcgctcagcgtcgactggcaacgccaggccgtgcgtcgtagcactgtccgtttgccgccggttggcgtagccattaccggagtcccagcgattgagcgtctacgtttcaagaccctggatgacgatgacacgggcgagctggatctgagtctgaagccagcggggctggaacagattgacgatgacttctgggatgctttcgacgggttggatcgcgaagcgctgattcatgacaccctggcggtgctggtggagcaggggcgacctgtgagtctcggggagcttgcgtctttgcttccacctgctcacgacctggaaacctttgcgctctggttggctatggcgcgcgaggcaggtactgaggtgctgacagaggagcgtcagctcgtggagctagttgacaaggatgagcaacgctggcgcttcaatctgccttatgtcggactcgaccacgaggcactcaaggacatcgattgggagttgtga

SEQ ID NO: 49549 - DNA, 2940 bp, Pseudomonas aeruginosa; identical to SEQ ID NO: 48151

SEQ ID NO: 49550 - DNA, 1182 bp, Pseudomonas aeruginosa; identical to SEQ ID NO: 44163

SEQ ID NO: 49551 - DNA, 1353 bp, Pseudomonas aeruginosa; identical to SEQ ID NO: 44160

SEQ ID NO: 49552 - DNA, 2940 bp, Pseudomonas aeruginosa; identical to SEQ ID NO: 48151

SEQ ID NO: 49553 - DNA, 1182 bp, Pseudomonas aeruginosa; identical to SEQ ID NO: 44163

SEQ ID NO: 49554 - DNA, 1497 bp, Rhodococcus sp. SC4
atgtccatcaccgccgacgttcatcggcttctccgtctgcgccaggaccacgcagcctggacattgctgcgtgccgattcggcgccggcaattctggcgctgttgggccgtcacttcgagcacgggacccgccgcctcccggctccggaactcttcgcccgcttggactccgaccttcagaccatgcgcgacgagggcctcgacttcccgcgaaccggtcaggcgtactgcaccgaatgggtgcggtccggatacctgctccgacgagcagcggccggtacccgtgaggagaccctggaaccgacggagggcgcgttcgccgcgatggccttcgtcgcaggcttcaccagccaggcgagttcggcaaccgaatcccgcctgaccacgctctccacccagttgcaggccctcgcgcgggattccgatccccgcgcggaaacccgtctcgccgcgctgctgaccgaacgggcgtcgatcgatcagcaggtcgccgcggtggagtcgggagtcttcccggtcctcgacggcgaacgcgccgtcgagcgttccgccgagattctcgcgctggcctcggaggttcccgcggacttcgcccgggttcgcgccgaactcgaggaactgaaccgcgatctgcgagcccgcatcctcgatgacgacggtgaccgcggcgacactctgggcgatgtgttccgcggggtcgacctgatcggagattccgatgccggccgcagcttcactgccttctacgacatgattctcgatccggcccgatcgtctcaaatcgacgagtggatcgatgtagtgctgcagcggccgttcgccgcgatgttgacccacgatcagaaacgacggttccgggcgttgctgaccgagatggaaaccgccggctccgaagtgcattcgacgatgacctccctgtcccggtcgttgcgtcacttcgtccagtcgcgtcactacgaggagcaccgccggctgcagcggttgctgcgcaccgcgcagcagagtgctgtcgccgtggccacacgtcgccgcccctacgacctgctcgacctcgaactggtgcgcgtcggtatgagcatcgaatcggtcacagctcttcgcctgcacaaccccgccgacaacctcgtcaccgaaccggtgctgacccacgacgccggtaccgtcgatctcgacgaacttcgaaagctcgtccgagaatccgagatcgatatggacgaactgtccgacaacgtcgcggcgacgctccgtgcgcatggtcgcgccacgatcggtgacgtcctgcgcgaatacccggccactcaaggactcgcgagcgcagtcggactgatggtcctcgccacccaccacgggcacgcgatcgacggcacagaagacatccactggatctcgggagccggagtagcgcgtcgggcgacaattcgtcgtcgcctgttcgatccggccgccgacgagttcaccactcgtcgggcgttcgaacccacggggagctcgacatga

SEQ ID NO: 49555 - DNA, 606 bp, Rhodococcus sp. SC4
atgaacgacgagccgacgaccggcggccattaccccggagacaccggcgaactggacctcgagacgcggcgcgcattcgtgcagctactcaagggccctctcgtcaccgcggccaaacatcccgaggtgtggcgcgcggtgatccgggacgagcgactcctccggtcccgactcgccgacgtcttcctcgatctcgtcatcgacgacgagaacgagctggcattcacccgcccgcccgagaccggcaatgccaacacccccacggtgctgcgcaccgagcgtctgacattcatggacacggtcatgctgctcgcattgcgccagcgtctgctccgcgcgcaacccggcgaacgggtgatggtcgacctcgacgaactgcgcgaacagctcgagctgtatcgcacggccggcgacaccgacccggccggctacgcgaagcgcgtcaacgcgtcgtggaagaagctcgacaagtattcgctgctcacgaagacgtcgaccgatgaccggatggaggtctcaccggtgttgcggcagctgttcgatgccgaacaggtcgctctcgtcgaagtggagttccggcgcattctggaggaggacacaccgtga

SEQ ID NO: 49556 - DNA, 3288 bp, Rhodococcus sp. SC4
gtgatccatcccggtcagcgccgtctcgcgcgcgttcaggtcgtcaactgggggaccctgcacggccatcacgatctttccgtggcccgcaagggtttcctgatcaccggcaattccggctccggcaagtccacgctcatcgatgccatctcggctgtgctcgtcccgggcaatcaactgcggttcaatgcggccgcgcaggaggccacgaactcgggacgcaacttcgtcacgtacatccgtggcgcgtggcggcgggaggcgggcgccgacaccgacggtctggtcgcctcgtacctgcgcaccggcgcgacgtggagtgggatcgccctcacctaccgcgccgacaccgacgatccgccgatcaccctcgtcaagctcatgcatctggggcgggggcagaacgccgcagcggacgtcacccacctccatctgattctcgaacacgaactcgatctgaccgacttcacgtcgttcacgacgcgcggcatcgatacgagggccatcaggaagcggtggccggagtcgacggtcagcccggcgtacgggccgtttgcccgtagcttccgctcccgcctgggtatttcgtcggagggtgctcagcgcctgctgcaccgcaccttgtcggcgaagagcctcggcagcctcgaccaattgttccgcgactacatgctcgacactccgaacaccttcgcgatggccgaacgagcggtcaaccagttccacgacttgcaggaggcccaccgggtcgtcgtcgacgcgcggcgtcaggtggagatgctcgcaccgctggtcgatcttgccgacacccggcaacgcgggctgcagtccctgcgcgacacggacgaggagaacgcgcatctcggagcggtccacgcggagatgaccttgtccctcctgcgcggtgaatgcactgaacgccatgccctgacgcctctgctggaggcgggtgcgaacgaagccaccgccgccgccgaacgtgcacggcaggagaccctcgatctgaccatgaaactcgagggcatcgggggcggcagactggccaccctccacgcgcagcgagacacggaactgaagacgttggcgcgcgtgcggaccaggcgtgatcagatcgccgaggcggtgtcggcctgggaaggaaccgttccggagaccgccgaggagttcgcgcgactgcgcgggcaactcgaggatcaggcgcgtcaggccaccaccgcccacgaggaacggcacggcgcccgctacgcgctcgccgaacagcgcggcactgcgcagaaggagcgcgccgcgctgatcaccgatcgtgagatcgtcgcccgcaaacgctccaatatcgatccgagtctgctccgcgcgcgcgagtcgatctgttccgccgcaggtgttccggacgacgcggtgcccttcgccggtgagttgatcgcggtgcgggacgaatactccgagtggaccggacccatagagcgagtcctcggcggcctcggccgcaccctgctcgtcccggacgacgtgtatccggcggttgccgcggccgttgatgccacccacctcggcgcgcgcctcgtgtatcgccgagtacgggtgggtgtcacaccgaaggcggtgccgaagaccggggcgttatcgctggtgcgtcgcgtggaggtcgccgacggtccgctcgccgcgtggatccaccaccatctcgccgaccgctacgactacgcatgcgtcgacaccgctgccggcttcgcggatcacgtccgcgccgtgacacgcgccgggcaggtcaagcactccgccgaacgacacgagaaggacgaccgcagccgcatcgacgatcgccggcggtgggttctcggattcgacaacgaagccaaactcgaggacattcgccggcgaatcgcagatctcgatgtcacgatcgcaggtgcgacgagccgactcgacgcgctggaccgtgaggaccagcagatcgccgtgcagaatcgcgcagcgcagacagtcctcgatgcgcagtgggtggatgtcgacgtgaccggtgcgcaggctgccgtcgacgctgtcgagagccgtctcgaatcatggcagcaggacaacccggagcattctgcggtgtcggtcgccctcgagctcgccaagaaggcggaaaacgaggccgacgcagcccggcgccaagccgatactgcgttgacggtgcaccgaacggcggtgacggaactcgagacgaggatcgcgcaggccgaactccacgcagatgatgcggcacccgatgctgtcgccgcgcggatcaaggcgcgattccagaaattcgcgcgccgggtcacgtcggacaacatcgacaaggcgctgttcgaggtcggccagggtatcggcaaggacagggctgacgcacagaacgcggtgtctgccgccaacgcgtcgatcgtcaggatcctctcccagtatctggcgcgttgggagtctcgcggcggtgagctgaggattgacgccgaatacgtcgacgacgcactgacgatcctccagcgcctgcgctccgacggtcttccccggtacgaagatcggttcttccagttgttgcacgaccagtcccaccgcaatatcggcgaactcgctcgcacgatccgcaaggcgcccgccgagatccgttcccgcatcgacccggtgaacaactcactgcaccgctccgcgttcgacaccgaccggtggttgcgcatcgatgtccgcgagcgacggtcgccggcggcggccgacttcctcgacgacctgacccggatcacgagtggtggatgggacatcgagcagcgtcccgcggccgaggagagattcgagcgaatggcggctgtgctggagcgcctggcgtcgaaggaacccgcagatcagcggtggcagcgccaggtcctggacactcgcctgcacgtcgggttcatcggcgtggaggtcgacggtgccggagaggctcgcaactaccacgattcgagctcgggactgtcgggcggtcaggcgcagaaactcgtgttcttctgcctggcagcggcgttgcggtatcagctcgctcccgacggcgcagaccttccccgttacggcaccgtcatcctggatgaggcgttcgaccgggccgactccgcgtacacacgccgagccctggacgtgttcgcgcagttcggttttcacatggtgctcgcgaccccgctcaagttgctcggcacactcgaggagtacatcggcggcgctgtgaccgtgagcatccgcgaccggatgcacaccgaactcagcctcatcgaattcgacgacgtgggcgccacatga

SEQ ID NO: 49557 - DNA, 1194 bp, Rhodococcus sp. SC4
atgagcgtgcggtgtgttctgccgcctgctgccgcggcgaaggcgctgaccacctacagcagtcgccgacgtcgctggctggccgaccccgcactcgccgaacaggattcgctgacggttgccctgcatccgccgtccgagcaccagatcgccgaggatcccgacacggtggtcgcctgggtccgctcctggcgcggctacaccggcgtcggccacgtggactgggcgattcgccggtggccgagcttcggcacacaggaggtgccggtgcgactgacactggccggggctgatcagattgcgtccgcgagtggccgcgaaaccgaatggcgcgccctggtgatgcgtcgtgatgcgcttgtcgaccgcctcggtcccgacactccggcgctgtcggcggcggttgccgtgaccgctgcgaaatggctcgacctcgacgacgacgacttcgtcaggctgacgaccatcgcgcgatggctgagcgaccatccgaactcggggtatttcatacgtcaacttcccgttccgggtgtcgacacgaaatggctctcgagtcatcgcggaatggtggagactctgctcgagggcgttcgcggcagccgggaactcggtatccggagcctgcccaacatgcgagacgtcgctctgtgcgatcccgatctcctgatcggaactccgaggcgcttcgcgacctcgctggacgaactcaccgcgttgccgctggccccggcgcgcaccctcattctcgagaacaaagagggtctgcatgcgctacctcggctggcggaaacggtggcactgcacggtggcgggtacacggttcacgagttggccggaatcccgtgggtcgtcgactcggaggtctggtattggggagacctcgacagtcacggtttcgccatcctcgaccgtctgcgccgacatcttccgcacgtgcggagtctgttgatggacacggacaccctgaatcggtggcggaccctcgcggtccgcgagcacaagcccaccttcaacgaggtctctcacctcaccgaatccgaagccgccgctctggagtcgctgcgcgaggacgatctccgcctcgagcaggaacgcataccctggccctacgccctgaagagacttctcgtcactttcggtgcgggtcagtcgtctgcggctgccgactgccctacgtgtccggacagcaagtaa

SEQ ID NO: 49558 - DNA, 1353 bp, Pseudomonas aeruginosa; identical to SEQ ID NO: 43741

SEQ ID NO: 49559 - DNA, 750 bp, Pseudomonas aeruginosa; identical to SEQ ID NO: 43742

SEQ ID NO: 49560 - DNA, 3306 bp, Pseudomonas aeruginosa
atgaagcaggcactcctttggcgtgacagcgagaccttcattctcaccagcatcgagctctataactggggcggctttcagggctatcaccgtgccgagatcgacccctccggtaccgccgtgatcggcccgacggggagcggtaaaacgacactggtggacgctctgatgaccttgctgtgcgccaatccgcgctacaacctggcatccacgggcgggcatgaaagcgaccgcgacctggtgtcctatgtccggggagttaccggccccggggacggaggtatagagcagtctcatatcgctcgccagggtaagacagtaaccgcaattgcggccacgctcgagcgtgatggtgcgcaggtacgactgggggccgtgctctggttcgaacgcacaagctcctcggcatcggatctgaaaaaactgtggctgttaagcgagtcccccgagcagactctggagcattggctcagccagcatcacgcaggcggtatgcgggctttgcgtcagatggagaaggatgggacgggtatctggccttatcccagcaagaaagctttcttggccaggctgagggattacttcgaggtcggtgaaaacgcattcaccttgctcaaccgcgctgccggcctgaagcagctcaatagcattgacgagatctttcgcgagttggtgctggatgaccgttccgccttcgagcgggccgccgaggtcgccggcagcttcgatgatctaaccgacattcaccgagaactggaaacggctagaaagcagcagcgctcattgcagccggtcgccgatggctgggagcgttaccaggtcttgcaagaacagctgcacgataagcaggctctcgaaggtatcctcccggtttggttcgccgagcaggggtatcgactgtggttggctgaaaccaacaggctcgagaaggagtacaaaaaggccgaactggatcaggagcaatgcaaaagtcagcttgaggcccagaaaggtgtggtcgatcaacatcgccagcgctacctgcgagtagggggcgcagggatagatcaattgcgcgagcgcatcgctgattgggtgagggagtgcgataagcgcagcctgaaagccgagcaataccaactcttggccaaaggccttggactagcggatgagttatcggccgctgctctcaaggagaatcagcagcatatcgcggcacgcctggaaatactggaccaacaaattactgacgcgcgccaaaaggcgttcgacgcaggcctcgtccagcaggaactcaatggtcgcctacagaccttacagcaggagggtgctgaggttgagaaacggccaggctcgaacctgcccgggcaatttcatgctttccgaagcgatctggcgcaggcgcttggtgtcaatgagtcggccctgcctttcgttgccgagctggtgcaggtcaagcccgaggagctggactggcgtggcgccatcgagcgggcaatcggtagccaccggctacgcatcctggtgccgcaggactcatcccaggccgcactgcgttgggtgaatcaacggcacaaccgcttgcatgtgcgcttgttggaggtacaggagccgacgtcgcgccccgtgttcttcgacgatggttttacccgcaagctgaccttcaaggagcatccgtaccgagaagccataaaggcactgctggcggacaatgaccgccactgcgtcgaaagcccggagcaattacgtcatacccctcatgccatgacggctcaggggctgatgtcgggcaaagaacgcttcttcgacaagcaggaccagaagcgtctggacgaagactggctgaccggcttcgataaccgtgaccgtctggccttcctggctgagcagattcgcgaggtcaatgagcggctcgagccagccaagctcgccttggatgctgcccagggcgacgttcgtcagttggagactcaagcttcgctgctgaatcgtgtcaaagaactgcagttcgaggatattgatctgccgggtgcccagagtcagctggagtcgctgcgtacgcaactggccaccctgacgcgccccgattctaaccttgccatgatcaaggtcgagctggatgcggccgaggccctgcaggagtctctggatcaacagctccgccaactgatcgaacagtacgttcagttaaaaactcagtttgaccaggccgcatccgctacccgtaaggcctataacagcgcggagaaagggctgaacgatacgcagcgtgaactggcgcaagcgcatttcccgactctgaccgcggatgacctcggcgatattgtcgagctggagcgcaagcatacgcgtgagcttcaagggcagctcaaagcgcttggcgagaaactgggcgatcagaaatcagagcttgccaaacgtatgtctgatgccctcaaggtagacaccggggcgcttgcagaggtcgggcgagagctggtggatgtccccaggtatctggagcgtctgcgtgtgctgaccgaggaagccttgccagagaaactcaagcgcttcctggaatacctcaatcgctcctcggatgacggcgtcacccaactgctcagctatatcgaccatgaagtctcgatgatcgaggaacgcctggatgacctgaatagtacgatgcagcgtgtcgactttcagcccggacgctatctgcgcctggttgcaggcaaggtcatccatgaaagcctgcgcaccctgcagcgcgcccagcgccaactgaactcggcgcgtttcatcgatgatgaaggcgagagccattacaaggcattgcaggatcttgtggggttgctcaaggacgcctgcgaacacagcaggaatcagggagccaaggcgcttctggatccgcgcttccgcctggagttcgcagtatcggtgatcgatcgagaaagcaggaatgtcatcgaaacccgaacaggttctcagggcggtagcggtggcgagaaggagatcattgcctcctacgtgctgaccgcttccctgagctatgcgctttgtcccgacggcagcagccggccgttgttcggcaccatcgttctcgacgaggcgttctcgcgcagctcccatgcggttgcaggtcggatcatcgctgcgttgagggaattcggcctgcacgctgtcttcatcacgcccaacaaggaaatgcgcctgttacgccaccacacgcgttcggcagtcgtcgttcatcggcgcggcctggagtccagtctggtttccctgagctgggaagctttggatgagcatcatcaacagcgcatcaaggccatgcatgaagtcgcccactga

SEQ ID NO: 49561 - DNA, 1182 bp, Pseudomonas aeruginosa
atgaagtcgcccactgacatcggtcgcagcttggccaggcaatggcagcgttctagtgttcggttggaccgcttactcaattctgctagctggccgcaaagcttcaacatcggcaagccttcggcacgactattctctgacaacatccggacggtgcttcggcatgtggaaaattggcggagcgtgaaagtgggtaaggtcgactgggaacccgtcagctaccgagcagggttggctccaatttccttgccaatgcgctggcacttgcgcagtccctccgaatggattgccgcaaccgacgatccttcggtcagccaggaatacgctcaactcgagtatctggtcgagcaggtagatagttcctttcatgctctgctggtggcgcaacggagcctgtggttgacgaagccctctgaagaagtcatcgctacagcgcagctcgccactcaactatctccgggctgcgctcaaggccgcccattgcgcctgcttgcagagcacggagtggacaccaagtttttcgagcgaaacgctatcttgctgacgaaactcctcgatgagcgcttcgaaggcgcggcgtccgagcaaggtctgacgacttttctggatgcctttgaagaaaccagtcattgggttctagtcgttcctcttcagcctgagctgctgcccttcaagcggatcaggctcacgacttcggaactggccgaaacctcacttcccggttcgcgattgctcgtggtggaaaatgagcaatgtgttcacttgctacccgaaacgctgccggacaccctcgctgttctgggcgcagggctcgatttgcagtggttggcgtctacgcatctggccgggaaacagatcgcttactggggcgacatggatacctggggcttactgatgctggcgcgagcgagacaccatcaacctgcagtcgaagcactgctaatggaccgggagctgtttgaccagcactccttgggaagcgcggtcgtcgagccagctaaagctcaggaattggctcccgaaggattgatgaccgacgaagctgatttctatcggtatctccttgcacaggagcgggggcgccttgagcaggagtatctgccacgcaggcaagtcgaacaggctattagtaaatggtttggagagtcggtagcgccggctcatcctgagcgaacggcttga

SEQ ID NO: 49562 - DNA, 1386 bp, Fervidicola ferrireducens
atggcctttttcgacaaaattccggaaaatcttttttcagtcttggcttccaaaaataaacacgtctacctggactccctttttataatctttcaggcgtaccaggaggaaatgctcgtaaaaaaggacgacctggtggaaaggctgaaaagttaccttgaaaattcgagctttttgcccgaggaggaagaagacgaggaaaggcccgacgacgcaagcctttcggctctcgcccattttattttgcgaaagcttgaaaaaaccggctggatatacagggactattcggaaaattttatagaagaaattatataccttcacgattactcgataaaaatcctgaatacgctgtatgagcttcaggtggatgaagtgaaggactacggttcgtacgtccattcggcctacaacaacctgaaaaatcaggacctcgaaaggaacgaggacgccatcttcgccctcagggaagcttacaggaggacgaaagacctcgtaaacgagctcaaaagccttctcaacaacctgaggaaatatcaccagtccctttatgaaaaggaagagataaggcagattttgagggaacacttcgacgagttcagggaacttatcgacgagaggatataccaccccctgaagaccctcgattccatcccccgctacaagacccctatcataaatattttaaactcctggctttacgacaaagaaatgatggacctcttggtgaaatcttccgtgaggcggaggatttacaaggatgaggaagaagcccttgagaaagttacggggatgataaccgagatagtgaacatctactacaatatagatgttttgctaaaagaaattgatagaaagcgggcggcctatactagggcttcggtggagaggatgcagtaccttttgaacgtagatatgagcctaaaaggtaaaatagtggagatactcaaagctctgccggaaaatgaggaaatagtaaccgccgtaaacgaggccgttttgctttttccccaaagctacatcgatgagaattccctttacgtaaagaaatccgagcggaaactgcaggatataaaattcaccaaaataaaagagcccgaggaagaaggcgttttcgaaaaggagatggaaagcttaaaagaaaggctcaagagtgctttgacgcgaaagaaggtctttgagtttttcaaaaagcttttaaaggggaaaagagaagttttctcagaagaaataaaccttgaaaacgatgaggaatttttgatgctcatactgggggtcataatgcacgacgaaaaaggttccttttacgatgtggcctttgaagaaaaaggaagcgtatccgtaaacggctacaggattccccgcatgaagataaaaaagaaggtgtga

SEQ ID NO: 49563 - DNA, 627 bp, Fervidicola ferrireducens
atgtggcatgaggaatacgaaaagatgagcgattcccaaaagcaggaatttgcaaggctggtaaacttcctcctttctcacaattttatcctgagggaaaagtatgacaaaacctcgatgaacgtgaggataaacccggactatagattcgtggaacgctactttgaagtcttttcgggctacctttccatggccggctgggacgtacacaaagacaaccactacggcgtgatttctatattcaacagattcgagcagaaccgcgcaaggctgaaaaaattcgaaaccattgtgctttttgccttaaggcttttgtacgaagaagaaagggaaaaaatttctctgagaaaggacgttatagtgacgaagggcgacgtggtgagaaaacttctcaacaccggggctatagacaggaaaccggcagaaagggatttaaacgaaactttgaatctttttaagaattaccagattatagagaaaatagaaaatccgctggacgactacgaaagcaagataatcatttacccttcgattttgcacgtcctgccatccgaaaagattaatgtgatctatagaatgatagaggaaaaaagtgcggaagaagaaatacccgaaggggaggaataa

SEQ ID NO: 49564 - DNA, 3351 bp, Fervidicola ferrireducens
ttgaagcttttgaaaaaactgctcctcattaactggcactacatcctgcatgaactaatagaattcgacatggtgaatttcctgacggggaaaaacggcgccggaaagtctaccattgtagacgccttgcagcttttaatcctgggggatacgaagggcgattacttcaacaaggccgccaatgaaaggtctaagaggaatttaaaagggtatttacggggtgaaatcgccgacgatacggaaggcggcattctcgttttgagagaagggaacttttccagctacatcgtgggcgagttttgcgataccgcaaagaaaagcactttttgctacggcgttgccttcgatgtttatgaaaacggcgaagtggaccacaggttcttttacctcgagtcgcccttgccggaaaatcacttcatagtagacggaattcctttgaatacaaaggaccttagaacttttctgaatgctaaatacagagaaaaatttaagattttcagctcgaacagggaataccagaaccactttttggcaaagatgggaagcctcaacgaaaaattttacagcgtctttaaaaagtccgtttccttttctcccatagtggagatagaaaaattcatcaccgaatatgtatgcgacgcgccacccaagatcgacatctccgatatgcaggaaaacctgaggtattacaaagagctggagtatcaagctgagcaggtaaaaaagatggtgagagatttagaagatatagaggccctttataatgaataccttacggaggaaaagaagttaaaggagcaggagtacctcataaatagagcccaggtagaaagcacaataaatcaaaggcgggctcttatcgaagaagcgcaaataaaaagagcacttttggaggaaaaggaagggcaaaaagatgaattcgaaagaaaagtaagagaacttgagcgcagaaaagatgacttaatcagggaaaaatacagcatggaagattacaaaaaaagtgagtatctcaaggcccaggaagaaaacatcagggaacagataaaagaaaaagaagctgcgatacatcaagttcaaaagtatttcggcaaggtgctcaaagactgggaaatggttttagatgaaatttcctcttttgccgggaaatttgacgaggagtttttgaaaaccgcaaaggaaaaaataaaaaagcttggcagagttaccgccgagaatatcacttatatcgaagaaggcgaagttgtttcattgaaaaatgatatagccctgtgcaaagacttccttgagaaacttttttactccgtggagcaggaaaaaacaaaactggaagaagatataaggaaaatagaaagtgagatagagaacctcaaaaaaggcattaagccctacgacaggaagctgctggagctaaaaagcgagatagaaaaagccctgaagagcaaatacaagaaagaaataaaagtggaaatcctggcggaccttctggaagtgcgaaataaaaagtggcaaaacgcaattgaggcctaccttcacacccagaaattttacctggtccctgagccggaatgcttcgtggacgccttaaaaatctacgataggttgaaattcgaaaagggcttttacgatataggcctggtggacaccggaaaactcgaaaggcaaaacataaaagtatgggaaaacagcctggcttcagaggtgatgacggaaaacaaatacgcccgacttttcgtggattttctgctgggaagagtcgtgaagtgcgaaaaaattgaggaattgagaaattaccctacagccataacgccggactgcatgctgtatcaaaatttcgtggcaaggcagctaaatccggagaggtggaggtttccctacatcggcaaaaagtccctggaagatatgctgcgagcgaaaacggcagaggtgaaggaaaagaggattttggtcgatgagctgatggatggctacaaaagacttgtccgggttaagaatgtggaacccatcacggaaagcttcatggaaaatctaaagaatgccaaaaaagaaagggaaaagctggatatattatttgaaaagctggaggaaatagaaaagcaaaaatccctgctggaccttacaaaattgatggaaatcgacgaaaggatagaaaaagctgaaaaagagctggaaggagctaaaaatgagataaaaaggctgcaagaggtcatatcggagattacttccgaaataaggcttttggagcaccagaaggaggaaaaagagaaagaacttaaaagccagcttcaggcattagaagagagatttgatctggatttcataaaagatacgggagagcccaggttcctcagggagcttcaggcaagaaaagacccggaaaacataataagggcatttcaaagccaggtggcaaggacgcagagtcaaaaggagaaaaagtggaatttgcttttgaacaagcgctcggattacaaccgggaatacaagatgccatttaacgtatcctcccaggacaacgccgaataccgaaaggaactcgaaaggcttttaagaaccgagcttccggcatacgaagagaaaataagggatgcaaaggaaaaggcgaggatccagttccaggaggacttcataagcaagataaaggaaaacatcgataaggtaaaggagcagatcgacgagcttaattcggccttgaagcagttctccttcgggaaagacaggtacaggttcgaggtaaggcccaacccggcttacagaaaattttacgacatgataatggacagcctccttctcgagggttattctatattttcaatagaatttcaaaaacggcacggagaagctttggaggagcttttcaaccagatagtctatgttggggagtcgaccctttcggcggacgaaagggaaaagctcgagaaaaacatcgaaacgtacaccgactaccggacctaccttactttcgatctcatagttaccgacgaccagggcagggaatcgaggctttcgaggacgcttcttaaaaaatctgggggagaaactcaaacgcccttttatatatcaatcctcgcttccttcggcaggatttaccggctcgggaatatgtacagggaaaataatactctgaggctcataatctttgacgaagccttcagcaaaatggaccaccagcgggtgcaggaaagcataaagcttctgaggagcttcggctttcaggcaattatctcggcacctacagaaaagatccaggatatagcgactttggtggacaggaacctgtgcgtgataaaggccaaggacagcactattgtccgggccttcgacccgagggaagtgatggaagaaggggaataa

SEQ ID NO: 49565 - DNA, 1227 bp, Fervidicola ferrireducens
atggatttgaggaaggcgattgtatcaaggcttcttgacaaatacgaaaaaagcaagagattttcgggagatgccaaaatcgagaaaaggataactttgaacttttccaagggcgaatttcccttctacgacatagaaaatgtagaatccaaggaaaacgtccattttgccttaaaggagctggaaaaagaaggcattatcaagataaagtgggtaaaatttgaagaaggaaacatcgtagaaaaggtgtttttaaacctggaaaatttggaaaaagcttatgatgcggccaggagagagccaaaaggtgcggttttaaaaaagatggcagaaaagcttttcagtttcaaacaagaaataaaaagcgagtggcttttaggatttgccgactttgaaatagaaaggataagggagaaaaaaagctaccccgcataccttccaaaggaagaagaattattcgaccttacgctgatggcgttgagaggaattgagcaaaaaggcgatgaagagattctagaaagggttttcagcaagaggtacctgaaggacagcaagaaatttgagagggtaaagggcaaggtctttgcagtgatgaaagattttcttttcaaagaatacgtcgaagaggacgaagcctttgagaggattggaatcctgaagaccatagaggagatactgttttgcggagcattgaaggctaaggttgcggggagcgctctagatttttctgctttcgtctacggcacttccttaaacagcctttctgtgagagagatggaaattttggatatctcgtgcagcaggataattaccgtcgaaaacaaggctaattactatgaactgataaaggatgcaaactcgaaaggagactttatagtctacctgggaggcttttacagcccttcgaagaggctttttctggaaaagctttattcttttattaaggctaaaaataaaaacgtaaagttttatcactggggagacatagacttaggaggattcaagattttcgtgaaattgaaagagataataaaggaactaaaacctctttacatggacgtggaaacgctggaaaagtacaaagccttcggtgaacctttcagcaaagactacgaaaaaagattgagagagcttcttggaaaaccggagtacagcgagttttacgaagtcatacaggaaatgctgaaactcgggataaggctggaacaggaagcaattctggcgtga

SEQ ID NO: 49566 - DNA, 1446 bp, Mycobacterium brisbanense
gtggaggacaacgcggcgctgtcggccgccgagttactcgaactcaaccgtgacgttcagggctcgcgcgcagttcggctcttggccaccctcaacctcggcgtctacgcgacgctgatggaacgccacctctccggtggcacggtggcagagaccgatctggtggtgcgtctcgagcgtgacctcgccgagctcggcgactccgagcagtccgggctggcgctcatcaagagctgggccagccagggctggctgcaccgggtggccgacacgcgtaccggtcacgagcgcaacgtctgctacctgacgcaggacgcgcgccgggcgctggacttcgtgcgcggagttcgccgcaacgacaccatcgccaccggtggctccatcaacggcatcgcgtcgcggctcaagcaggtcgccgtgcgggtcggcaacgaccccgaccggatccgggccggaatcgaagcggagatcgcggccctgcacgccgagctcgacgagctcgacgccggtctgcggccggaccccgatgtcactgcgatgtacgacgaagcgcgctcgatcgcgatgcagatggaacggctgatcaccgacatcgggctgtacggcagcatgatcgagcaggccaccgccgcgctcgacgatcccatcgacagcaatgccgactaccgcgatcggcaacgccagatgtacgccgactaccaggaggcgtgggattcggcgggccgagactcgcaccgcgcgttcctgcggatgatcaacgatccgcagcagcgtgccgagttcgaggcagacatcgccaccgtcgcggccacgctgcccgagctggacccggcgctgcgcaaggtgatggcgaacttcttcgagctggtcgggcatcagatcgacgaggtggaacgcatccagcagcgctgcgcccagcgggtcaagcggttcaccgccttcggcacgctcgagcagagccgcggcgtggcgcgtcagctcaacgacgccatcggcgctgcccgcgcgctgctgaaggtgtcgctgaccgattcacgcctggacctcgacgtgccgctggcccgtcacaccatcagctcgatcggcgcactgagcttccggatcaacgacctttccgcacccaaacccgcgcagatcgccgagggcgaggtggacctgtccacgttcgctgctctgaccacacaggtcgacgcgcccgccatgtcggagatgatcaacaccgcgctgcggcaggccccggtgtcgctgccggacgcggtgggcatgctggactcggcctatctgggccacgtgatcgtgttgtggtcgtgggcgctcaagcagccgcggccggcgggcgcccccgagcagaccaccgtgagattccagtccctggacggcagggaccgcgagatggaggtaccgcacctcgtgttcaccgaaccggttctggggtcggcgtcgtga

SEQ ID NO: 49567 - DNA, 672 bp, Mycobacterium brisbanense
atgaccgacgcaccgatcgatttcgcgtcactgccggaggtcgaccgcaacggtcgggccccgcagcagcgtcgcccgcgcttcgacggcgatgtcagtgccatgccggaccgggcatgctgggccctgcagcacctactgacgcggcgttacatcagcagcgaatccgacaccgacgtctacagctgggtcaaggagtaccgctccgacctggccgtgcggttgtccgagctcgacctgcagttgcgcatcgtcgacgacatcggcatcgccttcatcgagcaggcccgctacgaatccgccaagggcatcaagctgttacgccgtgagccgctcggcacctacgattcgatcctggcgctgcacctggcgcagatgatgcgtgccggtggcgaccagagcttcctgatcacccgtgacgagatccacggcctgttctccggggtgctcaacgacactgaccgtgacaccgtgacgttcaccgcacgcatcgatgccgccattgcccggctcgccggcctggacatcctgcgtaagacccgcgacgacgaggacagctacaccgtcagccccgtcatcagcgcgatcatgacggcctcggtgatcaccgaactgcagcagcagttcgaggctctgctgaatgggggtgtcgacgatgccgtccgcgactga

SEQ ID NO: 49568 - DNA, 3369 bp, Mycobacterium brisbanense
atgccgtccgcgactgaacagttccacctgtcccggctgcagatcatcaactggggcgtgttcgacggctaccactcgatcccgttcagcgccgggggttcgctgatcgccggcgcctctggcagcggcaaatcttcactgctggacgccatttcgctcggattcctgccgttcaaccgccgcaacttcaacgcctcgggcgacaacaccgcggccgggtccagtgccggtcggcgcaccgtcgacaagtacgtgcgcggcgcgtggggccagcgcagcgacggcggcgccagccaggtgatgtacctgcgcggcgacggcaccacctggtcggcggtggcggtcacctacaccagtaacaccgggcgcaccatcaccggcctggtgctcaagtggctcaccggggaatcccgctccgactcgtcgagccggtatgtcctgggcgacggcgacctcgacatcgaagaagtctgcaaccgttgggccgcagggcgtttcgacacgggggtgttcaaggacgtccggggcgagcgaagcgacggctggcggttcaccaccaaggtggaatcgcagtacctcgcccagctgtacgccgccatcgggattcgcgcctcggatgccgcacagcagctgctcggcaaggccaagtccctgaaaagcgttggcggactggagcagttcgtccgtgagttcatgctcgacgaacccgacagcctggcccggctgccggaggcgctcaagcagatcgacccgctggtggaggcccgcgagctgctggccgtcgcccagcgcaagcgcaagatcctcggcgacatcgaagccatccaggtccgctacacctcggaatcatccgatctgggcatcatcgatctggtggatcagccgttggtgcgggcctacaccgaccatgtgcggctcaagcagtgcccggcccagatcgaaaccctggacgccgaggtcacccagctcgacaacgagcacgccgatctgaccagacagctcaatctggccaaggctgagggggattcgctcaacgcgcagatcaacggcgccagcaccaatgtcggtccgctgcaggcgcaggtggccgcagccgaagcgcaggccgaagaggtctcgcgccggcgcgcagcctacgaggagttggtgggcgcacagggcatcgagccgcccgagtccgccgacgagttctgggaactgcgtgaggaactcacccggcaggccaccgagatgctcggcaagctcgaatggggtcgcgacgcgtcgaccgatgccgagtacgcccagaaatcggcccgcatcgtccgcgacaacgccgccaaggagctcaagcgcgtcgagcacgtgggttcggcgctgcccgagtcggctgtcgcgatgcgcgaaaacatctgcaacgcagtcggtatcgacccggcggagctgccgtacgtcgccgagctgctcgacctgcgccccgaggaggcgcgctggcggttggctgtggagaaggtgctgcggcccgtcggcctgcggctgttggtgccggatcagcattacgccaaggtgctgcgcttcgtcaacgagaccaacatgcgtggccggctggcgctgcatcacgttcgagtcacctccaccggccgcgttgcggaaccgaacaccctggcgggcaagctttttgtcgtcgacccggcgcatccctgcgcagcagaggcggccgacgtgatcgccgccgccggtgaccacatctgcgtcgacacccccgatgtgttctcccggttccgccgagcggtgactgattccgggctgtacaaggactccgaccggttggccatcaaggacgaccgtcggccgatcaagccgtcggagtacatctaccaaggcgatatcgcggccaagctggacgcgctgaccgccgagctgaccgaagcagaggacgccttccagcaggcgcggcacgccgcggatgagattgcgcgccaacggcaacagtggcgggatcaggccgcggcctgcaaggcgatctacgagcagtatccgcagtggagccagatcgacaccgagaccgccgacgggcacgccgaccgactgcgcgagcagtacgagctgctgctggccgacaatcccgacatcgaggccctcagcgcacgggccgaagagatctggagcgacatccagaccctgatgacccgacgcggcgcgatccagacgcgtcgcgacgagctggaccggcggcgtacgcgcctgctcgaactgcaggaccggctcgcgccggcggcggtgtccgaacccatcagtgaactgctgcaccgctacgccgcagagatccccgtcgagctggaactgctcaaccccgagccacaccgcgacgcgctgttcagcgcgatccggcgcgaacgtgaccagctgaccgaaagccgtaggcgttcatacgatgaactggcccgcatcatcaccacgttcgacacctcgttccccgacgcgattccgaacgactcggacgacttcgacgaacgggtgcacgattacgtcgcggtgtgccgccacatcgatgagcgcgagctgcccgacgcctacgagcggatgatgcggctcatcaccgagcaggctcccgacgcgatcctgacgctgcaccgggtggccgaacaggagacccgccggatcagcgaccagatagcccgggtgaacaccgggctgggtgcggtcgaattcaaccgcggcacgcggctgacgctgcgggccaccccgcgcagcctggctgcggtctcggagctgaccgacatcgtcaaggccatttcgcggcgcatcgcagaggtgggcctcggggacaagaaggcgatcctcgatcagtacgcagacatcctgcgactgcgaaatcggctggccagcaacacacctgaggaccgcgcctggacgcgcgatgcgctcgacgtacgcaaccggttcgcgttcgactgcgcggagtgggatgtacgcaccgacgagttgatccgcacccacagcaacgcaggcgacaactccggcggtgagcaggaaaagctgatggcgttctgccttgccggcgcgctgagcttcaacctggccagccctgagagcggggacaacacaccggttttcgcgcagctgatgctcgacgaggcgttctcgaagtccgatccgcagttcgcctcgcaggcgctggaagcgttccgcaagttcggttttcagctggtgatcgtggccaccgtgcagaacgcgaccaccatccagccctacatcgacggcgtggtgatggtgtccaagactgaggcgaccggtcgcaatgcgcgtcctgtcgcgaccgtcgtgaccaagaccatcagcgatttcagcgccctgcggcgggatctgaaggtgcccgagccggtctga

SEQ ID NO: 49569 - DNA, 1431 bp, Mycobacterium canariasense
atgcatgagttactccaactcaaccgcgacgtgcagtccacccgcgcggttcggctgctggccacccagaacctggccatctacgccacgctgatggagcggcacctgctcgacggcgtggtgcccgaaaccgatctggtggtgcggctggaccgcgacctggaggacctcgacgaggtcgagcagacgggactggcgctgatcaagacgtgggccagccagggctggctgcaccgcgtcgtgaagggcgaccgcaacgtctgctatctgacccaggacgcccggcgggcgctggatttcgtccgtggcatgcgccgcaacgacaccatcgcgacgggcggttccatcaacgggatcgcctcccggctcaagcaagtcgccgtccgcgtcgacaacaatccggcacgcatccgggccgggatcgaagccgagatcgcggccctgcaccgcgaactcgaggaactcgacgccgggttgcgtcccgagcccgatgtcacctcgatgtacgacgaagcgcgtgccatcgccctgcagatggaacggctgatcaccgatatcggcttgtacggcaccatgatcgagcaggccaccgccgcgctcgacgacccgatcgagaccaacaccgagtaccgcgaccggcagcggcagatgtacgccgactatcagcaggcctgggagtccgccggccgggattcgcaccgggctttcctgcggatgatcaacgaccccgagcagcggatggcgttcgagggtgatatcgccgcggtggccggcgccctgcccgaactggatccggcgctgcgcaaggtgatggccgggttcttcgaactggtcgggcaccagatcgacgaggtggaacgcatccagcagcgctgcgcgcagcgggtcaagcggttcaccgcgttcggcacgctggaacagagccgcgggatcgcgcggcagctcaacgaggccatcggcgcggcccgggcgctgctcaaggtgtcgctgacggactcccggctggacatcgacgtgccgctggcccggcacaccatcagttcggtgggcgccttgagcttccgcatcaacgatctgtccgcaccgaaaccggcggccgtcgccgagggcgacgtggatctgtccacgttcgcggcgctgaccacccaggtggacgcgcccgcgatgtcggcgatgatcaacaccgcgctgcgccaggccccgctgtccctgcccgatgcggtctccatgctgaacaccccctatctggggcacgtgatcgtgctgtggtcgtgggcactcaagcagcccgccgccggaggcggcaatccagacaccgcccagacgccccaaccggcgcgcgtccggttccattcgctcgacggccgcgaccgcgagatggaggttccgcacctgatgttcaccgaaccgattgcgggagttgcatcgtga

SEQ ID NO: 49570 - DNA, 669 bp, Mycobacterium canariasense
gtgaccgatagcccagttgatttcgcctcactgcccgaggtcgaccgtgccggccgcgccgcggcgcagcagccgcgccgtccccgcttcgagggtgatgtcagcgcgatgcccgaccgtgcctgctgggcgctgcagcacctgctcacccgccggtacatcagcaacgaatccgacagcgatatctacagctggatcaaggagtaccgggccgacctggccgtccggttgtccgaattggacctgcagttgcagatcgccgagggcgtggagatcgcgttcatcgagcaggcccggtacgaatcggcccggggcgtcaagctgctgcgccgggaaccgctgggcacctacgactccatcctggctctgcacctggcgcagatgatgcgcgccgccggtgatgcgagtttcgtcatcagccgcgacgagatccacggcctgttcgccggggtgctcaacgacaccgaccgcgacgccgtcaccttcgcggcgcgcatcgacgcggccgtcgcgcgactggccgggttggagatcctgcgtaagactcgcgacgacgaggacagctacacggtcagcccggtgatcagcgccatcatgacggcctcggtgatcaccgaactacagcagcagttcgaggcactcctgaagggcggcgcaggcgatgagtga

SEQ ID NO: 49571 - DNA, 3363 bp, Mycobacterium canariasense
atgagtgagcagttccacctgtcgcggctgcaggtcatcaactggggcgtgttcgacggctaccacgacatcggcttcgggccagggggcgcgctgatcgcgggcgcctccggcagcggtaaatcctcactgctggacgcgatctcgctgggcttcctgccgttcaaccggcgtaacttcaacgcctccggcgacaacaccgccgccgggtccagcgccggacggcgcaccgtggacaagtacgtgcgcggggcctggggccagcgcagcgacgccggcaccagccaggtgatgtacctgcgcggtgagggcaccacgtggtcggcggtggcggtcacctaccgcagcaacaccggacgcaccatcaccggtctggtactgaaatggctgaccggtgaatcccgttcggattcgtccagccgctacgtgctgggcgacggcgacctgagcatcgaggacgtctgcaaccggtgggcggcggggcgtttcgacgcgggggtgtttcgcggtgggggcgagcgaagcgacggagaataccagggcggctggcggttctccaccaaggtggagtcccagtacctggcccagttgtactccgccatcggcatccggtcatccgatgccgcccagcagctgctcggcaaggccaagtcgctgaaaagcgttggcgggctggaacagttcgtccgtgacttcatgctcgacgaaccggacagcctggcccggctgcccgaggcgctcaagcagatcgacccgttggtggaggcacgcgatctactggcggtcgcccagcgcaagcgcaagatcctcggcgatatcgaggcgatccaggtgcggtacgcctcggagtccagcgatctgggcatcatcgatctggtcgacgcaccgatggtgcgggcctacaccgaccacgtccggctgcgcgaatgcccggcccagatcgaggcgctggacgccaccatcacccagttggacaacgagtacgccgacctgacccgccagctgaatctggccaaggccgagggagattcgctcaacgcccagatcagcggtgccagcgccaacgtgggcccgctgcaggcccaggtcaccgccgccgaatcgcaggccgaggaggtgtcccgccggcgcgccgcgttcgaggagctggtcgtcgcgcagggcatcgacgtgccggacagtgccgacgaattctgggagctgcgcgaggccctcaccaagcaggccaccgagatgctcggaaagctcgagtggggccgcgaggcctcgaccgacgccgaatacgcgcagaagtcggcccgcatcttgcgcgacagcgcagccaaggaactcaagcgggtggagcaggtgggttcggcgctgcccgagttcgccgtcgcgatgcgcgaccacatctgtaccgcgatcggtgtcgatccggccgagttgccgtatgtggcggagcttttcgatctgcgaccggaccagcaacgctggcgggtggcggtcgagaaggtgctgcgcggcgtgggcctgcggctgctggtgcccgaccggcaccacgccaaggtgttgcggttcgtcaacgagaccaacatgcgcggccggctggcgctgcaccacgtccgaaacagtgcgagcggcaccgaaccggagccgaacacgctcgccggcaagctcttcctggtcaacccggaccacgcctgcgccgccgaggcgctcgatgtgatcaccgccgccggtgaccacatctgcgtcgacaccccggacgtgttcgcccggttccgccgcgcggtcaccgattcggggctgtacaaggaatccgaccgggttgccgtcaaggacgaccggcggccgctgaaaccgtcggagtacatctaccagggtgatatcagcgccaagctggaggcgttgcacaccgaactggccgaggccgaggagaccttcgcgcgggcccgcaaggccgccgatgacattgccgcgcaacgccagcagtggcgggaccgggccgcggcgtgcaaggccatctacgagcagttcccgcagtggagccagatcgacatcgagaccgccgacgggcacgccgaccggctgcgcgaacagtacgaactgctgctggccgaccacccggacatcgaagccctgagcgagcgggccgaggaatgctggaccgacatccagacgctgatgacccgccgcggtgcgatccagacccggcgcgacgatctggacagccgccgcacccagctgctggaactggccgaccggctttcgccgcccgcggtctccgagccggcgaccgagctgctgcgccggttcgccgccgaggtgccggtccccctcgagctgctcaaccccgagccgcaccgcgacgcgctgctcgccgcgatccgccgggaacgcgatcagctgaccgaaagccgcaggcgctcttacgaagaactgtcccgcatcatcaccaccttcgacacctcgttcccggacgccatcccgaacgactccgacgacctcgatgagcgggtgcacgattacgtggcggtgtgccggcacatcgacgaacgcgagttgccggacgcctacgaccggatgatgcggttgatcaccgaacaggcccccgacgccatcctcacgctgcaccgggtggccgaacaggagacccggcggatcagcgagcagatcgaccgcgtcaacggcgggttgagcgcggtggagttcaaccgtggcacccggctgacactgcgggccaccccgcgcagcctggccgccgtctccgagctcaccgagatcgtcaaggcgatctcccgccgggtgaccgaggtcagcatgggcgacaagaaggcgatcctggagcagtacgccgatatcctgcggctgcgcaaccggttggccagcaccgcccccgaggaccgtaactggacccgcgacgcgctggacgtgcgcaaccggttcaccttcgactgcgccgaatgggatgtgcgcagcgacgaactgatccgcacgcacagcaatgccggggacaactccggcggcgagcaggagaagctgatggcgttctgtctggccggtgcgttgagcttcaacctggccaatcccgaaagcggggacaacaccccggttttcgcgcagttgatgttggacgaggcgttctccaagtccgatccgcagttcgcttcccaggccctggaggcgttccgcaagttcggcttccagctggtgattgtggccaccgtgcagaatgccaccaccatccagccctatatcgacggggtggtgatggtgtccaagaccgaagccaccgggcgcaacgcccgcccggtcgcgtcggtggccaccaagaccatcaccgatttcaccgccctgcgtaaggatctcgcgtgcgtgtag

SEQ ID NO: 49572 - DNA, 1476 bp, Mycobacterium fortuitum subsp. acetamidolyticum
atgcctgacgcaggcaccggtggcacgtcgctggaccagctctaccagctgcaccgcgaggtggccgattcacgttcgttgcggctgctggtgaccaacaatctggccacctatctgacgctgatggaacgtcacctggaccgcggcgccaagctgaccgagaccgacctggtggtgcggctggaacgcgacctcgccgacctcggctccgagaccgagcagtcgggcctgtcgctcatcaaatattgggccagccagggctggctgcaccgggtcaccgagcagtccggcgacaccgaacgcaatgtctgttacctgacctacgaggcgcgggccgtgctggatttcgcccgccgcatgcgccgggaggacaccatcgccaccggcgggtcgatctcggggatcgccgccgggctgcgccgggtggccggtcaggtcagcaacgatccggatcgcatccgtgcggacatcgaagctgagatggccaagctgcgggatgaattggaggcccttgaacaggggcagcggcccgaacctgatctggtcgacgccgaggacgaggctcgggccatcgcgttgcagatggagcagatcatctccgacatcgggcagtacggcgccatgctgaaccgcatcaccacccggttgctggatgcttccgccgataccgatctcgggtaccgggagcgtcagcgccagctgttcgacgactacgagtcccttttcgcctcccgcgaaagcgcctcgtacacggcgttcacccggatgatccaagatcccgagcagcgggcggcgctggtggccgacatcgaggcggtgacccgggaattgccgcacctcgatcccgacctgcgtgaggtgatgacaggtttcttcagcctggtctctgcgcagaccgccgaggtgggccgcacccggcagcgctgcgcgcgacggatcaagcgattcgtcgcctccggaaccctggagcacagccgcggcgttacccgtcagctcaacgatgccctgaccagtgcccatgacttgctcagcatctcgttggccgacagtcgcatcggcatcgaggtgccgctggtccgtaccgacttcaattcgatcggcgccgtggccttcaagattcgtgacgcgatcccgccgtcacaggccgagacctctcacggcgaggtgaacctgtcggcgttctcggccttggcgtcccaggtggacgccgccgagctggccgatctggtcaacggtgcggtcgccgccggtccactggcactgtccgacgccatcggcatgctggactcggcctacctcggtcatgtgatcgtgttgtggtcctgggctctcaaacagccactgagtcaaccggaatccgatgccgaatccgttcgggtgcgtttccggtcgctggagggtgccgaccgcgaaatcgaaataccccgattggttttcaccgaaccgatccctactgccagtgagagcatgctatga

SEQ ID NO: 49573 - DNA, 765 bp, Mycobacterium fortuitum subsp. acetamidolyticum
atgaccgacaaccccgacacgtcgcccgtcaaagacgggtcgatcgacttcgatgccctaccgagcatcgacgccgtcgaacggtccaccgatcagcggcgtgctccgcgcttcgacggggacgtcagcgagctacccgaccgcgcctgctgggcgctgcagcacctgctgtcgcgccggtacgtcagcaaggacaaccactccgagctgtggtcgtgggtcacccgctaccgcgccgaactcaccgtgcggctgtcggaactcgatatgcgcctgtgcatctcggacgatcacgacatcgcctacgtcgagcaggcggattacgaatcgcagtggcggcgccggttgctgcggcgggagaccctcaacacctacgactcgatcctggccctgcacctggccaagctcatgcgcgcggcgtcccgtgacgagaacgtgctgatcagccgtgacgagatccatgagctgttcgccggggtgaacaacgacaccgatcgggataccgcctcgttcgacaagcggatcgacaacgcgatcgagcggctcaccgacatcgagatgctcacgcgcaaccgcgaggacgaggacagtttcacgatcagcccggtggtcaacgcgatcatgacggcctcgatgatcaccgagttgcagcagcagttcgagcagctcaagcgcgtcgcgaacggcacggcctacgatcccggtgcttccgacgatcccgatgtttccgaacggctcgaagacgaagtggacgcccatggctga

SEQ ID NO: 49574 - DNA, 3363 bp, Mycobacterium fortuitum subsp. acetamidolyticum
atggctgaaccgaccaaccagttctcgctgtcgcgcctgcaggtcatcaactggggcgtgttcgacggatatcactcgatcccgttcagccggcacggcaccctgatcaccggctcctcgggcagtggtaaatcctcactgctggacgcgatttcgctggccttcttgccgtcgcaccgccgcaacttcaatgcctccggtgacaccaccgcagcgggctcgggcaccggcaagcgcactgtcgacaaatacgtccgcggcgcgtggggcgagcgccgcgagggcaccagccgccagatcatgtacctgcgcgggaccggtccggcctggtcggccgtcgcggtcacctacagcgaccgcaccggacgctcggtcaccgggctggtgctcaaatggctggccgccgagaagacctcggacccgggcagccgctactacctgatcgatgccgaccgcgacatcttcggtctgtgtaaccgctgggcgtccaacgggtatgacgccgcggtgttccgtgatgacggctggaccggcggccgcagcgagagccagtacctggcccagctctactccagcatcggtatccgggcctccgaggcggcccagcagctactcggcaaggccaagtcgctgaaaagcgttggtggccttgagcagttcgtccgcgagttcatgctcgacgagccggccagcctcagcggtgtggaagaggcgctggagcagatcaacccgctggtcgaggcccgcggactgctcgacgtggcccggcgcaaacgcaacaccctcggcaatatcgctgcggtacaagcgcgttatgccgatgaggccgccaagttcggggtgatcgacaccatcgacaacgcgatgatccgcgattacgtcgaccatgtgcggctggcccaggccggtccggagatcaccaatctcgacgatcagatcacccagctcggcgcccagcgcgacgagttcgggacccagcagcgtcagctgaagaacgagcacaacgcacttatggcccagatcaactctgtggcggtagatctggttcccctgcagcaacggctgaccgaggccgagcggatcagcgaggaagtgtcgcgccgccgcagcgcctacgaggagaaggtgacctcactgggactgaccccgccggacaacggcgaggaattctggtcgctgcgtgagactttgatggaggaagccgaccggctgcatcgcgagctgttcaccggcaaccaaccctacgtggaggcctcggcgaaggaagtccgggcccgcgaggcgcgcgagagcgtcgaagccgagctggaacgggtgcagcggctgggttccccgctgcccagaaccgagtatgagatgcgggcccgcatcgcccgagcgctcgacatctccgaacgcgatctggtctacgtggccgagctcatggagctcaagcccgacgagtcgcggtggcggctggccgtcgaaaaggtattgcgcggggcgggattacgcctgctggtccccgacgcctacatggaacgggcactgcgcttcgtcaacgagaacgacatgcgcggccggatccagctgcagcacgtccagcacggcgcgcaactgcgtaccccggctccgggcacactggccaccaaactgcagctggccgacccgacgcacgacagcgccgtggaggcgctcaacgtgatcgccgccgtcggcgattacgtgtgtgtcgacgggccgggggagttcaccgaacaatcccgcgcggtcaccgaccaggggctgcgcaaggacagcggccggctctcgatcaaggatgaccggtcacggctgcggccctcggactacatcttcctgggtggcaccgcggccaaagtcgaggcgctgcaggatgatctgaccgccgcgcaggatgtctaccaggtggcgcgaacggcccgtgagcggctggatgagcaccgcggccagctgcaatcccgggaacgggcctgccgggcgttgtgcgaccagtacatgcagtggagcgacatcgacaccgattcggtcgacgcgatgctcgagcggctgcagggcgaacacgatctgctggtctcggacaatcccgacgctgagcggctgcaacagcgggccgacgattgttgggagcgcgtcgagaaggtcatccagcagatcggttcgctcaacgaacgcgagaccaccctggaccgcaggcgcacggcgctgctggagttgagcgagaccctgaccgagcggctcgggaccagcgagttcccgtcgcatgcccgggacaccatcgacggctatgccgccgacatcgcgctgaacctggagttgctcgagcccgagccctaccgcaacgaactggtccgcgtcatcggccgtgagcgggaccgattgcgggcggaccgcaaccgttcgcacgacgagttggccggcatcatggccgcctacgacagctcgttccccgacgcgatccccaatgacagcgatgtcttcgatgagcgtgtgcacgactacgtggcgttgtgccgccggatcgacgagcgggaattgcccgatgcctacgagcgcatgcagcggctgatcaccgagcaggcgcccggagcgattctgaacctgcacatgatcgccgacaacgaggcacgtcggatcaccgagcagatcgctcgcgtcaacacgggtctgggcgcggtggagttcaaccgcggcacccggttgaccctgcacgccgggacccggcatctggctgccgtcgacgaactgaacgagaaggcccagcgcatctcgtcccgggtgtcgttggtgagcttcggcgatgagaccgcgatgttcgagcagtacaccgacatcctgcagttgcgaaagctgttggcgggcaacacccccgaggaccgccaatggacccgcgatgccctcgacgtgcgtaaccggtttgtgctgtattgcgaggagcgcgacgccgagaccggcgaggtcattcggacctacagcaactccggtgacaattccggcggtgagcaggagaagctcatggccttctgtctggccggtgcgctgagcttcaacctggccagcccggacagcgacgatacccggccgttgttcgcccagctcatgttggacgaggcgttctccaagtcggatccccagttcgctcagcaggcactgtcggccttccgcaagttcggcttccagttggtgatcgtgtcgaccgtgcagaacagcacgacgatccagccctacatcgacaacgtggtgatggtgtccaagtcggacgcgtcggcacccaacgcccggcccgtcgcgtcggtcacgtcagcgtcgatctcagaattcgccgatctgcgaaagacctcgggtgaggcggttgcgagcgcctag

SEQ ID NO: 49575 - DNA, 1509 bp, Mycobacterium thermoresistibile
ttggaccgtctgatcggagcagaaggagacatcgaggaccaattggtggacgacaacagggggatgtcggcggccgatttgctcggcatgaaccgtgagctgcagggatcgcgcgccatccggttgctggccacccacaacctggggctgtacgccaccttgatggaacgccacctcaacgagggtgtggtcgccgagaccgaactggtgatccggctggagcgggatctcgccgagctggacgaccacccggacgggcaatccggtctggcgctgatcaagaactgggccagccagggctggctgcaccgcatcgtcgacgaccgcaccgggcagaacgtctgctatctgacccaggacgcccgccgggcgctggacttcctgcgcgggctgcgtcgcaacgacaccatcgccaccggagggtcgatcaacggcatcgcggcccggctcaagcaggttgcgatccgggtcggcggcgatccggcccggatccgcaaggacatcgaggcccagatcgccgcgctgcaggccgagctggaggcgctcgaggccggcgaacgcccggagcccgacgtcaccgactgctacgacgaggcccgcgcgatcgcactgcagatggagcgcatcatcaccgacatcggccagtacgggacgatgatcgagcaggccaccgccgcgctggacgaacccatcgacagcaacgccgcctaccgggaacgccagcgtcggttgtacgccgactatcaggccgcctgggagagctcgggccgcgacagccaccgcgcgttcctgcggatggtcaacgatccggaccagcgggccgagttcgaggccgatgtggcggcggtcgccgaggcgctgccggcgctggacccgcagctgcgcaaggtgatgaccgggttcttcgagctggtcggccatcagatcgacgaggtggagcgcatccagcagcgctgcgcccagcgaatcaaacggttcaccgccttcggcacgctggagcagagccgcggcatcgcgcgccagctcaacgaggcgatcgccgcggcccgcgccctgttgaagacgtcgctggccgactcccggctggacatcgaggtgccgctgacccggcacgcaatcagttccgtcggcgcgttgagcttcaagatcagtgacctgtcggtgcccaaaccggccgaaccggccggcggtgaggtcgacctgagcagcttcgcggcgctgaccacccaggtggacgccaccgcgatggccgagcggctcaacaccgagctggcctccggtccggtgtcgctgccgcaggcggtggacctggtcgacggcgccgggcagggcgcctatctggggcatgtcatcgtgctgtggtcgtgggcgctcaaacagcccggcgtggacggggactgcccgtcgacctgggtgcggttccggtccccggacggccgtgaccgcgccatcgaggttccgaatctgatgttcaccgaaccgatcactctggctggagctctctcgtga

SEQ ID NO: 49576 - DNA, 771 bp, Mycobacterium thermoresistibile; identical to SEQ ID NO: 42757

SEQ ID NO: 49577 - DNA, 3390 bp, Mycobacterium thermoresistibile; identical to SEQ ID NO: 42758

SEQ ID NO: 49578 - DNA, 1509 bp, Tsukamurella tyrosinosolvens
atggcgcagtcggccgcgcagctgtacgccgcgttcacggacaacgccgacaacgacgtcgcgctccgcctgctccgctccccccacgccgtcgcctacctggcgctgatggcggcgcggctgggcacgggccccgtcgacgcggaggagctgggcgacgcgctcaccgtcgacctgcagtccctgcagagccacttcaccgagcgcgcgcgtccggtccccgccggcccggacgtcctggacagctgggtgaaggccggatacgtctcgcgcacgctcgacgacacggaccgcgaagtcatccagctcacccgcggcgccacgacggccctcggccaggtgcaggccgtctcgctggaccgcaacgtcgcgaccgagaccgcgctggagctggtcacggcgcggctgtcggcggtcgcggtcaccgtgagcgccgatcccgacgaccacctccgcgccctggaccagcagatcgccgagctcacccaacgtcgcgaggccctgcgccagggcctcatccccgagtacgaccgcgacaaggtggtcgacgacctcaagatcgtcagctccctcgccgagcgcatgcccgccgacatcctcggctacggcgagaagctccgcgaacacacccgcgccctcctcacccacggcctcgacgcctccgactccagcgaggccgaggcctacgccaagaccctgcagcgcctcttcgacggacacgacgagctcgcgaacacgcccgagggcaaggccttcgacgccttctacacgctgctctcggaccaccgactgcgccggcagctcgagacctccgtcgcctccgtcgtgcacgaggtcgagctccccgacgacctgcgcgactccctcaccggcttcctcgaccgcatgtggatgcaggtccagcgcgtcgacgagatccgcggccaggtctatcgccgcatcaacacgttcgtcaaggacggcgacttcctgcagtaccagtcgctgcgcgcccgcatcaccgaggcgcagcgcgccgcggtcgacgccttcgacgccgcctccgcgggccgcgacaccggcctcgccgtccccatgtcggccgtcgacaccagctccgtcggcgcgctgcggttccacgacggcgtcgtcaccctgccgcccgaggtgcgcgagacctccggcgagttcaccatcgaccccgcccgcctcgtcggccgggaggcgatcgactgggacgcgctcgccgccgccgtcaacgaggccgtcggcacatccgacggtgcgaccctcaccgacgttctcgccgccatcgacgcgccccgcgcaggcgacgtggtcggcgtctggtcgctcggcgcgcggtacggcaccgtcgatgaggaccgcctggtcaccgtcgtcgcgcacacccagcgcgggccccgcgagatgacggtgccgcacgtcgcgttcgccgccgcgctcccgcccctgacccccgcctcggccgcgcccgagcccaccacgctcttcgagcaggaggcctga

SEQ ID NO: 49579 - DNA, 798 bp, Tsukamurella tyrosinosolvens
atgaccgacgagacgcagctcgacgacacgctggacgtacccgccgacgagggcctgccagagatcgacctcgccgacttcagcatcgccgacgacgaggccgtgaagtcgctccgcggcgccgacaccgcgccgcggttcgacggcgacacctccgccctgccgaactcggtctgctacgcgctacaggaactgatcgcggcgccgcacgtctcgtcgcggtcgaagaactgggcggtgatcgaggccgaggagacgctgctgcgcagccggctctccgaactgaacctcctgctggagatcaaccgcgagaccaagcacgccttcacccgccaggtcagcgagaacgacccgcggcagcggaatctgctgcgcgcgcagagcctctcgctcgccgggtcggtgctggcgctgttcctgcgcctcaagcacctgtccagcccggacgagaccgcggtcgtggagcggcaggagatgatcgaccacctgctgaccttccgacccgcgcgcgacaccgacgaggcgggcttcgtgaagaaggccgacgcggcgatcaaccagctggagacccgccgcctgatccgccgagtcggcaccagcgaccggtacgccgtgcactcggtgatcgcctccctgctcacccccgagcaggtggacctgtacaccgccgcgtaccgcgacctggccagcaccgatcaggacctgggcgaggcggcggcccccgtcgacggagcagaagagcaggacggcgaggacagcaccgtcgaacccgagaacgagacgcaggagcagcagtga

SEQ ID NO: 49580 - DNA, 3363 bp, Tsukamurella tyrosinosolvens
gtgacccgcaagcatctcggccagtaccgcctgacccgcctgcaggtggtcaactggggcacgttcgacggctacaaggacttccccatcgacgagcggggcgtgatcctcaccggcccgtcgggctcgggcaagagctcgctgatggacgcgcattcggtggtgctgctgcccacgtacgaccagtccttcaacgcctccgccgacatgactgccaagggcgccaagcgcgccgcccgctccatggcggactacgtccgcggcgcgtggtcggtcaacgacgacgagcaccagcagtccaaggtgcagtacctgcgcggcgattcggccacgtggtcggcggtcgcggcgacctacgacaacggcgcgggcaacgtcacgacggccgtcgccgtgaagtggtttccgggcagcggcaccgacggcgcctcgctcaagtcctggtaccagatccactccggcgctttcgatctcctggacctgcaggagtgggcgaccgccggcttcgacacccggggctggcgcgcgcggcacagtggcgtcgagtccttcgacacccaggccgcctaccaggacgcgctgcgccgccgggtcggcatcggcacctccagcgccgcgctggcgctgctcggcaaggccaaggcgatgaagaacgtcggcgacctcgacgccttcatccgcacctacatgctggaccggccgcagacctacgcccgcgccgagcgcctcgtggagaacttcacccagctcgacgaggcctaccgggccgcggcccgcgccgaggcgcaggagaaggtgctgcggccgatgccggaggcctacgagacgtaccgctccgccaccgtcggcacgacccgcgccgccgacctgctcggcgcgcccgtgcggtcctacctgcgcgggcacaagctgcggctgctgcaggagcagatggaccggatcgagggcgagcgcgccggcatggacgcgcagatcgcccgctgggaggacagggccgaggagcgcaagatgcgctacaacgacctgctgcaccggctccggcaggaacagggcgaggtcggggtgctcgaggccgagctgcagtcgcgcgagctgcagacccaagcccgccaacgcgcgtacgagcggttcgccgccgccgtggagaagctgggcgagcgcgcgccggagtcggcggaggagttcgccgcgctgcgcgagcaggtccccggcatccgcgaccgcgccaccgaggccgccgaggccctcgccgggcgcgtgcattccgcctacacggacgagtcggacgcgcggcgcgccgtcgaatccgtcgacgacgagctgtccgtgctcgaccgccgcgcctcgctgctgccgcccgccctgctcgaccagcgcgacgtgatcgcccgcgccaccggcgttcccgccgaggacctgccgtacgcggcggagctgatcgacgtcgagcccgacgagcaggcgacgtgggccggcgccgccgagcgcgtgctgcggccgctggccacgacgctgctcgtgcccgccgagcaccagcgcgcggtcgccgactacgtcaacgcgaaccgggtgcacggcgtgctcacctaccaggtggtcgacggtgccgaccccacgcgcccggaacccggctccctggccaccaagctgaccgtggacaccgcgagcgcggccggacggtggctggccggcgcggtcgcgcgcgccgcacggcacacgtgcgtggactcccccgacgagctggagaagcacgagcaggccgtcaccgccgagggcctcgtcaagaacgcgggcggccggttccgcaaggacgaccgccgcgccgtcgccgaccgctcgcagtgggtgctcggcaccaacaccggcagcaagcgcgaggcgctgcagcgccgccgtgacgagctggccgccgtccacgccaaggccgccgaggcgtcggcgaccctgcgcgacgacctcgccgagcacaaggccgtcgccgacagcgcggccggtgtgctcgggtacacgtcgtgggccgagctcgaccactgggcggcgaaggccgaggccgaggagctggccgaccggatctccgacgcccgctccggcaacgccgacctcggggagctggagctgcaggccgacaacgcctacggcgagctggccgaggcgcagacccgcatcggcgcgctgaccgagaccatgaaccgcgccggcacggagttcgacgacctgctggccgagttcgagaagatcgacgccgagagcgcgccgaagctcgcggagcccgacgaggacttcctcgccaccgcgctgtggcacctgctcacggccgacgaggcgaagccgcgccggctcaccctcgacaccttcggcgaggtccgcgccgacctccgcgccgagttggagcgccagcaggcggcggccaccgccgaacgggacgccgccgaggcccggatcgtccgcaccgcggagcagttcctgcgcgagtggccggacgcctcgaccgagctgtccgccgatgtggcgtccgccccggacttcgtggccgtgcacgagaacctcgtcgcgcacgggctcgcggcggccacggagaagttccggcggctcatcacgaccgacgtcagccactcggtgtcgaacctgttcaaggaggtcgacgacacgcaccgggccatcacccgcggcatcgccgacgtcaacgcgggcctgcgccgggtggagttcaacgagggcacctacctgcagatcgcctacgccgcccgcccgacgccggaggccacggagttcgcgaaactcgtcgacgacatggtccgcgacgcccccgccgcgaagcgggcggagccggcggcgatggccgcgcaattcaagcggatccgaggcctggtgctgcgcctgaccggcgacgaccccgagtcgcgccggtggacggagaacgtcctcgacgtccgcacgggctactccttctacggcaaggagaacgccgccggcgctgagccggacgcccccgcggtggtcacctaccgcaacaccgccaccaactccggcggcgagcaggagaagctggtcgccttctgcctcgcggcggcgctgagcttcgcgctcggctcacacgggatcgacggatcgaacgagcccgccttcgcgccgctcatgctcgacgaggccttcagcaagtcggatgagcgcttctcggcgcagtcgctgcgggccttcgagcagttcggcttccagctgctcatcgccgccccgatccgcatggtcggcatcgtcgagccgttcatcgggcaggtcatcctcgtcgacaagcaggtcacgcccgacggtgcccgctcggacgcccggtacgcgacgttcggcgagctcaccccgtcgcgctga

SEQ ID NO: 49581 - DNA, 1497 bp, Tsukamurella pulmonis
atgtcggccgcgcagctgtacgccgcgttcacggacaacgccgacaatgacgtcgcgctccgcctgctccgctcccccaacgccgtcgcctacctcgcgctcatggcagcgcgactgggcacggggcccgtcgacgcggaggagctgggggacgcgctcaccgtcgacctgcagtccctcgcgcaccacttcaccgaccgcgcccgtccggtccccgccggccccgatgtcctcgacagctgggtcaaggccgggtacgtctcgcgcacgctcgacgaggacgatcgcgaatccatccagctcacccgcggcgccacgacggcgctcggccaggtgcaggcggtctcgctggaccgcaacgtcgccaccgagaccgcgctcgagctcgtgacggcccgactgtccgcggtggcggtcaccgtcagcgccgatcccgacgatcacctgcgtgctctggacgagcagatcgccgagctcacccgccgccgcgaagccctcaaagccggcctggtccccgagtacgaccgggacaaggtggtcgacgacctcaaaatcgtcagctcgctggccgagcgcatgccggcggacatcctgggctacggcgagaagctgcgcgagcacacgcgcgccctgctcacgcacgggctcgacgcatccgattccagcgaggccgaggcgtacgccaagacgctccagcgcctcttcgacggccacgacgagctcgcgaacaccccggagggcaaggccttcgacgccttctacacgctgctctccgaccatcgcctgcgccgccagctggaaacgtcggtcgcgtccgtcgtcaccgaagtccagttgccggacgacctcagggactccctcaccggcttcctcgaccgcatgtggatgcaggtccagcgggtcgacgagatccgcgggcaggtctaccggcgcatcaacaccttcgtcaaggacggcgacttcctgcagtaccagtcgctgcgcgcccggatcaccgaggcgcagcgggcggcagtcgacgcgttcgacaccacctccgcctcccgcgacaccggcctcgccgtccccatgtccgccgtcgacaccagctccgtcggcgcgctgcgcttccacgacggcatcgtcaccctgccgcccgaggtgcgggagacctccggcgagttcaccatcgaccccgcccgcctcgtcggccgtgaggccatcgactgggacgcgctcgccaccgccgtcaacgaggccgtccgcgcgtccgacggtgcgaccctcaccgagatcctcgcggcgatcgacgcgcctcgcgccggcgacgtggtcggcgtctggtcactcggcgcgcggtacggcaccgtcgacgaggaccgcctggtgacgatcctcgcgcacacggcccgcgggccccgtgagatgacggtgccgcacgtggagttcgccgccgcgctcccgcccctgacccccgcctcggccgcgcccgagccgaccaccctgttcgaggagtga

SEQ ID NO: 49582 - DNA, 792 bp, Tsukamurella pulmonis
gtggacgactccctggacatcgccgccgacgaggccctgcccgagatcgacctcgccgacttcagcatcgcggacgacgaggcggtgaagtcgctgcgcggcgccgacaccgcgccccgcttcgacggcgacacctccgcgctgccgaactcggtctgttacgcgctgcaggagctgatcgccgcgccgcacgtctccgccagatccaagaactgggcggtgatcgaggccgaggagacgctgctgcgcagccggctctccgagctgaacctgctgctggagatcaaccgcgagaccaagcacgccttcacccgccaggtcagcgagaacgacccgcggcagcggaacctgctgcgcgcgcagagcctctcgctcgcggcgtcggtgctggcgctgttcctgcgcctcaagcacctctccagcccggacgagaccgccgtcgtggagcggcaggagatgatcgaccacctgctgaccttccgccccgcccgcgacaccgacgaggccggcttcgtgaagaaggccgatgcggcgatcaaccagctggagacccgccgcctgatccgtcgcgtgggcacgagcgaccggtacgccgtgcactcggtgatcgcctcgctgctcacccccgaacaggtcgacctctacaccgccgcgtaccgcgacctcgccagcaccgatcaggacctcggcgaggccgccgcgcccgtcgacggagcggatgagccggacggcgaggacggcaccgtcgacctcgattccgcacccgagcacgagacgcaggagcagcagtga

SEQ ID NO: 49583 - DNA, 3363 bp, Tsukamurella pulmonis
gtgacccgcaagcatctcggccagtaccgcctcacccgcctgcaggtggtcaactggggcaccttcgacggctacaaggacttccccatcgacgagcggggcgtgatcctcacgggcccgtcgggttccggcaagtcctcgctgatggacgcgcactcggtggtactgctgcccacctacgaccagtccttcaacgcctccgccgacatgacggccaagggcgccaagcgcgccgcccgctccatggcggactacgtgcgcggcgcctggtcggtgaacgacgacgagcaccagcagtccaaggtgcagtacctgcgcggcgagtcggcgacgtggtccgcggtggccgcgacctacgacaacggcgcgggcaacgtcacgaccgccgtcgccgtgaagtggttccccggctccggcaccgatggtgcctcgctcaagtcctggtaccagatccacaccggcgctttcgatctcctcgacctgcagggctgggcgaccgcgggcttcgacacccgcggctggcgcgcgcggcacaccggtgtcgaatccttcgacacacaggccgcctaccaggacgcgctgcgccgccgtgtcggcatcggcacctccagcgccgcgctggcgctgctcggcaaggcgaaggcgatgaagaacgtcggcgacctggacgccttcatccgcacctacatgctcgaccggccgcagacctacgcccgcgcggaacgactggtcgagaacttcacccagctcgacgaggcgtaccgggcggcggcccgcgccgaggcgcaggagaaggtgctgcggcccatgccggaggcctacgccaagtaccgttccgccaccgtcgggaccacccgcgccgccgacctgctgggcgcgcctgtgcggtcctacctgcgcggccacaagctgcgtctgctgcaggagcagatggaccggatcgagggcgagcgcgccggcatggacgggcagatcgctcgctgggaggaccgggccgaggagcgcaagatgcgctacaacgagctgctgcaccggctccggcaggagcagggcgaggtcggtgtgctcgaggccgagctgcagtcccgcgagctgcagacccaggcccgccagcgcgcctacgagcggttcgccgcggccgtggagaagctgggcgaacgcgcgccggagtcggcggaggagttcgccgctctgcgcgaacaggttccgggcatccgcgaccgcgcgaccgaagcggccgaggccctcgcgggccgcgtgcactcggcgtacaccgacgagtcggacgcccgccgcgccgtcgagtccgtcgacgacgagctctccgtgctcgaccgccgcgcctccctgctgccgcccgccctgctggatcagcgcgacgcgatcgcccgcgccaccggcgttcccgccgaggaacttccgtacgcggcggagctcatcgacgtccggcccgaggagcaggcgaggtgggccggcgccgccgagcgcgtgctgcgcccgctcgccaccacgctgctcgttccggcggagcaccagcgggccgtcgccgatcacgtcaacgccacccgcgtgcagggcgtcctcacctatcaggtggtcgacggtgccgattccacccgcccggcaccggattccctcgcggccaagctgacggtcgacgagtcgagcgaggccggccggtggctggccggcgcggtcgcccgcgccgcgcgccacacctgcgtggactcccccgccgagctggagcggcacgagcaggccgtcaccccggagggactggtcaagggcgcgggcggccggttccgcaaggacgaccgccgggccgtctccgaccgctcgcagtgggtgctcggcaccaacaccggctccaagcgcgaagcgctgcaacgccgtcgcgacgagctggccgccgtgcacgccaaggccgccgaggcgtccgcgacgctgcgcgacgacctcgccgagcacaaggcagtcgccgacagcgcagccggcgtcctcggctacacgtcgtgggcggagctcgaccactgggcggcgaaggccgaggccgaggagctggccgaccggatctccgacgcccgctcgggcaacgccgatctgggcgagcttgagctgcaggccgacaacgcctacggcgagctggcggaggcgcagacccggatcggcgcactcaccgagaccatgaaccgcgccggcaccgaattcgacgacctactggccgaattcgagaagatcgacggcgagagcgcgcccaggctcacggaggaggacgaggacttcctcgccacggcgctgtggcacctgctcaccgccgacgaggcccgcccccggcggctcaccctggagaccttcggcgagatccgggccgacctgcgggccgagctggagcgccagcagaacgcggcgaccgcggagcgcgacgccgccgaggcgcggatcgtgcgcaccgcggagcagttcctgcgcgaatggccggacgcctccaccgaactcaccgccgacgcggcctccgcgcccgacttcgtcgcggtgcacgagaacctcgtcgcacacgggctcgcagccgcgacggagaagttccggcggctcatcaccaccgacgtgagccactccgtgtcgaacctgttcaaggaggtcgacgacacgcaccgcgccatcacccgcggcatcgccgacgtcaacgccggcctgcgccgggtcgaattcaacgagggcacgtacctgcagatcgcctacgccgcccgccccacgccggaggcgacggagttcgcgaagctggtcgacgacatggtgcgcgacgcccccgccgcgaagcgcgccgagcccgcggcgatggccgcgcagttcaagcggatccgcggactggtgctccggctcaccggcgacgacccggaatcgcggcgctggaccgagaacgtcctcgacgtgcgcaccggctactccttctacggccgggagaacgcggtcggcgccgagccggacgcccccgccgtggtcacctaccgcaacaccgcgacgaactccggtggcgagcaggagaagctggtcgccttctgcctcgcggcggcgctgagcttcgccctcggcagccacgggatcgacggatcgaacgagcccgcgttcgcgccgctcatgctcgacgaggcgttcagcaagtccgacgagcggttctccgcgcagtctctgcgcgccttcgagcagttcggcttccagctgatcatcgccgccccgatccgcatggtcggcatcgtcgagcccttcatcgggcaggtcatcctcgtggacaagcaggtcacgcccgacggtgcccgttccgacgcccggtacgccacgttcggcgagctcgccccgtcgcgctga

SEQ ID NO: 49584 - DNA, 1509 bp, Tsukamurella sunchonensis
atggcgcagtcggctgcgcagctgtacgccgcgttcacggacaacgccgataacgacgtcgcactcaggctcctgcgctctccccacgccgtcgcgtacctggccctgatggcggcacgcctcggcacgggccccgtcgacgcggaggagctgggggacgcgctcaccgtcgacctgcagtccctccagagtcacttcacggaacgggcgcgccccgttcccgccggcccggacgtcctggaccagtgggtcaagcacggcttcgtctcccgcaccctcgacgagaacgaccgcgaggcgatccagctcacccgcggcgccaccaccgcactgggccaggtgcaggccgtctcgctggaccgcaacgtcgccaccgagacggccctcgagctggtcacggcgcggctgtccgcggtggcggtcaccgtcagcgccgaccccgacgatcacctgcgcgccctggacgagcagatcgccgagctcacccggcgccgcgaggcgctccgggcgggcctgatccccgagtacgaccgcgacaaggttgtcgacgacctcaagatcgtcagctcgctcgccgagcgcatgccggccgacatcctcggctacggcgagaaactccgcgagcacacccgcgcactcctcacccacggtctcgacgcctccgagtccagcgaagccgaggcctacgccaagaccctgcagcgcctcttcgacggtcacgacgagctcgcgaacacccccgagggcaaggccttcgacgccttctacacgctgctctccgaccaccgcctgcgtcgccagctcgagacctctgtcgcctcggtggtccacgagatcgacctcccggacgacctcagggactccctcaccggcttcctcgaccgcatgtggatgcaggtccagcgcgtcgacgagatccgcgggcaggtgtaccgccgcatcaacaccttcgtcaaggacggcgatttcctccagtaccagtcgctgcgcgcccggatcaccgaggcacagcgcgcggccgtcgacgccttcgacaccgtctccgcgggccgcgacaccggcctcgccgtcccgatgaccgccgtcgacacgagttccgtcggcgccctgcgcttccacgacggcatcgtcaccctgccgcccgaggtccgcgagacctcgggcgagttcaccatcgacccggcccggctcgtcggccgcgaggccatcgactgggactccctcgcgtccgccatcaacgcgcaggtcggcatgtccgacggtgtcaccctcgccgaggtcctcgccgccatcgaggcaccccgcgcgggcgatgtcgtgggcatctggtcgctcggcgcccggtacggcaccgtcgacgcggaccgtccggtcaccgtcgtcgcgcacacggctcgcgggccccgcgagctgacggtgccgcacgtcgagttcgccgccgcgctcccgcccctgacccccgcctcggccgcgcccgagcccacgacactcttcgagcaggaggcctga

SEQ ID NO: 49585 - DNA, 783 bp, Tsukamurella sunchonensis
atgtcggacgaagccctggacatcgagacgctggacgtgcccgccgacgaggcactccccgagatcgacctcgcggacttcagcatcgccgacgaggacgcgatcaagtccttgcgcggcgccgacaccgcgccccgcttcgacggcgacacgtccgcgctgccgaactcggtctgctacgccctgcaggagctgatcgccgccccccacgtgtccgccaagtcgaagaactgggccgtgatcgaggccgaggagacgctgctccgcagccggctctccgagctgaacctgctgctcgagatcaaccgcgagaccaagcacgccttcacccggcaggtcagcgagaacgatccgcgtcagcgcaatctgctgcgtgcacagagcctttcgctcgccgcgtcggtgctcgccctgttcctgcgactcaagcacctctccagccccgacgagacggccgtcgtcgagcgacaggagatgctcgaccacctgctgaccttccggcccgcgcgcgacaccgacgaggccggcttcgtgaagaaggccgacgccgcgatcaaccaactggagacgcgccgcctgatccgccgcatcggcaccagcgatcggtacgccgtgcactcggtgatcgcctcgctgctcacccccgagcaggtggacctctacaccgccgcataccgcgatctcgccagcaccgaccaggatctgggcgaggcggcagcgcccgtcgacgacgcggacggcgacggcaccgtcgacctcgatgagcaggaggcgcaggcgtga

SEQ ID NO: 49586 - DNA, 3348 bp, Tsukamurella sunchonensis
atgggccagtaccgcttgacccgcctgcaggtggtcaactggggaaccttcgacggctacaaggacttccccatcgacgatcggggcgtgatcctcaccggcccgtcaggttccggcaagtcctcgctgatggatgcgcactcggtcgtgctgctgcccacctacgaccagtccttcaacgcgtcggcggacatgaccgccaagggcgccaagcgcgcggcccgctcgatggcggattacgtgcgcggcgcgtggtcggtgaacgacgacgagcatcagcagtccaaagtccagtacctgcgcggggattcggcgacctggtcggccgtcgccgccacctacgacaacggcgcgggcaacgtgaccaccgccgtcgccgtcaagtggttccccggcagcgggaccgacggggcctccctcaagtcgtggtaccagatccattccggcgcgttcgacctgctcggtctgcaggactgggccacagcgggtttcgacacccgcggatggcgctcgcggcacggcggagtcgagtccttcgacacccaggccgcgtaccaggacgcgctgcgccggcgggtgggcatcggcacttcgagcgctgcgctggcattgctcggcaaggccaaggcgatgaagaacgtcggcgacctcgacgccttcatccgcacctacatgctcgaccggccgcagacctacgcgcgcgcggaacgcctggtggagaacttcacccagctcgacgaggcctatcgcgccgcggcgcgggccgaggcgcaggagaaggtgttgcggcccatgccggaggcctacgagcggtaccggtcggcgaccgtcgggacgacccgcgcggcggacctgctcggcgcccccgtgcggtcctacctgcgcggccacaagctgcggctgctgcaggagcagatggaccgcatcgagggcgagcgcgccggcatggatgcgcagatcgcccgctgggaggaccgggccgaggagcgcaagatgcgctacaacgacctgctgcaccggcttcggcaggagcagggcgaggtcggcgtcctcgaggccgagttgcagtcccgtgagctgcagacccaggcccgcgagcgcgcgtacgagcgcttcgcggccgcggtggagaagctcggcgagcgtgcgccggagtcggcggaggagttcgccgcgctgcgcgaacaggttccgggcatccgcgatcgggcgaccgaggccgctgaggcgctcgcgggtcgcgtgcactccgcgtacacggacgagtcggacgcccgccgcgcggtcgaatccgtcgacgacgagctgtccgtactggaccgccgagcgtccctgctgccgcccgcgctgctggatcagcgcgacgcgatcgcccgcgccaccggcgttcccgccgaggagctgccctacgccgcggagctgatcgacgtgcggcccgcggagcaggcgacgtgggccgcggccgcggagcgcgtcctccggccgctggccaccacgctgctcgtgcctgcggagcaccagcgcgcggtcgccgaccacgtcaacgcggtgcgggtccagggcgtgctcacgtaccaggtggtcgacggtgccgatggcacgcgcccggatccgggctccctggccgagaagctgaccgtcgacgagacctctgcgaccggacggtggctggccggcgcggtggcgcgggccgcccgccacacgtgcgtcgactctcccgccgagctggagcggcacgagcaggccgtgaccccggagggcctggtcaagagcgcgggcggccggttccgcaaggacgaccgccgctccgtcgccgaccgctcgcagtgggtcctcgggaccaacaccggcagcaagcgcgaggccctgcagcgtcgtcgggacgagctggccgcggtgcacgccaaggctgcagacgcgtcggccacgctgcgcgacgacctggccgagcacaaggccgtcgccgacagtgccgcaggcgttctcggttacacctcgtgggccgagctcgaccactgggccgcgaaggccgaggcggaggagctcgcggaccggatctccgacgcgcggtccggcaacgccgatctcggcgagctggagctgcaggccgacaacgcctacggcgagctggccgaggcgcagacccggatcggtggactcaccgagaccatgaaccgcgccggctccgaattcgacgacctcctggccgaattcgagaagatcgacggcgagagcgggccgagactctcggagcccgacgaggacttcctcgccaccgcgctctggcacctgctcacggccgacgaggccaagccccgccggctcaccctcgataccttcggcgaggtccgggccgacctgcgggcggagctggaacgccagcagaacgcggcgaccgccgagcgcgacgccgcggagtcgcggatcgtccgcaccgcggagcagttcctgcgcgagtggccggacgcctccaccgagctgtccgccgaagccgcgtcggcaccggatttcgttgcggtgcacgagaacctcgtggcgcacgggctcgcggccgccacggagaagttccggcggctcatcacgaccgacgtcagccactcggtgtcgaacctgttcaaggaggtcgacgacacgcatcgtgcgatcacccgcggcatcgccgacgtcaacgccgggctgcgccgagtcgagttcaacgagggcacgtacctccagatcgcgtacgccgcccggcccacgccggaggccaccgagttcgcgaagctggtcgacgagatggtccgcgacgccccggccgccaagcgcgccgagcccgcggccatggccgcccagttcaagcggatccgtggcctggtcctgcggctcacgggcgacgaccccgagtcgcgccgctggaccgagaatgtactggacgtccgcaccggatactccttctacggcagggagaacgcggtcggcgccgagccggacgcccccgcggtggtgacctaccgcaacaccgcgacgaactcgggtggcgagcaggagaagctggtcgcgttctgcctcgccgcggcgctgagcttcgcgctgggcagccacggcatcgacggatccaacgagccggcgttcgcgccgctcatgctcgacgaggccttcagcaagtccgacgagcgcttctccgcccagtcgctgcgggccttcgagcagttcggattccagctcatcatcgccgcgccgatccgcatggtcggcatcgtcgaacccttcatcgggcaggtgatcctcgtcgacaagcaggtcacgcccgacggtgcccgctccgacgcccggtacgcgaccttcggcgaactcaccaccacccgctga

SEQ ID NO: 49587 - DNA, 1509 bp, Tsukamurella sunchonensis
atggcgcagtctgctgcgcagctgtacgccgcgttcacggacaacgccgacaacgacgtcgcgctcaggctcctccgttccccccacgccgtcgcctacctcgcgctcatggctgcccggctgggaaccggccccgtcgacgcggaggagctgggggacgcgctcaccgtcgacctgcagtccctccagaaccacttcacggaacgcgcgcgccccgtccccgccggcccggacgtactggaccagtgggtgaagcacggctacgtgtcccgaaccctcgacgaggacgaccgtgaggtcatccagctcacccgcggcgccaccaccgcgctcggccaggtgcaggcggtctcgctggaccgcaacgtcgccaccgagaccgcgctcgagctggtcacggcgcggctctctgcggtcgcggtcaccgtcagcgccgacccggacgatcacctgcgcgccctcgacgagcagatcgccgagctcacccggcgccgcgaggctctgcgccagggcctgatccccgagtacgaccgcgacaaggtggtcgacgacctcaagatcgtcagctccctcgccgagcgcatgcccgccgacatcctcggctacggcgagaagctccgcgagcacacccgcgccctcctcacccacggcctcgacgcctccgagtccagcgaggccgaggcgtacgccaagacgctgcagcgcctcttcgacggccatgacgagctcgcgaacacccccgagggcaaggccttcgacgccttctacacgctgctgtccgaccaccgcctgcgccggcagctcgagacctcggtcgcctcggtcgtccacgagatcgacctcccggacgacctcaaagactccctcaccggcttcctcgaccgcatgtggatgcaagtccagcgcgtcgacgagatccgcgggcaggtgtaccgccgcatcaacaccttcgtcaaggacggcgacttcctccagtaccagtcactgcgcgcccggatcaccgaggcgcagcgcgcggccgtcgacgccttcgacaccgtctccgcgagccgggacaccggcctcgccgtcccgatgaccgccgtcgataccagttccgtcggcgccctgcgcttccacgacggcatcgtcaccctgccgcccgaggtccgcgagacctccggagagttcaccatcgacccggcccggctcgtcggccgcgaggccatcgactgggactccctcgcgtccgccatcaatgcgcaggtcggcatgtccgacggtgccaccctcgccgaggtcctcgccgccatcgaggcgccccgcgcgggcgatgtcgtgggcatctggtcgctcggcgcgcggtacggcaccgtcgacgcggaccgtccggtcaccgtcgtcgcgcacacggcccgcgggccccgcgagctgacggtgccgcacgtcgagttcgccgccgcgctcccgcccctgacccccgcctcggccgcgcccgagcccaccacactcttcgagcaggaggcctga

SEQ ID NO: 49588 - DNA, 783 bp, Tsukamurella sunchonensis
atgtcggacgaagccctggacatcgagacgctggacgtgcccgccgacgacgtacttcccgagatcgacctcgcggacttcagcatcgccgacgaggacgcgatcaagtccctgcgcggcgccgataccgcgccgcgcttcgacggcgacacctcgcagctcccgaactccgtctgctacgccctgcaggagctgatcgctgcgccccacgtgtccgccaagtcgaagaactgggccgtgatcgaggccgaggagacgctgctccgctcccgcctgtcggagctgaacctgctgctcgagatcaaccgcgagaccaagcacgccttcacccggcaggtcagcgagaacgatccgcgacagcgcaatctgctgcgcgcgcagagcctctcgctcgccgcatcggtcctcgcgctgttcctgcggctcaagcacctgtccagcccggacgagacggccgtcgtcgagcggcaggagatgctcgaccaccttctgaccttccgccccgcacgcgacaccgacgaggccggcttcgtgaagaaggccgacgccgcgatcaaccagctggagacacgccgcctgatccgccgcgtgggcaccagcgaccggtacgccgtgcactcggtgatcgcctcgctgctcacccccgagcaggtggacctctacaccgcggcgtaccgcgatctcgccagcaccgaccaggatctgggcgaggccgcggcccccgtcgacggcgcggacggcgacggcaccgtcgacctcgatgaccaggaggcgcaggcgtga

SEQ ID NO: 49589 - DNA, 3375 bp, Tsukamurella sunchonensis
gtgagcgcgcatagcacccgaaagcacttgggccagtaccgcctgacccgcctgcaggtggtcaactggggcaccttcgacggctacaaggacttccccatcgacgagcggggcgtgatcctcaccggcccttccggttccggcaagtcctcgctgatggacgcgcactcggtggtgctgctgcccacctacgaccagtccttcaacgcatcggccgacatgaccgcgaagggcgccaagcgcgccgcccgctccatggcggactacgtgcgcggcgcgtggtcggtcaacgacgacgagcatcagcagtccaaagtccagtacctgcgcggggattcggccacctggtccgcggtcgccgcgacgtacgacaacggcgccggcaacgtgacgaccgccgtcgccgtgaagtggttccccggcagcgggaccgacggtgcctccctcaagtcgtggtaccagatccactccggcgccttcgatctcctcgacctgcaggactgggccacagcgggattcgacacccgcggctggcggtcccggcacagcggcgtcgagtccttcgacacccaggccgcgtaccaggacgcgctccgcaggcgagtgggcatcggcacctcgagcgccgcgctggcgctgctcggcaaggccaaggcgatgaagaacgtcggcgacctcgacgccttcatccgcacctacatgctcgaccggccgcagacctacgcgcgcgcggaacgcctggtggagaacttcacccagctcgacgaggcctaccgggccgcggcgcgggccgaggcgcaggagaaggtcctccggccgatgccggaggcgtacgagcggtaccggtcggccaccgtcgggacgacccgcgcggcggacctgctcggcgcccccgtgcgctcctacctgcgcggccacaagctgcgcctgctgcaggagcagatggaccggatcgagggtgagcgagccggcatggacgcgcagatcgcccgctgggagaaccgcgccgaggagcgcaagatgcggtacaacgacctgctgcaccggctccggcaggagcagggcgaggtcggcgtgctcgaggccgagctgcagtcccgcgagctgcagacccaggcccgccagcgcgcctacgagcgcttcgccgcggcggtggagaagctcggcgagcgtgcgccggaatccgcggaggagttcgccgcgctacgcgaacaggttccgggcatccgcgaccgcgccaccgaggccgccgaggcgctcgcgggtcgggtgcactccgcgtacacggacgaatccgacgcccgtcgcgccgtcgagtctgtcgacgacgagctgtccgtcctggaccgccgcgcgtcgctcctcccgcccgcgctgctggaccagcgcgacgcgatcgcccgcgccaccggcgttcccgccgaggagcttccgtacgccgcggagctgatcgacgtgcggcccgcggagcaggcgacgtgggccgccgcggccgagcgcgtcctgcggccgctcgccaccacgctgctcgtgccggcggagcatcagcgcgccgtcgccgaccacgtcaacgcggtgcgcgtccagggcgtgctcacctaccaggtggtcgacggtgccgacggcacccgcccggatccgggttccctggcggagaagctcgtcgtcgacgagagcaccaagacgggtcgctggctggccggcgccgtggcccgcgccgcccggcacatctgcgtcgactcccccgccgagctggagcggcacgagcaggccgtcaccccggagggcctggtcaagagcgcgggcggacggttccgcaaggacgaccgacgttccgtcgccgaccgctcgcagtgggtcctcggcacgaacaccgggtccaagcgcgaggcactgcagcgtcgtcgcgatgagctggccgcggtgcacgccaaggccgcggacgcatcggccacgctgcgcgacgacctggccgagcacaaggccgtcgccgacagtgccgcaggggttctcggctacacctcgtggggcgaactcgaccactgggcggccaaggccgaggcggaggaactcgcggaccggatctccgacgccaggtccggcaacgccgacctgggcgaactggagctgcaggccgacaacgcctacggcgagctggccgaggcgcagacccgcatcggcggtctcaccgagacgatgaaccgcgccggcaccgaattcgatgacctcctggccgaattcgagaagatcgacggcgagagcgcgccgaagctctcggagcccgacgaggacttcctcgccaccgcactctggcacctgctcacggccgacgaggccaagccgcgccggctcaccctcgataccttcggcgaggtccgcgccgacctgcgtgccgagctggagcgccagcagaacgcggcgaccgccgagcgcgacgccgccgaggcgcggatcgtccgcaccgcggagcagttcctgcgcgagtggccggacgcctcgacggagctgtccgccgaggccgcttccgctccggacttcgttgcggtgcacgagaacctcgtggcgcacggactcgcggcggcgacggagaagttccggcggctcatcaccaccgatgtcagccactccgtgtcgaacctgttcaaggaggtcgacgacacgcaccgcgcgatcacgcgcggcatcgccgatgtcaacgccgggctgcgccgtgtcgagttcaacgagggcacgtacctgcagatcgcgtacgccgcccggcccacgccggaggccaccgagttcgcgaagctggtcgacgagatggtccgcgacgcccccgcggccaagcgcgccgagcccgcggcgatggccgcccagttcaagcggatccgcggcctggtgctgcgcctcacgggcgacgaccccgagtcgcgccgctggaccgagaacgtgctggacgtccgcaccggatactccttctacggccgggagaacgcggtcggcgccgagcccgatgcacccgcggtagtcacctaccgcaacactgcgacgaactcgggcggcgagcaggagaagctggtcgccttctgcctcgcggcggcgctgagcttcgcgctcgggtcgcacggcatcgacgggtccaacgagccggccttcgcgccgctcatgctcgacgaggccttcagcaagtccgacgagcgcttctccgcgcagtcgctgcgggccttcgagcagttcggtttccagctcatcatcgccgcgccgatccgcatggtcggcatcgtcgagcccttcatcgggcaggtgatcctcgtcgacaagcaggtcactcccgacggtgcccgctccgacgcccggtacgccaccttcggcgagctcacgaccagccgctga

SEQ ID NO: 49590 - DNA, 1497 bp, Tsukamurella pulmonis
atgtcggccgcgcagctgtacgccgcgttcacggacaacgccgacaacgacgtcgcgctccgcctgctccgctcccccaacgccgtcgcctacctcgcgctcatggcagctcgactgggcacggggcccgtcgacgcggaggagctgggggacgcgctcaccgtcgacctgcagtccctcgcgcaccacttcaccgaccgcgcccgtccggtccccgccggccccgatgtcctcgacagctgggtcaaggccgggtacgtctcgcgcacactcgacgaggacgatcgcgaatccatccagctcacccgcggcgccacgacggcgctcggccaggtgcaggcggtctcgctggaccgcaacgtcgccaccgagaccgcgctcgagctcgtgacggcccgactgtccgcggtggcggtcaccgtcagcgccgatcccgacgatcacctgcgtgctctggacgagcagatcgccgagctcacccgccgccgcgaagccctcaaagccggcctggtccccgagtacgaccgggacaaggtggtcgacgacctcaaaatcgtcagctcgctggccgagcgcatgccggcggacatcctgggctacggcgagaagctgcgcgagcacacgcgcgccctgctcacgcacgggctcgacgcctccgattccagcgaggccgaggcgtacgccaagacgctccagcgcctcttcgacggccacgacgagctcgcgaacaccccggagggcaaggccttcgacgccttctacacgctgctctccgaccatcgcctgcgccgccagctggaaacgtcggtcgcgtccgtcgtcaccgaagtccagttgccggacgacctcagggactccctcaccggcttcctcgaccgcatgtggatgcaggtccagcgggtcgacgagatccgcgggcaggtctaccggcgcatcaacaccttcgtcaaggacggcgacttcctgcagtaccagtcgctgcgcgcccggatcaccgaggcgcagcgggcggcagtcgacgcgttcgacaccacctccgcctcccgcgacaccggcctcgccgtccccatgtccgccgtcgacaccagctccgtcggcgcgctgcgcttccacgacggcatcgtcaccctgccgcccgaggtgcgggagacctccggcgagttcaccatcgaccccgcccgcctcgtcggccgtgaggccatcgactgggacgcgctcgccaccgccgtcaacgaggccgtccgcgcgtccgacggtgcgaccctcaccgagatcctcgcggcgatcgacgcgcctcgcgccggcgacgtggtcggcgtctggtcgctcggcgcgcggtacggcaccgtcgacgaggaccgcctggtgacgatcctcgcgcacacggcccgcgggccccgtgagatgacggtgccgcacgtggagttcgccgccgcgctcccgcccctgacccccgcctcggccgcgcccgagccgaccaccctgttcgaggagtga

SEQ ID NO: 49591 - DNA, 792 bp, Tsukamurella pulmonis
gtggacgactccctggacatcgccgccgacgaggccctgcccgagatcgacctcgccgacttcagcatcgcggacgacgaggcggtgaagtcgctgcgcggcgccgacaccgcgccccgcttcgacggcgacacctccgcgctgccgaactcggtctgttacgcgctgcaggagctgatcgccgcgccgcacgtctccgccagatccaagaactgggcggtgatcgaggccgaggagacgctgctgcgcagccggctctccgagctgaacctgctgctggagatcaaccgcgagaccaagcacgccttcacccgccaggtcagcgagaacgacccgcggcagcggaacctgctgcgcgcgcagagcctctcgctcgcggcgtcggtgctggcgctgttcctgcgcctcaagcacctctccagcccggacgaggccgccgtcgtggagcggcaggagatgatcgaccacctgctgaccttccgccccgcccgcgacaccgacgaggccggcttcgtgaagaaggccgatgcggcgatcaaccagctggagacccgccgcctgatccgtcgcgtgggcacgagcgaccggtacgccgtgcactcggtgatcgcctcgctgctcacccccgaacaggtcgacctctacaccgccgcgtaccgcgacctcgccagcaccgatcaggacctcggcgaggccgccgcgcccgtcgacggagcggatgagccggacggcgaggacggcaccgtcgacctcgattccgcacccgagcacgagacgcaggagcagcagtga

SEQ ID NO: 49592 - DNA, 3363 bp, Tsukamurella pulmonis
gtgacccgcaagcatctcggccagtaccgcctcacccgcctgcaggtggtcaactggggcaccttcgacgggtacaaggacttccccatcgacgagcggggcgtgatcctcacgggcccgtcgggttccggcaagtcctcgctgatggacgcgcactcggtggtgctgctgcccacctacgaccagtcgttcaacgcctccgccgacatgacggccaagggcgccaagcgcgccgcccgctcgatggcggattacgtgcgcggcgcgtggtcggtcaacgacgacgagcaccagcagtccaaggtgcagtacctgcgcggcgagtcggcgacgtggtccgctgtcgccgcgacctacgacaacggcgcgggcaacgtcacgaccgccgtcgccgtgaagtggttccccggctccggcaccgatggtgcctcgctcaagtcctggtaccagatccacaccggcgctttcgatctcctcgacctgcagggctgggcgaccgcgggcttcgacacccgcggctggcgcgcgcggcacaccggtgtcgaatccttcgacacacaggccgcctaccaggacgcgctgcgccgccgtgtcggcatcggcacctccagcgccgcgctggcgctgctcggcaaggcgaaggcgatgaagaacgtcggcgacctggacgccttcatccgcacctacatgctcgaccggccgcagacctacgcccgcgcggaacgactggtcgagaacttcacccagctcgacgaggcgtaccgggcggcggcccgcgccgaggcgcaggagaaggtgctgcggcccatgccggaggcctacgccaagtaccgttccgccaccgtcgggaccacccgcgccgccgacctgctgggcgcgcctgtgcggtcctacctgcgcggccacaagctgcgtctgctgcaggagcagatggaccggatcgagggcgagcgcgccggcatggacgcgcagatcgcacgctgggaggaccgggccgaggagcgcaagatgcgctacaacgagctgctgcaccggctccggcaggagcagggcgaggtcggtgtgctcgaggccgagctgcagtcccgcgagctgcagacccaggcccgccagcgcgcctacgagcggttcgccgcggccgtggagaagctgggcgaacgcgcgccggagtcggcggaggagttcgccgctctgcgcgaacaggttccgggcatccgcgaccgcgcgaccgaagcggccgaggccctcgcgggccgcgtgcactcggcgtacaccgacgagtcggacgcccgccgcgccgtcgagtccgtcgacgacgagctctccgtgctcgaccgccgcgcctccctgctgccgcccgccctgctggatcagcgcgacgcgatcgcccgcgccaccggcgttcccgccgaggaacttccgtacgcggcggagctcatcgacgtccggcccgaggagcaggcgaggtgggccggcgccgccgagcgcgtgctgcgcccgctcgccaccacgctgctcgttccggcggagcaccagcgggccgtcgccgatcacgtcaacgccacccgcgtgcagggcgtcctcacctatcaggtggtcgacggtgccgattccacccgcccggcaccggattccctcgcggccaagctgacggtcgacgagtcgagcgaggccggccggtggctggccggcgcggtcgcccgcgccgcgcgccacacctgcgtggactcccccgccgagctggagcggcacgagcaggccgtcaccccggagggactggtcaagggcgcgggcggccggttccgcaaggacgaccgccgggccgtctccgaccgctcgcagtgggtgctcggcaccaacaccggctccaagcgcgaagcgctgcaacgccgtcgcgacgagctggccgccgtgcacgccaaggccgccgaggcgtccgcgacgctgcgcgacgacctcgccgagcacaaggcagtcgccgacagcgcagccggcgtcctcggctacacgtcgtgggcggagctcgaccactgggcggcgaaggccgaggccgaggagctggccgaccggatctccgacgcccgctcgggcaacgccgatctgggcgagcttgagctgcaggccgacaacgcctacggcgagctggcggaggcgcagacccggatcggcgcactcaccgagaccatgaaccgcgccggcactgaattcgacgacctactggccgaattcgagaagatcgacggcgagagcgcgcccaggctcacggaggaggacgaggacttcctcgccacggcgctgtggcacctgctcaccgccgacgaggcccgcccccggcggctcaccctggagaccttcggcgagatccgggccgacctgcgggccgagctggagcgccagcagaacgcggcgaccgcggagcgcgacgccgccgaggcgcggatcgtgcgcaccgcggagcagttcctgcgcgaatggccggacgcctccaccgaactcaccgccgacgcggcctccgcgcccgacttcgtcgcggtgcacgagaacctcgtcgcacacgggctcgcagccgcgacggagaagttccggcggctcatcaccaccgacgtgagccactccgtgtcgaacctgttcaaggaggtcgacgacacgcaccgcgccatcacccgcggcatcgccgacgtcaacgccggcctgcgccgggtcgaattcaacgagggcacgtacctgcagatcgcctacgccgcccgccccacgccggaggcgacggagttcgcgaagctggtcgacgacatggtgcgcgacgcccccgccgcgaagcgcgccgagcccgcggcgatggccgcgcagttcaagcggatccgcggactggtgctccggctcaccggcgacgacccggaatcgcggcgctggaccgagaacgtcctcgacgtgcgcaccggctactccttctacggccgggagaacgcggtcggcgccgagccggacgcccccgccgtggtcacctaccgcaacaccgcgacgaactccggtggcgagcaggagaagctggtcgccttctgcctcgcggcggcgctgagcttcgccctcggcagccacgggatcgacggatcgaacgagcccgcgttcgcgccgctcatgctcgacgaggcgttcagcaagtccgacgagcggttctccgcgcagtctctgcgcgccttcgagcagttcggcttccagctgatcatcgccgccccgatccgcatggtcggcatcgtcgagcccttcatcgggcaggtcatcctggtggacaagcaggtcacgcccgacggtgcccgttccgacgcccggtacgccacgttcggcgagctcgccccgtcgcgctga

SEQ ID NO: 49593 - DNA, 1485 bp, Tsukamurella tyrosinosolvens
atggcgacagacatcgagagcgaattcgtccgcattgacgcggctctgaagtccccgacgctgcggttgctcgatcgcaagtcggccgccatcgccatgcccatcttcactgccgcgttcccagatgatgcgcaaccaattccggtcgaacgattccacactagggtcgaggcactgctgacagagctgagcgccgccggctactcagttccagcaggcgacgggaagtcgctggccatgcagtgggttcgcgagaggtggctgtaccgcgactcaggccgcggcgaggagacatatcagctcaccggagacgccaaacaagcgatcgaatacgtgacgcggacgacacgtgtgcagctgaatgtctcggcttctcgtatcgaaacgatgcgaagggtgatctccgaggcggcccaggccgcgaatccggaccgggacgagcgcaagcggaggttgtccgaggagatcgcggtcctgcagtccgagctggatcgattagagggcggcggagaggtgccgcgggcttccgaggcggaactggtcgagcagttcgcgaacgttctgcgcgagatagacgggctgccctcagacttccgtcgggtcgaggaagcggtccgagacatgcacaaggtcatcaccaagaagttccgtgaggaggagcacccggtcggtcaggtgctggacgactacctagaccaggcgaagaacttgctcacgtccacgcccgaggggcgtgcgttcgccggtgctcaggagcttctgcgcaatcgagaagtcctctcgcgcctgcgcgccgatctcgagagcatcctcgccagcgaatgggctgtcggtctcctccccgaggagcagcgacagctccgctcggcggtcgatgtgatccgccgcggtcgtgacgacgtgatcgaccagcggcaacggctctctgcgacgctgcgtgagcacatcgagaactatgaccacatcaagaaccgcgaactagatcgggtccttagggggctcgaccgggaaatgcgtacgtggatgcagtcggcacgaccgcgggaccacgtcgacgtcgagctcatgcctccggcgctggacgtcgcgggactgaagatccgcaccttcgacccggacagcgagcgcgcaccagaaccgcttgaggacgtgtccgccgacgccccgccctcgctatcgctcgacgagatccgcaagaagggcggcccgtcgctgcggcaactgcaggagaagatcgatgctcggctgctggccggcgagatcgccacggcggctgccctgttcaaccagttgccgcacgacctccgtcggcccgtagaggttctcgggctgctgcacctgctcgcgcgaatcgacgctcacgtggactcgggcgcccgcgaacccgtcttcacgatccggcccgacgggagcacgcgtcggctgcggatgccagtcgttacggtgcgtgacgcccgcgacgcggaggttgacgctcatgactga

SEQ ID NO: 49594 - DNA, 765 bp, Tsukamurella tyrosinosolvens
gtgacgcccgcgacgcggaggttgacgctcatgactgatgtcatcgacgacgaggaccgctccgacgacgccgaagttccagtgcctgaggatgacctcggctcggtgctattcgacggtgacgccggcactctctacgaggagcagcgccggtgcctccacgccctactcaagcaccgctacatctcggccgaccgtcatcccgaccactgggaggtcctgctaaaggacgaaggcgtgatcaagagccgcctcaacgacctgtttctggacctgcaagtcgagcgcgagccgcggatcgcgttcaagcggcaggccgtcagcgaaaccggcgatccgttgccgtcgctgttgcgcgacgtctcccacacaaaggaggagacgatcgtgatgttggctcttaggcagagattcttcgcccagcgccaggagggcgacgacgcagtattcgtcgaccggcagacgctgctcgacgagatcggcgagcgctggcccgagcacctcacgaacaggtccgcagcactcaagaaagcggagacgggcatcgacggcctcgcccgggcaggcgtacttctaagaaccgccgacccggaccggttccagatttcgccgatcatcgaggtcctgctcccggtggagaagttgcacgagctgctggtctggctcatgacccagaacggcgcagccccggtaggcgacgagtccgaggtcgacgatggacttgacctcgatggatctggggacgagcaggaggaagacgcatga

SEQ ID NO: 49595 - DNA, 3381 bp, Tsukamurella tyrosinosolvens
atgacctctgatcaaatgaccatcccgatcgtcgcggcgtccgatcacgcgcagtggcgtttggagacgatgcaattggtgaactggggcggcttccatgggcaccacatcatcgcggtgtctcccggctccactttgctgaccggtgggtccggggtcggcaagtcgacgctcctggacgcctggatcgcgttgatgatgccctccgacatcgatttcaacggtgcctcgaacgacaccggcagcgggcgtgcccgatcggcggagaagcgcaacctgcccagctacctgcgcggcaagcaggacaagaagggcgacggggcggggcgtacccgcgaactggtcctgcggggcgggaacggcgagcccgtgtggggtgccctggcgtgcagcttcgcaaacgacaacggccgcaagtacaccgtgatgcgcgccttcttcgtgagggcgggaggcacagtcaacagcgacgtagccacgacctttgccgcggtcgacggggccatcgacatcaaccgcctcgagccgctggcgtcgaccaggttcgacaagcgcatcctgaagaacgcgatccccggcctggtgaccttcaacaccttccgggagttcgaggagagcctgcacaccaggctgggcatcggggacggcgacggcggccgcaagccgatgcggcttctcgccagggtgcaggccgggatgcagatcaaccgggtcgatgacctctacaaaaccatggtcctcgagaggccggtcacctacgaggtcgccgacgacgcgttgtctcacttcgccgacctgaaggctgcctatctcaagatggtcgacgaggcggacaaggtgaaggcccttcagcggcttcccgacctgcagcgcgatctcgccgacgcgcgcgcccgagcggatctcatcagccgatttggggctgatcaggacggcccgactccattccgactgtggaggctgcgcacggagcgaggactcctcgccaccgccgtgaccgagaaccggcgcgagcacgacgaagcgacggccacgcacacgaaggccgagtcggacgaagccaaatacgagcgacagctcgcacagatcgcgaaggacaagcatgacaacggcggtggtgcgatcgacgagcgccgccgcgatatcgcccggctccagcagagccgcgacggtgcctacatcgcgaacatcaagttccagacgcggaccgaggccatcgacctcgtcgtgcctgagacttccggtcagtttgcggaggcacaggcagaggccgccgacttcctcgctggcttcgatgagcgtgagcaagcgctccaggccgaggaacagtcgatccaggaagagcagctcgcgccgcttgctactcggcagcgcgaccttctggacgagcggaagtccctccaggggcgcaccggaatggtcccgagacggctgcacgaggctcgagtgcggatggcgcaggcggccgggctcgattctatggacgaccttccgttcgtcgccgagctcatcgacgtcctgcccgatgaggattattggcgcaaggccgtggaaaccacgctgggtggtatcgctcgaacggtcctggttgaccggaacacccgcaatcggctctcgaccgcgatcgatggggtcgcgatcaggccgcgcatccggttccaggcagtgactctcgcggcgcacgaggactggcgcggcgatccggactacgtctccggcaagctcgcgttcaaggattcgccgttctctcgctgggtccaggaccgcgtgagcgacgacggcattgaccaccgctgcgtccccgacgcggcgtcgctcgacggccgcgggccgcgcgtcaccccggcaggacagacccgcgacggcgataggggcgcccacggagagtccggcgacggaaacgtcatcggcttctcaaacgagcgccgtctcgccgacatcgaacagcttcttaccgagctggacccccagatcgccgaggttcgcggccggatcgctgacgtcaaggcgtgcctgggcgacctccggcggcagaaggaggcccacgtctacgtccaagacaccgcctgggccgacatcgaccatctcgggatcgaccggcggatcgacgagctcgaggacgagatccggcggctccgccaggcatacgagatcctcgacgcgctggagcgggaggaggagcgtgtcaaaccgctcttccagcaggcgaacggggaccgggtcctgtcagccaacctcctgcagaagttgcagatgcggtggggtgagctcgtctcacagcaggacgacgtcctgaaagccatcgacgtcatcgacgagaagcagacggcgaccgtgacggatgagcaacaggtctacctcgactcgctcttcgcgggcaactgggacgccgtaagcctggactcgctcgagtcgaacatgcacgccatgcgcaaacgtctgagggaagaggctgaggcggcgcggaagagcgggcgcagcgccacgagcgcgatggagagcatgttcgaccagtacaaggcccgctggaccgagaataatcttggcacctccgtcgactccgccgacggttaccgcgagatcctcgaccggatccagtccgaaggactccacgagcggcgcggcaaatggcgccgcgagttcaccgcctggtcgagcgacgaccttctgcggctcaacgaggccttcgacaccgccctggaggacatcgaggaccggctgcgcccggtcaatcgaattcttgatgctctcccgttcggcggcaaaggtttcctgcagatcgacctgcgccgactcccgaaggagaacctgaccaggttccgtcggagcctgcgtgagctgtcctccggactcgccctcgagctcaccgatctgcagatcgagacccggttcaagcggctcagcgagttcatggaccagatcagtgtcccggaagggcacaccaagccctccacggcggaacgagatcgctacctcgatgtgcgccagcacgtcgtcatcacggcccggtgcctcaacgagcacggcggtgaagtcgcgacctacgactacatcgcaggaaagtccggcggcgagatgcaggagctggtcgcttttatcgtcggctccgcgctgcgctaccagcttggtgacgaagaacggtcccgaccacggttcgccccggtgttcctcgacgaggcgttcattaaggccgacagcgagttcgcgggccgcgcagtcaaggcctggcagaacctcgggttccagcttatcgtcggcgcgccgttcgacaaggtgacgtcattggaggagtctatggacctcctcctacacgtgagcaagaactcccggggtttctcctacgtgaccgacctccccgacgacgacggaggggccgcgtga

SEQ ID NO: 49596 - DNA, 1215 bp, Tsukamurella tyrosinosolvens
gtgaagacgccgagcgcggtgaccttggatatcgagcgccggctgcgcagccgctggcacaccgacgtggcaggcacggaaaacgcttttccgcacgccttcccgctcggtcgtccagcggccgcagagctgcgcgccgactacgccgccgttcacgccctgaccgtcgagtggcaggactgggcgagtggtagcggtgttgagctcacctacgagaaccgcgtcgccaagggcggcagtacgcaggcgatcccctcgcacgcccgggtcgagagcatcgaccacgcatcgtcgatcgtcgcaggggagtggcccgatcgtctgacgcgcggccgcgagcgggtcgccgtgttgcgcgcgcgctatccgggtgtcgtcgacgtcgaccgggtcctacggctactcgattcgtatacggcggtcgacttcgaactgctcctcaccgtcgtcgactggtacctcgaggacccgtcccgtgccgcactcggcgtcacgccccgccaggttccgatccccggcgtccatgcgaagtggctccaaagccatcgagccggcgtgcaggcgctcagcggcctcgatgacctcgggctcctgcccgcgcacccacctcgcatccacttcacctacctcgatcccgaccaccgaggcggtggcaaccgagttcacgactcggccaccgtaggtgacgtgtttgaaccggactatctgccgcaggttgtcgtcatttcggagaacaaggacaccgcgatccacttcccgtctctgccgggtggcatctcggtcgaaggggtaggcaaggggggcaggacgcccgccgccttcccgtggatccgggacgctcgctacgtcgtgtattggggagatatcgaccgcgacgggtacgagattctggacggctaccgcgaggccttcgaccgtgatatcgactcgatcatgatggacccggagacgtacgaagcgtacgaggagttcggcacggacctggaccaacacgggcgagcactcgaggccggaattccgcggccggtgggccggcttcgcgacggcgagcggtccgtgtacctcagtatccttagcgacgggcacataggtcgtcgtagagttgagcaggagcggatcccgctcgaccgggctttggacgccgtgacgcggatctgcggacagtctccctgcagtggcgacaatgcgcctgaatccggaacgatcaggagatga

SEQ ID NO: 49597 - DNA, 1509 bp, Tsukamurella tyrosinosolvens
atggcgcagtcggccgcgcagctgtacgccgcgttcacggacaacgccgacaacgacgtcgcgctccgcctcctgcgctccccccatgccgtcgcctacctggcgctgatggcggcgcggctcggcacgggccccgtcgacgcggaggagctgggcgacgcgctcaccgtcgacctgcagtccctccagagccacttcaccgagcgcgcgcgtccggtccccgccggcccggacgtcctggacagctgggtgaaggccgggtacgtctcgcgcacgctcgacgacacggaccgcgaggtcatccagctcacccgcggcgccacgacggccctcggccaggtgcaggccgtctcgctggaccgcaacgtcgcgaccgagaccgcgctggagctggtcacggcgcggctgtcggcggtcgcggtcaccgtgagcgccgatcccgacgaccacctccgtgccctggaccagcagatcgccgagctcacccaacgtcgcgaggccctgcgccagggcctcatccccgagtacgaccgcgacaaggtggtcgacgacctcaagatcgtcagctccctcgccgagcgcatgcccgccgacatcctcggctacggcgagaagctccgcgaacacacccgcgccctcctcacccacggcctcgacgcctccgactccagcgaggccgaggcctacgccaagaccctgcagcgcctcttcgacggccacgacgagctcgcgaacacgcccgagggcaaggccttcgacgccttctacacactgctctccgaccaccgcctgcgccggcagctcgagacctccgtcgcctccgtcgtgcacgaggtcgagctccccgacgacctgcgcgactccctcaccggcttcctcgaccgcatgtggatgcaggtccagcgcgtcgacgagatccgcggccaggtctatcgccgcatcaacacgttcgtcaaggacggcgacttcctgcagtaccagtcgctgcgcgcccgcatcaccgaggcgcagcgcgcggccgtcgacgccttcgacgccgcctccgccggccgcgacaccggcctggccgtccccatgtcggccgtcgacaccagctccgtcggcgccctgcgcttccacgacggcgtcgtcaccctgccgcccgaggtgcgcgagacctccggcgagttcaccatcgaccccgcccgcctcgtcggtcgggaggcgatcgactgggacgcgctcgccgccgccgtcaacgaggccgtcggcacgtccgacggtgcgaccctcaccgacgttctcgccgccatcgacgcgccccgcgccggcgacgtggtcggcgtctggtcgctcggcgcgcggtacggcaccgtcgatgaggaccgcctggtcaccgtcgtcgcgcacacccagcgcgggccccgcgagatgacggtgccgcacgtcgcgttcgccgccgcgctcccgcccctgacccccgcctcggccgcgcccgagcccaccacgctcttcgagcaggaggcctga

SEQ ID NO: 49598 - DNA, 798 bp, Tsukamurella tyrosinosolvens
atgaccgacgagacgcagctcgacgacacgctggacatgcccgccgacgagggcctgcccgagatcgacctcgccgacttcagcatcgccgacgacgaggccgtgaagtcgctccgcggcgccgacaccgcgccgcggttcgacggcgacacctccgccctgccgaactcggtctgctacgcgctacaggaactgatcgcggcgccgcacgtctcgtcgcggtcgaagaactgggcggtgatcgaggccgaggagacgctgctgcgcagccggctctccgaactgaacctcctgctggagatcaaccgcgagaccaagcacgccttcacccgccaggtcagcgagaacgacccgcggcagcggaatctgctgcgcgcgcagagcctctcgctcgccgggtcggtgctggcgctgttcctgcgcctcaagcacctgtccagcccggacgagaccgcggtcgtggagcggcaggagatgatcgaccacctgctgaccttccgacccgcgcgcgacaccgacgaggcgggcttcgtgaagaaggccgacgcggcgatcaaccagctggagacccgccgcctgatccgccgagtcggcaccagcgaccggtacgccgtgcactcggtgatcgcctccctgctcacccccgagcaggtggacctgtacaccgccgcctaccgcgacctggccagcaccgatcaggacctgggcgaggcggcggcccccgtcgacggagcagaagagcaggacggcgaggacagcaccgtcgaacccgagaacgagacgcaggagcagcagtga

SEQ ID NO: 49599 - DNA, 3363 bp, Tsukamurella tyrosinosolvens
gtgacccgcaagcatctcggccagtaccgcctgacccgcctgcaggtggtcaactggggcacgttcgacggctacaaggacttccccatcgacgagcggggcgtgatcctcaccggcccgtcgggctcgggcaagagctcgctgatggacgcgcattcggtggtgctgctgcccacgtacgaccagtccttcaacgcctccgccgacatgacggccaagggcgccaagcgcgccgcccgctccatggcggattacgtccgcggcgcgtggtcggtcaacgacgacgagcaccagcagtccaaggtgcagtacctgcgcggcgattcggccacgtggtcggcggtcgcggcgacctacgacaacggcgcgggcaacgtcacgacggccgtcgcggtgaagtggttcccgggcagcggcaccgacggcgcatcgctcaagtcctggtaccagatccactccggcgctttcgatctcctggacctgcaggagtgggcgaccgccggcttcgacacccggggctggcgcgcgcggcacagtggcgtcgagtccttcgacacccaggccgcctaccaggacgcgctgcgccgccgggtcggcatcggcacctccagcgccgcgctggcgctgctcggcaaggccaaggcgatgaagaacgtcggcgacctcgacgccttcatccgcacctacatgctggaccggccgcagacctacgcccgcgccgagcgcctcgtggagaacttcacccagctcgacgaggcctaccgggccgcggcccgcgccgaggcgcaggagaaggtgctgcggccgatgccggaggcctacgagaagtaccgctccgccaccgtcggcacgacgcgcgcggccgacctgctcggcgcgcccgtgcggtcctacctgcgcgggcacaagctgcggctgctgcaggagcagatggaccggatcgagggcgagcgcgccggcatggacgcgcagatcgcccgctgggaggacagggccgaggagcgcaagatgcgctacaacgacctgctgcaccggctccggcaggaacagggcgaggtcggggtgctcgaggccgagctgcagtcgcgcgagctgcagacccaagcccgccaacgcgcgtacgagcggttcgccgccgccgtggagaagctgggcgagcgcgcgccggagtcggcggaggagttcgccgcgctgcgcgagcaggtccccggcatccgcgaccgcgccaccgaggccgccgaggccctcgccgggcgcgtgcattccgcctacacggacgagtcggacgcgcggcgcgccgtcgaatccgtcgacgacgagctgtccgtgctcgaccgccgcgcctcactgctgccgcccgccctgctcgaccagcgcgacgtgatcgcccgcgccaccggcgttcccgccgaggacctgccgtacgcggcggagctgatcgacgtcgagcccgacgagcaggcgacgtgggccggcgccgccgagcgcgtgctgcggccgctggccacgacgctgctcgtgcccgccgagcaccagcgcgcggtcgccgactacgtcaacgcgaaccgggtgcacggcgtgctcacctaccaggtggtcgacggtgccgaccccacgcgcccggaacccggctccctggccaccaagctgaccgtggacaccgcgagcgcggccggacggtggctggccggcgcggtcgcccgcgccgcacggcacacgtgtgtggactcccccgacgagctggagaagcacgagcaggccgtcaccgccgagggcctcgtcaagaacgcgggcggccggttccgcaaggacgaccgccgcgccgtcgccgaccgctcgcagtgggtgctcggcaccaacaccggcagcaagcgcgaggcgctgcagcgccgccgtgacgagctggccgccgtccacgccaaggccgccgaggcgtcggcgaccctgcgcgacgacctcgccgagcacaaggccgtcgccgacagcgcggccggcgtgctcgggtacacctcgtgggccgagctcgaccactgggcggcgaaggccgaggcagaggagctggccgaccggatctccgacgcccgctccggcaacgccgacctcggggagctggagctgcaggcggacaacgcctacggcgagctggccgaggcgcagacccgcatcggcgcgctgaccgagaccatgaaccgcgccggcacggagttcgacgacctgctggccgagttcgagaagatcgacgccgagagcgcgccgaagctcgcggagcccgatgaggacttcctcgccaccgcgctgtggcacctgctcaccgccgacgaggcgaagccgcgccggctcaccctcgacaccttcggcgaggtccgcgccgacctccgcgccgagttggagcgccagcaggcggcggccaccgccgaacgggacgccgccgaggcccggatcgtccgcaccgcggagcagttcctgcgcgagtggccggacgcctcgaccgagctgtccgccgatgtggcgtccgccccggacttcgtggccgtgcacgagaacctcgtcgcgcacgggctcgcggcggccacggagaagttccggcggctcatcacgaccgacgtcagccactcggtgtcgaacctgttcaaggaggtcgacgacacgcaccgggccatcacccgcggcatcgccgacgtcaacgcgggcctgcgccgggtggagttcaacgagggcacctacctgcagatcgcctacgccgcccgcccgacgccggaggccacggagttcgcgaaactcgtcgacgacatggtccgcgacgcccccgccgcgaagcgggcggagccggcggcgatggccgcgcagttcaagcggatccgaggcctggtgctgcgcctgaccggcgacgaccccgagtcgcgccggtggacggagaacgtcctcgacgtccgcacgggctactccttctacggcaaggagaacgccgtcggcgctgagccggacgcccccgcggtggtcacctaccgcaacaccgccaccaattccggcggcgagcaggagaagctggtcgccttctgcctcgcggcggcgctgagcttcgcgctcggctcacacgggatcgacggatcgaacgagcccgccttcgcgccgctcatgctcgacgaggccttcagcaagtcggacgagcgcttctccgcgcagtcgctgcgggccttcgagcagttcggcttccagctgttgatcgccgccccgatccggatggtcggcatcgtcgagccgttcatcgggcaggtcatcctcgtcgacaagcaggtcacgcccgacggtgcccgctcggacgcccggtacgcgacgttcggcgagctcgccccgtcgcgctga

SEQ ID NO: 49600 - DNA, 1500 bp, Bifidobacterium bifidum
atggaacggctgaggccggtctatgaaaccggcgtgctgagactgctgctccgtcagaattcgatgatgtacgtggcgctgctccgcgcggccttcgacccgttgaccggcgagctgccccgtgagaccctggaggaaagcttctcgcaaagcctgtcccggctcgtcgactccggcgaataccagctcagggaggatcagaccatcgcggacgcctcccggcgcatcctcgccgacctgacccgtgagggcgatgacgattacgcatggctcgccaactcgcatgacgccgcatcgcaccggttcctgtaccgtctcaccgcccgcgcccatcgtgcgatcgaggcgctgtcgcggcttgaggatgactcccgcacgctgtcgggcgcgcaggcgaactcgatcatcatggagatcgagcatgcgcgcatgcagcttaccgccgaccccggcgagcgcgtggcgttgctcaaccgggagatcaaggcgcgcaaacacgagatacgtcagatacgccacggtcagcggcaggcggcgctcaccgaatcgcaggtcgaggacgtgattgcagtgattcacaacacgctgcgcggcgtgcccatagacctgcgtgaactcgtgctgaccgaacgggacaacggtgacgcgctccgccgccgaatgcaggcgggcgacatgagcgtcgacgacatcctgacctcgtaccacgacgaataccgcaggtccttcagcgagtccgacagcggaagacgcttcgaggacgcgtttcaggtgatcatcaccgacgagggacggcagcagatcgacgcggccctgcgcgacatcgcccacacgccgtatctggccggcgagtccggcgtcctgctcgatcaggtgcgtgccgagctttcgcgcatctatgacggcatcgaggcggtgcgtcgccagatgcgcgtatccgacgaggcgatcagccgtctggtgcgacagcagaccgatacccgataccgcacgatgctcggcaagctcaaccgtctgtatgcccacgtcaacgccgacgcgaaggcgcatcagggcgacgatgcgagaccgtaccggaccgataccgcggccggcaggttccctccgctgccgtcgcgccccgcgcgcccgatggtacgaacgaccaccccgggattgtccgtcccgcagacaccgggcgatgcgaccgcgcccgacctgcgttcgatgatcgacaacgggggaccgcggctgcggcgcatggccgcgctcatcctcgaatcgcccgtctacgcggacgacgggaacggcgccatcgacatcgtcgccagcttcaacgggctgccgaaagccgagcggaaggaaagcgagctcgtcggtttcctgggagagctcggctgcggggacggagccggcgtcgcatggcattgcatatcggcagacggaagcccgagggactggatcaccggcccagtgctcgcacaagaggatgaattgcacgacatcgtgaaggaggactga

SEQ ID NO: 49601 - DNA, 906 bp, Bifidobacterium bifidum
atgggtgcggtggacgtcgaatacgatggcgcggacgcggaaggcgcggtcaacccatacgccctgttcgagggcgacacgggcgacatgaccgccgacgcgcgcatggtggcgatcatgctcaaacgcgagcgctacatcagcggacgtttctatgacctggcgctcgacaaccgcgcggcggtcatccgttcgctcaacaacgacctgctcgatctggtcgtcaacgagcactaccgcgtcatgtacgccaccgcggtgagcgggccggacatgacgctgcgcgcgctcaagacccgtgcgagcctcaaacgtgaggaggcggcgctgctggcgttcctgcgcatccgcgtgctcgaatacgagaacgcccacgtcgcgccggacgaatggctggtcagcttcgaggagatccgagcggcgctcgccaccggcgccgggtacctcgcctcgcgcaacgacgaggagggcgtgctcaggcaggtgggtgcgatcgtgtccgtcatgtgcacgtacggctatctcaggcagctcgacgatgacgagacgatgtaccgcatcacgccgctggtgccggtggtgctggaccgtcagctggcggacagctggctcgcagtcgcggaccgggacgacgatggcgagccggccggtgacatggccccggccggctcgcggtctgcagccggcgatacgtcgaacgccgatgcgagcggcgccgatgacgatggcgattcggacgatgcgggacccgacgccgaactgttcgaggctccgctgttcgatgatgacgccgatgcggacgccgccgagaacatcaagggcgccgatgatgccaatggcgcgaacgacagcggcattgacgacgagaccgcctcggacggcggcactgcacgggaaggggagtga

SEQ ID NO: 49602 - DNA, 3591 bp, Bifidobacterium bifidum
atgagcggcaaggacatgcagatgatcgccgaccgatggatgatggaaagcaggaggctcgtcaactggggatcctatgagggctaccatgagttccgtccctccacggactcgcaactgccggtgacgttactcgccggcgcgagcgaatccggcaagtcgacgctggtcgacgcgcagatatcgctgctctacccgaccggcacgcccttcaacaaggcgtcgaattcggggcgttcggaacgaagcgactacacctacctgcgcggcatgatcggcgtgggaggctccgatggcgtcgacgaaccgatgtacctgcgcggccgggacgagtccggcgcgccccggtccatatggggcgcgatcgtcgacacctaccgcaacttcaccaccggtcagatactgtcctgcggcaagttcctctatctgatgcccggcgacgggcgcggcgacgtccgacggctgtacctggcatgggacaagccgatcgacccgcgccgcatggacgtgttccgcgagtcgtcgttcacgcccacgcagctgaaatccacgtatccggggtgcgtcaccttcccgaacgccgaggcgttccacacccacatttgggatgtcatgggcctgagcgcggaggcatgccgtctgctggcccgcatccagtcggccgacgccccctcccgccttgacgacatcttcaaacagggcgtgctgggcgtgcccgaggcgctggacctggcccgtgcgaccgtggaggattacgagcgttacgacgcgaacttccgaagcatggaggaaaagaccaggcgcatgggcaagttgcgtgccatcaccgccagctatggcgactacgagtcggcccgtgacgcggtccactcgttcgacgcggtgaacccggccacgaagtccggctcggcgacgatccgagcatgggcgatccgccgcatgatcggcgaggtcagcgaacggcagccgctcgacaggcgtctgcgtgacgagcgacgcagtgaggcgcgggctgccggcaaacgcatcgaaagcctgcgcacccgcatcgacgcggtgcgcgagcgtatgcgaggcctcgacggcggcgacctgacacggctcgacgcggaaatgcggcaggcggaacgcgcgctggcggacatcaccgccggcagacagcgcatcgggcgcatgttcgaggcggccggtgaggagttccccaaagacgagcacgcgtgggacgagcggcgcatcgaggccgtgacgttcatgcgctcatatgagcagcgcaagggactgctggacgacatgcgcaaccagacgtacgccgcgcacgcgtccgtcaagcagacgctgcagcggctgaacgacgattacgaacgccagaaatcgcagcgcacccgcatctcccgccagatggacgagacccgcgccatgctgtgccgggccaccgggctgggcccgagcgaactgccgtacgtcgcggagctcatggacgtgcgcgaggatcaggagcattggcgcctcgccatgaacgccgcatacggatccatggcccagaccatcctcgtcgacaagcgccatgagcgtggattcgcagccaaggtcagcgccatcgacccgcacgccatggcgcggcgcacctggcagttcgtcgacaccgaacgcgggggagccgggagcgggcccggcggcgcgaacacgggtgcgaccggcgggacggacggagaggtgtggctgtcctcgaagctgcgctaccgcgaggattccccgttcgccggctggctgcgcgagcagaccagctccgagcgtctcgacgccctgtgcgtcgacggcatcgacgactccgaccatgccgtgcggcaggtgcaggccgacgggcagatcaaatccggcaaacgcggccagcatggcatcaaggaccgtcagcaggtcatcggattcgtcaacgaaagctatttggcgcaactgcgcacgcgcatccaggacgcgcaacgccaatgcgacgagaccgcgcaatcgtacgcgagcgcgaaggaacaggccgaccgcctgcagcgagagcgcgaactcgccgaccagctcgcatacaccgcatgggagaagatcgacgagaacagcgcgaaggcggcgatcgccgacatcgaacgcaccatcgcctcggtcaggaacaatcccaagctcgccgaactcgacacgttgcaggagtcgctgtccaaggagctcgaccgctcgcagcgccagcgcatcgacatcgaacggcaggccgagctcgccgatcaggcggtgaacgcagcgcaggcatggctcgacgagcatgccgcgcagccgcagccgcaaccgcagacgcggccgctcgacggggaagcggcggacgtttcgccaaaagccgtcacgaacggacggactctcctgacggacgaggtggaggaggcgctcgccgaatcatatgagcagcgtctctccggtctgggggatgcgacgacccgcgcccacatgatcatcggcgcgggggcgccgcagcgtatggctcagggggataccttcgccgaccgtgtcatcgccggcatcggcaaggacctggaggcgcgcgtctccatgctcgaaggtcgtgcggcgtcggcccgcaccgccgtcgaggcgcggatgggcgcctatatcgagatgtatgcgggcggtgacgatacgatcgccgccagcgtggacgactaccggtattaccaggacgagttggaaagcctttcgaagctcgccaccgtcgaagccaccgccgtcgaataccacaactgcctcgacaagctgctgatgagcttcctgaccatcaaacgcgcgatagacaccgacgccggagacatccacgaccagctggaacgcatcaacgcgatgctggacggccagcagttcggcccgcgccacggcagcctgtccctgcacgcggacgtgcggcgccccgagcgcgcgttctggtcggccctgacccgtgtgatcggcaccctcaacgaccgcaaggcggcacagacggacgacgatcttgacggggcccggtgcgcgttcgcgtcctgcgccgcgatgatcgacatgctgcgccgcgagatcgggcagatcagggacgtcaacggcgtgaaaagctacggcgcccgcaacctcgacccgcggtgccgatcctcgttctacgcgctcgtgcgccactcggacgggcaggtcgaacgcatcacctcgaccggcggacggtccggcggcgccctgcaggagctgacctcgttcgtgtacggcgcggcgctgatctacctgctcggcggcggcatggacaacaagctcaagccttcctacacgacgctcttccttgacgaggcgctcatcaaggccgacggccggtatacgcggcgcgcgctgtccgtactgccgagactgggtttccaggtcatcgtctccgcccctgaaagcaagacgggcgagatactggaggtctccaccaaggcatacgtgacccgcaaggaccccgacaccggctacaccacgctgcacgaagccagactggacggcatcgatgagatggacggcgcagacgcgccggaaggtaccgtcgagtcggatgacgccgccgaatag

SEQ ID NO: 49603 - DNA, 1497 bp, Bifidobacterium pseudocatenulatum; identical to SEQ ID NO: 42319

SEQ ID NO: 49604 - DNA, 783 bp, Bifidobacterium pseudocatenulatum; identical to SEQ ID NO: 42320

SEQ ID NO: 49605 - DNA, 3459 bp, Bifidobacterium pseudocatenulatum; identical to SEQ ID NO: 46204

SEQ ID NO: 49606 - DNA, 1203 bp, Bifidobacterium pseudocatenulatum; identical to SEQ ID NO: 46205

SEQ ID NO: 49607 - DNA, 1500 bp, Bifidobacterium bifidum
atggaacggctgaggccggtctatgaaaccggcgtgctgagactgctgctccgtcagaattcgatgatgtacgtggcgctgctccgcgcggccttcgacccgttgaccggcgagctgccccgtgagaccctggaggaaagcttctcgcaaagcctgtcccggctcgtcgactccggcgaataccagctcagggaggatcagaccatcgcggacgcctcccggcgcatcctcgccgacctgacccgtgagggcgatgacgattacgcatggctcgccaactcgcatgacgccgcatcgcaccggttcctgtaccgtctcaccgcccgcgcccatcgtgcgatcgaggcgctgtcgcggcttgaggatgactcccgcacgctgtcgggcgcgcaggcgaactcgatcatcatggagatcgagcatgcgcgcatgcagcttaccgccgaccccggcgagcgcgtggcgttgctcaaccgggagatcaaggcgcgcaaacacgagatacgtcagatacgccacggtcagcggcaggcggcgctcaccgaatcgcaggtcgaggacgtgattgcagtgattcacaacacgctgcgcggcgtgcccatagacctgcgtgaactcgtgctgaccgaacgggacaacggtgacgcgctccgccgccgcatgcaggcgggcgacatgagcgtcgacgacatcctgacctcgtaccacgacgaataccgcaggtccttcagcgaatccgacagcggaagacgcttcgaggacgcgttccaggtgatcatcaccgacgagggacggcagcagatcgatgcggccctgcgcgacatcgcccacacgccgtatctggccggcgagtccggcgtcctgctcgatcaggtgcgtgccgagctttcgcgcatctatgacggcatcgaggcggtgcgtcgccagatgcgcgtatccgacgaggcgatcagccgtctggtgcgacagcagaccgatacccgataccgcacgatgctcggcaagctcaaccgtctgtatgcccacgtcaacgccgacgcgaaggcgcatcagggtgatgatgcgagaccgtaccggaccgataccgcggccggcaggttccctccgctgccgtcgcgccccgcgcgcccgatggtacgaacgaccaccccgggattgtccgtcccgcagacaccgggcgatgcgaccgcgcccgacctgcgttcgatgatcgacaacgggggaccgcggctgcggcgcatggccgcgctcatcctcgaatcgcccgtctacgcggacgacgggaacggcgccatcgacatcgtcgccagcttcaacgggctgccgaaagccgagcggaaggaaagcgagctcgtcggtttcctgggagagctcggctgcggggacggagccggcgtcgcatggcattgcatatcggcagacggaagcccgagggactggatcaccggcccagtgctcgcacaagaggatgaattgcacgacatcgtgaaggaggactga

SEQ ID NO: 49608 - DNA, 906 bp, Bifidobacterium bifidum; identical to SEQ ID NO: 42154

SEQ ID NO: 49609 - DNA, 3585 bp, Bifidobacterium bifidum
atgagcggcaaggacatgcagatgatcgccgaccgatggatgatggaaagcaggaggctcgtcaactggggatcctatgagggctaccatgagttccgtccctccacggactcgcaactgccggtgacgttgctcgccggcgcgagcgaatccggcaagtcgacgctggtcgacgcgcagatatcgctgctctacccgaccggcacgcccttcaacaaggcgtcgaattcggggcgttcggaacgaagcgactacacctacctgcgcggcatgatcggcgtgggaggctccgacggcgtcgacgaaccgatgtacctgcgcggccgggacgagtccggcgtgccccggtccatatggggcgcgatcgtcgacacctaccgaaacttcaccaccggtcagatactgtcctgcggcaagttcctctatctgatgcccggcgacgggcgcggcgacgtccgacggctgtacctggcatgggacaagccgatcgacccgcgccgcatggacgtgttccgcgagtcgccgttcacgcccacgcagctgaaatccacgtatccggggtgcgtcaccttcccgaacgccgaggcgttccacacccacatctgggatgtcatgggcctgagcgcggaggcatgccgtctgctggcccgcatccagtcggccgacgccccctcccgccttgacgacatcttcaaacagggcgtgctgggcgtgcccgaggcgctggacctggcccgtgcgaccgtggaggattacgagcgttatgacgcgaacttccgaagcatggaggaaaagaccagacgcatgggcaagttgcgtgccatcaccgccagctatggcgactacgagtcggcccgtgacgcggtccactcgttcgacgcggtgaacccggccacgaagtccggctcggcgacgatccgagcatgggcgatccgccgcatgatcggcgaggtcaacgaacggcagccgctcgacaggcgtctgcgtgacgagcgacgcagtgaggcgcgggctgccggcaagcgcatcgaaagcctgcgcacccgcatcgacgcggtgcgcgagcgcatgcgaggcctcgacggcggcgacctgacacggctcgacgcggaaatgcggcaggcggaacgcgcgctggcggacatcaccgccggcagacagcgcatcgggcgcatgttcgaggcggccggcgaggagttccccaaagacgagcacgcgtgggacgagcggcgcatcgaggccgtgacgttcatgcgctcatatgagcagcgcaagggactgctggacgacatgcgcaaccagacgtacgccgcgcacgcgtccgtcaagcagacgctgcagcggctgaacgacgattacgaacgccagaaatcgcagcgcacccgcatctcccgccagatggacgagacccgcgccatgctgtgccgggccaccgggctgggcccgagcgaactgccgtacgtcgcggagctcatggacgtgcgcgaggatcaggagcattggcgcctcgccatgaacgccgcatacggatccatggcccagaccatcctcgtcgacaagcgccatgagcgtggattcgcagccaaggtcagcgccatcgacccgcacgccatggcgcggcgcacctggcagttcgtcgacatcgaacgcgggggagccgggaacgggcccggcggcgcgaacacgggtgcgaccggcggaacggccggagaggtgtggctgtcctcgaagctgcgctaccgcgaggattccccgttcgccggctggctgcgcgagcagaccagctccgagcgtctcgacgccctgtgcgtcgacggcatcgacgactccgaccatgccgtgcggcaggtgcaggccgacgggcagatcaaatccggcaaacgcggccagcatggcatcaaggaccgtcagcaggtcatcggattcgtcaacgaaagctatttggcgcaactgcgcacgcgcatccaggacgcgcaacgccaatgcgacgagaccgcgcaatcgtacgcgagcgcgaaggaacaggccgaccgcctgcagcgagagcgcgaactcgccgatcagctcgcatacaccgcatgggagaagatcgacgagaacagcgcgaaggcggcgatcgccgacatcgaacgcaccatcgcctcggtcaggaacaatcccaagctcgccgaactcgacacgttgcaggagtcgctgtccaaggagctcgaccgctcgcagcgccagcgcatcgacatcgaacggcaggccgagctcgccgatcaggcggtgaacgcagcgcagacatggctcgacgagcatgccgcgcagccgcagccgcagacgcggccgctcgacggggaagcggcggacgtttcgccaaaagccgtcacgaacggacggactctcctgacggacgaggtggaggaggcgctcgccgaatcatatgagcagcgtctctccggtctgggggatgcgacgacccgcgcccacatgatcatcggcgcgggggcgccgcagcgtatggctcagggggataccttcgccgaccgtatcatcgccggcatcggcaaggacctggaggcgcgcgtctccatgctcgaaggtcgtgcggcatcggcccgcaccgccgtcgaggcgcggatgggcgcctatatcgagatgtatgcgggcggtgacgatacgatcgccgccagcgtggacgactaccggtattaccaggacgagttggaaagcctttcgaagctcgccaccgtcgaagccaccgccgtcgaataccacaactgcctcgacaagctgctgatgagcttcctgaccatcaaacgcgcgatagacaccgacgccggagacatccacgaccagctggaacgcatcaacgcgatgctggacggccagcagttcggcccgcgccacggcagcctgtccctgcacgcggacgtgcggcgccccgagcgcgcgttctggtcggccctgacccgcgtgatcggcaccctcaacgaccgcaaggcggcacagacggacgacgatcttgacggggcccggtgcgcgttcgcgtcctgcgccgcgatgatcgacatgctgcgccgcgagatcgggcagatcagggacgtcaacggcgtgaaaagctacggcgcccgcaacctcgacccgcggtgccgatcctcgttctacgcgctcgtgcgccactcggacgggcaggtcgaacgcatcacctcgaccggcggacggtccggcggcgccctgcaggagctgacctcgttcgtgtacggcgcggcgctgatctacctgctcggcggcggcatggacaacaagctcaagccttcctacacgacgctcttccttgacgaggcgctcatcaaggccgacggccggtatacgcggcgcgcgctgtccgtactgccgagactgggtttccaagtcatcgtctccgcccctgaaagcaagacgggcgagatactggaggtctccaccaaggcatacgtgacccgcaaggaccccgacaccggctacaccacgctgcacgaagcaagactggacggcatcgatgagatggacggcgcagatgagccggaaggtaccgtcgagtcggatgacgccgccgaatag

SEQ ID NO: 49610 - DNA, 1632 bp, Bifidobacterium longum
gtggccgatgtgatgcgggagctggaacggctacgaccggtgtatgagacgggcgtcctgcggttgctgttgcgccagaacgcgatgctgtacgtgtcgctgctgcgttccacgttcgacccgctcaccggcgagctgccgcgcgagaccgtggaggagcggttcgcgcaaagtctgaacgctctggccgacgccggcgaatatgcgccgcgcgaggaccagaccttcgccgaggccgctcatcagatcctcgccgacctgacccgtgaaggcgaaggcgactacgcctggctcgccaactcgcatgatgcggcctcacaccgattcctctaccgtttgacggcccgcgcccaccgcgccatcgaggcgctgagcaggctcgaagacgaatcacgcgccctgtccggcgcgcaggccaacagcatcatcatggaaatcgagcacgcgcgcatgcagctgaccgccgaccccggcgagcgcatcaaactcctcaaccgtgaaatcaaggaacgcaagcacgagatcaaacgcatccaacagggcaagcagcatgccacgctgagcgaagcccaggtggaggacgtgatcgccgtgatccacaacacgctgcgcggcgtgcccatcgacctgcgcgaactcgtgctcgacgagcgggacaacggcgacgccttgcgccggcgcatgcaggccggcgacatcagcgtggacgagaacctgacccgctaccacgatgaataccgccgctcgttccgcgaatcagacagcggccgccgcttcgaggacgccttccaggtgatcatcaccgacgagggtcgccagcaaatcgacgaagccctgcgcgccatcgccaaaaccccgtatctggccggcgaatccggcgtgctgctcggccagatccgcgacgaactggcccgcatctacgacggcatcgaagccgtgcgccgccagatgcgcgtctccgacgaggcgatcagccggctcgtgcgccagcaaaccgacactcgctaccgtacgatgctcacccgcttgaaccgactgtacgcgcgcctcaacgcggatgcgaaaacccatatgggagacgcctcgcgcccgtacgacacggccacctcggacgcgctgttcgcgccattgccgatgcgcccggccaaatccatgacccgcgccaccgcacccggcctgagcgacctcgccgccgaagccccgcagtcgactccggtggccgatctgcgggacatggtcaacagcggcggcccccgactcctgcgcatggtcagcctcatccggcgcaacccggtgaccgttgacaggtccgatgacaggcccggcgcaaccctcgtggacatcgccgccagcttcaaccggctgcccgaaagcgaacgccgcgaaagcgagatcgtcggcttcctgggcgggctgggagccgtaagcggcaacgccatcgccgacgagccgtccactgacggcgtcggcgtcggggtcgacagcgacatcgccaccgagccggccccggcgcagtgcggcgataccgcgacctggcattgcgtatcgatcgacggcgagccccggaactggatcactagaccggtgctggccgacatggacgagctgagcatcattgtggaggaaggatga

SEQ ID NO: 49611 - DNA, 684 bp, Bifidobacterium longum
atgaccgtggccgaggaacacgaggaacacgaggaacacgaggagcatatggacaacgccaacccgtacgccctgttcgaaggcgacaccggcgacatgccggccgaggcacgcatggccgccatcgccctcaaacgtgaccgctatatcagcgggcccacctacgacaccgtgctcgacaaccgcgacgccgtcgtacgctccctgaacaacgacctgctcgacttggtgatcaacgaacgctaccgcatcatgtacgccacgcccgtggccggcgacgacgtgaccctgcgctcgctcaaaacccgtgtcagcctcaaacgcgaggaggccgcgctgctcgccttcctgcgcatccgcgtcctcgaatacgagaacgtgcacgccgaccccgccgactggctcgtcagctttgaggagatccgcgccgcgctcgccaccggcgccggctatctggccgcccgcaacgatgaggaaggcgtggcaaagcagatcggcgccatcgtctccgcgatgatcacctacgggtatttggtgcgcctggacgacgaagccatgtaccagatcacgccgctcgtgcccgtggtgctcgaccgcgaactggccgacacctggctcgacgtcgcggaacacggcgacggcgacacggaagatgacgatgacgacgagaagggagccgaatga

SEQ ID NO: 49612 - DNA, 3549 bp, Bifidobacterium longum
atgatgcaggcgacagacgtgcagatgatcgcggaccggtggatgctggaatcccgccgactcatcaactggggctcctatgagggctaccacgaattccgcccctccacggaccacaagctgccggtgaccctgctcgccggcgccagcgaatccggcaaatccacgctggtcgacgcgcagatctccctgctgtacccaaccggcacgccgttcaacaaggcctcgaactccggccgctccgaacgcagcgactacacctacctgcgcggcatggtcggcgtgggcagcaccgaaaccggcgacgagccgctctacctgcgcggccgcgacgagaacggcgcaccgcaacccgtgtggggcgccatcgtggacacctatcgcaaccagaccaccggccaggtgctctcctgcgccaaattcctctacctgatgcccggcgacggccgcggcgacgtgcgccgacagtacgtggtctggggcaagcccgtggaccccaggcgcatggaccaataccgtgacgccccgttcacgccggcccagctcaaagccacctaccccgactgcctcacattccccagcgccgaagcgttccacacacacatctggagcgcaatgggcctgagcgaggccgcctgtcgactgctgcacaagatccagtccgccgacgcgccctcccggctcgacgacatcttcaaacaaggcgtgctcggcgtgcccgaagccctggacctggcccgcaccacggtcgaggactacgaacgttacgacgagaacttccacgccatggacgagaagacccgccgcatggacacgctgcgcggcatccaacaggcctacggcgaatacgccgccgcacgcggcaaggcccgcgccttcgaaccggtcaagccggccgtcgacggcacggtaccggccgtgctgcgcgactgggcattggcccgcatgcgcggcgaagtcgccgtccaactgcccgccgaccgcgccgaacaacagaacagcgaggcggaagccaagctgctgcgccgccgaaccgaagacctgcgcacccgtctcgacatgatccgcggccagatgcagggtctggacggcggcaacctgacccgactcgaactcgaactcgaccaggcccgccgcaccctcgaagacgtgcaagccaaccgaacacgaatcgaacaaacgttcgcatccatcggcgagacgctgcccggcgacgaacaggcctggaacgaacgccgcatcaacgccgtgaacttcaaacgcgaatacaacaaacgagacggcgaatgcgaggaagccctcaccgccgccatcaacgcgcgggccggcgcacgcggcgacctcgaacgactgcaacgcgacttcgaccggcaacgctcccagcgcacccgcatctcccagcagatggacgaaacccgcgccatgctctgccgcgccaccggactcacccccgccgaactgccgtacgtggccgaactcatggacgtgaacgaacacgaggaagactggcgtctcgccatgaacgtcgcctacgcgcccatcgcccagaccatcctcgtcgacaagcgccacgaacagggcttcgccgccaaagtcagcaccatcgacccgcgcaccatgccccgacgcacctggcagttcgtggacaccgcacgccactacgacgacaccggcgcgcacgcgaacatactcaccggagaacaggacggcgactggctgtccggcaaactgcgctaccgcgacgactcgcccttcgccgactggctgcgctcgcagacccaggacgaacgattcgacgccctatgcgtcaccgccatcgacgacaccgaccgcaccaaccgtcaggtgcaggccgacggtcagatcaaatccggcgcacgcggccagcacggcaccaaagaccgcgcccaggtcatcggattcgtcaacgaaacctacctcaacgcgctcgcagcgcaggtcgacgccgcccgcaacgcgctcagccaagccgacaccgactacacggccgccaaaacacagtccgataacctccaccgcgaactcgaactggccaaccagctcgcctacacgtcctgggagcgcatcgacatcgccggcgcgcaacggaccatcacggacacgcaggacgccatcgcatccatcaaaaacgatcccaaactcgccgaactcgccaaacagcgcgacgaactgaacgccgaactcgaccgtgtggaacgccagcgcatcgaatccgaccaggccgcggcccgcgccggcagcgccgtcgaagcggcgctcatctggctgcgcgaccatgccgacaccggcacgacggacgccgccggtgccaccgccgacaatgacgatgacgccgcgtccggcccgctgccggacgaagtcacggcggcgctcgccgaatcctacgacaaccgattcgccggactggcggacgccgccatgcgcgcgcacatgatcatcggcgcgggcgcggcaggaacgcaggcgccgggggagagcttccccgaacgcaccatcgccggcatcggcaaggacatggcctcccgcatcaacctgctgaacggccaggccgatgccgcacgcaccggcgtcgaatcgaaaatgagcacctacatcgcgctctacgcggccgacgatgattcgctgaccgccagcgtggaggactaccggtactatctcgacgaactcgccagcctcacccagctggccgcggttgccgccaccgacgccgaataccggcgctgcctcgaacagctgctcaggagcttcctgaccatcaaacgcgccatcgacacggatgccagcgacatccacgaccagcttgaccgcatcaacgccatgctcaaaggccagcagttcggtcccaagcacggcagcctgtccctgcacgcggacgtgcgccgtcccgagcgcaccttctgggcgcagctcatccgcgtcatcggcaccctgaacgattggaaatccgccgacgtcaacgattccgacgcctcgcgcaaggctttcgcggcctgcgcgccgatggtcgggctgctgcgcgccgaactcgcgcaggtcaaggacgcgaacggcgtgaaaagctacggcgcccgcaacctcgacccgcgttgccgctcgtccttctacgccatcgtgcatcatgccgacggcccggatgaacgcatcacctccaccggcggccgttcgggcggcgccttgcaggagctcacctcattcgtatacggcgcggcgctcatctacctgctcggcggcggcctgaccagcgagccctcgtacaccacgctgttcctcgacgaggcgctcatcaaggccgacggccgttacacgcagcgcgccctcacggtgctgccgcgcctcggattccaggtcatcgtctccgccccggaaagcaagaccggcgaaatcctcgaggtctccaccaaggcctacgtgacctacaaggaccctgacaccggcctcacctccttgcgcgaggccgtgctgcatcagaatgacatggacgatgaatcatcgtcggatatattgaaggatgacggggttgccgaatga

SEQ ID NO: 49613 - DNA, 1185 bp, Bifidobacterium longum; identical to SEQ ID NO: 43861

SEQ ID NO: 49614 - DNA, 1479 bp, Sinomonas atrocyanea
atgctggttcgcctcgccgagctcgagtcgctccatcgggggcccgcgtgggccctcacccgctcggccccgtggaccatcgcggcgctgcagaccgcgttctcgcgcaaccgcccgcaggtggagctcgagcagttccacgaggagctcgacgccttcctcgaggacctccgggcgcacgatgccgcgtcgggggctgcccccaccgccggcgcggcgaccggccgctccgtggccgacgactggacccgccgccgcttcctcgcccgccgctcgcacggcggacggatcgtgtacgagctcaccgaggccgcggcccgcgtgctcgcgttcctcgactcgctctcctccgaacggtcgacgctgaccggttcgcgcctcggcacgctcctcggcgacgtggagaggctcgcccgcgagaccaacccggacacgaccgcgaggatcgaggccctcgaggccgagatcgaggagcggctcgagctcgtgcgggccatgcgcgccggggagcagaccggaagcctcgatgacgagacggccttggaggccgccgagaacatcctcgaccttgccgccggcgtcccggccgacttcaagcgcatgcgggaccgcatcgaggactcggtgggccagctgcgcaaccagatcatcgaggagtcgctgaccaggggcgccacgatggcccaggtcctcgaggcggaccggcgcctgcgcgcctccagcgagggccgcaccttccgctcgttcacggcgttcctggacgaccccgagcagcagatgcgcttccgggcggcgatctccgaggtgctctcgcgcgacttcgcggacgggctcggccacgaggagcgcgagaccctgcgccacctcgtcgcggagctgcgcgaggccaatgcccagatccagcgcatctacggcaagctctcggagagcctgaacacctacgtccagagcgacgactaccgccagtccgtccgcctgcgcgacgcgatccgccgcgcggagcaggcggtccgccagcttccgtacgtccgcgaggagtcggggttcgcgcccgcccccgagctgttcggcgccgagttcgagtccctgtccatggtcaagctcttcgacccggacgagctcgcgcccccgcctcggctcgcggatcccatctccttcggccgggaggaccgcgtccggtccgcccgcaccgccaaggcgcgggccgcagccctgcgcgaggcggtggacgtggccctcgaggccgggggaggccgggcgcagctgggcgacatctggtcccagctgcccgccgaggagcagcacatcaactcgatccgcgcgctcctcgcccacctgctcaaccggggggtgggcttcggccgggacgcctgggcgccgctggagttcgaacaggtcgacgggacgcggcgcatggccttcgtcccacaggcggaagtgaccgtggaggcctcggggccctccggggaggagaactga

SEQ ID NO: 49615 - DNA, 906 bp, Sinomonas atrocyanea
atggagacagccgccgaggtcacgccgcgggacgccgaggtcaccgcggaggacgccgaggtcatgccggaggagccattcgtgccgggaaccgccctgtacgacggcgacacgggcgtcctcccgctgcgggtccgccacgtcctggtccgcctcctgaagggtccgtacctcgacggcggccgcgacgagaaggcctggaccacgctcctggaccatgaggacgtgctgcgctcgcggctgtccgagctgttcctccgcctccagatcgaccacgagcgcacgatcgccgtgctgcggccggtggaccccgagctgctgggcacggcgtcgcgcgccacggtcctgcggcagcagcgcgtgctcagccgcgtcgagaccatcctgctgctgcggctccggctgctcctcgaccggcatgccacggcccagaccgagccgacggtcacgctcgaggagctcgccgacgtcgtggcccactaccagcccgccgaggagcaggacgcgctccgcgatgcggacaccgtcaaccgtgcggtcgccaagctccaggcccgccgcctcctcatccccaccccgctcgaggacgtgtacctcatctccaacgccctgccgctcgccctgccgttcgagaacatcggcgacgtcacccggcacctcgaggccgtcgccgcggcggggccctcgcgggacggcggtccggcggacgacgccggccaggccgccctgggcgtggacctcgccgtgggcggggagggagcgggcgagcccgggggccgggaccgccccgacggggccgaccctctcgacgacgacccagaccctgacgccgcggtcccaggggatgacgtcgcggtcccgccgggtggcctcagcggatcggacgagacggaggggctcctgtga

SEQ ID NO: 49616 - DNA, 3462 bp, Sinomonas atrocyanea
gtgagcgtcgcgaccatgctccccctcggcacggccgtcaaccccggccagtaccggctcagcctcgtgcaggtggtcaactggggcaccttccacggcgcccacacgatgcacgtggaccgggcgggcaccatgctcacgggcaactcgggcgtgggcaagtcgacgctgttcgacgcgatcgcccgcgtgttcgacgcgcgcccgcgctccaatgaggccgccgcggcccgcgcggggcacagcgaggaccgccgcactacctacacctacatgcgcggcaaggtcggcgacgtggccgtgggggagggccgcgcgagcgcgttccagcgcccgggggccacctggagcgccgtcgccctcaccttcgacaacgccgcgggcaccgcctacacgctcacggcgctgttcgacctgcccaagaacggcacggagtccagcctaggccgcttctacctcatcgactcggtgccgctcgatgtggccgcggtcgaggggatcatcgggcagacccccggcaggcgcttcacccgcagcggactcgaggccgtcttccccgaggcgcaggtcttcgacgtccacaagaacttcgccgagcgcttccgccggctcctgggcatctcgagcgaccaggcgctcccgctcctgcgcgtcatccaggcgggcaagggcctcgggggcagcgtcaacagcttcttccgggaccaggtcctcgacccgcccgccacgctcgcggccgccgacgaggtggtcgaggagttcagcaacctcatgtccatccgggcccggctcgaggacatccggctccagcgcgaccagctcgcccccatccccgccctgaaccaggagtacgaggcggccctggccgaggccgcgcgcctgcgcgagctcgccgacgagcccttcgacgccgtccgccagtcccacgcggtcgccgtccaggagcggctcatcgccggcatccgcgagcgtgcccaggccaaggcgaaggagctctccgccgagcgccaccgccgcgacgccctggccgccgagctgcgctccctcgaggccgagtacaacagcgccggcggcaaccagatctccgcgctcgagcaggcccgcgacaacgcgaccgtggcgctgcgcctgcgccgtgaggtcgaggccgccgcgaaggcggggatgcacgacgccggcctcgacctcgcgttctcggccgaaggctgggaggccgcgcaccgccaggccgccgaggccctcgccgggctcgagggggacaccgcggcgctgcgggaggcccgcttcgacgcgttcgaggcccacgcgaccgcgaagcgcgagctcgccgaggcacgctccgagctcgcggccctcgctcagagcaagagcctcctgccccagcacgcggtcgagaaccgtgcggcgatcgccgcggcgctcggtctcgacgaggacgagatgccgttcggcggcgagctgatcgacctcgccgaggaccaggagcggtggcgcccggccgccgagcgtgccctgcgctcgctggccacgaccctgctcgtcccggggcagcacttcgccgcggtgacccggtggctcgacgcgaacccggtacgcggggcgctgcgcgccgtcgacctctccagccgcgtccccggcgcggagctcgccctcgattcggtgggggagcgggacctgctcgcgaagctcgaggtggcccccggccccgccggccactacctccgcgagcgcatcgcggtggacttcggctacacgtgcgtcgaggacccggacgagctcgcgggcgtggagcgcggcctgagcctcggcggcgtggtcaagcgcggccgcggcaccgtggagaaggacgaccgcttcgccgcgcgcgcggacttcgtcctcggcttcgacaacgcggccaaggtcgagctcctcgccgcccgggtcctcgagctcgaggcctccctcgccgccgcggccgaggccgcccaggccagcgaggactcccaccagggcctctcccgccgcctcgaggcgctgcggcgcgtggcccgggacgagcgggcgtgggaggaggtctcctccgcggcggccgaggacgagctgcgccgcatcggcacccgcctcgaggacgcgctcgcggcccagggcgacctcgagccgctgcgcgccaaggtcgaggcggcccgcgccgagcaccaggcctccaccgaggccgcggccgtgctccagagcgagtaccgccagctcgactcccagctcgtcaccgccgaccgcctcctcgaggccgcgcgcgcccgcctcgccgacgccccgccgtcggccgcggcgaccggaacgctcggcccgctcttcgacgagttcggccaggccgaggaccagcacgacctcgagcggatcgccgccgaggtccacggccggctcgccgcccgcgtccacgcggcggagagccgcgcgcagggcgccgccgagcgcctcacccgcatcttcgagcagttccagcgcgactggggccccgtcgtcgcggcggaccacggcgtctccatcggcgccgcgcccgcgttcgaggcccgctaccgccagatcgtctcggagggcctgcccgcgcaggaggcgcagttccgggagttcttcgcccagcgcacccacgagtcgttctcgaccctgctgcacctgctcgacgaggagcgccggggcatcgcggcccgcatcctgccgctgaactcgatcctcgccggcgtggacttccacgacggctcgtacctcgagctggacatccgccagacggtcccggcgtccgcgaagcagttcaaggatgcgatcgcctccgcgctcagggcgcgccacgcgccgtcgtccgccgcagcggcgcacgacgccggcccctccgccgccgggagcggcgccgccgggggcggcgccggcgaggaccagctcaccgtccgctacaagacgctcgaggcgctcgtgaagcggctcgcctcccagacgcccgaggaccggcggtggcgggccgaggtgctcgacacgcgcgcccacgtgttcatctcctgcaaggagcaccgcgtgtcccgggaccccgcgggcgcggcgcgggacgaggtgttcgtgcacgcggacaccggctcgatgtccggcggcgagcggcagcgcttcaccgcgttcatcatggccgcagccctgagctaccagctgggcatcgccgagcacgggttcaccggctacgggaccgtcatgatggacgaggcgttcgtgctcgcgtccgaggagttcgccggccagggcatcgcggcgctgcacgagttcggcttccagctgctgctcgccgccccggagaacgtgatcgacctctcgcgctacctcgggtccgtgacggagatcctccgggacaagcggaccaaccggtccgggctcatcgagggcccggcggtgcccgggggaccggtctcgcaggcgaacccggtcgacatcgtgctgcgctga

SEQ ID NO: 49617 - DNA, 1497 bp, Marinobacter sp. T13-3
atggatgaacaaacccgcctgagaacacagtcctactccgtagcccgttaccagcacccggcctggaaagtgctctcggccacccgcgggccactcgtcttgagttgcctgcaggtcttgtttgaacagaaccgcgaggaaatcctgttcgaagatgcccagcagatgctttctgagatcctgcgtcagcacgccaacagcgatgatcttgaacttcccaccgatgaccttgccggggaggcccgcaaagagctgcgctcctggattcgccgtgggttaattgttgaacggaacggacggctgattgcgaccgatgccctgcagaaagcactggccttcgttgacggtttggacgagcgggtgatgacctccacagcatcgcgccttgccacggtgcagcgggagattgaaaacctggaaacgcgcctgaacccggatgcggaaagccgtgccgaccatatccgccgcaagattgatagcctggaaagcgagctggaagacattaaagccgggcgcttcaaggtactggacggccccgaagccgctgaaggtatccgggaagtctacaacttggccaccagtctacgggcagattttcgccgggtggaagattcctaccgtgacgccgaccggcgcctacgacagtccattatcagcgagaaacatcatcgaggtgagatcgtggatcgcctactggatggccacgacactctactcgaaactgccgagggtaaagtgttccacggcttccatgaacagctcagccgctccactgagctgaacaatatgaaacaccgcctgcgcaccatactggcccaccccgctgcacgccacgcgctctcccgccagcagcaagacgagttgcgctggctgatcatccggcttattcaggaatcggcagcggtgatcaaggcccgcgcccgtagcgaaaaagacgtcaaaggcttcctgaaaaccggcctggcggcggaaaaccaccgggtcggcgagctactgaacggcatcctgaacgccgctctgaatatcgactgggccagccacaaagtccgcaaaagcgacacgcccttgccaccgctggcggttgccgcctccagcctgccgctggtggagcgactgagattcaaatccgcgaccgaagagcaggcacaaggtctggagttggcggaacaaaacgttgacctgaccgaggtggacgaagaattctggcgagcgtttgacggcctggatcgcgaggctctttatcatgaaaccgtagaactgttaaaagtaaccgaccgccccatgagcatcggcgacctggccagccacctgccgcctacccacgacctggaaaccgtcgccctgtggctggccatggcccgcgaggcggaagtggaaatctcaaatgaccgggaagctgtggacatcaccgacaccaatggccagaaactgcgctttcacgtgccacacctgaccctgacccgacacgacgccgagtccatcaattgggagctgtaa

SEQ ID NO: 49618 - DNA, 759 bp, Marinobacter sp. T13-3
atgcctgactactttgaccaattgacacgccagcccgatgaacagacagcagaccaggaaccagagccacccgctggccctgatgaaaagcacgctggcgaagcgtcaacggttgacgaaaccccgtacaccgccagcaacctcaaggcaaccgcccaggaactgctgaaatacgggctgctggaagccgaccgcaaagcgaggctttaccagatcgccatcacacagaccggcgaaatcaaccgtattctggagccctttgatctgcggctgaaagtggatgatattcggggcctggcttttctggtggtcgcggatcagctattccgggacggtgacgaaaacgacgacgaatggtcccatccgctggtgcgtcgccaacgcctgaatatggagcagtccctgttgatcgccattctgcgccagcatttcattgcccacgagcaggaggccggcctgggagccggcgatgcggtggtggagctggacgaactgttgccccaactacagttgtatctgggcgacacgggcagcgatgccaaagaccagaaacgtctgcgaggactactggacaacctgaagaatcacggcattgtctcggacatcgacgccaacgatcaggtggtgatccgcccgatcatcacccatctggcaaacccggaaaatctgcagaacctgctgcaacatttccggaaaatggccggtgagatttcacacagggacggaaccagcgatagcgaagagggaggcatagaatga

SEQ ID NO: 49619 - DNA, 3324 bp, Marinobacter sp. T13-3
atgaacctgcctcaggatgacctgtttgccactgaaatcattccacctacggcctatatcctgacgcacctggatctatacaactggggccccttcggtggccgtcattgcgcggaaatcgacccgaaaggctcggccattatcggacccaccggcagcggcaagacgaccctggtggacgcgttgatgactctgctcacccagcaaccgcgctataacctagcctccaccggcggacacgaaagcgaccgggacctgatctcgtacattcgcggggtgtccggcgccggcaacaattccggcgacaacagccacatcgcccgccccggcaaaaccgtgacaggggtgagcgcccggttttccaacggcgataccaacctgcgcatcggggccctgttctgggtggatggcagcagctccgcagccagtgatctcaagcgcctgtggctgttctccgaaagagacgaccagagcctggatgactggctggccattcaccacgaaggtggcgcacgggaactcaaacagcacgtgcgggacacccccggcattcaggccaacgacagcaaaaaagcctacctggcccaggtccgccgtttcttcgaagtgggcgaaaacgccttcaccctgctcaaccgcgccgcaggcctgaagcagctcaacagcattgacgaaattttccgcgagctggtgctggacgaccactccgcctttgaccgggccgctgaagtggccagtgaattcgatgacctggccgctatccatagcgaactggaaaccgcccgcagacagcaccagtcgctggtgcccattgccgaaacccatgaaaagcaccaggccacttacaaagagctggaacagctgaaaaccctcaagcgcatcctgccggtctggtttgcccaggccgggtatgacctctggaccgaccgcatccacgagctggaccgccagctcatcgagagccagaaccaaatcgactcgctcaccagtaccgtcagtggccttaacaaccaggccaccacactcaaagacatctacctggaagccggcggcgccagcatcgaacagctgcgtgaacaaatcggccagcaacaacgctgggtaaatgagcgcgccagccacgccaacgattatcgcgcactgacccgaaagctggatctggacgaccgcctttcggcacaagcattggcggccaaccagcaaaccggcgaagcaaggttacgtgagctatccgaacgggaagagacccaagacaaaaccctcctggacctgcgtctggagcacggcaaactcagtgaaaccctgaaagagctcactgacgaaatcgaccgcatcaaggctcgccccggttccaacatcgatggccgctatcaggaatttcgcagtgaactggccgaagccctgaacctgggcgaagaccagctgcccttcgtggccgaactggtggaagtaaaacccgaagaaaaagactggcgcggcgccatcgaacgggccctcggcggccatcgcctacgcatcctggtgccaccggcggccatgcagtccgctctggaccgggtgaacgcccgggacaaccgactgcacgtacgcctgatggaagcccagacaccccaagcccaggcgcagttcatggacgacggctttacccgcaagctcaacttcaaagaccatccgcaccgggaagccctcaagggattactggccggtattgaccgccactgcgtcgattcacccgaagcactgcgccagactccccatggcatgacccgccaggggctgatgtccggcaagaaaggctttttcgaaaagcgcgacaaccagcggctggacaagggctggatgactggctttaacaaccgggaccggctcaccgccctgaccgaagaactgcgggaagcgcagggttcggaacgggagatccagcaggcaatgggtaaggcccaggctgcgctgaaatccacccgcgacgaaatcaccctctacgaggcgctggctggcattcggttcgataccattgatctacccagcgccgagaaagaactttccgagctgcaaaaccgactggaaagcctgaccgcgccagactctgatgtggagcaggcccgacagaaatacgaaacggtcaaccaggaactggaacaggcccagcaggacttgtccgaagcgcgcacccaatatgccctgctcgacgacaagcgcagccaggcgacccaacgttgccaggaaatgctcgaacgcctcggcgaagggctgaccgacgaagagcagatcctggctggccaacacttcgatacgcccgatgctagccagtacgaccgcctggagacactggagcgcagccagcgtgacaagctggaaaaggccattagtacgttaaacaagcagctgcagcgctaccagctcaatctcacccaactgatggaaaaagcccgcaccctggacaccggcgccctggccgaaaccggcagcgacatccgggatattccggaatacctggaacgcctacgggtactggccgaggaagccctgccggaaaaactggaacgcttcctcaattacctgaaccagtcctcggaccaaggcgttacccaactgctggcccatataaataaccaggtagcgattattgaggaacgcatcgccgacctgaacgccaccctcaaacgtgtcgatttccagcccggccgctacctgcgcctggaaccccgacgggttacccacgaatccctgcgcaccctggaacgggcccagcgccagctgcgcgccgatgccctgaaagacgaccagggcgaaagccatttcaaggccctgcagaacatggtgcagctgctgcgcgatgccgccgacagcaaacgcaccgttggtgcccgcgccctgctcgacccgcgctaccggctgcaatttgaagtctcggtgctggaccgggaatcctgcaccgtcatcgaaacccgctccggttcccagggcggcagcggcggtgagaaagaaatcattgccagctacatcctgactgcctcactgagctacgccctgtgcccgacgggtgccacgcaaccactgtttggcaccatcgtactggacgaggccttctcaaaaagctctcatgccgtggctggtcgcattatctcggcactaaacgaattcggcctgcatccgttatttgtaacgccaaataaggaaatgcgcctgctgcgcgcccatacccgctcggcaatcctggtacaccgaaaagaactgcaagccacactaacatccctcagctgggaagagctggaaacccacgccgaaaaaatgacccgtaaacgcgatgaaatccccggctga

SEQ ID NO: 49620 - DNA, 1152 bp, Marinobacter sp. T13-3
atgaaatccccggctgacctggcatcccggctggcccggcagtggcaaaacgcggatttgcgtgagcagcgtctgctttacccgggtagctggccagtcacgctgcctgtgggcaagcccagcggtggcgacgtccgcaaccggctggaacaggtgcgcgcccatctggaacagtggcggcacgttgacaccggccgtgtacactggcaaccggtgcgctttcagagcgctgcggagcccatcagcgtgccagtgagctgggagctgaactcccccagcgaatgggtggaagcgacgaatgaccccgaagtccggcgtgaataccagatactgggccgcctggtgccggaactggatcctcgctttcactcactggtcatccgccgtcgcagcctggtgatggacagaccggaaaccgaagtgattcgttgcggccagcttgccctgcaactgacaccggattgtgcggaaggcaaaccactacgagccctctcgctggcgggcatcgacagcaagttttttgaacgtaaccgtcagttgattacccacatgctggatgtgctcttcgaaggccgggccagccaaaccggcctggaagccttcctcggcgccgaagacgaaggccaccactggctattggtggcagacctggatggcagcctattgccattctcgcaactgagggtgcgagcaagagacctacaatcttctccgttgcccggccaacgcttgttgctggtggaaaacgaacgctgcctgcatcaactgccgaacgctcctggaacacttgccgtgctcggctccggcctcaacctttcctggttgggagccggatggctggtcggcaaaagcattgcctactggggtgacctggacacctggggtctctacatgctagcccgcgcccgggagctacaacccaagctcacccagctgctaatggatcgctcaacctttgatcaattcgaggaaagcagcgctgttcatgaacccgagccagcccctgcagagattcccgaagcactcaccccggctgaggcagcgctttatagccatctgaatgacgccgaacggggacggctggagcaggagtttttgcctgctgaaaccgctcaacaggcaatcaacgcatgggcagaatccagccgttaa

SEQ ID NO: 49621 - DNA, 1470 bp, Sutterella sp. KLE1602
atgaaagccagcatctcataccccggcttccagcgtctgcgcgcagcgcccctctggaagcttctggcggcagccaatgcgcccgccatcatcgccatcctggccgagcacctctacgaggcggaccacgggatgcgtgcgtccgaattttacgcgcgcgtcgaccgcagtctcgaggagcttcgcgcaacgggcgtcgacatgccgtcgacggcccgcgaatacgcgtcgcagtggctcgcccaggggcttctcgaacgcacgctgccctacggcagcgacgaggaggtctattcgctcacctcggcctcggtcgacgccgtgaggtttgtgaccggcatgggcaggccccgtgcggaggcgacggaatcccgcctgcagcttgtgatcaccgcgctcgacggacttgaagaagacaccgacgcggacgtcgaacgccgcgagcatcgtctcatcgaggagcagagccgcatccgccgcgagcttgaggccgtgggcaggggcgaggtgaaggtgctggacaaggacaccgcgctagagcgcacccgcgagattctcacgctcttctcggggcttgtgggcgactttcatcgcgtgcgcgacagcttcgaggcgctcaacgctgaccttcgccgccgcatcatggagtgctcgggctcgaggggcgacgtcctcgaggacgtcttcgcagggctcgatctcatcaggctcagccctgcaggccgaaccttcttcgcgttctggcgcctgctcaacgatcccgtcgagtccgcccgcttcgaggaggcgatcgacgccgtgctctcgcgcgactttgcgcgcgatcttaccgtcgaagagcgcaggatgctgcgcacgatgcgccgcaacctgctcgaaaggggcggggatgtgcacgacacgacgaagcgtctggcccagggtctcaggaactttgtggaaagccgccagtatctcgaggaacaccgtctcaacaggctcctcaccgaggcgatgcgcgcagggatcgatgcggccgacgagcagagtcccgtccgtaggaccgggatcgaactttcgaggacgggcttcacaccgaggtccgcgggccagatggtcctctgggatcccgtcacctatgcgcctccgccgcccgtcgaggacggcacgccgcctccgcttgacctctccgccgtgggcgagcgcattgcaagatccgaaatcaacatccgcgagctcagggagaacgtcgccgacgtgctctcccgcaaggaccaggcgagtgtcggcgaggtactcgaggcgcatcccgcgaagcagggcctcggcagcgtcgtcggtctcatggagctcgcgcttcgtcacggcattcccggctcgggcaccgagagcctcaagtggacggggctcgacggccgcgagcgctccgccaccgtgaatcaactcttctttgttaaggacaagatcgatgaactcacccgaatctactga

SEQ ID NO: 49622 - DNA, 711 bp, Sutterella sp. KLE1602
atgaactcacccgaatctactgacgccgcgcgcaatgacgaacaggccgcgggcctctggcgcggtgacgcgggcgggttgaagctcgacgcaaggcgcgcgctcgtgcagcttctcaagggccccgtgctcgacggcatgcgcatgcccgtcatctggaaggccctgcttgagagcgaggacctgatccgcagccgcctcaacgacctctttctcgacctcgtgatcgaccgcgagcagctcttcgcgttcacgcgccaggcggacaccgattccgtcaaggcgccgatccttctgaagcgcaagccgctcaactacatcgagacctatcttttcctcttcctgcgcctgaggctctcgagcgccgagggcaggggcgagcgcgccgtcatcggccttgacgaaatccgcgagcatctcgccgacatcgcgggccgcaatcgcgacgccgtcggcttcgagaggcatctggcgggcgccgtcaccaaggcggaccacttcggcgtgctgcgccgcctcaagagcggcgaggacgccttcgagatctcgcccgtcctcaagatgctcatgacggccgaactcgtcgaacaggtcaaggactactacgagggcagggccgtcaagccgggcgaggccgccgccgaaattcccgccggcattgaaaacgacgaatccgaagacgacgaagacgatgcggaggacatggaatga

SEQ ID NO: 49623 - DNA, 3381 bp, Sutterella sp. KLE1602
atgaccgatctcgcgcttttccccgagctcatgcccgaagaacagttcagggccgtgcgcctgcaggtacacaactggggcaccttctcgggctgcaacgacattccgatcgccgaagagggctttctcttcgtgggcgcctcgggctcgggcaagtcgacgcttctcgacgccttctcccagctgctgattccgccccgctgggtggacttcaacgccgccgcgcatgagacgggcggcaaggtcaagggcgaccgctcgatcgtctcctacgtccgcggcgcatggtccgagcttcagaccgatgcgggcgtgacaacgcagtacctgcgcgaggagacgaccgcctcgggccttgcgctcaccttccgcaacgcccgccgcatcgtgacgctcctgcaggtattctggatccgcggaaagctcaacggcgtgggcgacgtcaagcgcctctacgccgtcgttgaacgagacgtcgacctcaaggccctcatcaccggcttttcggagtccgactacgacctcaggcgtctcaagctcgatctgggcgatgccaggtgctcggacctctttccgccctacgagaccgccttcacggcgctcctcggcatcaagagcagccttgcgctcaagctccttcacaagacgcagtccgcgaagaaccttggcgacctcaacgaatttctgaggaacttcatgctcgatgagccgcgcacctacgcgatcgccgcccgtctcgtcgatgagtttgtcgagctcgaggcctcgcaccgcgccgtcgtggccgccaacgcccagatccgcgtgctctcgcccgcgcagacggcgttcggcgacatgcagcaggcagaagagggccgcctccgcgcgaagctcctcgcggaggcgctccccgcctaccgcgagtcctggcgcgcgaaccttctgaccgcccaggccgcgaagctcgagaacgagcgccgcacgtatgaggagaacgtccgcacgattcaggccgatctcgtcgcaaggcgcagcacgctcgccgaccttgagcttcgcgagcgccagagcggcggcgaccagatcgccggctgggaggccgaaaaggcccgtcgcgaacaggaccgcgaccgcgcgatgcgcgagcgcggaaaggtcgaggccgccgcgcgcgagctcggcgaggctctgccgcccacggctgacgaattccgcacgctcgttgaggctgccgccgctgaagaggcgggtgccgccgacttgaagaaggcgagggacgcgaagatcgaggccctcatcggcgaagagcacggcatcaagagcgagctcgacgtcctctgcgaggaaatcgagtcgctcgaatcgcagcgctcgggcattcccgccgtgcagctcaggatccgcgagaaggtcgctgccgaggcggggctcaggaccacggacctgccctttgcgggcgaattcatcgaggtgctgcccgagcagatcgcctggagaggcgctctcgaacgcgcgctcaggccgctcgccctttcgattctcgtgccctccgaacatttcgaagctgtttcccgtgtcgtcaacggcgccaactggggcgcccacgtgcgcctgctgaggacgggcggcgcgatcgtcgaggaggcggggagcctttcggacgactccgtcatccgcaagatccgggtcaccgacggcgtgcacgcccagtggctcgagagcgtccttcgccgcgactacgacctcgcctgcgtcgagacgcccgaggccttcgccgccgcgcgccgcgccgtgacgaagacgggcttcgtgaaggacacgcacgcacgatacgacaagaacgacacccgcgcggtcgacgatccgcgcgcctgggtgctcggcatggacaatcgcgccaagctcgcggccctcagggccgaagaggagattcgccgtcgtgatcttcatgagaagaggcgcgcgatcacggccctcaagaacgaggaggctgaggccagccgcaggctcgtgcactgccacacccttgcggccgcctcctggatcgacatcgatcccgctccgattcttgccgacatccaccgcctcgaggcccagatccgcgccgtgcgcgagggcaacgaggccctcagggagctcgcgaaggccatcgaggagacgcgcattcagattgccgccgtcgaggagaagctctccgacgcaaaggccgacctcaagaccgccgacggcgcgctcacgaccgtcaggaagcgcctgcagaccctgaatgacgcctggagcacgcagatcgcggcgctcaccgacggcatgcgcaagggactcggcgaccgcttcggtgcaaggctcggcgagatccgcctcgacacgctcgacgacctcgtcaacatggtcgcgcgtgaaatcaatgacgaaatctcgaagctcgtcgctcgcgtgaaggacatggagatccgcgtcacgaccgcgttcgacaagttccgcgaccagttccccgcagagtcggccgacctcggcgcgggccttgagttcgcgggcgactacttcaggctgctcgagacgctcgagcgcgaccgcctgcccgacttcgaggcgaagttccgcgagctcctgcgccaacagagcatgcagaacctctcgcagctgcgccagtacctcaccgaggagcgccgtgacattctgcagcgcctcgaactcgtgaacgaaagccttcacgtcgtgcccttcaacgtgacgaacggtcgcaggaccttccttcgcatcacgacgcaggagcgcatgctctccgaagtggtcgagttcaggaagcggatccgcgacgccctcgagggcgcctgggacgtcaaggtcgaggacggcgaggctgaaaagcgcttcgcgatcctcgccgagctcgtgtcgagtctcaaggacctgcctgaaaaccgccgctaccgcgacacagtgcttgacgtacgccgccacgtcgacttcattggcgaggaagtggatgacgacggacgccagatcgaggtctaccgcagcggcgccggcaagtccggcggccagcgccagaagctcacgacgacttgcctggctgccgccctcaggtaccagctctgcggcgacagcgtgtcggtcccgacctatgcgctcgtggtgctcgacgaggccttcgacaaggccgacagcgacttcacgacgctcgccatgaacatcttccgccagttcggcttccagatgatcgtcgccacgcccgacaaggccgtcacgacgctcgagcccttcattggtggcgcctgcgtggtgcacatcgtcgagcgcaagtactcgagcgtgcttacgatcccctacgacggcgcggtccaccgcctcgtctggaaggcgcccgctgaatccgcagaacccgtgaaggaggcctga

SEQ ID NO: 49624 - DNA, 1212 bp, Sutterella sp. KLE1602
atgaagacgccggccgaggtccgcacgactgcggcgcgtcgattccgggcgtcgtgccgcaggtggctcgccggtcatctgggccttcccgacgactcggcctggccgtttgccgtcccgcttggcgttccttccgagcgcgaggtcctcgccgacccgcagaagacgctcgactggcgcgacgcatggagcgcggaggccgaatcgggccgtctcaaggtggccttcgcggtgcgggactggacggcctgcggccgtcagaccgttcccgaacgtgcggtgttcgagtcgcccgaagccgttgcgcgtgcagcgggcgagcttcacacatggagacgtgcgctcgagcgtgcctcccgcctcgtcgacggcgaagacggcctgagggaggcggtcgtgcgtgcctggagcgtgctcgccgaatgggaggacgaggatttcgcgattctgctctccgccttcaggtggcttgccgacaatcccgaaagcggtctctatgttcgtcagctgcccgtcgagggcatggataccaagtggctcacgaagcccagaatgacggtgcttcgcgatcttctcgccgcccgctggcgtgcttccgggaggcccgtgcccgaggcgcaggccttcgaggccttcgcaggtctgaggagcaggccctcgagcgtgcgcatgaggcttcttgatcccgcagaccgtgcgctcatgcacggactctccgacctctcagcgccgccggaggaaatcgcgatcctgccgcttcatccgagaatcgtcttcatttccgaaaacgagcagtcgggccttgcgttcggcgacgtgccgggcgccgtcctctttttcggtttgggcaagggcgtcacgcagctcgatgccgttccctggattcatgaggggacggtcatctactggggcgatgccgacacgtggggccttcagattctcgcgtctttaagacggcgctttcccaagacgcgcgccgtcatgatggacgaggcgacgctcgtgcgctttcatgcctacgccgtcgaggagcccaggcaggcgcccgaagctgtctgcgagggccttctgcctgctgaagccgcgctttgggacgcactcaagtccgacaaatatggcatgcgccttcgccttgagcaggagcgcatcccctgggcccatgcctgggccgaactcatgaaggcagttgccgaagcttccagaaagtcctga

SEQ ID NO: 49625 - DNA, 1449 bp, Bacteroides intestinalis
atgcaagtagaaaaaataatacaaatattacgagagtcaccaagcatacgactcataaaatcaagaagtgtggatttcttcttgtcttttgtcattgaggcgtttgagggacagtcggctataatgcaggaacgcttgcacatgctactggagaaccgactggatgagcaggaaaatgcgttggtggaggataatcttgaaatgacaagactaggggagtcgaacgaacagaaagcaaaacgactcatcaaagactggacagacaagggattcttgaccaactatcagaacgaagagggagaggtgatatacgagatttcgtcgcacacaagcaaactgatggattgggtggtgagcttgaaaaaagaggattacatcggtacggaatcgaagttcaagacgctgtttgcccaactaaaggaattggtggaatactcgaatgagaaccgcgagaagcgactggaactgctccgagccaaaaaaatggagatagagcatcagattcagcgactggagatgggcgaagaggtcgaggtgtatgaggactaccagatagaaccacgatacaatagcttgaataaactggctaaggagctgcttagcgatttcaaggaggtggatgacaacttcaaggggattatcaaagagatatacgagcgccagacagacaatgcggagaagaaagtattgctgaactacatctttgatgcgtatggcgaactgaaacaatcgcaacaaggcaagagtttctatgcattctgggaattcctgctctcggccgatctgcagaaagaatgggacgagttgactggtgcactctatgaaacactggagaatagaggcattgatgcgcatgatatgtttctcagggaaatgaaaaagcatctgtttgacgcaggcgagaaggtggcgaaaaccaacgatcgcatgagcgagaaactgagtcgcatcattcgccagaacggacagatgaatgcagaggtgacaaagctggtgattaacgatataaagaaactgctcatcgaagccaccaaacagaaagagaaaccagaagcttcgcttgaatatgaaactatcgatatcaatctgccagtcgagcgccctctgactctgactcctataaaagagactgtgtataaggataagcctgatatggctgaactgagtctggacgacttggagcgcataggcaaactctacaatccgtatcacatcgatcgtcaggtgttgagagaccgcattaacaaggtactgtacgacagacggcagacaacactagcagaggtgatagaatggaacgagggtgtggagaaaggtctgtcggaagtgtttggatacattggcgtgctgaaggaatataagactgtggtaaacgaagagcgccagcaatatattgtttttgcagaaaacaaaacgatatcaattcccgaaatcataataacacgatga

SEQ ID NO: 49626 - DNA, 585 bp, Bacteroides intestinalis
atgaacgcaacaaatatacaaccatacagcagggctgtggtgaaactactgaaaggcatcgtagagaaagacgatgtagtgtggaatgatgtactcgactaccagagcgagatactggactatatcagcgtgatggggctggaactcatcgtgaaaaaggatgagggttttgcctttgtcaagcaactgaaattggacgatgacaaaacgttgaacatggtgtcgagaaggttgtatggttttgaggtgtcggtgatactcatcgtgttgaggcagatactcgaagacttcgacagcaatccaacagagtcgcaggcttcgtacaagtatgtaaccgccactgaaataaaggaagaggcggaactgttcctacccaccaccttcaatcgtgccaagtttgagaaagaccttgaccgctatatcgacagcatcgtcagctttggtttccttgtggaagcaaagcatgctgagggcgagaaacgctataaaatacatcgcatcatcaaggagaaggtgacactggacgatctattggaattcaaaaataaactgaacgactatgatgcagcagatgaatctctttaa

SEQ ID NO: 49627 - DNA, 3396 bp, Bacteroides intestinalis
atgatgcagcagatgaatctctttaataccagtccggaagtggcgggcttcaagcttgactatttggaagtgtggaactggggtacattcgaccaaaaggtgtactgcatgaatacgcagggcaataactcgctgctgaccggtgccaacgcatcgggcaagagtacgctgatagatgctctgctcacgctgctagtgccactgaagcgccaacgattctacaaccaatcatcgggtgtggagaagaagggcaaccgtacagaggagtcgtacttctttggcaactatggcaatcagcagcaggagggtgcagcgagcactaccacgcttagattgcgagacaaaggggcacgttcggtacttcttgcatcgttttgcaatgtggacaaacgtgtggtgacgctgtttcaggtgcgctactacactggcgaggaactgaaggtgttgtttggcatagctcgcgaaccgctgactataaagcgcgacttttcggagtttgacctgcatggcgactggcgcaagcgactgacgaagaaatacaatacgaacgacacaagacgcaagatagagttttttgacggcccggttgcgtatggcgagaagatgatagccctcttcggaatgcgttcggacaaggcgcttacactcttcaatcagatagtgggcgtgaaagtgttggacgatctagacagtttcatccgtacgaatatgctcgaggaagtgctggctgaggaaaagtaccaggaactaaaggataacttccagaatctgatggaggcgaaaaccaatatcgataaggtgaaggagcagattgcccaactgaaacctatcaatatattggcaaaggaactgatggcgatagacacgcgcatagctgaattggagcaagagaagagtatggtggtctattggtttgctgcgcgaacggtggatttgtgtaacgaggagttggtgcgctgcaagagtaacttgagaaaactggaagatgagttgaaggcgttaaaggtgaagaagagtgagttggaacaagagcagacgcgcttgtcggtggctattgagaaggacgaggtgggtcagcagatacgtgagattgagaaggaaatcaatcagaaggtgaagatgcgtgataaccgcaaggccaaagccgaagaatacgataagctggcaaagacggtggagctgaaacacagtcctgatgcagaggtattcgatgctaatcgtgcgaccgccaaacacgagaaagatgctctgcaggtaaagattgacaggcaacttatggaagagaagcgtcaggcacaaaaccgtcaggatgaaatcaactgcacgatatcagagcgagtggatactatacgctatctgcagcagcataagaacaatatctctggtcgtgtggctgagattcgtgatgagatactggaggctgttggtgcaaccgccgaagagattccattcatcggtgaactgatacgtgtgaaggatattgagtgcgattgggagtattccatcgagcgcattctgcacaattttgcattgagattggtggtgccagagaagtattacaagcaggtgaatgagtatgtgaatggtcataatctgcgaggacgcatcgtgtatcagcgatacgagggcacagagcctcttcgtgagtttgaggataggacattgaaggtggattcgttgctccgtaaggttgaatacaagccaaagtgcttgtatttggattggcttgaggataagttatttgctgagttcaactatagttgtgttgattcgcttgcggacttcaactatctgcaagagaaagcagtgacgaaagagggactgataaaggcgagaggtggtaagcatgagaaagacgaccgaccagagacacgaggcaaggaacactatgtgttgggctgggacaacaaggagaagattgccatgctacaggcggaagtacgccagttgcagcaggatgaaaaggaggtggcaaccaaagttcgtcgtatagaggcagatacaaagaatgctcaggagaagcgagaaacctactcgaagctgtttgataaatacgataagtttgatgatatcgactggtggtcgtgtgcactcgtcattcagcaaaaggaagcacagaagcgacaactggaggagaccaatgataaggtgaagatgttgcaggggcaattggagggggtgagaaaggaacttggtgcacttgaggagaagtttaatgaagctatcggtaacaaagcattattggaaaatcgtgagaatatactcaagaaacagagtaatgattgtgctttggctttagctcaaataggcgttgttgataccgatgcttttgagtcgcaacacacagatttactgaatgtggcattggtgggtttggacaaaatgcgtgacacgttacagagtgacatcaattccgctttgcggaaacaacgtgagacgaagggtagcaagagtggcgatttgaagaacctgatttatcgcttcaagaatcccacagaggaaattaccgcgaagtatcgcgattggcgttcggacgtgaaccgtttgcccgaagccgtggagtttatgggcgaatatcagacctattaccaacgattgctggacgaagatctgcctgggtttgaatcgcgcttcaacaagtatttacgggagaatatcatcaacaaggtcagtgcattcaatatgttcttccagaactggcgccagtctatcaccaagaccatcgaccaattgaattcgtatcttgtgggcatcgatttcaaggatgctccaaagacgtatatccagttggtcgcagccaaacgattgaacgtggatttgaaagagttccaagaccttctgagcagtgcaatcccgaacatccatgagatgaattcgacaatcgatggcagcaggattcattttgaacagcatatcgaaccgctgatgtctcgtttacaagacgaatcatggcgaaagttggtgatggatgtgcgtggatggtacacatataaggctgaggagttttatcaagacgatgatcagaagcgtaacacctacgaggctatgggacagctgtcaggtggcgagaaggcgcaattgacatatactatcctggggtcagctatcgcttatcagtttggcttgactaagaacggactcgactcttcgttccgcttcattgccatagatgaggcttttcgcgcacaggacgaggacaaggctcgctatctgatttcgctctgcaaacaactccacctgcagttgctcgtggtgactccgagtgacaacatccacatcgtggagaacgatatttcgtatgtgcattatgtggagcgcaagggcgaccgttctgtactctataatatgcctatcagtgagtttaaggcagaacgtgaaaggagtatggaggtatga

SEQ ID NO: 49628 - DNA, 1155 bp, Bacteroides intestinalis
atgataacggcagcagaaatacgtaagaagacagaacgcaagtatgtggattatttgcgttcagtggtcgctggttctgagtttgaaccaattgtgattccttgcgacaagaaagcgagtgcatcgatggatgagtatcagcacgaactgacggatatccgttcgcaatcgaaagaggtgaggggctttggttacacgattgagtggaaaacagtgaaaacgaaagcattgggcgaacaggatctgcctgagcgtgtgttgttcaggagtgcatcggacgttgagcgcttcttgctgaagggtggtgaagtgtcacagtttcgcaaggatgtggcgatgttgtttaatgagtttccgcagcttcgtccatgggtggaacgctatccacttaaggtgatcgagaatgcttcctcttggcctgatttgttgaaagttttgcgctattttgtggcgaatccttgtcctaagttgtacattcgtgaattgcctattgaggtgcacaccaagttcattgagcgcaataagggagtgcttcgtgagttgctggatattgtcattgtagagcatgtctgttcggatgagaaggagttcgaaaagcgctttggattgcgatacgatgagccatgggtgcgcattcgtgtgttggaagcatcgattgcgagtgaatacttttctggtgtagacgatctgacgatgcctcagagtcagttctgtgcgttatcgttgcctgtgcagaaggtgtttgtggtggagaataaagtcaacttcctgacttttcccaagttggcaggaagtctgctgatttgggggcatggattcaccgttggtatcctcaagtctgttccattcatgcggcacgcttccctatactattggggcgacattgatgtacagggcttcgaaattctctcgcagttccgcagttattttccccagacgcaaagccttctgatggatcgcgctacctttgacacctattttgaaggcgacaaaggcactccaagcaatgtatcaaagcctctccatcttacccctgcggaagctacactgtataatcatatcaagtctcacaacctacgtctagagcaagagaaaattccgcaaaaatgtattgataatatattcaatagttcgttaaaaattagccaagtctaa

SEQ ID NO: 49629 - DNA, 1512 bp, Gordonia sp. QH-12
gtgcaattcgacgagatcgtcgccgtccggaggagcaatgctgcctggcgactgctgagggccgacaacgcgccgttgctgctgtcgttcctgggacgggtcttcgtcgacgacaacgtccgcgagatctcggagtcggcactggtcagcctgctcgacgaggagttgtactcgttgaacgagcggctcggcgagggaacctatccgcgatcgccgaaggcctacctcgacgagtggtcggccgccgatactgcgtggctgcgcaagtactacgtgatcgagagcgacgagccgcactacgacgcgaccccggcggtcgagcgcgccgtggcctgggtccggtcgctgcgcgaccgcgacttcgtgggcaccgagtcacgtctcaagaccgtgctggaactactgcggcagatcgtctacggcaccaccaccgacgccgaggtccggctcgccgaactgcgccgccgtcgcgccgaactcgacgcggagatcgaggccgccgagcggggcgagttccaggtcctcgacgccaccagccgacgggagcgctaccagcagttcgccgacatcgcccgcgcgctgctctccgacttccgtgaggtggagaccaacttccgcaccctcgaccgccagatgcgggagcgcatcgccacctggcgcggcaccaagggcgaactgctcgacgagatcgtcggcagccgaaacgtcatcagcgactccgaccagggccgcagcttccaggccttctacgacctcctgctctccgccgaccgactcgacgagctcgacgaactggtccggcatgcgcagggcctcgacgaggtcgccgactccgacatccggctcaccaacatccaccacgactggctcgacgccggaacccgcgcgcaggacacggtccgccggctgtcggagcagctgcgccgcttcctcgacgaccaggcgtggctcgagaaccgccgcgtcatggacctgctgcggagcatcgagtcgtcggcctacgccatccgcgaccgccgcgtcgacgacttcgcccaggagatcgactccccggcaccgagcgtgaatctgcccctcgagcgtccgctgtaccgtcccgccgcggcggtcgaggtcgccagcgagggcatcgaggagggcgaggctcagggggcctcggaagcgctgttcgagcagatccacgtcgaccccgcgccgctgatcgacggcgtccgacgggcgctgcgccgctccggccaggtcacgctcgccgaagtcctcgccgaacgtcccctcgaacaggggctcgccgaactggtcacctatctgtctctcaccgacgacggcttcgggaaggtcttcgacgaaagcgccgacgagacggtctcgtggactgacgagagcggtggccgccgtgtcgctcgcgtcccgcgcgtgatctacacccggccgtcccctaccgcgagccccaccgcgggccccaccgtgaatccgaccgccgaccccaccgcccccgaccaggagactcgatga

SEQ ID NO: 49630 - DNA, 600 bp, Gordonia sp. QH-12
atgagccgccccgtcccccgcgacgagctgaacctctcgctcgcggtcacctcgctgatgaagggcgtcgtctaccgcgacaccgccgagaccgcctggcgccacgtcctcggcctggccgcgcaggtgagcgattacgtcgccacgctcggtctcaccgtcgtgatcgacgaggccgagggatatgccttcctgcggtccaagagcgacgacgagctggccgacctcgggatcgggcgtctggtcgcccgccaccaactgccgctgcatccgtcgttgctgctggccctgttgcgcaagaagctcgccgagcacgacacgtccgatgcgggcaaccgtctgatcgtgaccggtgcgcagctgcgtgaaatggtcagccccttcttccccgccaccaccaacgaagctcggatcgccgaccaggcggacaccgcgatccggcgcgtcgtcgaactcggcttcctgcgccgcatgcccggccaggacggcgagtacgaggtccggcgggtcatcaaggcctacgtcgacgcccagtggctgtcggatctggacgcccacctggccgagtacgccgagatcgccaccgaggagcgacgatga

SEQ ID NO: 49631 - DNA, 3405 bp, Gordonia sp. QH-12; identical to SEQ ID NO: 43474

SEQ ID NO: 49632 - DNA, 1494 bp, Steroidobacter denitrificans
atggatagcaacagccacgagcgtacccagtcctacattctggcgcgccagcagaatcctgcgtggcagctactggctgggcgccgagctccactggtgctgggttgtctgcaggcgctgttcgaggaaagtcaggacggtgtcgattacgacgatgcccagcaagccttggccgagttgctggctgggcatgtcggactgagcgagttcgagatcagcggtgataccgccatgttggcacgcagggagctgcgtacctggatacggcgctcccttgtggttgagcgcgaggggcgactgtacgccacagatgcgctggaaactgcgctgcgtttcgtggaagcgctggacagccgcattatgacctccacggcttcgcgtctggcagtagttcagcgcgagatcgagcgcctggaagctcggctgaaccctgatccacagagccgggccgaacatctgcgccggcagatagccgacctgcaacgggagttggatgaggctgaagccggccggatcgaggtcgctgacgccaaggaagcggccgagggtatccgcgaactctacgcgctggcgaccagtctgcgcgcggacttccgaagagtggaggattcctggcgcgctgccgacttgcgcttgcgtcacgccgtcgtcaacgaaggccaccaccgcggcgcgatcgtcgacaccctgctcgacggccacgacacattgctcgaaaccgctgaaggtcgggtattccagacgttccatcagcagttgcaacaggaaatcgagcttgaagcgatgaagcgccggttgcgcaccatcctgcagcatccccaggccgggatcgcgttgacactgtcgcaacaggccgatctgcggtggctggtgatgcgtctggtcaaggagtcggcctcagtcatccgcgcacgctcgcgcagcgaacgcgatgtccgcagttttctccgcaccggtctggcagccgaacatcatcgggtcggacaactgctcaacgaggtcttccgccatgcccaggcagtggactggaatatcgcttcggtacgccggcaaccggcccgcctgccgcctctggccatcgcttgcggcggcctacccttggtggaacggctgcgcttcaagtctctggatcagcaggcactgcgcgatctggatctgcaacgcatggccggtgacatcgaccagatcgacgaggagttctggtcctcgctggacagcctcgaccgcgaggcattagtgcgcgacaccgtggaaacgatacgcggcagcgaccagccactgagtctggccggcctggcacagcggctgccacccacgcacgacctggaatccctcgccgtatggttgggcatggcacgggaagcggactgcaccatcggcgaagaatgcgaaaccctggatctcgccacccgagacgatcagaacctacgcttccatgtgccgttgctcgggctcgacccggcggcgttcgagcacttcgaatgggagccttga

SEQ ID NO: 49633 - DNA, 609 bp, Steroidobacter denitrificans
gtggccgcagcggtacgggctacgatcctggagctgatgaagtacgggctcctggaggaagccagcaagcccaatctctaccgtaacgcgctgttgcaccgggatgaagtggatcggatgctgggctggctggaactggcgctgcgtatcgatgacatccgcggcctggcgttcatcgtcgtggccgccgcgcccgaccgggacgacgacgaatggtcgcacccgctggtgcgccggcagcgcctgaccctggagcaatcgctgctggtcgcgattctgcgccagcaattcgtcgcccacgaagtggaagccggcgtcggcgccggtgatgcccgagtcgcactcgacgatctgattccgcacctgcaggcttatctgggcgacctgggcagcgacgcccaggaaaggaaacgcctgctgactctgctggagcagctcaaaggccacggcatcgtctccgacgtcgatcaacaggagcgggtgacgatacgcccgatcatcgcccacctggccaatccggagaacctcaccaacctggtgcaagcactgcgcgaggctaccggcggtggcgatatcggcccgacatcggtcgaggaggcggacgaatga

SEQ ID NO: 49634 - DNA, 3309 bp, Steroidobacter denitrificans
atgagcacctcacctgcgctcgcttcgggtagctacgtgctcacgcacctggacgtgtacgactggggcgccttcgacggtcgccacagcgcgcagatcgatttggccggcaccgcgatcatcggccccaccggcagcggcaagaccacgctggtcgacgcgctgatgaccctgctggtcgccagcccccgctacaacctggcctccaccggtggccatgaaagcgatcgcgacctagtctcctacgtccgcggcgtgtctggtgccggcaacgacagcgaagccaacgaacacattgcccggcccggtcctgtcgttactgcgatcgccgcacgcttcagcaacggcgaagcagtgttgcgcatcggcggcgtgttctggctcgacggcaccagttcggctttgaccgacctcaagcgccgctggctgttctgccagggcgacacgccgagcctggacgagtggctggaaacgcaccgcgatggcggcgcacgggcgctgaaggagttggaacgtacttgccccggctttaaggtctacgataccaagcaagccttcttggcacgcctgcgcaaccacttcgaggtcggcgaaaacgcgttcgccctgctcaatcgcgctgccggcctcaagcagctcaacagcatcgacacagtgttccgcgaactggtgctggacgaccgttccgccttcgacagcgcgcgcgccgtcgccgatgagttcgacacgctggccggcatccgacaggaactcgagaccgctcgcagacagcgcgacacactggcgccgatcgataaaggatgggccgatcatcaggaaacgtccgtcagattggacgaacacaaccggctactggcgctgctgccggcttggttcggagagcaggcgatcaccctgtgggagcgccgagccgccgccgaaaatatcaaactgctcgaacagcaacaacaggccgaggcgctgtccaaggacctggcgttggcagaagcagaggatcaggcgctgcaggtgatctacctgcaggcaggcgggcagagaatcgaggagctgcgtcgacacatcgatacgcaggaagagaagctcgagcggtgccaacgccaggccaaggactaccaagcatggaccattagcttgggtctgagcccagcactgacgcttgctgcggtgcaggccaaccagacggaaatcgaacagcggcggatcgatgaaacagaacgttgggaagtgcagaagcgggcggcttgggaaataggagcgaagcaacaagcgctacttgccgagcgtgaccggctcaagcacgagctggacgagtcgaagcagcggcccggttcgaacatcccggtcgagcaacagcgttttcgcagtcttctcgcagaccatctcagcctggatgagagcgccttacccttcgttgccgagttggtcgaggtccagcctgagcaggcacgttggcgtggcgccattgaacgcgccattggcagcgaacgcctgcgtctgttgatcgctccggaacatgctcccgctgcactaacctggatcaatgcgcgtgataaccgccttcatgttcggctgcgcgaagcggatgcgcctgccgagcaggcgcgattcttcgacgatggattcacccgcaagctcaatttcaagcctcatgcccatcgtcaggcattgaagcacctgctcgccagcatcgatcggcattgcgtggacgacgttcaggccttgcgccgcacgccgtatgcgatgaccgtacaggggttgatgtccggccgcagcggctacttcgacaagcaggatcagaagccgctcgggcgcgactggatgaccggcttcgataatcgcgatcagctcgcgcgcctcgcgcaggatctcgccacggcgacggagctgcatgcggtgagccagagtgaaatgcgtaaggccgaggaactggtagagaacaccagaaaaggcctctcgctgctggatcggatcaaagatgcggtgttcaacgatatcgacgttcctggtgcgcaagcggaacttgatcagttgcggcagcaactgcaagcattgacggcgccggcgtccgatgtcgagcaggcaagaatcaaatgggagatcgccaaggcgggcaccgaggcactacgcggcaagcagatcgaactgcagacgcagatcaggctgctcacccaggccattgagcaggcgaacgacgccgtgggccgtattcgcaagagaatcggcagcgggctggatgaggcgcagagagcgctggctacccaacacctggaaacgcaacgggtcgacgagccttccgagttggacgacctggagcgccgggaaagggagggtatccagcgggccatcgagcgccaatccgcgcgtctcagaaatgtcgaacaacagctcgttcgcgacatggccaaagcaaaggcggcggacaccggcgcattgtccgaggtcggcaccgaactgcaggacgtacccgcctatcgcgaacgcctgcgcgtgctcgacgaggaagcacttcccgagaaactcggccgcttcctcacctatcttaaccagtcctccgatcagggcgtgacgcagctgcttagcgagatcgacagcgaagtctccgtgattgaagaacgcatagccgatctcaatgccactctggaacgggtggacttccagccagaccgctacctgcgcctggagccgcagcgggtcgagcacgagagcctgcgcaccctgcggcaggcgcgagcccacctacgctcggcccagctcaaggatgaccagggcgaaagccactaccgtgccttggccgacctggtcggcctgctgcgcgatgccgtggaacggcgcaagaccctgggtgcgctggccctgctcgatccacgctatcggctgcagttcgccgttctggtgatcgaacgcggcagcggcaagatcatcgagaagcgcaccagttcccaggggggtagcggcggggagaaggagatcatcgccagctacgtgctcaccgcctcgctcagctacgccctgtgcccaccgggcagccagcggccgttgttcggcaccatcgtgctcgacgaggccttctccaagagttcccaggcggtggccggacgcatcatccgcgccctggcggaattcggcctgcacccgctcttcgttacacccaacaaggaactgcgcctgttgcgggaacacacccgttccgccatcgtcgtccaccgcaagggcgcacaggcgaccatgacatcgctgagctgggaagcgctggaagcgcatgcgcgcaaccgcacccagcgacaggagcacgatgttgaagtcgcctga

SEQ ID NO: 49635 - DNA, 1164 bp, Steroidobacter denitrificans
ttgaagtcgcctgatgaactcgccaacctcctgacccggcaatggcacagcgccgacaagcgtgaacgccgcctgctcgatccgcaggcttggccgctgcagctcgccatcggccgcccaccaccagcgctgttcgcgcaccacacggcccgggtccgcgagcacatcgcacgctggcggacagtgaccgtgggcgaagtgcgatggcaggacacggccttccgcagtgccgccgagccggtgtcactgccgctgcactggcaactttcctcaccggaggagtgggcacaggcgtcgggcgatgcccaggtgcaactggaactgcaacgacttcgatacctgctcgatcgcgtcgacccgcgcttccacgcacttctgatccggcagcgcgggctatggcacgagcgtaacgacgaggaggtcgtgcaagcggccgcgttgaccttcgaactggaacccggcatcgcggccggccgccccctgcgcggcctcgccctggccggcatcgacagcaagttcatcgaacgcaaccgcggattggtgaccgcgctgctggatatccgcttcgaaggacaggcatcccaacttggcctcaccagctttctggatgccgccgatgagggcgaccattggctgctggtcgcgccgctgacaccggggctgctacccttcgcccagcagcgcgtgcgggcccgtgaattgatggatacaccgctaccggccgggcacatcctgctgatcgagaacgatcgctgcctgcacctgctgccaccactgcccgataccatcgccgtcctcggttccggcctcgacctggcatggttgcgcgcgcactggctgcgccagcgtcacctgggctactggggcgacatggatacctggggcctgcatatgctggcacgcgctcgcagcctgcaaccccacctgcaacctctgctcatggagcgcgccctgttcgaccgccacgccgctgcactcgcggtgccggagccgatcaatgccggcgcggaaccgcacgatggcttgttagatcacgagcaggacttctaccgccatttactcactctgcccaaaggcagaatcgaacaggaattcctgcctggagagactgtcacccacgtgctgtcccgctgggtcaacacgaactttggtgcgccagagtaa

SEQ ID NO: 49636 - DNA, 1413 bp, Mycobacterium sp. NRRL B-3805; identical to SEQ ID NO: 43377

SEQ ID NO: 49637 - DNA, 672 bp, Mycobacterium sp. NRRL B-3805; identical to SEQ ID NO: 43378

SEQ ID NO: 49638 - DNA, 3372 bp, Mycobacterium sp. NRRL B-3805; identical to SEQ ID NO: 43379

SEQ ID NO: 49639 - DNA, 1464 bp, Burkholderia monticola
gtgaaggcgcttcggggcgcagcggctctgcgcaatctgcgcgagcaacccctttggcgcctgctggcggcaacgaaggcacccgtggtaattgcgttgcttcagtcgcttttcacgggcactgacaaagcgttatcaagctcggtgcttcatgagcgcctcgctcgtgacatcgattcgcttcgctcaaccggcgaagagctcccccagtcaccccaagcgtacgtctctgaatggctcaatcaaggctggttgacgcgtcggtttcccatcggggctcccgaagaagagtacgaattgtcggccgaagcgcttacttcggtgcgctttgtcacgggactattgacgcctagaacgaccgccacagaaagtcgactttcagtggtaattcaccaactgtcgcgactggctgaagcaaccaataccaaccccgaagcacgcttggcagcgctgcgcgctgagcgcgagcgtatcgacacagccatcgccgatgtcgagcgtggcggcgcgagagttctgccatcagaccgcgccatcgagaacgcgcgcgaagtcatcgctctggctcaagaccttgcggcggacttccgaagcgtccgcgacgagttcgagcgattgaatcgggggctgcggcagagcctgatggagaacgagggtagccgtggcgacgtgcttgaacagctttttgcgggcgttgaccttatcggcgaaagtgatgctggtcgcactttcaacgcattttggcgtttgctgacagacagcgagcaagccgcaactcttcgcgagtcgttagacgaagtgacgagtcggccctttgcgcgtcagttggaatcgcacgaacgcaaattcctgcatgggctgacgggcgcactgttgaacgaaggacgaggggtacacgacgtgttgcagcattttgcacggagcctcaagagcttcgtgcagagccgcgagtttcttgagcaccggcgccttcactccctactgaaagaagcaacgcaggcagcgctcaccgccaagaatgcagttcgccctaatgagcaggtcggtttcgagctgatgcagtccagcggtcgcatccggtcagtatcacagtgggcgctctatgaccccacgcaacgagtgaccgattggtcaatgcgagttgcggaaccctctgagctggacctagaaaccgtgagcgagctcgtgcgacagtcggaaatcgactttcgaacgctcaaagcccacttgcggaccattctcgagcgccagtcgcaggtcaccattggccagacattgattgagtttccagcggaacaaggtcttggcagcgtcgttggctatgtggcgttgggtgccaagcacggcgaggtcacggacggcatcgagctcgtctcatgggaaggcgacgacacgacccagcgccgcgccaaaattccgaccatctatttcatgagggagcgctatcttgaactcgttgactga

SEQ ID NO: 49640 - DNA, 729 bp, Burkholderia monticola
ttgactgaccccaccgacgcgagcttcgccgacgagcccgggcccgatacgccagtcgctgatactgcgacgttccgaggtgataccggttcgcttccaattgatactaggcgggtgctggtgcaactgcttctgggcccttccgtggacgcccggcgtcagtcaaagctctggccggtgctgcttcgcgatgaagccgtcgtccgctcccgcatgcatgagctctttcttgaggtcgtcattgaccacgagcagcgagtcgcgttcacgcggcaagttgtctccgaggacatcgatgtccccgttcttcttcgcaaggcatcgctcaccttcctggatacagcgttgctgctcttcttgcgacagcgattaactcaggccgacgcgcagggggaacgggctgtcgtgtcgcacaatgatatgcaagaacacctgtcggtgttcgaacgggggaacaaccccgaccacgcaaaatttgagaagcaaatcgtcaacgccgtcgacaaggccaagaagctcagcctgctgcaattcgttcgcggctctggtgagagatatgaagtctcaccgacgctaaaactcctcttctcagccgaagaaattcaagacctgacacgaacttatgccgctttggcgtcctcgcaatacgccataaacactggcgaaggcaacgccactgaagacgatgcgtcgtccagcagtgccgaaaacgaggaggactcgctatga

SEQ ID NO: 49641 - DNA, 3354 bp, Burkholderia monticola
atgaatatcgaccagcacgtgttgttggacggcagcgatgaccagttccgccttgcgcgtatacagacgttcaactggggaaccttctcaaacgtcttcgacttccccatccccaaagagggctacctcttcgtggggccgtctggttcggggaagtcgacggttctggacgctcacgcggcgctgctgacgccaccgaagtggttagacttcaacgttgcagcgcgtgaagcagaccggcatggacgcgaccgcagcgccatgacctatattaggggtgcttgggcccagcaaacgggagacggtggcgagtacgtttcacaataccttcgcggcggcacgacctggtctgccatcgcagagacctatcgcgatgaacaaggtcgggtggtcgtgctcgctcaggtcctatgggtcaagggcaacaccacggcgtcaagcgacgccaagcggttgtatctcaccctcgagcgagagttcgagattcaggagctggagttcttcgtcaagaacgagttcgacacccgccgcttcaaacacgacttgctcgatgcgaaggtgtacaccgaattcagcgcatatcaagagcgctttcgtcgtttgctggacatcgacaacgagcgcgccctccgccttctgcataagacgcagtcggcgaagaatctcggtgacctcaacgtgttcctgcgggacttcatgctggatgagcctgagacgttcggcatcgccaccagcctaatcaacgagttcggggagctgaacgaggcacaccaggaggtagtggctgcccgcgaccaaatccagatgctcaagccggcgcgggacgcgcacatggagcttgaacgcggcaacaacgaccgtatcgggctgcaggcaatccagactgccattgaccagtatcgagagcaccgtcgcaaggtcctcgtggacgagcggattgcagaactggaggtcgacagggaggcatcgcggcaggaattccaacgtctctcgcagattgccgatgacgagtccgttaagctgacagaccttcaacgtcagaagctcaaaatcggcgctgatgtcttggtccgtctcgaagaaaatatcaaggcgacggaggcagataaactcgttcggatgaacaggcgtgaccaggcggcgaccgcgtgcaaagtcatgggatgggcgatgcctgacagcgttgtctggttcgtccagcgagtcgaatcagccaagcagcgtgtcctcagggctcacgacctgacaaaggaagtagaggaccgtaaggaccagctcaaggcagaccatcgccaggccagcgaagagttcaccaccgtggtggctgaggtcaaagccctggagcgtcaaaggtccaaccttccggcacggctcgtcgacctgcgtgagcgcatggcccgcgacctttcgatacccgaggcgaagctacctttcgcgggcgaactggtggaagtgcgctctgattcgacagaatggcggggcgccattgagcgcgtcctcggcggtttcgcgcgctccatcctcgtggatgagaagctctacccggcggtctcggcttacctgaacgagcgcaacattggcgagcgactcgtgtactttcggattgtccagcagacatccggacgcatgcctggtcccaattcactggtgcgaaagctcaacttcgcgcagggaagctttggtgaatgggtgcgggaagagctaaaacactcatacgaccttgagtgcaccgacacgctgctggcgttccgcaatgcccctcgtgccgtcacccgtgaaggcttggtcaagcacaacacggtgcggcacgaaaagaacgaccgccactcggtcaacgaccgcagccagtgggtactgggctttgacaataaggacaagctcactctgtacaagaacaaggcagcggagcttggtggacgaatcactgaactgcgggtggctctggacaagattggggatgaagaagtcctccaacagcaacagctcttgcaatgccagaacctgtcgaacttgacctggaacgacgtcgacgtcggcgcacttctggcccgcattgacgacttgacgacacgcctcaacgcggagcgggacgctaggccagaccttgccattctggatgaccgcataaaaacgcaggagggcgttcactccacggctatcggcaagaagaatgaagaggatgccaaaggtcgctccatcaagtctgacatcgagaagctaaatgtcaagctggccgagctggctcgtctatggcccacctctgaccggccaccggcgttcgccgcccaaatcgcagctcggtatgtggccaccggcaaggaggttactctcgagaatcttgaccaggtgaacgggcaggtggaccggagcctcagtaacgaattgcgtgcgattgagagtcacttgggcgagttgcgtaatgctatcgttcagcgcttcgtagagttcaatcgcttgtggccttcggttgccggtggtctggacgctacgctagccagcgccgacgactatctggcaaagctgaagcgtctggaagatgacaaccttccggcatttgaagaccgattctttgggttgctacgcgagcagagtgaccagaatctcactctcctggctaccaagctcgacgaggagcgttcggctattcgctcgcgcatggaactggtcaacgagagcctggagacagcgccgttcaacccgggaacgcatctcgtcatcgaaacgaccgacaagtcgctcgaggatgtgcggctcttccgcgcgagcttgaaggagtcgctcagccactcgttctcgaacgaccgcgacttggcggaagaccgcttcaagacgttggctgcattggttaagcgcctcgccagccaagaaacagtggacaagaactggcgaaatctggtgctcgacgtcaggcagcatgtggagtttgttgcgcgcgagcttgacggggatgacgtcgaggtggaggtctaccgcagtggcgcaggtaagtcgggcggacagcgtcagaagctggctgccacctgcctcgcggcggcactgcgctatcagcttggcggccaggaccgcgcgcttccgagctactccaccgtggtgctcgacgaagcattcgataaagccgatgcggaattcactgcgatggcgatgaacatcttcaaggcgttcgggtttcagatgattgtggccacccctctgaaatccgtgatgacgctggagcctttcatcgggggagcgtgcttcgtgcatattaaggaccgcaagaagtctgccgtcatacccatcgagtacgacagcgagtcccatcgcttgaagttgactcaggacgtgcgcaatgccgaagaaactactgtctcctga

SEQ ID NO: 49642 - DNA, 1470 bp, Stenotrophomonas sp. DDT-1
atgaagcaccgcgaacgcatctcccgttaccgccatctgcgcgaacagccccagtggaagctgctcgccgccgaccacgctccggaaatcatcggcctgctgcaggggctgctgatggacggcgagcgtaccctgccttcgtcggtgctcaacgagcgcctgcagcgtgcgctggatcagctcaacggcgacgaactgtcgcgcgagctgccacgtaccgcgcaggcctacatcgcgcactggctggcccagggctggctggaacgccgcctgcccgagggcgccgaccaggagcagtacgagctgtcgaccgcagcactgcaggcgatccgattcgccgacggcctcgagcaggcccgtgtggccgccaccgaaagccgcctggcgctggtcatcgaacagctctcgcagctggccgcgcagaccgaatccgatccggacgcccgcctgtcggcgctgcgcgacgagcgcgaccggatcgacgccgagattgcccgtgtcagcgccggccgtgtgatcgcgctggacggcaagcgcgcgctggaacgtgcgcgccagatcatcggcctggccgacgagctgaccgaggacttccgccgcgtgcgcgacgacttcgagcagctcaaccgcgagttccgcgaacgcatcatcgacgacgagggcgagcgcggcgatgtgctgtcgcagctgttcgaaggcgtggacgtgatcggcgaaagtgatgccgggcgcagcttccaggccttctggcgcctgctcaacgacgccgagcagagcgcccagctcgatgccgcgctggaagcggtgctggcgcgtggcttcgcccgccgcctggaccgcaacgaacgcaacttcctgcgcggcttcaccagcaccatgctcgagcgcggtggccaggtgcacgatgtgctgcagcacttcgcgcgcagcctgcgcggcttcgtgcagagccgtggctatctggaacagcgtcgcctcaaccagctgctcaagcaggcgcagtccgaagcgctcgctctgcgtgacgagttccccgcacaacgtggcatcggccgcgacctgcagctgaccaccagccgcctgcgctcgtggtcgcaatggaaactgcacgatccgcgcagcgcccaggtcgatggcaacgtcgaatacaacgacgcagccgcgatcagcctggaaagcgtcggcgatctggtcgcttcgtccgaaatcgacttccgcaccctgcgccgcgacctgcacgacctgctcgatgcacagccgcgtctcagcatcgcccaggccctgtcgcagcgcgaagcgccgcagggcctcggcagcgtcatcggctacctgtcgctgggcacgcgcttcggcaacgtggtcgccggcgagcaggagcttgcgcaatggcgtggtggcgacggccagatccgtcgcgcccgcatcccgctggtttggttcacccaggagagacgccatgagctggcatga

SEQ ID NO: 49643 - DNA, 702 bp, Stenotrophomonas sp. DDT-1
atgagctggcatgaagatcccatcgacgcaccgcaggccgacgtggcggaagacgcctacgaagccgagccggtggcggccgtggcgcagccccgccgtggcaacgacgtgtactacctcggcgataccgggcgcctgccgctggatgcgcgccgtgcgctgtgccagctgctgatcggccccagcatcgaccagctgcgccacgccaagctgtggccggcgctgatccgcagcgaggcggccatccgctcatcgctggccgacctgttcctggaactggtgctcgaccgcgacagtggcgtggcgttcacccgccaggccgataccgaagacgtcgatgcgccggtgctgctgcgcacctccccgctgaccttcatcgactcggtgctgctgctgtacctgcgccagcagctggccgaggccgatgcgcgcggcaaccgcgcagtggtcgccgacgccgagatggccgaagcgctggccatctacgaaaagaacctgtccaccgaccgcgccggcttcaaccgtcgcgtcgcatcggcggtgcagaagatgaaggacaaccacatcctgacccgcctcagcggccaggaagaccgccacgaagtctcgccggcgctgaagctgctgttctccgccgaagacgtgtcccagctttcggcggtctaccgccagctgcgtgaaaccccggccgccgaggcctga

SEQ ID NO: 49644 - DNA, 3381 bp, Stenotrophomonas sp. DDT-1
atggctatctccaagcacactcccgccctgttcaacgaaggcctgccggacccgcgcctgcagcagttccgcatgcgccgcctgcaggtacacaactggggcaccttcaacggcctgaccgaagtaccgatcgccgagcgcggcttccttttcgtcggccgctccggctcgggcaagtcgaccctgctcgatgccatgtccgcgctgctgacgccaccggccatcgtcgacttcaacgccgctgcgcgtgaagccgagcgcagtggccgcgaccgcaacctggtgtcctacgtgcgcggcgcgtgggccgaccagcaggacagcggcaccggcgaaatcgccacccagtacctgcgcaagggcgcgacctggaccgcgctggtgctggaataccgcgccggcgatggccgcgtggtcagcctggtgcgcctgctgtggatctccggcaacggcacctcggccggtgatgtgcgcaagcactacatgatcgccgagcgcccgttcgacatcgccaaggacctcggcggtttcgacctggacctgcgcaagctgaagcagaagctgcccgacctgcaccacttcgacaccttctccggctacgccgagcgcttccgcgacctgctcggcatcgacaacgagatggcactgcgcctgctgcacaagacgcagtcggcgaagaacctgggcgacctcaacgtcttcctgcgcgacttcatgctcgacacgccgaagaccttcgacgccgccgagcgcctggtcagcgacttcgccgagcttgatggcgcgcaccaggcggtggtcactgcccgccgccaggtggaaaccctgttgccggcgcgcgcctactacaacgacctgaaggaaatgcaccgccgtcgtggcgacgacgaagcactgaagctgggtgtcgacagcttccgcgaaagccggcgccaggcgctgatcgaagcgcgcctgcgcgagatggacgtgcgtgaccgcggcctgctcggcgaagaatcccagcgccgtgccgcactggacaatcacaccgagcgcctggccgaactggagctgcagcgccgccagcagggcggtgagcgcatcgaggaactggaacgcgagcagggccgtgccgaagctgagcgtgaccgccgccaggccaagcgcgagcaggcacgccaggcggcgcagcaactgggggccgaactgccggacgacgcccatggcttcgccgaactggtcgagcgcgcacagaacgagctgcaggaccgccagcgtgcctcctcggcactggacgacgcgatcagtgaccgcctgggcggcaagcgcgatgacgagcgccgcttcggcgaggtccgtgccgaactcgaagcgatgcagcgcacgccctccaacatcccggcgccgatgcagaagctgcgcgcgcgcctggccgaggaaaccggcatcgccgaggcggcactgcccttcgtcggcgaactgatccaggtccgctcggaagagcagggctggcagggtgccatcgagcgcgtgctgggtggtttcgcgctgtcgctgctggtcgatgacaagcattacaacgacgtcgccgaatgggtgaaccgtacccatcttggcatgcgcttcacctactaccgcgtgcgccgcaacgatgatgcattcgcccgtgagccgtcggcgaagtcgctgctgcacaagcttgaactgcgcgagcatgtgttcgaaagctggctgcgccgcgagctgggcaagcgcttcgactacgaatgcgtggatgccaagcagctgcgcaacgtcgaccgcggcatcacccgcgaaggccaggtcaagcatcccggcgaccgtttcgagaaggacgaccgcagtgcggtgggcgaccgccgtcgctggatcctcggcttcaacaaccacgacaaggtgggcgccttcgagcgcgaagcacaggagctggccaagcgcatcgccagctgcgagaccgacatcgcgcgcctgcgcgggcagcgtgaccgcgacaacgaacgccgcctggcctgccacgagctggtcagcatcagctggaacgagatcgacatcgccgctccgcagcagcgcctgagcgatatcgaagccaccctgcgcgacctgcgcgaaggcaacgccgatctcgccaagctggccaagcagatcgacgccgtgcgcgccgacatcgagcagtcccgccgcacctatgaagacgtccgcgtcgagcgcggccagctggtcaaggaacgtgatcgcctggaccgcgcacgccagcagagccgtgcactggtgctgccgagcctggcccaggagcaggaagccggcctcgccgagcgcctgcaggaacagggtccgctcagcctggaaacgctcgaagcgcacatgcgccaggtcagcaacgcgctgaacgagcagttgtcgtcctcgcagcaggacctcaaccgcatcgagaaccagctgatcggctgcttccgtcgcttcatccagcagtggccggaggagtcgggcgacttcaccgtgtcggtggcctcggccgaggacttcctcgcacgcctcgaacggctggaacgcgacggcctgccacagcacgaagagcgcttcttcgacctgctgcagaaccagagcaagaacaacctgctggccctgcagcgtcacagcgcagaggcccgcaagtcgatcggccagcgcctggacgaggtgaacgccagcctggagcaggtgccgttcaaccgtggcacgctgctgaccatcgaactgagcgaccgccgcctgccggaggtcgctgagttccacctgcagctgcgcgaggtgctgtcgcagcagcagaccgagcagcgcgagctggccgaatcgcagttcaccgtgctgcgccagctggtcaaccgcctcggctcgcaggaaggcgaggacaagcgctggcgcgagctggtgctggacgtgcgcatgcacgtggagttcatcggcgtcgagctggatgcggaaacgcgccagcaggtcgagatctaccgcagcggcgccggcaagtccggtggccagcgccagaagctggccaccacctgcctggcggccgcgctgcgctaccagcttggcggcgctgacagccagctgcccagctacgcggcggtcgtgctcgacgaggccttcgacaaggccgacaacgagttcaccgcgctggcgatgaacatcttcgacaacttcggcttccagatggtggtcgccaccccgctgaagtcggtgatgacgctggagccgttcatcggtggcgcctgcttcgtcgaaatcagcggccgccacgactccggcgtgctgctgatcgagtacgacgaagagggcaagcgcctgaagctgcccgagcgcagccgccagcaggccaacgaaccggaagaagccgaggcctga

SEQ ID NO: 49645 - DNA, 1476 bp, Acetobacter malorum
atgaagcttgatttcacaactctcaacagtatgcgccagcataatccggcctggcgcctgttatgctcggaccatgccccccttattctcagctttttgcatcaggccttcgtccgccccaacgtgcgcagtctggaagccgagagcatggcggaagcactggaggacacactctatgctttgcgccagcaactggatgaaaacgctttcccccgaacagcccgggaatatctggaagactgggcctcacccgacaaaggctggctgagaaaattctatcagctaggaacagacaacgccgtcttcgacatgaccccagccaccgagaaagctctttcatggctggagcaactcgcagagcgcagctttgtcggcacggaatcccgcctgcggaccctgtttgacctgctccgccagatgaatgaaggcacccagagcgacccggaccagcgccttgctgacctgcaccagcgtcgggatgaaattgatgccgaaattgcccgcatccagagtggggatctcagcctgatggatgataccggcatcaaggaacgcttctcccagttcacccgcatggcacgcgaccttctggccgacttccgtgaagtggaacataatttccgccgtctggaccgtgcggtgcgggaacgcgttgctttgtgggatggcaccaagggagctttgctggatgaaattctggctcagcatgatctgattaatgagtccgatcagggtcgcagcttccaggccttctggaatttcctcatgtccagccgcaggcaggaagaactttcgcagcagctggaacatatcctctccctgcctgtcattgcggagcaaaacccggacccgcgactgcgccgtattcattatgactggctggaagcgggcgaccacacacagcgcaccgtcgcacaactctcccaccgcctgcgtcagtttctggatgaccagagccggcaggaaacccggcgcattatggaaattctgcataatatcgaggcccacgccatcgccgcacgcccttacctgtccgactgcccgcctgatgaggcactgacggatctggatgccatggcagcctcaccagaccttattatggagcggcctctttattcgcccccactccccaccatcctgacggttgacccgttgccggaagacaccgcggaggatgtggaccccatagccctttatgaacaggtggtggtggaccgcgtgcgcctgaccgaaaacattcagcaggctctgtcggaagccccgcaaatcagccttgctgcgcttctgagtcgccatccgttggaacaggggctgtctgaacttgtagcctatcttcagctcagcagtgagcgcttcgagagcctcattgatgaaaagacaaacgatcatgtaaactgggacatcatgacagaggacgggtccatcataacgcgccacgccaccctgcaacgcgtaatttttgtgaggtcggcatga

SEQ ID NO: 49646 - DNA, 3408 bp, Acetobacter malorum
gtgactgacacccagcaagccccgctcgactttgccgtggatgatcgtctggccgggttccgtctgcatcgtcttgaagtgctgaactggggcacgtttgacaagcggatctggcgctttgacctcaacggtcggaacgcgctgcttaccggcaatattggctcgggcaaatccacactcgtagacgccatcaccaccctgctcgttcccgcacagcgcattgtttataacaaagctgcaggggctgatacgcgtgagcgctctctgcgctcctacgtgaccggccattataaatccgaacgcaatgatgcaactggctccaccaaatccgtcagcctgcgtgacacacaaagctacaccgttattctcggtgttttcaaaaatgaagggtatcttcaaactgttacactggcgcaggtcttctggataaaaaaacagcaggtgcagccggcacgcttctttgtgtgcgcggaaaaagaactgtccattcaggagcatttcaccgggttcggcaccgacatcctgcaactgcgcaaaaacctgcgcgcacagggttcggaagtggaagacagcttcaaccgctatgccgcatggttccgtcgccgctttgggattgaaaacgagcaggctttagacctgtttctgcaaactgtctccatgaagtctgtcgataatataacagactttgttcgggagaacatgctggcgcggtttgacgccacagagcgcatccatgccctaatttctcattttgaagatctggatgactcgcaccaggccgttctgaaagcacagaaacagatcagtctgctcacgcctttaacagaagacctcaccgcccacgcggaaagtaaaacccggcatgacacgctcaaagcttgccgtcaggcactgccgggatattttgccagccagaaagccactctgcttgagcagaagattgccaaagaacaggacactgccgcaaccaatcagcaacagctaaccgaacaggatgccgtccgtaccaccagcaagcagcagctggacgaaatcaaacaggctatttatgccaatgggggcgacaggcttgagcagctggccatcgctatccagcaagccgaaaagaccagtgaagatcgccgcaagaatgccgcgtattacgcaacgcttgttgaaaaactaaatgaaaaacctgcgcattctgcggaaggctttctggagctcacacagcacctcaagaagcagaaaaacgaatggaaaaagcaggacacctggctagcgaaggatctgaccgaacagagcattcttttccacgaagaaaagaaccaacacgccgagattgtcaccgaactggacagcctacggaaacgccagagcaatattgacgaacgacagatccgcatgcgcgccatgctgtgtgatgcgctggatgtgtcagccgaagacctgccgtttgccggagagctcatccgcgtgcgggatgacgcacgggagtgggaaggtgcagcggaacgcctgctgcatggcttcgcattatctctgcttgtgccggaccatctctatgcacaggtggtggactgggtggaccgcacacagctaaaagggcgtttggtttactaccacattcagcaacaccgctcgggctcccatgccgtccgccactccaatacactcgcccagaaactggaagtacatccggactcccccatgcggctctgggtggaaaatgaactggcgcaccgttttagcttcacctgctgcgaaacacaggacgatttccgccgctcaagcaaagccgtcacccggcccggtcaggtcaaggaaccgggaggccggcacgaaaaagatgaccgccatcggattgatgaccggagccgttatgttctgggctggaacaatgccatcaagattgccgctcttgaagagcgacagcgagagcaggaagcgctgatccagaaacacgcgggtgaaattgcgcaggccgaaaacacccgcaaaatgctgcaggaacgttttgaaacgctgacccggctggagcgctaccccgattacacccaactggactggcagagtgccgcacaaaccgcagctcaactgacagccgaacgggaagcgctgacagcgacttccgatgttctgcgtgaactcaaacagcagaaagagcatgcggaacagacacaacagcaggctgaagcagagtatatgatcctgtttaaaaaacaggcgcttctggatcagtccgttgaaactcttcaggcccgcctgcaacattgccagacggttctgaacgactatacgctcacaccgcagcaggagcaggaactcaccgagcttcaaatacagctgaatggcgcagagctatccagccttgaggcctgtgagggcgcggaaacgcagctgcgcgaccagctggatacacagattgaccaccagcagcgcacactggattccctgcgcgacagtattttgaaagacatgcgggagttccggacaacatatccggtcgaagcgcaggacatggacgatcatctggaggctggcccagagtattgcgcgttgctggcacaactcaaaaaagatgaccttccgcgctttgtcagccgctttaaaaacctgctgacagtcaatacgattaacgaaatcgctaatttcaatgcccatctggcgcaggaacgggagattattaaggaacgaattgccgtcatcaatacgtccctgacccagattgactataacccggaccgctatatccggctggaagcccaccagacgctggacccggaaatccgtgactttcaggcctcccttcgggcctgcaccgaaaatactgtttccggggatgataccgaacagtattccgaacagcgcttttatctggtgaaaaccatgatcgaacgctttcgggggcgtgaaggtctggcggaacaagaccgccgctggaccaacaaagttactgatgtccgcaactggttttccttcgcagccagtgaacgctggcgcgcggatgagaccgagtttgaccattatacagattccggcggcaaatccggtggccagaaggaaaagctggcctataccattctggcggccagtctggcatatcagttcgggctggaatggggcgaggtgcgctcgcgctctttccgctttgtggtgattgatgaagcctttggccgtgggtctgatgactccacccaatacggcctgcggctgttccagcaactgaacatgcagctccttattattacgcccttgcaaaaaatccacatcattgaaccctttgtttcaagtgtgggctttgtggacaataaggatggaaattactcgcgcctgcgtgttctgagcattgaagagcattttgccaacaaggcatccctccatgatgcagcgccagccctgctcaggcatgaagagcagtctgtgtga

SEQ ID NO: 49647 - DNA, 1182 bp, Acetobacter malorum
gtgaactggactacgccggcagacctcaaaaaacagcttgagcgtttatggaaaaaggggacactccccaatgcccttatcagcaaaacatgcttatttccgttaaccctcaccctgcgcaccccaagtgcctcagatattacgaagcacctccatgccgtcagagactggacggaaatgcttaatgcgatgcggcatatcaggctcatccgacacacagtgaaaaatagggtgcagggcacacagaccatcccgcacaaagtcgttattgaaacactggaagatgctcttgccttactggacaagcacgacaccgctcgtcagattttggcgctccatgccctgacaatagaaaaagcgccttttctactaccttggcttgctcaaaatgctctcacagctcaccgccacgccacagaatgggaacgacttttaaccctcgctgtctggatgagggacaaccctgctcccggcatctatctgagacaggtcgacctaccgggaattcataccaaattcattgaacgcaacaggactattctctctcagctttttcagcatgctctgccagaacaatccgttaatagagcctgttctggcatggatcagtttgagccacgctacggatttcgcaccaaacctttacgcattcgttttcgggttttggatgctgcactctctcccttccccaccatcgcgcatcccgacatcacgctggactccgaaagttttgcagccctatcccttatgggatgtcgtattttcattgtggaaaatgaaagttgctttcttgctttcccttatcttgagaatgctctggtcatttttggagcaggctattgctgggatgttctgaaacccgcccactggttgcaaaaatgctctatttattactggggagacattgatacgcacgggttcaggattcttgatcacctccgtgccattttaccccggacgcattctttcctgatggatgagccaaccttgctcgcttatagcgcgttctgggataaggaaccttcccccgtgcggcatccgctttcccgcctaacgccctctgagcagagtgtttttacggctcttcaaactgatctgtttagccagaacctccgacttgaacaggagcgcattcatttttccgacctgcgcaagatactggactctctggtccagccataa

SEQ ID NO: 49648 - DNA, 1476 bp, Acetobacter malorum
atgaaacttgatttcacaaccctcaacagtatgcgccagcataacccggcctggcgcctgttatgctctgaccatgccccccttattctcagctttttgcatcaggccttcgtccgccccaacgtgcgcagtctggaagccgagagcatggcagaagcactggaagacacgctctatgctttgcgccagcaactagatgaaaacgctttcccccgaacagcccgggaatatctggaagactgggcctcacccgacaaaggctggctgagaaaattctatcagttggggacagacaacgccgtcttcgacatgaccccggccaccgagaaagctctttcatggctggagcagctcgcagagcgcagctttgtcggcacagaatcgcgcctgcggaccctgtttgacctgctacgccagatgaatgaaggcacccagagcgacccgaatcagcgccttgctgacctgcaccagcgccgggatgaaattaacgctgaaattgctcgcatccagagcggggatgtcagcctgatggatgataccggcatcaaggaacgtttctcccagttcacccgcatggcgcgagatcttctggccgacttccgtgaagtggaacataatttccgccgtctcgaccgcgcggtgcgggaacgcgttgctttatgggatggcaccaaaggcgctttgctggatgaaattctggcccagcatgatctgattaatgagtccgatcagggccgcagctttcaggcattctggaacttcctcatgtccagccgcaggcaggaagaactttcacaacagctggaacacattctctctctgcctgtcattgcggagcagaacccggaccctcgcctgcgccgtattcattatgactggctggaagcgggcgaccacacacagcgcaccgtcgcacaactctcccatcgcctgcgccagtttctggatgaccagagccggcaggaaacccgtcgcattatgggaatcctgcataatatcgaggctcacgccatcgccgcacgcccgtatctgtccaactgcccacccgatgaggcgctgacggatctggatgccatggcagcctcaccagaccttattatggagcggcctctttattcgcccccactccccaccatcctgacggttgacccgttgccggaagacaccgcggacgatgtggaccccatagccctttatgaacaggtcgtggtggaccgtgtgcgcctgaccgaaaacattcagcgggctctggcggaagtgccacaaatcagccttgctgcgctactacgtcgccatccgctggaacagggattgtctgaacttgtggcctatcttcagctcagcagtgagcgcttcgagagcctcattgatgaaaagacaaacgataatgtaaactgggacatcatgacagcggatgggtccatcataacgcgccacgccaccctgcaacgcgtaatttttgtgaggtcggcatga

SEQ ID NO: 49649 - DNA, 759 bp, Acetobacter malorum
atgagccagacggtcaatactgcagaggacgcacaggcttcagtccaagctccggcttctctctccacactcgccattacgctcttaaaaagcgtgatctaccgggaggaagatgaaagcctatgggggcatctgctccgcctgcaaaatcaggtgcgggattatgttgctgtgttggggctagtcctgattatcgaccccgccgagggctatgcctatctgcgcagcgcaccagagcccgaagaggaagaaggcgcatcccgtatgctccgtctgattgcgcgacgtccgctctccttccatgtcagtctagttttagccctgctccgccagcaactggtccggtttgatgccatgggtggcgagacccgccttatcctgagccgcgatgatatcgcctccatgcttcagaccttcctaccggaaaatagcaatgaagtccggcaacttgcgcagattgaaacctatatccgccgcgtggctgaactcggctttttgcgtcccctcccccccaccagtgcagatgcccctcatgccccgccccgctacgaggtgcggcgtatcctgaaggcctatattgatgtggaatggctggccacgctggatgaacggctggaagcctatctggcgcatgcccgcagccttgagcaaacagacctgccccttgtggcaactcctaccccgccagaagagaacaccgcagctgagtcccagctttttcctgaccatgccgatacaggactgaccaaccgtgactga

SEQ ID NO: 49650 - DNA, 3369 bp, Acetobacter malorum
gtgactgacacccagcaagccccgctcgactttgccgtggatgatcgtctggccgggttccgtctgcatcgtctggaagtgctgaactggggcacgtttgacaagcggatctggcgctttgacctcaacggtcggaacgcgctgctgaccggcaatattggctcgggcaaatccacactcgtagacgccatcaccaccctgctcgttcccgcacagcgcattgtttataacaaagctgcaggggctgatacgcgtgagcgctctctgcgctcctacgtgaccggccattataaatccgaacgcaatgatgcaaccggctccaccaaatccgtaagcttgcgtgatacacaaagctacacggttattttgggtgttttcaaaaatgaagggtatctgcaaaccgtcacactggcgcaggtattttggataaaaaaacagcaggtgcaaccagcacgcttctttgtatgcgcggaacaagaactgtccattcaggagcattttaccgggttcggcacggacatcctgcaactgcgtaaaaacttgcgcgcacagggttcggaagtggaagacagcttcaaccgctatgccgcatggttccgtcgccgctttgggattgaaaacgaacaggctttagatctgtttctgcaaactgtctccatgaagtctgttgataatatcacggactttgtgcgggaaaacatgctggcgcagtttgacgcgactgaacgcatccatgctctgatttctcattttgaagatctggatgactcgcatcaggccgttctgaaagcgcagaagcagatcaacctgcttacgccgttaacagaagacctcaccgcccacactgaaagtaaaacccggcatgacacgctcaaagcctgccgtcaggctttgccgggttattttgccagccagaaagccactctacttgagcagaagattgccaaagagcaggacgttgccgcaaccaatcagcagaagctgactgaacaggatgccgtccgcacaaccagcaagcagcagctggacgagatcaaacaggctatttatgccaatgggggcgacaggcttgaacagctggcagttgctatccagaaagccgaaaagaccagtgaagaccggcgcaaaaatgccgcgtattacgcaacgcttgttgaaaaactaaatgaaaaacctgcgcattctgcggaaggctttctggagctcacacagcacctcaaaaagcagaaaaacgaatggaaaaagcaggacacctggctagcgaaggatctgaccgaacagagcattcttttccacgaagaaaagaaccagcacgccgagattgtcaccgaactggacagcctacggaaacgccagagcaatattgacgaacgacagatccgcatgcgcgccatgctatgtgatgcgctggatgtgtctgccgaagatctgccgtttgccggagaacttatccgtgtgcgggatgacgcgcgggaatgggaaggtgcagcggaccgcctgctgcatggcttcgcgttatcactgcttgtgccggaccatctctatgcacaggtggtggactgggtggaccgcacacagctaaaagggcgtttggtttactaccacattcagcaacaccgctcgggctctcatgccgtccgccatcctaatacactggcccataagttggaagttcacccggactcctccgtgcgcctctgggtggaaaatgaactggcgcaccgcttcagctttacctgctgtgaaacccaggacgatttccgccgatcaagcaaagccgtcacccggtcaggtcaggtcaaggaaccgggcggccgacatgaaaaagatgaccgccaccggattgatgaccggagccgttatgttctgggctggaacaatgccatcaagattgctgctcttgaagagcggcagcgggaacaggaagcgctgatccagaaacacgctggtgaaattgcgcaggccgaaaacacccgcaaaatgctgcaggaacgctttgaaacgctgacccggctggagcgctaccccgattacacccagctggactggcagagtgccgcgcaaacagcagcacagctgacagcagaacgggaagctctaaccgcaacatccgatgttctgcgtgaactcaaacaacaaaaagagcatgcggaacagacgctgcggcaggctgaagcggagtatatgatcctgttcaaaaagcaggcacttctggatcagtctgttgaaacccttcaggctcgcctgcaacattgccagacggtgctgaacgactatacgctcacaccgcagcaggagcaggaactcaccgagcttcaaatacagctgaacggcgcagaactatccagccttgaagcctgtgagggcgcggaaacgcagctgcgcgaccagctggacatacagattgaccatcagcagcgcacactggactccctgcgggacagtattctgaaagacatgcgagagttccggacaacgtatccggtcgaagcgcaggacatggacgatcatctggaggctggcccagagtattgcgcgttgctggcgcaactcaaaaaagatgaccttccgcgctttgtcagccgcttcaaaaaccttctgacagtcaatacgattaacgaaatcgctaattttaatgctcatctggcgcaggaacgggagattattaaggaacgaattgctgtcatcaatacgtccctcacccagattgactataacccggaccgctatatccggcttgaagcccaccagacgctggacccggaaattcgagattttcaggcctcccttcgggcctgcaccgaaaattctgtttccggggatgataccgaacagtattccgagcagcgcttttatctggtgaaaaccatgatcgaacgcttccgggggcgtgaaggtctgacggatcaagaccgccgctggaccaacaaagttactgatgttcgcaactggttttccttcgcggccagtgaacgctggcgtgcggatgagaccgaatttgaccattatacagattccgggggcaaatccggtggccagaaggaaaagctggcttataccattctggcggcaagcctggcgtatcagtttgggctggaatggggcgaggtgcgctcgcgctccttccgctttgtggtgattgatgaagcctttggccgcgggtctgatgactctacccaatacggcctgcggctgttccagcaactgaacatgcagcttcttattattacacccttgcaaaaaatccatattattgaaccgtttgtttcaagtgttggctttgtagacaataaggatggaaattactcgcgcctgcgtgttctgagtattgaagagcattttgccaacaaggcatcccaatctgcatag

SEQ ID NO: 49651 - DNA, 1323 bp, Acetobacter cerevisiae
atccgcgtggaagacacgctctatgcgttgcgccagcaactggatgaaaacgcattccccagaacagcccgggagtatctggaagactgggcgtctcccgataaaggctggctaagaaaattctatcagctggggacagacaacgccgtgttcgacatgaccccggctaccgagaaagctctttcatggctggaacaactggcagagcgtagctttgtcggcacagaatcccgtctgcggaccctgttcgacctcctgcgtcagatgaatgaagggacgcagagtgaccctgaccagcgccttgcggacctgcatcagcgccgggaggagattgatgccgaaattgcccgcatccagagcggggatctcagcctgatggatgataccggtatcaaggaacgcttctcgcagttcacccgcatggcgcgcgaccttctggccgatttccgtgaagtggaacataatttccgccgtctggaccgcgccgtgcgagaacgcgttgctctgtgggatggtacaaagggcgctttgctggatgaaattctggcccagcatgatctgattaatgaatccgatcagggccgcagttttcaggccttttggaacttcctcatgtccagccgcaggcaggaagaactttcgcaacagttggaacatattctctccctgcccgtcattgcggcgcagaacccggaccctcgcctgcgccgtattcattatgactggctggaagcgggcgaccacacacagcgcaccgtcgcacagctctcccaccgcctgcgtcagtttctggatgaccagagccggcaggaaacccggcgcattatggaaatcctgcataatatcgaggcccacgccatcgccgcacgcccgtacttgtccgactgcccgcccgatgaggcgctgacggatctggacgccatggccgcctctccagaccttattatggaacggcctctttattcgcccccgctccccacgatcctgacggttgacccgctgccggaagacacgggggacgatgtggaccccatagccctttatgaacaggtcgtggtggaccgcgtgcgcctgaccgaaaacattcagcaggctctggcggaagccccgcaaatcagccttgctgcactgctgcgtcgccacccgctggaacagggcctgtctgaactcgtggcctatcttcagctcagcagtgagcacttcgagagcctcattgatgaaaagacaaacgatcatgtaaactgggacatcatgacaacggatgggtccatcataacgcgccacgccaccctgcaacgcgtaatttttgtgaggtcggcatga

SEQ ID NO: 49652 - DNA, 3408 bp, Acetobacter cerevisiae
gtgactgacacccagcaagccccgctcgactttgccgtggatgatcgtctggccgggttccgtctgcatcgtctggaagtgctgaactggggcacgtttgacaagcggatctggcgctttgacctcaacggtcggaacgcactgctgaccggtaatattggctcgggcaaatccacactggtggatgccatcaccaccctgctcgttcccgcacagcgcattgtttataacaaagctgctggggctgatacgcgtgagcgctccctgcgctcctacgtgaccggccattataaatccgaacgcaacgacgcaaccggctccactaaatccgttagcctgcgcgacacacaaagctacacggttattctgggtgtttttaaaaatgaaggatatcttcaaactgttactctggcgcaggttttctggataaaaaaacagcaggtgcagcctgcacgcttctttgtgtgcgcggaaaaagagctgtccattcaggagcattttaccggtttcgggacggatatcctgcaactacgcaaaaacctacgtgcgcagggtgcggaagtagaagacagctttaaccgctatgccgcatggttccgtcgccgcttcgggattgaaaacgagcaggctttagatctgtttctgcaaactgtttccatgaagtctgttgataatatcacagactttgttcgggaaaacatgctggcgcgatttgacgcgactgaccgcatccatgccctgatttctcattttgaagatctggatgactcgcatcaggccgttctgaaagcacagaagcagatcagtctgctcacgcctttaacagaagacctcaccgcccacacggaaagtaaaaaccggcatgacacgctcaaagcctgccgtcaggctttgccgggttattttgctagccagaaagccaccctgcttgagcagaagattgccaaagagcaggctgttgccgcaaccaatcagcagcagctgactgaacaggatgccgtccgcaccaccagcaagcagcagctggacgagatcaagcaagctatttatgccaacggtggcgacagacttgagcagctggccatcgctatccagcaagccgaaaagaccagtgaagaccggcgcaaaaatgccgcgcattacgcaatacttgttgaaaaactaaatgaaaaacctgctaactctgctgaaggctttctggagcttacgcagcatctcaggaagcagaaaggtgagtggaaaaagcaggacacctggcttgcaaaggatctgaccgagcagagcattctgttccacgaagaaaaaaaccagcacgccgagattattaccgaactggacagcctgcgaaaacgccagagtaatattgacgaacggcagatccgcatgcgcgccatgctgtgtgatgcgctggatgtgtctgcggaggatctgccgtttgccggggaacttatccgggtgcgcgatgacgcgcgggaatgggaaggcgctgcggaacgtctgctgcataattttgcattatcactgcttgtgccggaccatctctatacacaggtggtggactgggttgaccgcacacagctcaaagggcgtctggtttactaccacattcagcaacaccgctcaggttcccatgccggtcgccaccccaatacactggcccagaaactggaagtccatccggactcccccatgcggctctgggtggaaaatgaactggcacaccgcttcagctttacctgctgcgaaactcaggacgatttccgccgctccagcaaagccgttacccggtctggtcaggtcaaggaaccgggcggtcggcatgaaaaagatgaccgccaccggattgatgaccggagccgctatgttctgggttggaacaacgccatcaagattgcagctcttgaagagcggcagcgggagcaggaagcgctgatccagaaacatgctgctgaaattgcgcaggccgaaaacacccgtaaaatgctgcaggaacgctttgaaacgctaacccggctggagcgctaccccgattacacccagctggactggcagagtgctgcgcaaaccgcagctcaactgacagccgaacgggaagcgctaacagcaacctccgatgttctgcgtgaactcaaacagcagaaagaccatgcggaacaggcactgcggcaggctgaagcggagtatatgatcctgtttaaaaagcaggcacttctggatcagtctgttgaaacccttcaggcgcgcctgcaacattgccagacggttctgaacgactatacgctcacaccgcagcaggagcaggaactcaccgagcttcaaatacagctgaatggcgcagagctatccagccttgaggcctgtgagggcgcggaaacgcagctgcgcgaccagctagacacacagattgaccaccagcagcgcacactggattgcctgcgcgatagcattctgaaggatatgcgggacttccggacaacatacccggtcgaagcgcaggacatggacgatcatctggaggctggcccagagtattgcgcgttgctggcacaactcaaaaaagatgacctcccgcgctttgtcagtcgctttaaaaaccttctgacagtcaatacgattaacgaaattgccaatttcaatgcgcatctggcgcaggaacgggagattatcaaggaacgaattgccgtcatcaatacgtccctgacccagattgactataacccggaccgctacatccggcttgaagcccaccagacgcaggacgcggaaatccgcgattttcaggcctccctccgtgcctgcaccgaaaatgctgtttccggggatgataccgaacagtattccgagcagcgcttttatctggtgaaaaccatgatcgaacgcttccgggggcgtgaaggccttacggaacaggaccgccgctgggccaataaagtcactgatgttcgcaactggttttccttcgcggccagtgagcgctggcgcgcggatgaggccgagtttgaccattatacagattccggcggcaaatctggtggccagaaggaaaagctggcctataccattctggcggccagtctggcgtatcagtttggtttggaatggggcgaggtacgctcacgctccttccgctttgtggtgattgatgaagcctttggccgtgggtctgatgactccacccaatacggcctgcggctgttccagcaactcaacatgcaacttcttattattacacccttgcaaaaaatccatattattgaaccttttgtttcaagcgtgggctttgtggataatcgggacgggaattactcacgcctgcgcgttctgagtattgaagagcattttgcgaataaggcatccctccatgatgcagcaccagccctacttaagcatgaggaccagtctgtatga

SEQ ID NO: 49653 - DNA, 1182 bp, Acetobacter cerevisiae
atgaactggactaccccggcagacctcaaaaaacagcttgagcgtttatggaaaaagggcacgctccccaatgccctgatcaccaaaacctgcttgtttccgttaaccctccccctgcgcacaccaggtgcctctgatattacgcagcgtctgcatgccgttcgagactggacggaaatattcaacgcgatgcggcatatcaggctcatccggcacacagtgaaaaatcgcgtgcagggcacgcagaccctcccgcataaagttgttattgaaacgctggaagatgctcttgccttactgggcaaacacgacaccgctcgtcagatcttagctctacacgccatgacagcagaaaaagcaccttttctgctaccttggcttgctcaaaatgctctcacagcctaccgccacgccccagaatgggaacgacttttaacccttactgtctggatgagggaaaaccctgcacccggcatctatctgagacaggtcgatctgccgggcattcataccaaattcattgagtgcaacaagactattctctctaagctttttcagcatgctctgccaaagcacgctgttaacgagacctgttcgggtatagatcagtttgagccacgctacggatttcgcaccaaacctttgcgcattcgttttcggattctggatagagcactctctcccttccccacctgcgcgcatcctgacatcacactggactccgaaagtttcgcagcgctgcccctgatgggatgtcgcattttcattgtggaaaatgaaagttgctttcttgctttcccttatcttaaaaatgcactggttatttttggagggggctactgctgggatgttctgaaacccgctctctggctgcaaaaatgctctatttattactggggagacattgatacgcacgggttcaggattcttgatcacctccgggctattttaccccggactcattctttcctgatggatgagccgaccttgctcgcttatagcgcattctgggataaggagccctcccccgtgcggcatccgctttcccgcctgacatcctccgaacagagtgtttttacggctcttcaaaccgatctgtttggccagaacctccggcttgaacaggaacgcattcatttttccgacctgcgcaagatactggactctctggttcagccatag

SEQ ID NO: 49654 - DNA, 1455 bp, Ferrovum sp. Z-31
atggccctcgactatgctactttgaacaccctgcgcaaccaccatccggcttggaagttgctgcgctcggatcatgcccccctggtggccagttttttacatcgggtgttcgtgtcgtccaatgtgcgcggaatgaatgccaccgatttggccgagacgctggaggatgaactctatggtttgcgccaacgatttggtgacactgccttccccaaaaacgggatggattatctgaacgactgggccagcaccgaaaaaggttggctgcgcaaatactaccgccacggaaccgatgaaccgcaatttgacctgacatcggccaccgagaaggccattgcctggctggggacactcaccgagcgtagtttcgtcggcactgaatcgcgcttgatgaccctgttcgaactgctccggcaaatgagcgcgggttccgaaatcgatccggccaagcgcatcaccgaattgcacaagcgccgcgaggaaatcgatgccgagatcgcacgggtgttgtctggggatgtgcctatactggacgacacggcactgaaggatcgatttcagcaattcatgcagttggcgcgagaactgctgactgactttcgcgaggtcgagcataacttccgcatgctcgaccgccgggtgcgcgagcgcatcgccctctgggaaggctccaagggagccctgttggaagaaatcatgggcgagcgagacgccatcgccgattccgatcagggcaagagtttccgggccttctgggattttctgatgtccagccggcgacaagaagaattgaccgaattgctgtcgaccgtgctctctttggcgcccgtcgctgacctccagccggatgctcgcacgcggcgagtacattatgactggctggaagccagcgaacatacccaacggacggtggcccaactttctcagcaactccgacgctttctggacgatcaggcatggctggagaaccgccgcatcatggatatccttcatggtatcgaagcccaggcgctggcgctccgggaacaccccccaaccaaagacatcatgaacctcgccattccggccgcctctttggaattgccgatggagcgccccttgttcacccccacgctgaaaccgctgatcgccgacatcgagttgcacgcaggcacagaggagggggatatggcggcgctctatgatcaggtggtagtggataccgtacaactggcccggaatatcactcaggcattgcaggagcgagcccaaatcactctcgccgaattggccaaagcgtatccgctcgaacaagggctggcggaattggtggcgtatgtacaattgggtagccaaaccttcgccgccgtggtggatgagtccacgcgggacctcgttggttgggaaacaactgctgaggatggggtcatcgtacaccggacggcaaatctacctcggatgatttttgtgagatga

SEQ ID NO: 49655 - DNA, 672 bp, Ferrovum sp. Z-31
atggacgatgacactcttgccatgaccccttctctcggtcaaatcgacccccctgatttgtcggtactgatcatcagtctgctcaagggcgtgatctaccgcgatgataacgaacgcctatggggagcgttgctttctctccaggccagggtcagggattatgtatcggtgctggctttggctttggtactcgacgaggccgaaggctacgccttcctgaaaagccgtctcgaatcggaagatgaggaaggaaacccaaaacttccccgattggtggcgcggcgccctctgtcctttcccgtcagcctgctgttggctctgctgcgcaagaagttggcggagtcggatgccggagggggcgacacccggttggtactgacccgcgaagacatcctcgaattggtgcgggtgtttcttcctacagcgagcaatgaggtgaaattggtcgaccaaatcgaaacccacatcaacaaaattgtcgatctcggattcctgcggcgcctgaaagttggcgctggcaccactacgggcccgacaagttacgaggtaaaacgaatcctgaaggcatttgtcgatgctcagtggctggccgacttcaatgaccgtctggccgcctaccaggcacaattcacggaaaatatcgactccgccggagaggttagcgatgaatga

SEQ ID NO: 49656 - DNA, 3375 bp, Ferrovum sp. Z-31
atgaatgaaacccgatcccagagttttgacttcgtcgccgacgataccctgtcgggttttcgcctgaaacgactggaggtattcaactggggcaccttcgatggccaggtatggacgcttaacctagagggcaagaacgggctattgacgggagatatcggctccgggaaatccaccctggtggatgccatcaccaccctgctgatccctgcccagcgcataacctataacaaggcagcgggcgctgataccaaggagcggtccctgcgctcatacgtattgggccactacaaatcggagcgcaacgaaattacgggcaccgctcgaccagtatccttgcgcgatcataaaaattattcagtgattctcggcgtgtttcacaatgccggctatgaccaaaccgtaaccctggcccaagttttctggatgaaagatgccgccggacagccagcgcgcttcttcctgggagccgaacgggacctgaccatcaccaccgacttcgcccgttttggcactgaaatttccgcattgcgcaaaaaattgcgtcatctgggcgcggaaatcatggacagttttcccccgtacggatcctggtttcgacgccgctttggcatcaacaacgatcaggcactggaactgttccatcagacggtatcgatgaaatcagtgggtaacttgactgacttcgttcgcagtcacatgctggaacccttcgaggtggcgccgtacattcaggcactgattacccacttcgatgatttgaaccgtgcccacgaagccgtgctcaaggccaaacggcaggtggaactgctcacgcccatggtggcggactgtcaacggcatgcgaatctggccaacgagattgaggaatggcggaaaggccgcgaaggactgcacacctattttgcaggtctgaaactcgccttgctcgacaaacgcctgatcaacctcaagggagaatgggaaaaactcaatgctcaggttgaacgactcgacgaccatcaggatcagcaacgggctgtcatcgatgagatcaagcgggggattgccgccaatggtggagatcatttggaaagactgtcgtccgagatcaagcgcaagggtgaagaaagggatcgttgtcgccagaaggcgcatcgctatgaagaactgatcaccgcagtgggtgaagtacccgcctccgacggggatggctttgtggatcagcgtgcccgtttgtccgtatatgccgaaacggtggcagaacaatcagcggctctggaaaatcaagaacgagaacacgattttgccttccgcaaaggcagggaggagtatcaagccctcagcgaagaaatttccagcctgaaacatcgccgcagcaatatcgaaaacatccaggtgcaaatccgcacaacgctctgtgcagcattggggataccggaggaggacatgcccttcgctggcgaactgattcaaatacgcgaagaagagcgcgcctgggaaggcgcggccgagcggtttttgcgcagtttcgggctgtctctgctggtacccgatgcacgctatccggcggtggctgagtgggtagacacaaaccaactgcgcggtcgtctggtcttttttcatgtgcgtccccagaaaaaatccctcgatttccctacgctgcaccgggattctttgatcagaaaactctcgatcaagccggactctccgttctatgactggctggagcgcgagttgacccaccgcttcgatgtggcatgctgtgtcacaccggagcagtttcgccgcgaaacccgcgccatgacccgagccggacagatcaaggatcccacagggcgccatgaaaaagatgaccgctatcggatcgaagatcgtagccgctatgtgttgggctggaccaacagcgccaagatcgcggctctggaggataaattccaccgcctcgaacgacaattaggcgaactgggtcacctgatcggtaaggtccagggggcacgcaaagaggttcagacgcgcctcatcgcattatccagactagaagaattcaccgaattcgacgaactggattggacgaccaaagccgcagaagtggctcggctcgaagatgaattcaaacaattcgaatcgtcatccgataaattgaagcagttgaatgaccaatatcgtgaggcaaaccagagactggagaatctccgcaaagatctggataccgcccgggacaaacgctccaaaaccgagcaaaagcgcatggacacggatctgtacaggcaggcggtctccgctcagatcacggagaaaccccttgatgcggcgctcagcgcccgcttggaaaacacgcgcaccgaggccctgggtcaacatctgctcaccgtggagtcctgtgataaccatgagcaacaagttcgtggttggttacaaggacgcatcgatggaacaaccaagaaactgtcagatttgcgtgacaagatcattcaggagatgatggcgttcaaagagtggttcaaattggaaacagcggattttgacgccaatattgatgccgctttcgagtaccaaaatctgctcgatcggttgaatcgggatgacctgccccgctttgagacgcgcttcaaggaactgctgaacaccaatacgatcaatgaaattgccaattttaatgcccggcagaaccgtgatcgggaactgatcaaggaacggatcgggcgcatcaacgaatcgctgacacagattgactacaattccgggcgctatatcgtgctggaatcccaacccagtccagatgcggacattcgggattttcagtcagagttgcgggcctgtacggaaggaaccctcaccggttcggaagatgcccagtattccgaagccaagtttcttcaggtaaaaatcattgtggatcgcttccggggccgcgacggactcgccgatcaggatagaaaatggactgccaaggtcaccgatgtacgtaactggttcctctttgccgcctcggaacgctggcgtgccgacgatatcgagtacgaacattactcggactccggtggaaaatcgggggggcagaaggagaaactggcctatactgtactcgcagccagtctggcctatcaatttggcctgaaatggggcgaagtcaagtcccgatccttccgttttgtggtcattgatgaagcctttggccgaggatcagacgaatctgcccaatatggattgaagttgttcaaacaactgaatctgcaactcctgatcgttacccccctccaaaaaatccacaccatcgaacctttcatcgctcatgttggtttcgtacataacgagggggggcaggcgtctaaattgcgcaatctgaccattgaggaataccgcacccatcggccccaaacgctaccggcatga

SEQ ID NO: 49657 - DNA, 1236 bp, Ferrovum sp. Z-31
atgagttggaccacggcccgcgagttgaagcaacaggtagttcgtctctgggagcggggagacctgctgcgctcagaaatcacgggagaatcccgattcccgctgaaactggccctgacaattcccacttctgcagaactcaccgagcgttttgatgctgtgcgtgtctggatcgcgggtctgactgccctcccccatactcggatcgagtggcgcgaaatcaatcatcgggttcagggcacgcaacgactcccccagtcgatctgggtggattgcctggaagacgcgcttctctggatcggccggcgtgccgaagctgcccgcttcgaagaactcgcatccctgacccgctcaacccatgcagcacttctggcatggttggccaaacgacccttccaagcgctcgaactggttgaagtgtggcctcaactgctcgaggtggtgatctggatgcaacagcacccgcaccccggcatctacctacggcaagtaaatattacaggggtccatagcaaattcatcgaggcccatcgcagcgttctggccgaatggttcgaccttgtcttgccggcctcggcaattgctgcagagcataccggaatccgtcaatttgctccacgctatggttttctcgacaaaccgacgcgtattcgtctgcgtgtgctcgacccacagatcagatggatctcggggtccccttgtcccgatatcaccttggatgctaacagtttcgcccacctcaacccgccacttcgccgggtgttcatcaccgaaaacgaaacgaatttcctggcatttccccaagcctccgaagctatcgtcattttcggcgccggctacggctgggaagcactgtctcgggccacatggttgcaccgttgtgacctgtattactggggcgacatcgatacccatggattcgccattctggatcaattgcgtcgtcacttccctcataccaaatcgttgctcatggaccggtcaaccttgatggcacacctaacctcatggggttcagaacccgaccccatcacccacgacctgccaaacctcacaaaaatcgaaggtgccttatacgacgagttgagggataaccggatccgcacccacctccgactggaacaggaaatgatcaactattccctggtggaagccgcgatagcggacgaaaccgaccctggatccaagaaagcaatgtttggagcatcgacttcgacaccttggaattttggttga

SEQ ID NO: 49658 - DNA, 1464 bp, Mycobacterium phlei DSM 43072
gtggacggtaccgccgacaacacggagctctcggccgccgacctgctcgaactcaaccgcgagctgcagggcagcccgaccacccggctgctggctgccaccaacctcggcctgtacgccacgctgatggagcgccacctgctcgacggggtgacaccggagaccgagctggtcgtgcgcctggagcgcgacctcgacgacctcggctcgctcgagggccagtcggggttgtcgctgatcaagtcgtgggccagccagggctggctgcaccgcatcgtcgacccgcgcaccgaccagaacgtctgctatctgacccaggaggcccgccgcgcgctggacttcctgcgcgggatgcgccgccaggacaccatcgccaccggcggctcgatgcagggcatcgccgcgcggctaaagcaggtcgccgtccgggtggaccgcgacccggtccggatccgcaagcacatcgaggccgagatcgcggcactgcaggccgagctcgacgagctcgaggccggccagcgccccgaacctgacgtcaccgacgcctacgacgaggcccgcgcgatcgccctgcagatggaacggctgatcaccgacatcggccagtacgggacgatgatcgagcaggccaccgccgccctcgacgagccgatcgacagcaacgaggcctaccgcgaccggcagcgccagatgtacgaggactaccaggccgcgtgggactccaagggccgcgagagccaccgcgcgttcctgcgcatggtcaacgaccccgaccagcgcgccgagttcgaggccgacgtcgccgcggtcgccgaggcgctgcccatgctggacccggcactgcgcaaggtcatgtcgggcttcttcgagctggtcggccagcagatcgacgaggtcgagcgcatccagcagcgctgcgcgcagcgggtcaagcggttcaccgcgttcggcaccctggagcagagccgcggcatcgcccgccagctcaacgacgccatcggagccgcccgcgcgctgctgaagacctcgctgatcgactcgcgcctggacatcgaggtaccgctggccaagcacgcgatcacctcgatcggcgcgctgagcttcaagatcggcgacctgtccaccccgaagccggccgtccacgccgagggcgaggtcgacctgtccagcttcgcggcgctgaccacccaggtcgacgcgccggcgatgtcggagatgctcaaccgcgcggtcagcagcggacccgtctcgctgccggaggccgtcgcgatggtcgacaacgcctacctgggccacgtcatcgtgctgtggtcctgggccctcaaacaaccgaatgatgctgcggcgcataagaagtcgatcccggttcggttccgttccctggacggtccggaccgggcgatcgaggtgcccgagctgttgttcaccgaaccgatcacgagcaccgcaggagtcgcgcagtga

SEQ ID NO: 49659 - DNA, 687 bp, Mycobacterium phlei DSM 43072
gtgaccaccgagcccgaggtcgacttcagctcgctgcccgaagtcgaccagaacgcccgtaccccgcaccagcgtcgcccgcggttcgacggcgacgtctccgagctgcccgaccgcgcctgctgggcgctgcagcacctgctgacccgccgctacatcagcgccgactccgacgccgacatctactcgtgggtgctggagtaccgcgaccagctggccgtgcggctgtccgagctggacctgatcctgcgggtggtcgacggcatcgaggtggcgttcgtcgagcaggcccgctacgaatcggcaaggggcatcaagcttctgcgccgcgaaccgctgggcacctacgactcgatcctggcgctgcacctggcgcagatgatgcgcgccgcgggcgggcagtcggtgctgatcagccgcgaggagatccacggcctgttcgccggggtgctcaacgagaccgaccgcgacgcggtgacgttcgccgcccgcatcgacggcgcgatcgcccggctggccggcctggagatcctgcgccgcacccgcgacgacgaggacagctacacgatcagcccggtgatcaccgcgatcatgacggcctcggtgatcgaggaactgcagcagcagttcgaacagctgctcaacggcggcgccgcggccgacgaggaggacacccccgatgactga

SEQ ID NO: 49660 - DNA, 3357 bp, Mycobacterium phlei DSM 43072
atgactgaacagttccacctgtcgcggcttcaggtcatcaactggggcgtgttcgacggctaccactcgatcccgttcagccccggcggcgcgctgatcgccggcgcctccggtagcggcaaatcgtctctgctggacgcgatctcgctgggcttcctgccgttcaaccgccgcaacttcaacgcctccggcgacaacaccgccgccgggtccagcgcgggccgccgcaccgtggacaagtacgtgcgcggcgcgtggggtcagcgcagcgacggcaacaccagcaaggtgatgtacctgcgcggtgagggcaccacctggtcggcggtggcggtgacctactccagcgactcgggccgcaccgtgacgggtctggtgctcaagtggctgaccggcgagtcgcgcaacgactcgtcgagccggttcgtcatcggcgacggcgacctggacatcgaggacgtctgcaaccgctgggcggcgggccgtttcgacacaggtgtgttcaaggacggcggctggcggttcaccacgaaggtcgagtcgcagtacctggcgcagctgtacgccacgatcggcatccgcgcctccgatgccgcccagcagctgctcggcaaggccaagtcgctgaaaagcgttggcggcctggagcagttcgtccgggagttcatgctcgacgagccggagagcctggcccggctgcccgaggcgctcaagcagatcgacccgctggtggaggcgcgcgaactgttggcggtcgcgcagaagaaacgcaagatcctcggcgacatcgagaagatccagcagcgctacgcctcggagtccaccgacctgggcatcatcgacctggtcgacatgccgatggtgcgcgcctacaccgaccatgtgcggctggcgcagtgcccggcgcagatcgaggtgctcgacaccacgatcgagcagctcgacaacgagtacgaggacgtcacgcggtcgctgaatctggccaaggccgaggcggattcgctcaacgcccagatcagcgggcagaacgccagcctggcgccgctgcagtcgcaggtgaccgccgccgaggccgaggccgagcaggtgacccgtcggcgcagcgcctacgaggacctgctgatcgcccacgacatccgggtcccggagaccgccgaggagttctggaacctgcgcgaggagctgctcgccgaggccaccgagctgctggcccgggtggagcgcaaccgggaggcgtccaccgacgcggagtacgcgcagaaggcagcgcgtatcgcccgcgacgacgccgcccgcgaactcaagcgcgtcgagcacgtcggctccgcgctgccggagttcgcgctggcgatgcgcgaacagatctgcaccgcactggatctcgacgtcaacgagctgccctacatcgccgagctgctggacctcaaaccggatcagacgcgctggcgggtcgcggtggagaaggtgctgcgcggggcgggtctgcggctgctggtgcccgaccagcactgggagaaggtgctgcgtttcgtcaacgagaccgatatgcgcggccggttgcagctgcaccacgtgcggacccggatgctgggcgccgagcccgaagaacctgatccgaacacgttggcgggcaagctgttccccgtcgacccgaagcatccgtgcgcggccgaggccgtcgacgtcgtcgccgccgcgggcgaccacgtctgcgtcgacacccccgatgtgttcgcgcgttaccgccgcgcggtcaccgacaccggcctgtacaaggacagcgaccggttggcgatcaaggacgaccgtcgtccgctgcgccagtccgactacctgtaccagggcgacgtgacggcgaagatcaacgcgctgaccatggatctggccgccgccgaggaggcctaccagaaggcgcggcgggtggccgacgacatcgccgccgagcggcagcgctggcgggaccgggccgcggcgtgcaaggcgatctgcgagcagttcccgcagtggagccagatcgacaccgagaccgccgaccggcacgccgaccggctgcgcgagcagtacgagctgctgatggccgagcaccccgacctggaggcgctcaacgcccgcgccgacgaatgctggtcacagatccaggctttgatgacgcgccgcggtgcgatccagacccgccgcgacgacctcgacgcccggcgcaccgcgatcctggagctctcggagcggctgtcgccggcgttcgtctcggaaccgttgacggagctgctgaaccggtattcggcgacgctgccggtgacgctggagctgctggatcccgagccgttccgcgacgcgctgttcaacacgatcaagaaggaacgcgagcagctgcgcgagagccgtcgtcgctcctacgacgagctggcgcgcatcctcaacacgttcgacaccgcgttcccggacgcgatccccaacgacagcgacaacttcgacgagcgggtgcacgactacgtcgcgctgtgccgccacatcgacgagcgcgagctgcccgaggcctacgagcggatgatgcggctggtgaccgagcaggcgccggacgcgatcctgacgctgcaccgggtggccgagcaggaggcgcggcgcatcgccgagcagatcgagcgggtcaacaccgggctgggcgcggtggagttcaaccgcggcacccggttgacgctgcgcgcgacgccgcggtcgctgacggcggtggcggagctgaccgagatcgtgcggtcgatctcgcggcgcatcgccgaggttggcctgggcgacaagcaggcgatcctggaccagtacgccgatatcctgcggctgcgcaaccggttggcctcgaccaacccggaggacaaggcgtggacccgcgacgcgctggacgtgcgcaaccggttcacgttcgactgcgcggagtgggatatcgagaccggcgacctgatccgcacgcactccaacgccggcgacaactccggtggtgagcaggagaagctgatggcgttctgcctcgccggcgcgctgagcttcaacctggcggcgcccaacagcgacgacaacaaaccggttttcgcgcagctgatgctcgacgaggcgttctccaagtcggacccgcagttcgcgcagcaggcgctgcaggcgttccgcaagttcgggttccagctgatcatcgtggcgacggtgcagaacgcgacgacgatccagccctacatcgacagcgtggtgatggtgagcaagacggaggcgacgggccgcaacgcccgccccgtcgcgtcggtggccacccggacgatctcggagttcaccgcgctgcgtaaggagatgcgggagaaggttccggcgggcgtgtga

SEQ ID NO: 49661 - DNA, 1464 bp, Mycobacterium phlei DSM 43070; identical to SEQ ID NO: 49658

SEQ ID NO: 49662 - DNA, 687 bp, Mycobacterium phlei DSM 43070; identical to SEQ ID NO: 49659

SEQ ID NO: 49663 - DNA, 3357 bp, Mycobacterium phlei DSM 43070; identical to SEQ ID NO: 49660

SEQ ID NO: 49664 - DNA, 1464 bp, Mycobacterium phlei DSM 43239 = CCUG 21000; identical to SEQ ID NO: 49658

SEQ ID NO: 49665 - DNA, 687 bp, Mycobacterium phlei DSM 43239 = CCUG 21000; identical to SEQ ID NO: 49659

SEQ ID NO: 49666 - DNA, 3357 bp, Mycobacterium phlei DSM 43239 = CCUG 21000
atgactgaacagttccacctgtcgcggcttcaggtcatcaactggggcgtgttcgacggctaccactcgatcccgttcagccccggcggcgcgctgatcgccggcgcctccggtagcggcaaatcgtctctgctggacgcgatctcgctgggcttcctgccgttcaaccgccgcaacttcaacgcctccggcgacaacaccgccgccgggtccagcgcgggccgccgcaccgtggacaagtacgtgcgcggcgcgtggggtcagcgcagcgacggcaacaccagcaaggtgatgtacctgcgcggtgagggcaccacctggtcggcggtggcggtgacctactccagcgactcgggccgcaccgtgacgggtctggtgctcaagtggctgaccggcgagtcgcgcaacgactcgtcgagccggttcgtcatcggcgacggcgacctggacatcgaggacgtctgcaaccgctgggcggcgggccgtttcgacacaggtgtgttcaaggacggcggctggcggttcaccacgaaggtcgagtcgcagtacctggcgcagctgtacgccacgatcggcatccgcgcctccgatgccgcccagcagctgctcggcaaggccaagtcgctgaaaagcgttggcggcctggagcagttcgtccgggagttcatgctcgacgagccggagagcctggcccggctgcccgaggcgctcaagcagatcgacccgctggtggaggcgcgcgaactgttggcggtcgcgcagaagaaacgcaagatcctcggcgacatcgagaagatccagcagcgctacgcctcggagtccaccgacctgggcatcatcgacctggccgacatgccgatggtgcgcgcctacaccgaccatgtgcggctggcgcagtgcccggcgcagatcgaggtgctcgacaccacgatcgagcagctcgacaacgagtacgaggacgtcacgcggtcgctgaatctggccaaggccgaggcggattcgctcaacgcccagatcagcgggcagaacgccagcctggcgccgctgcagtcgcaggtgaccgccgccgaggccgaggccgagcaggtgacccgtcggcgcagcgcctacgaggacctgctgatcgcccacgacatccgggtcccggagaccgccgaggagttctggaacctgcgcgaggagctgctcgccgaggccaccgagctgctggcccgggtggagcgcaaccgggaggcgtccaccgacgcggagtacgcgcagaaggcagcgcgtatcgcccgcgacgacgccgcccgcgaactcaagcgcgtcgagcacgtcggctccgcgctgccggagttcgcgctggcgatgcgcgaacagatctgcaccgcactggatctcgacgtcaacgagctgccctacatcgccgagctgctggacctcaaaccggatcagacgcgctggcgggtcgcggtggagaaggtgctgcgcggggcgggtctgcggctgctggtgcccgaccagcactgggagaaggtgctgcgtttcgtcaacgagaccgatatgcgcggccggttgcagctgcaccacgtgcggacccggatgctgggcgccgagcccgaagaacctgatccgaacacgttggcgggcaagctgttccccgtcgacccgaagcatccgtgcgcggccgaggccgtcgacgtcgtcgccgccgcgggcgaccacgtctgcgtcgacacccccgatgtgttcgcgcgttaccgccgcgcggtcaccgacaccggcctgtacaaggacagcgaccggttggcgatcaaggacgaccgtcgtccgctgcgccagtccgactacctgtaccagggcgacgtgacggcgaagatcaacgcgctgaccatggatctggccgccgccgaggaggcctaccagaaggcgcggcgggtggccgacgacatcgccgccgagcggcagcgctggcgggaccgggccgcggcgtgcaaggcgatctgcgagcagttcccgcagtggagccagatcgacaccgagaccgccgaccggcacgccgaccggctgcgcgagcagtacgagctgctgatggccgagcaccccgacctggaggcgctcaacgcccgcgccgacgaatgctggtcacagatccaggctttgatgacgcgccgcggtgcgatccagacccgccgcgacgacctcgacgcccggcgcaccgcgatcctggagctctcggagcggctgtcgccggcgttcgtctcggaaccgttgacggagctgctgaaccggtattcggcgacgctgccggtgacgctggagctgctggatcccgagccgttccgcgacgcgctgttcaacacgatcaagaaggaacgcgagcagctgcgcgagagccgtcgtcgctcctacgacgagctggcgcgcatcctcaacacgttcgacaccgcgttcccggacgcgatccccaacgacagcgacaacttcgacgagcgggtgcacgactacgtcgcgctgtgccgccacatcgacgagcgcgagctgcccgaggcctacgagcggatgatgcggctggtgaccgagcaggcgccggacgcgatcctgacgctgcaccgggtggccgagcaggaggcgcggcgcatcgccgagcagatcgagcgggtcaacaccgggctgggcgcggtggagttcaaccgcggcacccggttgacgctgcgcgcgacgccgcggtcgctgacggcggtggcggagctgaccgagatcgtgcggtcgatctcgcggcgcatcgccgaggttggcctgggcgacaagcaggcgatcctggaccagtacgccgatatcctgcggctgcgcaaccggttggcctcgaccaacccggaggacaaggcgtggacccgcgacgcgctggacgtgcgcaaccggttcacgttcgactgcgcggagtgggatatcgagaccggcgacctgatccgcacgcactccaacgccggcgacaactccggtggtgagcaggagaagctgatggcgttctgcctcgccggcgcgctgagcttcaacctggcggcgcccaacagcgacgacaacaaaccggttttcgcgcagctgatgctcgacgaggcgttctccaagtcggacccgcagttcgcgcagcaggcgctgcaggcgttccgcaagttcgggttccagctgatcatcgtggcgacggtgcagaacgcgacgacgatccagccctacatcgacagcgtggtgatggtgagcaagacggaggcgacgggccgcaacgcccgccccgtcgcgtcggtggccacccggacgatctcggagttcaccgcgctgcgtaaggagatgcgggagaaggttccggcgggcgtgtga

SEQ ID NO: 49667 - DNA, 1464 bp, Mycobacterium phlei DSM 43071; identical to SEQ ID NO: 49658

SEQ ID NO: 49668 - DNA, 687 bp, Mycobacterium phlei DSM 43071; identical to SEQ ID NO: 49659

SEQ ID NO: 49669 - DNA, 3357 bp, Mycobacterium phlei DSM 43071; identical to SEQ ID NO: 49660

SEQ ID NO: 49670 - DNA, 1464 bp, Mycobacterium phlei; identical to SEQ ID NO: 49658

SEQ ID NO: 49671 - DNA, 687 bp, Mycobacterium phlei; identical to SEQ ID NO: 49659

SEQ ID NO: 49672 - DNA, 3357 bp, Mycobacterium phlei; identical to SEQ ID NO: 49666

SEQ ID NO: 49673 - DNA, 1440 bp, Endozoicomonas montiporae CL-33; identical to SEQ ID NO: 44708

SEQ ID NO: 49674 - DNA, 603 bp, Endozoicomonas montiporae CL-33; identical to SEQ ID NO: 44709

SEQ ID NO: 49675 - DNA, 3402 bp, Endozoicomonas montiporae CL-33
atgcagaatcaatcgcttgatttttcacaagatcagtccaaagctggttttcgtctacacggactggaagtgttgaactggggcacgttcaacaaaaaaatctggaaaaccaaacccgatggcaacaatagtctgctgacaggtgatattggttcaggcaagtccacgctagtggatgcgatgaccactttgctggtgcccagtcagaagattacctacaacaaggcagcaggcgcagagacacgtgaacgtaatatgacctcttacgttagaggttatttcaagagcgccaaagacgatgacaccttgtcagccaaagcggttgcgttgcgtgatcacaacagttacagcgttttgttggctcgctttgtgaatgaagggtttgatcaaaccatcacgttagcccaggtgttctggagcagggacaataacaattcgcctgagcgattttttattgtggctcgtaagccgctaaccatcagcaagcattttagtggctttggcagcgacattaccgaccttaaaaagaaagtaaagcggcttgagcataccaaagtatttgaaagcttctctcagtatcaggctgaatttcgtcgtcagatgggtattgaaaacgatcaggcgatggatttgctgtatcagacggtatccatgaaatcggtgggcaatcttactgattttgttcgtcatcacatgcttgaaagtaccgatgttgaagaacgggtagaagagctgagtcgtcagtttgacaacctcaatcgtgcccatgaagccgtgttaaaggctcgtcagcaaattgaaaagctgcagccgatggtggacgactgtcagcgctatgaaacgctggaaagtgaaattcagtcttttaaacagtgtcgggatgctttgtacgcctattttgcggacaaaaagattgccttgctgggtcagcgcattcaaagacgggagctggatcagaaaaagctggaaagtcgtttagatgaagtgctgcactctttggagaatctcagggcgggtttgcgggaaaccgagcgatccattgagcaaaatggcggtcagcggctgtccgagttaaaaacggaaattgaccgcttgggacgtgaaaaagaccggctggttaaaagcaatgatgactatttagcactctgtcgttttctggatatgccagacccaaaagacgacaacgaattcttttctaaccgtgaagaagcaacagaaagtcaggaaagactggaaaagcagaaaactgatttacaaaacgagcaggtagagcaagcggttggcttgaagcagctgagagatgagcataaaagcttgtcaaaagaaatagattccctgaaaggtcgtaaatccaatattcccagtcgaaacctcaccataagggaagctttatgcagtgctcttgatttgaccgaagacacgctgccttttgcaggtgaattattacaggttcgagaggaagaaaagcactgggaaggcgctgtagagcgtgtattgcataactttgcactcagcttgctggtacctgatgaacattataatgcggttgcacattatgtggacaagactcatctgaaagggcgtttggtgtattaccgtgtacgcacgcctgccaagcacccccataatacagtcgataagcgatcactcagccggaaaatttctatcaaaaccgacagtggtttttacacctggctagaacaggaaatactgcaacggtttgattatgtatgctgcgatactcttgatgaattccgaaaagagtcccgctgcatcactgcgacaggtcagattaaaagcagtggcagccgtcatgaaaaggacgaccgatatcgtattgatgatcgctctcgctttgttttgggctggagtaaccgtgagaagatattagcgctggaaactcagcgcaatctcatggaaaaagagattcagactgctgccggtatccagagtgaatttacaaaaaggcttaaaaagcttggtgacagtcagattaagttggaactgctgctaaattaccagtcttttggggatattaactggcagccactagctttaaccattcaatcgctggaaaaagaaaaagcagaactggaagcaggttcggatattctcaaaacactcagggagcgtttgatcacgacagaagctcaaattcgtgagcaagaaacgctcgagcgcaaactcacaaaagagtctggtgccgccattgagaagctgaagcaagacagaaccctgaaagagcaagctgaacaacagttgggtgatttgcctgaagatgtgaaagccagcatttttgaacgactggaagagttggaagaggaggcgctggataataaaaaaatcactatcgaaaactgtgacagctctcaggtaacactgcgtcgatggttgcaagaccggcttgacactaaagagcgtggtgcaagaaatctgtcgtccaacattaccggacagatggctgattataaaaatgcttatccgaatgaaaccagagaagtggatgcttctatggcttctgccggtgaatttggtgaaatgctcaagacgttggcgggtgaagatttgccaaggcatgaagggcgcttcaagcaaatgttgaatgaaggcaccattcacaatatggcgatgttccagaactggctggatcagcagcagcaaaccattcgggataagattgacaccatcaaccgctcgctttcgaccatagactacagcgatggcacgtatatccggctggtggccgataatcaccgggatgccgaaattaatcagtttaaaattgatttgagaaattgccttggaggtacgctgtcgtcagatgacacggaaacctatgccgaaaacaagtttattcaggtcaaagacatcatagaacggtttaatggcagggaagggcagaccgatctggataagcgatggacaaagaaagtcaccgatgttcgtaactggtttttgttcaatgcttcagaacgctatcgtgaagatgattctgaaaaagagttttactcggattccgcaggtaagtccggcgggcaaaaagagaagctggcctacacgattcttgcggcggcactggcttatcagttcgggctggaatggggtgaaacccgttcacgatccttccgctttgtcatgattgatgaagccttcgggcgtgggtcggacgaatcggcacgctatggactggagctgttccgaaagctcaatttgcagttactgattgtgacgccgttgcaaaagattcatgtcatcgaagactatgtcagttcggtgcattttgttcataacgaaggtggttgcaactcggtactgagaaacctttccattgagcaataccgcaaagagaagcagcaaatagcggaacaaaagcaggcatctgaagaagttgtattgaattaa

SEQ ID NO: 49676 - DNA, 1167 bp, Endozoicomonas montiporae CL-33; identical to SEQ ID NO: 44710

SEQ ID NO: 49677 - DNA, 1497 bp, Rhodococcus sp. LB1
atgtccatcaccgccgacgttcatcggcttcttcgtctgcgccaggaccacgcagcctggacattgctgcgtgccgattcggcgccggcaattctggcgctgttgggccgtcacttcgagcatgggacccgccgcctcccggctccggaactcttcgcccgcttggactccgaccttcagaccatgcgcgacgagggcctcgacttcccgcgaaccggtcaggcctattgcaccgagtgggtgcggtccggatacctgctccgacgagcagcggccggtacccgtgaggagaccctggaaccgacggagggcgcgttcgccgcgatggccttcgtcgcaggcttcaccagccaggcgagttcggcaaccgaatcccggctgaccacgctctccacccagttgcaagccctcgcgcgggattccgatccccgcgcggaaacccgtctcgccgcgctgctggccgaacggtcgtccatcgatcagcaggtcgccgcagtggagtcgggagtcttcccggtcctcgacggcgaacgcgccgtcgagcgttctgccgagattctcgcgctggcctcggaggttcccgcggacttcgcccgggttcgcgccgaactcgaggaactgaaccgcgatctgcgagcccgcatcctcgatgacgacggtgaccgcggcgacactctgggagatgtgttccgcggggtcgacctgatcggagattccgatgccggccgcagcttcagcgccttctacgacatgattctcgatccggcccgatcgtctcagatcgacgagtggatcgatgcggtgctgcagcggccgttcgccgcgatgttgacccacgatcagaaacgacggttccgggcgttgctgaccgagatggaaaccgccggctccgaagtgcattcgacgatgacatccctgtcccggtcgttgcgtcacttcgtccagtcgcgtcactacgaggagcaccgccggttgcagcggttgctgcgcagcgcgcagcagagtgctgtcgccgtggccacacgtcgtcgcccctacgacctgctcgacctcgaactggtgcgcatcggaatgagcatcgaatcagttgcagcacttcgcctgcacaaccccgccgacaacctcgtcaccgaaccggtgctgacccacgacgccgggaccgtcgatctcgacgagcttcgaaagctcgtccgagaatccgagatcgatatggacgaactgtccgacaacgtcgcggcgacgctgcgcgcgcacggtcgcgccacgatcggtgacgtcctgcgcgaatacccggccacccaaggactcgcgagcgcagtcggactgatggtcctcgccacccaccacgggcacgcgatcgacggcacagaagacatccactggatctcgggagccggagtatcgcgtcgggcgacaattcgtcgtcgcctgttcgatcctgcttccgacgagttcaccgctcgtccggcgttcgcacccacggggagctcgacatga

SEQ ID NO: 49678 - DNA, 606 bp, Rhodococcus sp. LB1
atgaccgacgagccgacgaccggcggccattaccccggagacaccggcgaactggacctcgagacgcggcgcgcattcgtgcagctactcaagggccctctcgtcaccgcggccaaacatcccgaggtgtggcgcgcggtgatccgggacgagcgactcctccggtcccgactcgccgacgtcttcctcgatctcgtcatcgacgacgagaacgagctggcattcacccgcccgcccgagaccggcaatgccaacacccccacggtgctgcgcaccgagcgtcttacattcatggacacggtcatgctgctcgcattgcgccagcgtctgctccgcgcgcaagccggcgaacgggtgatggtcgacctcgacgaactgcgcgaacagctcgagctgtatcgcacggccggcgacaccgacccggccggctacgcgaagcgcgtcagcgcgtcgtggaagaagctcgacaagtattcgctgctcacgaagacgtcgaccgatgaccggatggaggtctccccggtgttgcggcagctgttcgatgccgaacaggtcgctctcgtcgaagtggagttccggcgcattctggaggaggacacaccgtga

SEQ ID NO: 49679 - DNA, 3288 bp, Rhodococcus sp. LB1
gtgatccatcccggtcagcgccgtctcgcgcgcgttcaggtcatcaactgggggaccctgcacggccatcacgatctttccgtggcccgcaagggtttcctgatcaccggcaattccggctccggcaagtccacgctcatcgatgccatctcggctgtgctcgtcccgggcaatcaactgcggttcaacgcggctgcgcaggaggccacgaactcgggacgcaacttcgtcacgtacatccgtggcgcgtggcggcgggaggcgggcgccgacaccgacggtctggtcgcctcgtacctgcgcaccggcgcgacgtggagtgggatcgccctcacctaccgcgccgacaccgacgatccgccgatcaccctcgtcaagctcatgcatctggggcgcgggcagaacgccgcagcggacgtcactcacctccatctcattctcgaacacgaactcgacctgaccgacttcgcgtcgttcacgacgcgcggcatcgacacgagggccatcaggaagcggtggccggagtcgacggtcagcccggcgtacgggccgtttgcccgtagcttccgctcccgcctgggtatttcgtcggagggtgctcagcgcctgctgcaccgcaccttgtcggcgaagagcctcggcagcctcgaccaattgttccgcgactacatgctcgacactccgaacaccttcgcgatggccgaacgcgcggtcaaccagttccacgacctgcaggaggcgcaccgggtcgtcgtcgacgcgcggcgtcaggtggagatgctcgcaccgctcgtcgaacttgccgacactcggcgacgcgggcttcagtccctgcgcgacacggacgaggagaacgcgcatctcggagtggttcacgcggagatgaccttgtcgctcctgcgtggtgaacgcaccgaacgccatgcactgacgcctctgctggaggcgggtgcgagcgaagccaccgccgcagccgaacgtgcacggcaggagaccctcgatctgacgatgaaactcgagggcatcgggggcggcagactggccaccctccacgcgcagcgagacgcggaactgaagacgctggcgcgcgtccgaaccaggcgtgatcaggtcgccgaggcggtgtcggcctgggaaggaaccgttccggagaccgccgaggagttcgcgcgactgcgcgggcaactcgaggatcaggcgcatcaggccaccaccgcccacgaggaacggcacggcgcccgctacgcgctcgccgaacagcgcggcaccgcccagagggagcgcgccgcgctgatcaccgatcgtgagatcgtcgcccgcagacgctccaatatcgatccgagcctgctccgcgcgcgcgagtcgatctgttccgccgcaggtgttccggacgacgcggtgcccttcgccggcgagttgatcgcggtgcgggacgaatactccgaatggaccggccccatcgagcgagtcctcggcggcctcggccgcaccctgctcgtcccggacgacgtgtatccggcggttgccgcggccgtcgatgccacccacctcggcgcgcgcctcgtgtatcgccgagtacgggtgggcgtcacaccgtcggcggtgccgaagaccgggacggcgtctctggtgcgtcgagtggaggtcgccgacggtccgctcgccgcgtggatccaccaccatctcgccgaccgctacgactacgcctgcgtcgacaccgctgccggcttcgcggatcacgtccgcgccgtgacacgcgccgggcaggtcaagcactccgcggagcgacacgagaaggacgaccgcagccgcatcgacgatcgccggcggtgggttctcggattcgacaacgaaaccaagctggaggacattcgccgacgaatcgcggacctcgacgccacgatcgcaggtgcgacgagccggctcgacgcgctggaccgtgaggaccagcagatcgccgtgcagaaccgcgcggcacagacagtcctcgatgcgcagtgggcggacgtcgacgtgagcggtgcacaggctgccgtcgacgctgtcgacagccgtctcgaatcatggcagcaggacaacccggagcattctgcggtgtcggtcgccctcgagctcgccaagaaggcggagaacgaggccgacgcagcccggcgtcaggcggatactgcgttgtcggtgcaccgaacggcggtgacggaactcgagacgcggatcgcgcaggccgaactccacgcggatgacgcggcacccggtgctgtcgccacgcggatcaaggcgcgattccagaaattcgcgcgccgggtcacgtcggacaacattgacaaagccctgttcgaggtcggccagggcatcggcaaggacagggccgacgcacagaacgcggtgtccgccgccgacgcgtcgatcgtcaggatcctctcccagtatctggcgcgatgggagtcccgcggcggtgagctgcggattgacgccgaatacgtcgacgacgcactgacgatcctccagcgcctgcgctccgacggtcttccccggtacgaagatcggttcttccagttgctgcacgaccagtcccaccgcaatatcggcgaactcgctcgcacgatacgcaaggcgcccgccgagatccgttcccgcatcgacccggtgaaccactcactgcatcgctccgcgttcgacaccgaccggtggttgcgcatcgatgtccgcgagcgacggtcgccggcggcggccgacttcctcgacgacctgacccggatcacgagtggtggatgggacatcgagcagcgtcccgcagccgaggagagattcgagcggatggcggctgtgctggagcgcctggcgtcgaaggaacccgcagatcagcggtggcagcgccaggtcctggacactcgcctgcacgtcgggttcatcggtgtggaggtcgacggtgccggagaggctcgcaactaccacgattcgagctcgggactgtcgggcggtcaggcgcagaaactcgtgttcttctgcctggcagcggcgttgcggtatcagctcgcccccgacggcgcagaccttccccgttacggcaccgtcatcctggatgaggcgttcgaccgggccgactccgcgtacacacgccgagccctggacgtgttcgcgcagttcggttttcacatggtgctcgcgaccccactcaagttgctcggcaccctcgaggagtacatcggcggcgctgtgaccgtgagcatccgcgaccggatgcacaccgaactcagcctcatcgaattcgacgacgtgggcgccacatga

SEQ ID NO: 49680 - DNA, 1194 bp, Rhodococcus sp. LB1
atgagcgtgcggtgtgttctgccgcgtgctgccgcggcgaaggcgctgaccacctacagcagtcgccgacgtcgctggctggccgaccccgcactcgccgaacaggattcgctgacggttgccctgcatccgccgtccgagcaccagatcgccgaggatcccgacacggtggtcgcctgggtccgctcctggcgcggctacaccggcgtcggccacgtggactgggcgattcgccggtggccgagcttcggcacacaggaggtgccggtgcgactgacactggccggggctgatcagattgcgtccgcgagtggccgcgaaaccgaatggcgcgccctggtgatgcgtcgtgatgcgcttgtcgaccgcctcggtcccgacactccggcgctgtcggcggcggttgccgtgaccgctgcgaaatggctcgacctcgacgacgacgacttcgtcaggctgacgaccatcgcgcgatggctgagcgaccatccgaactcggggtatttcatacgtcaacttcccgttccgggtgtcgacacgaaatggctctcgagtcatcgcggaatggtggagactctgctcgagggcgttcgcggcagccgggaactcggtatccggagcctgcccaacatgcgagacgtcgctctgtgcgatcccgatctcctgatcggaactccgaggcgcttcgcgacctcgctggacgaactcaccgcgttgccgctggccccggcgcgcaccctcattctcgagaacaaagagggtctgcatgcgctacctcggctggcggaaacggtggcactgcacggtggcgggtacacggttcacgagttggccggaatcccgtgggtcgtcgactcggaggtctggtattggggagacctcgacagtcacggtttcgccatcctcgaccgtctgcgccgacatcttccgcacgtgcggagtctgttgatggacacggacaccctgaatcgatggcggaccctcgcggtccgcgagcacaagcccaccttcaacgaggtctctcacctcaccgaatccgaagccgccgctctggagtcgctgcgcgaggacgatctccgcctcgagcaggaacgcataccctggccctacgccctgaagagacttctcgtcactttcggtgcgggtcagtcgtctgcggctgccgactgccctacgtgtccggacagcaagtaa

SEQ ID NO: 49681 - DNA, 1446 bp, Collimonas fungivorans
ttgttttttgaaccagaccgacttaattttttccggccgctggccggcaagcaccgcggcgtggtggtggcttgcgtgcgcgcgctgtatgagcggctgcatggtcccagcgccgactacggtcagaacctgacgcgcgacggcttgcgcgacctgctgctgccggtggtgcaggaatcgcgccaggttttgctggcgcaggaagaggcggcagcgaacatggagctggccgaggacgatttgattcccgccggcgccgacgaccagcaaagcagcagcgcgctgctgcgcaccttgctcagggacggttggctggaaaccttcggcgaccgcgccggcctggtcaccgcctatcgtttcacgcgcgccggcaagctgtttgccgaggcgttctgggccatagaccggcgcagcgcccgcacccgccagcgcaacgtgcgcagctgccgcaatgcactcaacgccgcgctgcgcaatgtcgacgcctatgatctgatcgatgcctacgactatgccgaaaaagtcatcagcgatttgtcggaaggcgtcgattatttccaggaactggtgcggcgcctgatgctggaagcctcgcaaacgccgtgggacggtttcatggaattcctcgaccgtttcgagaaagaattcaagaaacagctcaccgccgacagcatcgaacggcaccggcaggcgatccgcgacgtgatcgctcgcttgcacagcctggagcatgacaagtcgcaggcgctggaagaccagctcaacgacatcgcgcgctgggccagccaggaacggcaaggagcgtcgacgctggaatggatgctggaccgcatcgaagaaatggtggaagcggcttgcaccaccaaacatccggagctgatcaaggccatgagcgtctacatgcagcgcgccgccagcatcgtgcagcaggcgctgatgctgcgcggcggccagacccggcaagcctacagcctggccatcagccagaccgccaggctcggcggcgcggcccaggacgccttgctggagcgcatcggcgccgccatcgcgccggcggaaatccgcctgctcgatccggccggcttcaagctgcgcagcgcctcgcaacggcgcaaggccctgacggtgacagcgcagccgaaagtgacgcgcgacgcccggctggcggcggccatgtaccgcgccgaagccgatgccttcgccttgtccaacgacgacatcgtgcaccgtatccgcgccgaactgcgtctgcgcgaccggccgatccggctgtcgaccctgccggcggcgaccaccaccgacgtcctcaacaacatgcaagtggtggaagccgtgcgcggcgcgcgcgacgaccggctcaccgtgcagaaactgccgagcaagctctggaacgagttttatgccggcgacgattaccagatcgagatgaaacatgaccctgaatga

SEQ ID NO: 49682 - DNA, 714 bp, Collimonas fungivorans
atgaccctgaatgaaacactgaaccagcagctggcgctgcagagcttgtcgctggaacgtttccgcgaaatcgtcggacgcctgttcgcggccggcatcgtgctgcgcgaagaagacggcgtcgagcagcgcctgtacgacgatgcgcgccgcatcgaaacctgcctgggcgattatttccagctcggcggcttccgccttgagcacaacctcaagggtgaattcttccgtctgtatgcacctggcgccgaagtgccgggtttgccggaagacgggctggaaccggtgccgggtttgcgcgcccggctgtcgccggattttgtcgcggcggcgctggcgctgcgtttccagtaccagcaaggtttgtccgaaggcggtagccgcctgaccgatgccggcgaggtgctgacgcgcttcgaggaattgtcggccacgctgcagacgcagctgaagcgcgcgctgccgccaaccaatatcgaacggcaacgcttgctcaacgatctcaagcgccatcgcctgatccggctggcggcgaatttttccatggacgatgaagacgccctgttggcgatccggccgaccatcctgggcatcatcagcgacgacatgctggaagccgcattggagtcggagccgctgccggccggcgccgagacagaggcggccgacctgcaagccgtggcagaagaaagcattgaaggaaatatcgaatga

SEQ ID NO: 49683 - DNA, 3621 bp, Collimonas fungivorans
atgaagctggacaaactgatcctggtgaactggggcgccttgcgctcgcaggaatacccgatgggcaacatgactttgctgaccggccccaccggttccggcaaatcgaccatgctggacgccttgcaaaccgtcatgacggcggtgtaccagaatattttcagctacaacccgggccaggatgagaccacccagggcgcgcgcaacggcaagaccaagcgcactttgtggtcttacatcgtcggcgccgaggataacctgttcgcccgtcccaatggcgcgcacggctatatcgccgcggtattcaagccgagcgagggcgaagaggggcgcgaattcaccgcgctggtggcggcttcggcccgcgtcgacggcgccggcgaacggcgccaggcggtgtcggagcggctggccttgctgatcatcgatggcgccgcattacagctgggcgacctgacgtcgaccgagatcgacggcgccatggcggtggtggcggtggaaaagatcgagcaccacctggccgggaaataccgcggcatcaccaatttccgcgatagcaagcgcgaatacctgtgccagttgtacggccgtttccgcggccagaaaaccgtctccttcgccgaagccgagagcgccgcccgggcctggagccagtcgatcgcccacaaacctatcggcagcgtcgacgacctggtcaagcaccagatcctggaactcgacaccagccagctgtcgcagcgtatcggccagatcagcaagctgatgcgccaggtcaacgaattgcgcaaagaaggcgagcgcctgagcgacaacgtcaagcgcctggagctgctcggcacagccgtcggcgataccgcgcgcgcacaccagtccgccagccagtcgcaactgctggtgtcgtcgctggccttgcgcgaagaccagcgccagctggaagccgcaacctcggccatcgagggattgcaggcgctgatcagcgatgaaaccgaaagcgccgataagctggagcaggaccgcggcgccaagaaccgcagcctgacgcagatccacgcgcagatgatgggcatcccggctgctgaacaaaaatcgaggatccagaaccagatcgaacagaacgacggcaagatcaagacggtgttcggttcgctgcagcacaatgcgctggccgcccagcagctggaaagcgcggcgcgcaatgtggccggcatgcagattccgccggagcagaaggaaattgccgacgccgcccgccaggtagtgttggcgctgtcggcggccggcacgctggaccttgctagccatttgcgcagcataggcgaactggccaggtccgaagaagtggacgtgctgaaatcgctgatgctggtcaacgactttgaaggtgttgatgccgccctcggcaaactgcatggcgcgctggccggcaccgagcatagtttcgtctcggccttgcatacgcagattgcgcagctgcgcgccgccgagcatgacgccttgcgccacgaaaaagacgccgcttcgcgcaaagccaacctggccgaaggcggcgccgattatccgcagcatatccgccatgccctgaaagaattccgtgccgagctggcagccgcgcgcgcccaggtgctgtgcgacctggtagaacccgtctcggcggaatggcagccggcaatcgaaggttacctgggcggcgcccgtttcaacctggtggtcgaccaggcatgggaaggcaaggccatcgatttcgtgcggcagaaaaaactgcgcgccaatgtgatccagggcagtttttgcctgaaaaacctgaaagtggaaagaacccccagcgactcgatcgtgcacgaactcagcaccgagcacccgattgcccatgcctacctgcacgaccagttcggccaggtggtcaaggtcgccgataccgaggccctgcgccatgcctcgcgcggtctgaccagggatggcaagggcagcggctcgcgcaccatgttcaccgccgacaccgacctgctggtgttcggccaggaagccaagcgtctcgccaagcagcgcgccgaacaggagcatgcacaggccgaacgcgaactgacccaggtgcgcacccagttgcgcgagctgcagggcgcgctggccttgatggggcaattgcaatgcccgtcgtttgccgcaatcgacgaactggagaacctggtgcgcgagctcgacgctgcccgccaggacctgagccggctcgacctgacccaggtcagcaaactggaagatgaagccgaagccttgggcatcgaaatcgccgccctggaagcgcgcaagacggcttgcagcaagaatatcggcggccatgaaaaagccatacaaggccatcaggctgcgctgacgcgcctgcatttcggcatgggagccaaacaggcgcgggtcgacagcgataccgaaaaactgcgcgacctgtgcattgtcaacggcagcctgtctttcaccgcgctgacggacgcagtcgcggcctgggtcgatgagggcacttattcgcagtcgcaggcatcgaataatgtcgccaaacagacggcgttgagctggcagctatacggcgatgcgcgcaacgccctgggcgaatatcacgcccatgcgcgtatcgacgaacgctttgaagtgacccagggcgacgatctgcgcgacggcgatttcacgcctttgtatgcgctgatggtgactttgcaggaacgtacccgcgcccagctgacgcggcagaaagatatcggcctgatcaagaacctggagcagctgcgcaccgccgaagcttcgttcaacgatgtattcaccaagcagttctgctacgaaatccgcaacgccgtcgataccggcgtgcgtaccttgaagacgcttaataccgaactcgacaaactcaagttcggcaccgacaaattccgcatcgactggtcggaatgggtgccggaattcaaggcttattacgatttcttctgcgccacttccgagatggcggatacgcaggaagccggcaatctgtttgccgatccggtcttgagcgtggacaactgccaggtgcgtgaccggctggtgcaattgctgctgtccgacgacgaagacaaggcggtcaaggaattgcagcgggttgccgactaccgcaactaccgtcgctacgaaatctacaaggagtcggataccgggtctcatgtccgcttgtctgaatggggcaccggttccggcggccagctggagacgccggcttacatcattcacgccgcggttgtcaccaaccgcctcaaacgcttcgagaagggcaacagcctgcacctgctggtcaacgacgaatcatttgccaagatggatgaagggcgcgctcgcgatgtcttgaaattcctgcgtgacaatctcggcatgcaactgatctgcgccatgccgaccaaacatgccggcgccatcaagccggaattttcgcgcgaatggagcttcagccggacggtggcggatggcaacggtgaagtcgggtttgtttcggaatcggacgaacgcgaactgcgctcggacaagctgcgcgaactgtgggaattgcggcgagcccaggtgcgcgagcaggcgcagatcaatttcgaggcggccgagcaggctgcctga

SEQ ID NO: 49684 - DNA, 1440 bp, Collimonas arenae
ttgttttttgaaccagaacgacttaattttttccggcccttggccggcaagcaccgcagcgtggtggtggcttgcgtgcgcgcgctgtatgagcggctgcacggccctagcgccgattacggccagaacctgacgcgcgacggcttgcgcgacctgttgctgccggtgatccaggagtcgcgccaggtcctgcagcagcaggaagatgccgccgccagcttgcccgacgatgatttcattgccgacggcggcgacgaccagcaaagcagcagcgcgctgctgcgtacgttgctccgggatggctggctggaaacctttggcgatcgcgccgggctggtcaccgcctatcgcttcacccgcgccggcaagctgttcgccgaagcgttctggtcgcttgagcggcgcagcgctcgcacccgccagcgcaatgtgcgcagctgccgcaacgccctcaacgccgcgctgcgcaatgttgatgcctacgatctgatcgacgcctacgactacgccgaaaaagtcatcagcgacttatcggaaggcgtcgactattttcaggaactggtgcggcggctgatgctggaagcttcgcaaacgccgtgggacggattcatggaattcctcgaccgtttcgaaaaggaattcaagaagcagctgaccgccgatagcatcgaacggcaccgccaggcgatccgcgatgtcatcgcgcgtttgcatagcctggaggcggaacaggcacaggcgctggagttacagctgaatgacatcgcccgctgggccacccaggaacggcaagggccgtcgaccctggactggatgctggaccgcatcgaggaaatggtggaagcggcctgcaccaccaagcatccggaactgatcaaggcgatgagtgtgtacatgcagcgcgccgccagcatcgtgcagcaagcgttgatgctgcgcggcggccagacccgccaggcatatagcgtggcgatcagcaggactgccagcctaagtggtgcggagcaggatgcgttgctggtacggatcggcggcgccatcgcgccggcggagatccgcttgcttgatccggccgcgttcaagttacgcagcgcgtcgcagcggcgcaaggcgctgaccgtcaccgcgcagccgaaagtgacgcgcgatgcgcgtctggctgcggccatgtaccgcgccgaagctgacgccttcgcactctctaatgacgacatcgtgcaccgcctacgtgccgaactgcgcttgcgcgaccggccgatccgcctgtcgacgctgccggtggcgaccactaccgatgtcctcaacaacatgcaggtggtggaagcggtgcgcggcgcgcgcgatccgcgcctgaccgtacaaaaattatcgagcaagctttggaacgagttctatgccggcgacgattatcagattgagatgaaacatgacactgaatga

SEQ ID NO: 49685 - DNA, 765 bp, Collimonas arenae
atgacactgaatgaaacattgcacgcccaactgagcttgcacgctctgtcgctggaacgcttccgcgaaatcgtcgcgcgcctgttcgcggttggcatcgtgatgcgtgaggaagacggcgtcgagcagcgcctgtacgacgatgcgcgccgtatcgaggcctgcctgggcgattatttccagctcggcggttttcgcctggagcacaatttgaaaggcgaattctttcgcctgtatgcgcccggcgccgaagtgccgggattgccggaagacggcctggaaccagtgccaggtttgcgcgcgcggctgtcgccggatttcgtggcggctgcattggctctgcgcttccagtatcagcagggcctggccgaaggcggcagccgattgaccgacagcggcgaggtgctgacccgcttcgaagaactatccgctaccttgcagacgcaactgaaacgcgctctgccgccgaccagcgtcgaacggcaacgcctgctgaatgaactcaagcgccatcgcctgatccgcctggccgccaatttttcgatggacgacgaagacgcgctgttggcgatccgtccgaccattctcggcatcatcagcgacgacatgctggaagccgcgctggaatccgaaccgctggcggtcggcagcgaggccgcagcagacgaagaacagggtgatctgcaaggcactttggatgagatgccggaagatgcgttggaagacagcctggaagcagcacataaagaaggaagcatcgaatga

SEQ ID NO: 49686 - DNA, 3621 bp, Collimonas arenae
atgaagctggacaaactgatcctggtgaattggggcgcgttgcgctcgcaggaatacccgatgggcaacatgacgctgctgaccgggccgaccggttccggcaaatcgaccatgctggatgcgctgcaaaccgtgatgacggcggtgtaccagaatattttcagctacaacccgggccaggatgaaaccacccaaggcgcgcgcaacggcaagaccaagcgcagcctgtggtcttacattgttggcgccgaagataacctgtttgcgcgcccgaacggcgcacacggctatgtcgctgcggtgttcaagccaagcgaaggcgaagaagggagcgagttcactgcgctggtggcggcttcggcgcgcgtggatggcgccggtgaacgacggcaagcggtatcggaacggttggcgctattgatcatcgatggcgtcgcattgcagttgggcgacctgacctcgaccgaaatcgacggcggcatggcggtagtggcggtggaaaagatcgagcgccatctgtccggaaaataccgcggcgtcaccaatttccgcgacagcaagcgcgagtacctgtgccagctgtacggccgtttccgcggccagaaaaccgtttcctttgccgaagccgaaagcgcggcgcgcgcctggagccagtcgatcgcgcacaaaccgatcggtagcgtcgacgatctggtcaagcaccagatcctggaactcgataccacgcaactgtcacaacgcatcggccagatcagcaagctgatgcgccaggtcaatgagctgcgcaaggaaggtgagcgcctgagcgataacgtaaaacgactggagttgttgagcaagacggtcggcgatacggcgcgtgcgcaccaggcggcctgccagtcgcagttgctggtgtcgtcgctggcgctgcgcgaagatcaacgccagctggaaaccgccgcgacggccatcgagagtctgcaggccttgatcgatgacgaagccgaaactgtcgatcagctggagcaggaccgcaacgccaagaaccgcagcctgacgcagattcatgcgcagatgatgggtattccggcggccgaacaaaagacacgcatccagaaccgcatcgagcaatgtgacggcaagatcaaggccgttttcaattctctgcaacacaatgcattgatcgcccaacaactggaaaccgcggcgcgcagcgtggccggcatgcagattccgctggaacagaaagagattgccgacgccgcgcgccaggtggtgctggctttgtcggccgccggcacgctcgatctcgccacgcatctgcgcagcatcggcgagctggccgaggccgacgaagtggatgtgctgaaatcgctgatgctggtcaacgactttgaaggtgtcgatgccgcactgggcaagctgcatggggcgctggcaggtaccgaacacagtttcgtttcggccctgcacacgcagattgcgcagttgcgcaacgccgaacatgaagcattgcgtcgcgagaaagacgcagcttcgcgtaaagccaacctggctgaaggcggcgccgactatccggcacacatccgccacgcgttgaaggaattccgtagtgagctaggcgcggcgcgcgcgcaagtcttgtgcgatctggtcgagcccttgtcggaagagtggcaggctgccatcgaaggctatctcggcggcgcccgtttcaacctggtggtggatcaggcctgggaaggcaaggccatcgatttcgtgcgccagaagcggttgcgcgccaatgtgatccagggcagcttttgtttgaagaatctgaagatcgaaagaacgccgagcgattcgatcgtgcatgaactcagcaccgaacatccgatcgcacatgcctacctgcacgaccagttcggccaggtggtgaaggtgagcgataccgaagcgctgcgccacacatcgcgcggcctgaccaaggacggcaagggcagcggctcgcgcacgatgtttaccgcggataccgatctgctggtgttcggccaggaagccaagcgcctcgccaagcaaagagccgaacaggaacatgcgcaggcagaacaggaactgttgcaggtgcgcgcccagttgcgtgagctgcaaggtgcgctggcgttgatggggcaactgcagtgtccgtcgtttgcggcgattgacgagctcggtagcctggtgcgggatctcgatgccgcgcgtcaggatttgagccggctggatctgacccaagttagcaagctggaagacgaggccgaagcattgagcgtcgaaatcgccaatctggaagcacgcaagaccgcttgcagtaaaaacatcggcggccatgaaaaagccatccaaggccatcaggctgcgatcaccaagctgaatctgggcatgggcagcaagcaagcgcgagtcgatagcgataccgcaaaactgcgtgacctgtgcatcgtcaacggcagcctgtcgttcaccgcgctcaccgacgaagtcgccggctgggtcaatgacggcagctatacgcctttccaggcttccagcaacgtcgccaagcaaactgcgctcagctggcaactgtacggcgacgcgcgcaacgcgcttggcgaataccatgcgcacgcacggattgatgaacgcttcgaagtggcgcacggcgacgatttgcgcgacggcgacttcgcgccgctgtacgccatgatggtgaccttgcaggagcgcacccgcggccagctgacgcgccagaaagatatcggcctgatcaagaacctggagcagttgcgcactgccgagtcgtcgttcaacgatgtgttcaccaaacagttctgctacgaaatccgcaacgccgtcgacaccggcgtacgcaccttgaaaacgctgaacatcgaactcgataagctcaagttcggcaccgacaagttccgcatcgactggtcggaatggataccggaattcaaggcttattacgacttcttctgcgctacctcggaaatgtcggatacgcaggaaaacagcagcctgttctccggccctggactgagcgcagaaaactgccaggtgcgcgatcgcctggtgcaattgctgttatcggatgatgaagacaaggccgtcaaggagttgcagcgggtcgccgactaccgcaactaccggcgctatgaaatctacaaggaatccgataccggttcccacgtgcgcctgtcggaatggggcaccggctccggtggccagctagagacgccagcctacatcatccactcggcagtagtcaccaaccgtctcaagcgtttcgagaaaggcaccagcctgcatctgctggtcaatgacgaatcgttcgccaagatggatgaaggccgcgcacgcgacgtcctgaaattcttgcgcgataacctcggtatgcaattgatctgcgccatgccaaccaaacacgccggcgccatcaagccggaattctcgcgtgaatggagtttcagccgcactgtcgccgacggcaatggcgaagtcggcttcgtgtcggaatcggatgagcgcgagctgcgttcggacaagctgcgcgaactgtgggaattgcggcgcgcccaggtgcgcgagcaggcgcagatcaattttgaagctgccgagcaggcggcgtaa

SEQ ID NO: 49687 - DNA, 1458 bp, Collimonas pratensis
ttgttttttgaaccagaccgattaaatttcttcaggcccctggccggcaagcaccgcggcgtggtggtggcctgcgtccgtgcgctctatgaacggctgcacgggccgagcgccgattacggtcagaacctgacgcgcgacggcttgcgcgacttgctgctgccggtggtgcagcaagctttgcaggaagcacgccaactgctgccgcagcaggacgaggccggcgtcgagctggccgatgatgatctgatcccggccggcgccgacgaccagcagagcagcagcgcgctgctgcgtaccttgctgcgcgacggctggctggaaaccttcggcgaccgcgccggcctggtcaccgcctatcgtttcagccgcgccggcaagctgtttgccgaagctttctgggcgatcgagcggcgcagcgcccgcacccgccagcgcaatgtgcgcagctgccgcaatgcgctcaacgccgcactgcgcaatgtcgacgcttacgatctgatcgacgcttatgactatgccgagaaagtcatcagcgatttatccgagggcgtcgattatttccaggagctggtgcggcgcctgatgctggaagcatcgcagacgccatgggacggcttcatggaattcctcgaccgtttcgagaaagaattcaagaagcagctcaccgccgacagcatcgagcgccaccgccaggccatccgcgatctcatcgcgcgcctgcacagcctggagcacgacaaggcgcaggcgctggaagaccagctcaacgatatcgcgcgctgggccagccaggagcggcagggaccgtcgacgctggactggatgctggatcgcatcgaagaaatggtggaggctgcctgcaccaccaagcatccggagctgatcaaggcgatgagcgtctacatgcagcgcgccgccagcattgtgcagcaagccctgatgctgcgcggcggccacacgcgccaagcctatagcgtggcgatcagcaagaccgccaagctgagcggcgctggcaatgctcaggatgcttttctggaacggctgggcgcggcaatcgcgccggcggaaatccgcttgctggacccggcgtccttcaaactgcgcagcgcttcgcagcggcgcaaggcgctgaccgtgaccgcgcagcccaaggtcacgcgcgatgcccgtctggcggctgcgatgtaccgcgccgaagccgatgccttcgctctctccaacgacgacatcgtgcaccgcatccgcgccgagctgcgcctgcgcgaccgcccgatccgtttgtcgaacttgccggtggcgaccaccaccgacgtcctcaacaacatgcagatagtggaagccgtgcgcggtgcgcgcgatgaacggctgaccgtgcagaaattgccgagcaagctctggaacgagttttatgccggcgacgattaccagatcgagatgaaacatgaccctgattga

SEQ ID NO: 49688 - DNA, 723 bp, Collimonas pratensis
atgaccctgattgaagcattgcacgagcagctggcgctgcacaacctggcgctggaacgtttccgcgagatcgtcagccggctgtttgccgccggcatcgtgatgcgcgaagaagacggcgtcgaacagcgtctgtacgacgatgcgcgccgtatcgaagcctgtctgcacgactatttccagctggccggtttccgtcttgagcacaatctgaaaggcgaattcttccgcctgtatgcgcccggcgccgaagtacctggcatgccggaagacggactggagccggtgccgggcctgcgcgccaggctgtcaccggatttcgtcgccgccgccctggcactgcgcttccagtatcagcaaggcttgtcggaaggcggcaaccgcctcaccgattccggcgaggtgctgacccgctttgaagaactgtcggcgaccctgcagacgcaattgaagcgagcgctgccgcccaccaatatcgaacgccagcgtttgctcaacgacctcaagcgtcatcgtctgatccggctggccgccaacttctccatggacgacgaggatgcgctgctggcgatccgcccgactatcctcggcatcatcagcgacgacatgctggaagcggcactggaaaccgatccgctgccggccgctgaaagcgccgatgaagatgtggccagcccgcaagcgctgctgaaagaagaaagcattgaaggaaacatcgaatga

SEQ ID NO: 49689 - DNA, 3627 bp, Collimonas pratensis
atgaagctggacaaactgatcctggtgaactggggcgcgctgcgctcgcaggaatacccgatgggcaacatgaccttgctgaccggtcccaccggttccggtaaatcgaccatgctggacgccctgcaaaccgtgatgacggcggtctaccagaatatctttagctataacccggggcaagacgagaccacccagggcgcgcgcaacggcaagaccaagcgcagtctgtggtcctacgtggtcggcgccgaggataatctgttcgctcgccccaacggcgcgcacggctatgtcgccgcggtgttcaagccaagcgagggcgaggaggggcgcgagttcaccgcgctggtggccgcctcggcgcgcgtcgacggcgccggcgagcggcgccaggcggtctcggaacggctggcgctgctgatcatcgatggcgtcgccctgcagctgggcgatctgacctcaaccgaaatcgatggcggcatggcggtggtggcggtggaaaaaatcgaacgccatctgtcaggaaaataccacggcgtcaccaatttccgcgacagcaagcgcgagtatctgtgccagctgtacggccgttttcgcggccagaaaaccgtctcctttgccgaagccgaaagcgcggcgcgcgcctggagccagtcgatcgcgcacaagcctatcggcagtgtcgacgacctggtcaagcaccagatcctggagctcgacaccacccagctggggcagcgcatcggtcagatcagcaaactgatgcgccaggtgaacgagttgcgcaaagagggcgaacggctgagcgacaacgtcaagcgcctggagctgctgggcaaggctgtcggcgataccgcgcgtgcgcaccaggccgccagccagtcgcagctgctggtgtcgtcgctggccttacgcgaagaccagcgccagctggaagcagcaacgtctgcgattgagggtttgcaggcgcttatcgacgacgaaaccgagagcgccgacaagctggaacaggaccgcaacgccaagaaccgcagcctgacgcagatccatgcgcagatgatgggaattcccgccgccgagcaaaagacccggatccagaaccagatcgaacaatgcgacggcaagatcaaggcggtcttcaactcgctgctgcataacgcgcagacggcgcagcagctggatagctctgcacgcaacgtcgccggcatgcagatcccgccggagcaaaaggaaattgccgatgccgcccgccaggtggtgctggcgctggccgccgccggcacgctggagattgccagccatctgcgcagcatcggcgaactggccaaggccgagcaggtcgacgtgctgaaatccctgatgctggtcaacgattttgaaggcgtcgacgccgcgctggtgaaattgcacagtgcgctggccggcaccgaaaaaagctttgtctctgccttgcacacgcagatcgcgcaactgcgcgccggcgagcacgaagccttgcgccgcgaaaaggacgcagcttcgcgcaaagccaacctggccgaaggcggcgccgattatcctgcgcatatccgccatgcgctgaaggaattccgctccgaactcggcgccgcccgcgcccaagtgctgtgcgacctggtcgaaccggcttcagccgaatggcaggcggcgattgaaggctatctcggcggcgcccgtttcaatctggtggtagaccaagcctgggaaggcaaggcgatcgacttcgtgcgccagaaaaagctgcgcgccaatgtgatccagggcagcttctgcctgaagaacctgaaaatcgaaagaacgccgagcgattcgatcatccacgaactcagcaccgagcacccgatcgcccatgcctatctgcacgaccagttcggccaggtggtcaaggtggccgataccgaagcgctgcgccacacctcgcgcggtctgaccaaggacggcaagggcagcggctcgcgcaccatgttcacgaccgacaccgacatgctggtgttcggccaggaagccaagcgtctcgccaagcagcgcgcggagcaggaacatgcgcaggccgagcaggaattgacgcagatccgcgtccagctgcgcgaactgcagggcgcgctggcgctgatgggtcagttgcaatgcccttcgttcgctgccatcgatgagctggaaaacctggtgcgacagctggatgcagcgcgccaggacctgagccggctcgacctgacccaggtcagcaagctggaagacgaagcgcaggcgctcggtctcgaaatcgctgcgctggaagcgcgcaagacggcctgcagcaagaatatcggcggccacgaaaaagccatccagggccaccaggcggcgatgacgcgcctgaatttcggcctgggcggtaagcaggcaagggtcgacgccgacagcgagcgcctgcgccagctgtgcgtcgtcaacggcagcctgtcctttaccgccgtcagcgatgaagtggctggctgggtcagcgacggcagctattcgcagacgcaggcagcgaacaatgtcggcaagcagaccgcgcttagctggcagctgtacggcgacgcccgcaacgcgctgggcgaataccacgcccatgcccgcatcgacgagcgctttgaaatcgttcagggcgaagatctgcgcgacggcgacttcacgccgctgtacgccatgatggtgaccctgcaggaacgcacccgcgcccagctgacgcggcataaagacatcggcctgatcaagaacctggaacagctgcgcacggccgaatcctcgttcaacgatgtcttcacaaagcagttctgctacgagatccggaatgcggtcgataccggtgtgcggaccttgaaaacgctgaataccgaactcgataaactcaagttcggcaccgacaaattccgcatcgactggtcggaatggattcccgaattcaaggcttactacgatttcttctgcgccacctcggaaatggccgacactcaggaagccagcagcagcctgttcgccgatcctgccttgagcgccgagaattgcctggtgcgcgaccgcctggtgcaattgctgctgtcggacgatgaagacaaggcggtcaaggaattgcagcgggttgcagactaccgcaactaccgccgctatgaaatctacaaggaatccgataccggttcgcacgtgcgcttgtccgagtggggtaccggctccggcggccagctggaaacgcctgcctacatcatccacgccgctgtcgtaaccaaccgcctcaagcgcttcgagaaaggcaacagcctgcacctgctggtcaacgacgaatcgtttgccaagatggatgaagggcgcgcacgcgacgtcttgaaattcctgcgcgacaatctcggcatgcagctgatctgcgccatgccgaccaagcacgccggcgccatcaaaccggaattctcacgcgaatggagtttcagccgcaccgtcgccgacggcaacggcgaagtcggcttcgtctccgagtcggacgagcgcgaactgcgctcggacaagctgcgcgaactgtgggaattgcggcgcgcccaggtgcgcgagcaggcgcagatgaattttgaagctgcggagcaggcaacggtataa

SEQ ID NO: 49690 - DNA, 1440 bp, Collimonas arenae; identical to SEQ ID NO: 49684

SEQ ID NO: 49691 - DNA, 765 bp, Collimonas arenae; identical to SEQ ID NO: 49685

SEQ ID NO: 49692 - DNA, 3621 bp, Collimonas arenae; identical to SEQ ID NO: 49686

SEQ ID NO: 49693 - DNA, 1458 bp, Collimonas pratensis
ttgttttttgaaccagaccgattaaatttcttcaggcccctggccggcaagcaccgcggcgtggtggtggcctgcgtccgtgcgctctatgaacggctgcacgggccgagcgccgattacggccagaacctgacgcgcgacggcttgcgcgacttgctgctgccggtggtgcagcaagctttgcaggaagcacgccaactgttgccgcagcaggacgaggctggcgtcgagctggccgatgacgatctgatcccggccggcgccgacgaccagcagagcagcagcgcgctgctgcgtaccttgctgcgcgatggctggctggaaaccttcggcgaccgcgccggcctggtcaccgcctatcgtttcagccgcgccggcaagctgtttgccgaagctttctgggcgatcgagcggcgcagcgcccgcacccgccagcgcaatgtgcgcagctgccgcaatgcgctcaacgccgcactgcgcaatgtcgacgcttacgatctgatcgacgcttatgactatgccgaaaaagtcatcagcgatttatccgagggcgtcgattatttccaagagctggtgcggcgcctgatgctggaagcatcgcagacgccgtgggacggtttcatggaattcctcgaccgtttcgagaaagaattcaagaagcaactcaccgccgacagcatcgagcgccatcgccaggccatccgcgatctcatcgcgcgcctgcacagcctggagcacgacaaggcgcaggcgctggaagaccagctcaacgatattgcgcgctgggccagccaggagcggcagggaccgtcgacactggactggatgctggatcgcatcgaagaaatggtggaggccgcctgcaccaccaagcatccggagctgatcaaggcgatgagcgtctacatgcagcgcgccgccagcattgtgcagcaagccctgatgctgcgcggcggccacacgcgccaagcctatagcgtggcgatcagcaagaccgccaagctgagcggcgctggcaatgctcaggatgcctttctggaacggctgggcgcggcaatcgcgccggcggagatccgcttgcttgacccggcgtccttcaaactgcgcagcgcttcgcagcggcgcaaggcgctgaccgtgaccgcgcagcccaaggtcacgcgcgatgcccgtctggcggctgcgatgtaccgcgccgaagccgatgccttcgctctctccaacgacgacatcgtgcaccgcatccgcgccgagctgcgcctgcgcgaccgcccgatccgtttgtcgaccttgccggtggcgaccaccaccgacgtcctcaacaacatgcagatagtggaagccgtgcgcggtgcgcgcgatgaacggctgaccgtgcagaaattgccgagcaagctctggaacgagttttatgccggcgacgattaccagatcgagatgaaacatgaccctgattga

SEQ ID NO: 49694 - DNA, 723 bp, Collimonas pratensis
atgaccctgattgaagcattgcacgagcagctggcgctgcacaacctggcgctggaacgtttccgcgagatcgtcagccggctgttttccgctggcatcgtgatgcgcgaagaagacggcgtcgaacagcgtctgtacgacgatgcgcgccgtatcgaagcctgtctgcacgactatttccagctggccggtttccgtcttgagcacaatctgaaaggcgaattcttccgcctgtatgcgcccggggccgaagtacctggcatgccggaagacggactggagccggtgccgggcttgcgcgccaggctgtcgccggatttcgtcgccgccgccctggcgttgcgcttccagtaccagcaaggcttgtcggaaggcggcaaccgcctcaccgattccggggaggtgctgacccgctttgaagaactgtcggcgaccctgcagacgcaattgaagcgagcgctgccgcccaccaatatcgaacgccagcgcttgctcaacgacctcaagcgccatcgcctgatccggctggccgccaacttctccatggacgacgaggatgcgctgctggcgatccgcccgactatcctcggcatcatcagcgacgacatgctggaagcggcactggaaaccgatccgctgccggccgctgaaagcgccgatgaagatgtggccagcccgcaagcgctgctggaagaagaaagcattgaaggaaacatcgaatga

SEQ ID NO: 49695 - DNA, 3627 bp, Collimonas pratensis
atgaagctggacaaactgatcctggtgaactggggcgcgctgcgctcgcaggaatacccgatgggcaacatgaccttgctgaccggtcccaccggttccggcaaatcgaccatgctggacgccctgcaaaccgtgatgacggcggtctaccagaatatctttagctataacccggggcaagacgagaccacccagggcgcgcgcaacggcaagaccaagcgcagtctgtggtcctacgtggtcggcgccgaggataatctgttcgctcgccccaacggcgcgcacggctatgtcgccgcggtgttcaagccaagcgagggcgaggaggggcgcgagttcaccgcgctggtggccgcctcggcgcgcgtcgacggcgccggcgagcggcgccaggcggtctcggaacggctggcgctgctgatcatcgatggcatcgccctgcagctgggcgatctgacctcaaccgaaatcgacggcggcatggcggtggtggcggtggaaaaaatcgaacgccatctgtcaggaaaataccacggcgtcaccaatttccgcgacagcaagcgcgagtatctgtgccagctgtacggccgttttcgcggccagaaaaccgtctccttcgccgaagccgaaagcgcggcgcgcgcctggagccagtcgatcgcgcacaagcctatcggcagtgtcgacgacctggtcaagcaccagatcctggagctcgacaccacccagctggggcagcgcatcggtcagatcagcaaactgatgcgccaggtgaacgagttgcgcaaagagggcgaacggctgagcgacaacgtcaagcgcctggagctgctgggcaaggctgtcggcgataccgcgcgtgcgcaccaggccgccagccagtcgcagctgctggtgtcgtcgctggccttacgcgaagaccagcgccagctggaagcagcaacgtctgcgattgagggtttgcaggcgcttatcgacgacgaaaccgagagcgccgacaagctggaacaggaccgcaacgccaagaaccgcagcctgacgcagatccatgcgcagatgatgggaattcccgccgccgagcaaaaaacccggatccagaaccagatcgaacaatgcgacggcaagatcaaggcggtcttcaactcgctgctgcataacgcgcagacggcgcagcagctggatagcgctgcacgcaacgtcgccggcatgcagatcccgccggagcaaaaggaaattgccgatgccgcccgccaggtggtgctggcgctggccgccgccagcacgctggagattgccagccatctgcgcagcatcggcgaactggccaaggccgagcaggtcgacgtgctgaaatccctgatgctggtcaacgattttgaaggcgtcgacgccgcgctggtgaaattgcacagtgcgctggccggcaccgaaaaaagctttgtctctgccttgcacacgcagatcgcgcaactgcgcgccggcgagcacgaagccttgcgccgcgaaaaggacgcagcttcgcgcaaagccaacctggccgaaggcggcgccgattatcctgcgcatatccgccacgcattgaaggagttccgttccgaactcggcgccgcccgcgcccaagtgctgtgcgacctggtcgaaccggcttcagccgaatggcaggcggcgattgaaggctatctcggcggcgcccgtttcaatctggtggtagaccaagcctgggaaggcaaggcgatcgacttcgtgcgccagaaaaagctgcgcgccaatgtgatccagggcagcttctgcctgaagaacctgaaaatcgaaagaacgccgagcgattcgatcatccacgaactcagcaccgagcacccgatcgcccatgcctatctgcacgaccagttcggccaggtggtcaaggtggccgataccgaagcgctgcgccacacctcgcgcggtctgaccaaggacggcaagggcagcggctcgcgcaccatgttcacgaccgacaccgacatgctggtgttcggccaggaagccaagcgtctcgccaagcagcgcgcggagcaggaacatgcgcaggccgagcaggaattgacgcagatccgcgtccagctgcgcgaactgcagggcgcgctggcgctgatgggtcagttgcaatgcccttcgttcgctgccgtcgatgagctggaaaacctggtgcgacagctggatgcagcgcgccaggacctgagccggctcgacctgacccaggtcagcaagctggaagacgaagcgcaggcgctcggtctcgaaatcgccgcgctggaagcacgcaagaccgcgtgcagcaagaatatcggcggccatgaaaaagccatccagggccaccaggcggcgatgacgcgcctgaatttcggcctgggcggtaagcaggcaagggtcgacgccgacagcgagcgcctgcgccagctgtgcgtcgtcaacggcagcctgtcctttaccgccgtcagcgatgaagtggctggctgggtcagcgacggcagctattcgcagacgcaggcagcgaacaatgtcggcaagcagaccgcgcttagctggcagctgtacggcgacgcccgcaacgcgctgggcgaataccacgctcatgcccgtatcgatgaacgctttgaaatcgttcagggcgaagatctgcgcgacggcgacttcacgccgctttacgccatgatggtgaccctgcaggaacgcacccgcgcccagctgacgcggcagaaagacatcggcctgatcaagaacctggaacagctgcgcacggccgaatcctcgttcaacgatgtcttcaccaagcagttctgctacgagatccggaatgcggtcgataccggtgtgcggaccttgaaaacgctgaataccgaactcgataaactcaagttcggcaccgacaaattccgcatcgactggtcggaatggattcccgaattcaaggcttactacgatttcttctgcgccacctcggaaatggccgacactcaggaagccagcagcagcctgttcgccgatcctgccttgagcgccgagaattgcctggtgcgcgaccgcctggtgcaattgctgctgtcggacgatgaagacaaggcggtcaaggaattgcagcgggttgcagactaccgcaactaccgccgctatgaaatctacaaggaatccgataccggttcgcacgtgcgcttgtccgagtggggtaccggctccggcggccagctggaaacgcctgcctacatcatccacgccgctgtcgtaacaaaccgcctcaagcgcttcgagaaaggcaacagcctgcacctgctggtcaacgacgaatcgtttgccaagatggatgaagggcgcgcacgcgacgtcttgaaattcctgcgcgacaatctcggcatgcagctgatctgcgccatgccgaccaagcacgccggcgccatcaagccggaattctctcgcgaatggagtttcagccgcactgtcgccgacggcaatggcgaggtcggcttcgtctccgagtcggacgagcgcgaactgcgctcggacaagctgcgcgaactgtgggaattgcggcgcgcccaggtgcgcgagcaggcgcagataaattttgaagctgcggagcaggcaacggtataa

SEQ ID NO: 49696 - DNA, 1452 bp, Leptospira santarosai
atggactataaacttttgcaaagattgtttcgttcttccgcaatccgtcttctgcgaaaagacaacgccccctttatcatctactttttggaaaaatattttagaagttctgcacgtactttcgttccgttcgaggagctgaaaattctacttcgttacgaattggaaaacttaaacgatcaggaagagatctccttacaaagaagcgcggacgtttatctgggagaatggattggagaaaattttctgacccggaggatacgatccgcggagggaatcgaagagatcatattggaaccctcggtcgaattggaaaaagtattctcctggatggaagacatacgatccttggaagataaggacgtgatcggcacggaatcccgttttttttccgtattaaataaattgaaagagattgtggaagagagtgtttccgatccggaggagaaaattcgacaattggaattcaagcgggacgaattggatcttcaaattcgaaaactcaaggcgggagaacaagtatccaaatttccgagcgaaagaattcggagccaatatgtgtatgcgcgaaaggaagcgttgggattactttcggatttccgacaagtggaaggtaattttatggaaataacgaagatgatccataaaaaatatctggaagtcgttcagaaaggggaaattttacgatttgctttggacgggaacgacgagttacttcgatcggaacagggtcgtagtttccaaaccttttgggattttttacgatccgaacgaagtcaggaacaattcgaaagtatattagattctttgtattcattggaagacgttttggagctggactcgagaaagtttttccggaattttaggagaaatttaagagaagcgggttctcgggtaaacggagttgttacccgtatgtcggaacagctcaaaaaaagtttggtggaacgtacacttcgtgaaaaccgcagatcgaaagaacttatcgcggaaattaagaatttggtcttggagaatccactcgatttctctcagacggatttttattctttggaggaaatggatgtgcgttttccgatggaaaggcctctttggcgcggcgatccggaggagacgtttcgaaccgtccggatcgaaaatacggatgaggatggaaatgtattcgatattctggaatcgatccgaggaatcgatttggaaatgtacgaacaacggatccaaacgttgcttcgtatttctccggaggtttctttggaaaaggttctgcgggaatatccggacgacgtctgctttgaaagtttagtcgcttatgtttggattgcgggtaacggagaatttcattccttggacgattcggaaacctttgtatattccgtttccataatggatcatccttcggaaaaacttgcgtatcgaattcctaagggaacgtatagagtgggccatttatga

SEQ ID NO: 49697 - DNA, 564 bp, Leptospira santarosai
atgaataaaccgtatgactatgcaccttccattcttagattgttgaaaggatcgatcaacagcgagtccgatgcaaagatttggaagaatcttttggacaacgaaaaatcggtgcgggaacactttgaaaaactgggtatttttttgcacttggatcgggaagacggttatgcgtttctacgacagacttcggacgacgaaagtgcagaatcggatgagaaacttcccgtgatcacccgtaaacttccgcttacgaaagaagagactttgtttctaattctactgagggaatgtatcatagaaatcgaagaaaaagatccttccggttccatcctttttagaaaggaagagctatcggataaagtgagtccttttttctccgacctctccgatgaaatcgatcggcaaaaaagattcgaaaaattacttcgcaaatccgaagaactaggctttgtcaaacagatcgagccggaaacgattcggattgaaagactcttaaaggcgaaattgaccgtatccgagttagagggtttacgcggtaagtttcgactaggaacggaataa

SEQ ID NO: 49698 - DNA, 3357 bp, Leptospira santarosai
atgactgatttattttcacccggtgaaattgccgccaataccggatatagacttgaattcttggaaattttaaattggggaacttttcacggtaggatttggaaattacgaccggaaggggaaaattttcttttaaccggagcgaacggttccggcaaatcaacgttagtcgacgcgattcttacgctgctcgttccggccgcaaaacgaaattataatctggcttcgggactggaaagtaaaaagagagatcgatcggaacgatcttatgtggaaggtcactacggtagatcctcttccggtagcgaaggaattttgaaaattcgcgggaaacaagaagagtgttattccgttttatcggcggtattcgaagcgaatggaaggttcccgcgaattcggattgcgcagatcttttggttcgaatccggagaattgaaaaagatctaccttttttccgataaagagttggacttcgaaaaagatctggttttgggaaaaagaaccgtaaaggaattgaaagcggatctgaaaaattccggggcaagactttacgatcagttcaaggcgtataacgtggattttaggaaagcggtgggtttggaatcggagaaagcgatcgacctattcaatcaaatcgtagccatcaaatccttaggagtgttgaacgaattcgtccgagaacatatgctcgagtccaaggataaaagatccaggatcgaggaattgaatcgtaatttttccgatctgagcgaaacatacgaggcgattgtaaacgcaaaagaacagttgaagttgttggaaccgatcgaaaaaaaagccgccgagtatagggaatggaatcggaaggcggccgatcttcaggctttgatcgtatatgttccgtattattttgcggaaaaaaattacgagcttcgtcaaatcagagaacaggattatctttttgaattatcgcgtttgaaagacagatccgacgaactatcgactgaaatcgaatccttaaatcaagaggaacggaagttattcaacgcattagaaaacaatgatactcaaaggagaatcgccgatcttgtacgaaaacgggagggaattctctccgatctcaaaacgcggggaatcgaaaggaaaaaatattcctcctatctttccaaaatcggtttggaggaagcgttttccgaagaaacattctatacgaacctgcgcatagccggaggaatgcttacggaaaccgattcgatttgggaagaaatcagggatcgattgggaaagctgacgcttcaaaaaatggaattgcaaaaaaatttcgattcggttcgttccgaattggagtatctgaaaaaaaagcgggataatcttcccagaacccagtcggaaattcgggcaaaaattgcctccggaatcggactttccgaaaaaagatttccctttatttgcgaattgatccgcgtcaaagaatccgaaaaagaatggacgggggctttggaaaggctcttgagaaatttcggcttacggatgttagtcgcggaagaggactacgaggccgtgtcggcttacgtgaattcttcctatctgggagggaagttggttttttcaagaatggttcctttatcgggaccgatcttgcaacccaaagacaaggaagaagttttctacaagttggaattgaaatcggaattgtcgaacgtaaagaaagaatggttggaagcgcagatactgcgcgagttcggacatatctgcggggatctgaatcgtcttcggaaagaggagaaggctcttacaaaagaaggtctgattaagtccggtagaattcgacacgagaaggacgatcgtaagaacatttcggacgcaagagattatattttaggctggaacaatacggagaaaatcgccgcgttggaatccgaatttgcccttctcgggcagaacattgatcggttgaatgctgcaatcgacctgatcagagaagaggaaaacaaaaacaaaaacaaacgggacgacctgcttctctttctacgtttcgaacaattttcacaaattgacgacgaaagtttgaaaggtccgcttcaggatacggaaagacaaatccgggaattggaattgcgttccgaagaatacgggaagttgaaggaacaatacgaactcgcaaaagctcgcctaacggatgttcaagggagacaacgggaaaccgccaaggaattcaacgttttagaggataggcttttcactcttcggaaggacatggaagatctacagcagagggtccgaaaagtcgaccgggaaacgtcgatttcactggagccgattctcaacgaacgactgcgggaaacgatcctaaccctggagtcgatcgcggagacggaacggaatttttcggatcgtttggttgtagagcgcgatcaatatttggagaaacgagattcgatcggagaagaattgaacaaaggaatggatcgttatgtgaaacgattccgagaggaggcggatcgggaagaattgtccgtttcggtttccaacgcggaagggtttgcgaaattgaccgaaaggattcggcaggatcgattgcccgaatttcaggaaaaatttcgaacgatgatgtccgacaaagtcgcaaagcagattttggacttcaaggcggaattggacgacgacgtctcggaaatcaaggaaaggatcgacgaactgaacgattcgttaaaggatctggattattctaaaggaaaatcttatattcaaattcgatattttgataccaaggatcgggagattgtgggcgattccggctttaaggaaatgttacgcggaagcattccggatttgggagacagttctcacaacgaggaaaaattcgctaaaatcagagagttgttgaaaaagttaaagggagagggcggtagcgatcgttggtccagactcgtaacggatcccaggaactggctggatttccaagcggcggaattccttagggataacaaccaaattcttcaggtttacgattcgtccgcgggtaagtcgggaggacaaacggtaaaactcgcttacacgattctcgcttcggcgatcgcttatcaattcaaaattcgtgaacggaattcgtttcgttttgtggtgatcgatgaaatgttcaacaatctggacggagagaattcaagatatgcgttgaacctctttcgtcaattgggtttacaattgcttgtcgtaactccgatggataagattacgatcgtcgaaccttatgtgagaagcgttcattttgtgaagaacaattcggaaggaaacgattccagagtgtatccgatttcgaaggaaaatgtatcgtccgggaaggatgaaaattcggaaaggaaagtgggaaatttatag

SEQ ID NO: 49699 - DNA, 1179 bp, Leptospira santarosai
atgatttctccggaaattttacgcaagagatcgctggcatactatcataacgaactcttacgttctatcgtcctaggaggtgttttatttccttgggagatttcgatcggtaaagttcttccggaagagatcttaaaaaatccctctttgttacgagaattacgggccgaatcgaaagaaaacaaaggtttcggatttagaatcgtctttcgttcgaaagagacccggaaatacggaatacaaacgattcctacgaaaatcgtttttgataccgaagacgattttttgcgttttacaaaaaagaaagacgaattcctctcctatagcaccgattgtacgttgattctttccgttcttcccgagctgaaagattggattttaaaaaatacgttatccgtaatcgaagagtccggtaaatgggaaagtattctttcggtctgttcctattttttagaatataggaatcccggattgtatatccgagaactaccgattcgaattcctacgaaattcatcgaggaaaataaaaaggttttgagaagtcttttggattttctattgcctgagatcgcggatgcgaaggatttcgaaactcgttacggattaaaaaaagcggaacctttggttcgatttcgaattttggatctcgaaattgcaaagtcttccaccggaggtttaacggatttgagcattcccgtccgggattttagaaagttggagctctccggttgtggaagggtttttatcttagaaaataaaacgaatttcgcgaacctattcaattttttaagttttccgcaactgaagggaacgatctccattttcggtcagggtttcggattaaacgttttaaaggattgtaactggttggagaaaatggaaattttttattggggagatctggacgttcagggtttcgaaatcctgtcgcaactacgggaacaatatcctcaaagccgttcctttttaatggacctgaagacatttgttcggtttcgagactttgcggtagacggtatttcttcttctaaatcttccgaaccgaaatttctcactccatcggagcgcgaaacttggaagtatttaagttctttagattcgaaaaatcggttggaacaggagaaaattcctcacgaatacgtgcaagaagttctgtccggtttgggtggatcacagtaa

SEQ ID NO: 49700 - DNA, 1521 bp, Microbacterium laevaniformans
gtgactcagcccgagctatccgccgccgccgcgtcaacggatgtcggtgtgttccttcagaatggacgcgtgcccgccgtcgcccaggttctcgagctcgcccagcttgcggagcgcgatgcggcgtggaagctgcttcgagccgacagcgcacccgtggtcgccggtcttctcggcacccacctgggcggagacgagcgccgagtcgacgctgaggagctatacgagcggatcgatgccgacctcgagcggctccgtgcgcaggggctgatcttgccgctgactgcgaaggggtactgcggggagtggcgatcggccggcttcctggtgcgtcggccgtcatcggaagcgcggggtgagacgctcgagctttccccggatgcgatcgccgggatccgcttcttgcaggggcgtgccgccccgcgttcgagtgtgaccgagtctcggcttgcgagtcttgcggcgcaggtccgtcgcctcgcgatcgacaccgatcctgacgtgtcagcgcgcatcgcgctactcgaggaagagatcgggtcgattgagcggcggatcgagagcctgcgttccggtgacgagtccgcgatcgatgaagaccgggcgctcgagcgcgttcgcgacgtgctggcgcaggcggcggacgtgccggacgactttgctcgggtgcgtgccgagttcgagacgctgaatgcgtcgctgagggcgaagatcgtcgagtccgatgtttctcaggcgtcagtcgtcgacgaagtcttccgcggaatcgaccacatctccgactcggatgcaggccgcagtttcgctgccttctcccagctcgtgctcgaccctgcactcggtaccgcattcgaggccgacatccgtcgcatcctcgaccgcagattcgctcgtgatctcacctcggatgagcgccgggcactgcgtgccttcctcgcaacgctcaagggacgaagcgcggagatccacgatgtcatcacattgttcgcccgggcgctccgccgctacgtgcagtcgcaggactaccagcgcgaccgggtcctgcggactcttctgcgggaggctcagcacgcgggggtgcaagccgccgcacacacgcgtccgtggcatccgacgtttctcacgctggatctctcggccgttgcgctgtcgagcgtcggggcgatcgaccttcacgaccccgccgaattcgccgccaccgaagagatcgtcacgcagacgacatccctcgcgagcctcgaggagctgcgggcgatcgctcgcgaaaccgagatcgacttcgacgaactcacccggaacgtcaacgacctgctcgccgaggtgccctcgtgcaccgtcgcagatgtccttgctcgataccccgcgacgcagggggtcggcagcgtgatcggacttctctcgatcgccgccgagcagggcaccgttgacgatgagcccgaggtactcgcttggcagggcgccgacggagttccgcgtgcggcgattgtggccgcgcaccgattcacaggagcggtggcatga

SEQ ID NO: 49701 - DNA, 660 bp, Microbacterium laevaniformans
atgaccgagtcgaccacggcggatgtcgcccccgacgaggacggaggcctctggcgtggcgacgccggcgaactccctgatcgcacgaggcgcgtcttgctgcgtctagtgcgtggcccgtatctttccggagcgcgcgaggcgcagctgtgggcggtcctgctcaccgacgaggctgtcctccgctcccggctcgccgatttgttcctcgaattggtcatcgatcgggacaacgagttcgccttcgtccgcaacgctccgtccgaggacgccccgaaggcagtgcggtctgaggcgttgacgttcctcgacaccgcaatgctgcttgtcttgcgccagacgctgctgagcgaggagggtcgcggtcgggtgatcgtcgggcaggcggaggtgttcgagcagctcgccgtgttccgcaccccggaccgtgatgagaaggacttcgcgagccgcgtcaactcgtcgtggaacaagatgcagaacaagctccgcgtgttgcacgccgttggcgatgaccgtgccgagatttcgcccgtgctccgactgctcgtcgatgccgaccagatccgcgcgatcacatcggagtaccaccggatcgcccgagagggcggaggagaatccgctgccccgtcgacggatgccgaggatgacacagaatga

SEQ ID NO: 49702 - DNA, 3354 bp, Microbacterium laevaniformans
atgacgatgctgagcttccccaccgacgagccggaggtcgatccgaccaggcccggccagtggcgactcgcccaaatcgagctcgtcaactggggcacgttcgccggccacgtctccgtggatgtcgcgcgcgccggccacctgttcaccggcgcatccggatcgggcaagtcgtcgctactcgacgcgattgcagccgtcctcacccccgacaggtggctgcgcctcaacgcggcggctcaggatggtgcttcccggcagagcgatcggacgctgatgagctatgtgcgtggcgcctggagcaaggaagctgacgagactgccgatcgggccaccacgacctacctgcgctcgaaggcaacctggagcggcatcctgctgcgctacgagaatctccgcgatgaaccggtcgtcctgctgcgggtgttccacgcaccgggcacgcgcaccgaaccgaccgcgttgaaggacgcacggatcttcacccgcgatcacgtgaagcttctcgacgtgaagccgcacgtcgaaggcggaattgacgcgcgtcgcatgtcgacggccttccccgacgcgctgatcaccaccggcgggagacacggacgctttcacgagcggatcatccgtcagttcggcttccgcggagatgcgacgcttcagcttctccacaagacacaatcagcgaagaacctcggcaccctcgacgcgttgttccgcgggttcatgctcgaccagccagggaccttcgcgcgggccgagaccgccgtcgagcagttcacggagctcgatgccgcgcacaagcacgtggtcgacctgaggaagcaggctgatgcgctccgcaaggtcgacgaggcgatcaccgcgttcgacttggccggcgctgagatggcggcgatctccgatctgcacgagggggtcgagcccttcacagcgggactcaagttgcggctcgcgaaggaagccgcgggccccgcacgcgccgcgctggcgcgcgccgagagcgacctgagcgacgccgcgcgagagcagcggttggcggcagaggcgctggaaaccgcgaaggcgcgggtccgggacgagggcggcgcgcgcgtcgagcttctgcaggagcggatcgacagtgcgcagcgtgccgaggacgtcactaggcaatatcgagctcagttgaccgcagagctgatgcgcatcggcgcaccaatgcccgaagactccgagcagtttgcggagctccttgccgcggccgtcaccgaggttgcgcgcgacatccccgctgtgtcgtatgaggtgcgtgacgccgcgagtcaggcgcgtaaggcgctggacgaagtcaccaggcagattcaggcgctgagagatcaccggagcaacctcgacgagaagcttctgagcgcacggcgattcctcgcggacgctgtcggtgtgccggcatcgacattcccctttgcgggcgagctgatctcggtcgccgagcagcactccgcctggcgcggcgcggcagagcgagtgctcgctccgtttgcgtcgacgctcctcgtgcgggacgaacatcttgtcgccgcacgtcgggcagccgactcgcggacactcggtgtccggctcgtcatcgaagcggtcccgcacgccgtcgacgagccgcgtcgccccaaggatgcccgctcgctcgttcatcgcctcgcggtgagcgatgggcccttcgcgtcctacgtccgcaagcgcatggcctccgagttcgactacgcctgcgtttcgcaccccgacgagcttgatgacgtcgagcgtggcgtcacgatcggcggcctggtcaagcgcaactcacgcaggtatgagaaggacgaccgtcacgaggtcggtgatgccactcgatgggtgctgggcggcgacacccacgcgcggctcgaggcattgcttgagcgtcggcgggacgcgatggcggcgatggaggaagcatccgcccgcgacgccgaggccgactcgtttcgtcaggacgcggtcagtcggcgcgacgtcttcacacgcgtatcgacgttcagctgggaccaagtggacctcgcaactgcgatggcggtcaccgcggcccagcgcgacgatctccgggtgctcaccagcgagtcggggactctccgcgaagcacaggaggccgcggagcgagcgacccggcgactggacgaaacgaacgcgaagcacgcacgggcgctcggagcccacgctgtcgcccgcagtcacgtcgaaagcatcgcggcacacgtcgccgaactcgaggccaccccatatgcaccggtcgaggagcggatcgccgacgccctcgaaggccggttccgagccgagcgacgctccgtgagcctggagacggtggacgaagtcgcgcgaaaggtgcagtcggcactctcgaaggagaaggacgcctcggccagccgcgcagcggatgctgaggccagcttcgccgggcgcgccgccgagtttcggctcgggtggcccgctgcatccgcagagctgactgctgacatccgcgaccgctacgtctaccgggaactgcgcgaaggcatcatcgcccgcggcctgcccgagaaggagtccgagttccgcaagctgttgcgggaacgatcgcaggacgtcgtcgcacacttgctcagcgacctccgcgacgccccgggtctcatccgtgagcgaatcctccctgtcaacgcatccctggggcggtccccgttcgagggagcggaccgcttcctcgagatcgatgtgaagacgacgcggaccccggaggtcgacgagttcctcacggacctccgtcgcatcgttgaaggcaactgggccgacgagtcggccgccggtgccgagcaacgattcgccgtgctgcagcgcgtaatcggtcgactcggatccaaggaccgcgtcgacatcgattggcgcaaccgggtgctcgacacgaggcttcacgtgagcttcctcgcgcgggagaaggacgtcgccggccgcgttgtgcgggtgtatgactccgcagagggcttgtcgggtggtcagcgacagaagctcgtcatcttctgcctcgcggcagcgctgcggtaccagctgactgaagaagaggacgaggttccgaggttcgggtcgatcgtgctcgatgaggcgttcgacaaggctgacagccgatacacgcgcaacgcgatggaggtgttccgcgagttcggattccacatgatcctcgcgacaccgcagaagctgctgcagacgctcgagccgtacgtgggtgcgatcacgtcggtatcgaaccccgaccgcgacgcctcacggctggcgaacgtggtgttctcggtcggtgaacctgaggtcgccaccccgccgcacgcggagtcgcgcgtgtga

SEQ ID NO: 49703 - DNA, 1122 bp, Microbacterium laevaniformans
gtgaccacgcttgtcacaccgtctgacctgcgcgcgcgggcgaagaagctcttcgaccgcgatgcacgcacctgggccgccgagcagcagaccgatgtcgtgctcgacgttccgctacgcccgccaacggagcgggaggcgctggacgatctcgatcgggttcgacagtgggtcgacgcctggcgcggtgtgagcgaggattcgggtatcgagctcgagtgggtcgtccgccattggtcacgcatcgggtcgcaggaagtccccgttcgcgcggtgctgcgcggttcggattcgatcgctcgagcggcgggcgaggcggagggttggcgacgtctgatggcgcgactcgacgagttgaggggcctggccggttccgacgccagcggtgtgctccgcgcccatggccgcgcgatcagcgatctcgatggcgccgatttcgacaggctcgtccatgtgctggcctggttgcgcgagaacccggaatcgggccacctggtgcgggaactgccgatccgcggcatccacaccaaatggatcgaatctcgccgcggactcgtcgaggcgttgcatcgggcgggaaccggagcgcccggactgggccttcgcgagccgtcaccgctcatacggatccgagctctcgatccgtcgctctcgttccaggggctcaccgatgtgtcggcgcccgtcgacgaccttgcggcaagcacgatccgacccgagcgcgtgttcgtgttcgagaacctcgccaccctgctcgcgatgccggatgtgccccgagctgtagcagtgcacggtggtggtcaccgcgtcgatctcgtcgcccgcctcccgtgggcgcagacggtcacctactggggcgatctcgattcgcacgggttcgccatactcaaccgacttcgagccaggggtgtggacgcaacgtcggcgttgatggatatggatactctgttcgctcaccgtgatctgtgggggaccgatccggatccgaacgtcggcgtgttcgagctgctcacgcctgatgagcgcgcgactcttcagtcgctgagcgcggagggcaacatacgcctcgagcaggagcgcctcccgtggagttacgcgctcgaacggctcggggtgtcctga

SEQ ID NO: 49704 - DNA, 1452 bp, Brevibacterium ravenspurgense
atggatgccgaacagatcgaccggttgcgccgtctgaaccccgcgtggaagttgctgcgcgctcagaacgcgcccttgattttgtcgtttttgggtcggtatttcatcgaggaaaaccacggcgcgacggccgccagcacacttgcgggtgcgctggatgacgagctctacgggctgaatgaccaggccgtcagccttggcgaacctgcgccgtaccccaaggaccctacggattatttagaggattgggcggcggacgattctggttggctgcgcaggttctacccggtggattctgacgagcttcactacgacgccacgcctgcgctggagaaggcgtattcgtgggtgctcggcctgcaggtgcgcccgtttgtggccaccgagtcgcggctgcagacgattgtagaactgctgcggcagatctcgatgggttcggaagaagatcctgaggaacgtattgcggaactcaagcgacgccgcgattcaattgatcgcgagattcgccagattgaacaggacccgcagtttggcatgctcgatggcaccaggctgagggatcggtatcagcagtttacgtccaccgccagggaactgttggcagattttcggcaggtggaggaaaacttccggtcgttggatcggagtgctcgagagaagatcgccacgtggcagggcagccgcggcgaactgttggatgaacttgtgtcgaccagggccaatatcgatggttcggatcagggacgcagcttccaggcattttatgacctcctgttgtcggaggccagacaggaagaactgtcgcagctgcttggccgcgtgtcggaacttgctcagatacagacagacagccggttacgcactatccaccacgactgggcggatgccgctgaacgcactcagcagacggtgcgccagatatctgaacagttccgcaggttcctggatgaccaaatctgggtggaaaaccgcagagttctggaactggtaaaagacatcgagcgccatgccattgatgttcgtgcgcaagcgccgaagaaggactctcccgtcggcatcgaagtcgacgtcccgggcgttgatgtggcgctgccgttggaacgccctctgtatgacgtgcgtccaaccaccgaggtcgacagccttctgcagcccagcgaggccgaagacctcgacaccaccgcgcttacatcacaggtctttgttgaccagacgaaactcttgagccagcttgccgcgatcatcccacagggcgaatcggcgctgctggacgacattgtgcagatgtacccgatagaacagggcgtgagcgaactcatcggctatctgtccctgccggctgaggatgttcaggtggatatcaacgacgatgtcgaatcgaccatcgaagcccaggatgacgaactcacgtaccaggtgcggcttgctcagattaaggtaaccagatcttga

SEQ ID NO: 49705 - DNA, 588 bp, Brevibacterium ravenspurgense
atgagaactcccgaggaaacagcggcggcgcgcagcatcatcgccctgatgcgcggtgtggtgtaccaggaaactgcagaagacgtctggcgtgaccttcttaagaaccccgccccggtgcgcgatcatttcaacaccatcggcctggatgttgtggtggatgaaaacgagggctacgcctatctgcgcatgcaggaagaacgggagggcgaagaaccactcccccgtttgatcacacgccgcaaacttccctacaacgattccctgctgctggtgttgctgcgcagacgcttggtggaattcgaatcccacggcgatcagggccgcctggcggtggatcgggatgacatcgttgattcgctccgggtctttctagctgactcttctgacgaagcccggatcatcaacaacatcgaccagagcataggcaggatcgagaagcttggttttctgcgcaaattgcgcggtgaaaacgatgtgtgggaagtccgccgaattctgaaagcctatgtcgatgcgcagacgctgtctgattttgcgcagaagctggacgaatataagtccgtactgaaccagggtgggcaatga

SEQ ID NO: 49706 - DNA, 3420 bp, Brevibacterium ravenspurgense
atgagcgaaggtctgttctccacagttgaagttgaggcgacgggcaaaccgggctacagacttgaacggattgaactgtacaactggggtacgttcgacaaccacgtcagctacttgtgcccgaatggcgaaacggcgctgctgacaggtgatatcggcagtggaaagtcgacgattgtcgatgctgtgagcaccttgctgttgccttcacacacgattgaatacaacaaggccgcaggtgccggtaggcgtgagcgtagtttgcgcagctacgttgagggccactacaaatctgagcgcgacgaacaaaccggcacatcccgcccagtggctctgcgcggccacaatgcctattcggtgattctggggaccttcaccaacgagggatacggcgaaactgtgaccctggcccaggtgttccagcagcgcgattcaacgggccagccgtggcgacggttcttctctgcacccaagcggctgaccatcctggatgacttttcaggcttcggcaccgatatcaacgacctgctgcgcaagctgcggaagaaggacgtcgctgttgacgacaccttcccgaactacgcccgccgcatgcgcaggcttctgggcatccggtcagaacaggccatggacttgttccagcagacggtgtcaatgaaggccgtgggggatctcaacgagtttgtgcgcactcacatgctcgaacccaccgatgctggtggtcggatcaggcagatcatcgaccacttcgatgatcttgaaaatgcctaccaggccgtgcagcgagcacaggaacagttggagctgctgacccctctggtagaaaacgcggataagtacgatgccgtgattgccaagaaggacaatctggccaagcagcgtgatgctgtggctatgttcttttccgacatacgcgcgacgctgcgaactgccagtatcgagcagctggaaactgatctcactaccgtcaaccagcagttggtggcgaagcgggaaacccgtgacaagctgtctgcggaacgtgacgatctcatcgcggcgcgtgcctcggccggcggcgagcgcctggagaccctgaggcacaaggctgcgtctgcgcgtgaacagcaagagcagcgcgaagctcgcaaccagcgcctgcaggtgaaactgcatgatgcaggcttggctgaggttaaaacgcgggctgatttcaaccagattcccggcaaggctcaagatcaactggcggtgctggagccagaggccaccgaacttgataagaatcgttcggccatcgaagccgaaaagctgctgctcaccgagcaggaacgcgaaaacaaccgcgaactgaaaagtctggccgcccgccggaacaacctgcccagcaacctgctggatatccgtgaacagctcagtgccgccactggaattgctgaagacgagctccccttcgcgggtgagcttctggatgttgccgaagagttcgaagaatggcgaggcgccgctgaacgtgtgcttagaaacttcgccttgtcgatgttggttccgcaggcacactacgccgcggttgccgaatgggtgaacagaacccggctgcagaccacgggtcacggtggccgcaccacgggtgtgcgtttggtgtatgaacgtgtaccggatcggcatgtgccgctgcagcgcaaaccttcggctgggctgcgacttgcggacacgatcgagatcgaggattcacccttccgcgcctacttgaagagcgaggtagagtcccgcgctgaccacctgtgtgcggacaccgttgaggaatttcgcggtgcgcagcgcgcggtcacgcgtgagggccaagtgcgttcgcgtgaccgccacgaaaaagacgaccggcgtcgtgtggacgatccacgcggttgggtcttgggccggatcagtgagcgcaaacaagaagctctgattcgtgaaatccaagaacagtaccagcgtcagtcgaagctgaatgagaagcgggaacagcttgtggccagacaggcagaagtccaggcccagtccgaagccctgcgtgcggttctggactttgactcatgggatgaagtcgattgggaatcagctcgggctcgtctgcaatctgctgaagctgagattgagcgtctggagagcggttcctcggagctggcggagatcacccgcagctttgagtccgtagaacagcagattaaggaaaacgagaacgcgctagataatgttgcccggaaggcaacgaccctcgaagtgcgcttaggacaggaacgttcagcgctggaacgtgaccgtgaaatcctcgcggcaggcactttcgaaaaagcccaagaatccttcgaggacctccaagcccgcgtacctaagcgcatcgcgtccgttgaacaggcagacgagctccaagcctcgacagtcagtgcgattgcgaaggagatcgaatcggcgcaggagaagatcaacggccacaccacaacgctgctgacgcagatgggcaatgtgcgcgaacagttccctgcagaaaccacggaaatggatgccagcgtgcacgcgcgcaatgcctaccgcgaattccactcgcgagtgaaaaatgacgacctcccgaggttcaaaacggagttcaaggagcagctgaacaccaacgcgattcgcgaaattgcaggtttttccagttggctccgccggcaggcggatgaaatcgacgtgcggatcggcaagatcaacgaggccttgtcagccgtggacttcaatgagggccgctacattcgtctggagaagtccgccaccattaaccaggatgtgcgcaagttccgcagtgatctgcgtgatgttaccgccgaagtcagtgacaacgacgattcgtccctgtactccgagcagcgtttccaggatgtgcgggcgatcatcgagcgattcaagggccgcgaggggcacacagacgccgacaagacatggacggctcgtgttaccgacgtgcgcaattggtttacgttctcagcttcggagcgtgatcgtgaaactgatgaggagtgggagcacttccgcgattctgacggcaagtccggcgggcagaaggaaaagctggcgtacacgatcctcgccgcttcgcttgcttaccaatttgacctgaagtggggtgcggcgaaatcgaaggacttccgctttgccgtgattgatgaggcttttggccgcggttcggattcctcgacccgctacgccttggacctgttccgcaaactgggcctgcagctgttgattgtcacgccgttgcagaaggtccacatcatcgccccgtacgtcaagagcatcggcttcgtcgacaacttaggcggcgataattctcgcctgctgaccatgaccatcgagcagtactacaacatggccgactccggcggctcgacacccggaggttcgaagcccggaggatcggtgtga

SEQ ID NO: 49707 - DNA, 1173 bp, Brevibacterium ravenspurgense
gtgactcgagtccgcgcttggaaatccccgcaagacatccgcactgcggtgcagcgccgctggaaagacgggtcgctgctgcgcgcctacgcccagggtgaggaattcccggtgatcacggtgcccctgggcgggccgacttccgctgagctcgcttcccgctgggacgaatggcgtgcctggtcttctgacctttcccacgattcgcgaggtggggctcactacgacctcgaactcaagtctgttgggggtcggggtgcggtaggtgcgaactcggtccctcaccgggccgtaatcagtcggttcgatcaggcttggaagcttctttcggtcggccgggatgttgccgcctttgatgagttgttgtcggtgacgaaaaagcggcagttggaggctccctggcactgggttttgcgccgaccgctggaggcgctgcggttggcagcggagtggccgcaggtgttggcggcctacgagtggttggatgcagcgcgggattcaggccgctatttgcggcaggtggatgcggccggggtcgatacgaagttcgtggagtccaaccggcgaccgttggcggaaatgctcggggtggctgctgcgaagggcaagttcgagcaggcgttgggtttggcgacaaagcctgcgtatgtgcgcatgcgggtggaccctgcgcgttcgccggtgcccggcgtggatgagctcacgctgcaggcggatcagttgtcggagtttggtttcataccggacatcgtcctgattgtggagaacgaaattacgttcctaacggttcctgtgcctgccgatggggccgtggtgtggggcaagggttttgagagtcagcgcagccaaacactcgcgttttttgcgggatcggatgtgttgtattggggcgatgtggatacacacgggttcagcattctgcacggggtgcgggcacaactgccgcaagctgaatcagtgttgatggatgaagacaccctggaagcgcaccgtaaattgtggggttctgagcctgcgccgacgaatgcgtatttggagaatttgaccccaacggagcgagcgctgtacgacgatttggtgtcggatcgactgggccgcaatgtgcgtttggaacaggaacgcatcaactgggcgtgggcgttgcaacggctcgactaccgctgggcacagtag

SEQ ID NO: 49708 - DNA, 1500 bp, Ralstonia solanacearum
atggatcaggattggaaacagcgcacgtatcaatacgtccagtcgcgacgtcagcaccctgcttggcaattgcttgccgcacgtagtgcaccgttggtgctgagctgtctgcagagcctattcgagaagagccacgatggcattgaggtggaagcggccgagcaggggctggccacattgctggagcaacatgccaattccgacgagttcggcgtcgacccggacgtcgactgcgccgcgctggcgcgaaaggagttgcgcggatggattcggcgtgcgctgttgattgagcgcgaaggccggctctacgccacggatgcgctcgaggaagccttgcgctttgttgcggccttggacggccgactcatgacgtccacggcgtcgcggctatctatcgtgcagcgggaaatcgaaaatctcgaatccagtctgaatccggatcctcgtagtcgctcgcggtatctggagcgcaagatccaggagctcgagcgagagctggatgacgttaaggccggcaaggttcacgtagtgaccgagccggaggcggtcgagggcatccgcgagatttacagcttggccaccagtttgcgggcggattttcgccgagtggaagattcctatcgggaggcagatcaggctttgcgacagtcgatcgtaagcgagcgcaatcaccgcggcgcgatcgtcgacaaattgttgaatagccatgacgagctcctggagacccccgagggtaaggtttttcgggggtttcagcagcaactcggccgctcggccgaactcgatgcgatgaagcatcgcttgcgcgaaatccttcgccatcccgcagcacgctccgcactccgtcccgcccagcagcatgaactgcgctggctcattattcgtttgatcgacgagtcggctgccgtcatccgcgcacgggccagaagcgagcgtgacgtcaagggattcctccgcacgggcttggcggcagaacaccaccgggttggcgagttgattggcgacatcctgcagcaggcgctggcgctcgattggcagagcgcttcggtgcgcggcatggacagcagcttgccacctgtcgccatttccgtcgccggactgccactgatcgaacggattcgattcaaggttatcgaggatgaggcgcaagagcttctggagctacgcgcgcaaagcatggatccacaggccatggacgacgagttctgggaagcattcgatggccttgaccggcaggcgttgtacgtgcagacattggcgctactcgagcaaagtggtgagccgatggggatcgccgaactcgtgcggcacctgcctccgacgcacgaccttgagaccattgcactctggctgagcatggcacgcgaagctgaggcgccagtgagcgagcggcgagaaagcgtcgatgtggtcggccgggacggcgtaccgctacgatttaatgtccccgaggtggagctcagcttcgagcagatgcgcggattggatatggagctataa

SEQ ID NO: 49709 - DNA, 780 bp, Ralstonia solanacearum
gtggtgagcattttcgatacgctgacggctccaaaggaggatggccaggcggccgccgatgtcacgtctgacgtcgcgttgcagccggagctgactcacagggctgatgccgaattaggtgtgggcgcagtgcctggggcacccggggcattcataccccgcgacgtgaaggatgcgttccaggaactgctcaaattcggttttctcgaggccgccagaaagcccaatctctactacatcgccgccactggtaccgcgcagatcaatgcgattctggagcctctcgatctagcgctcaggatcgacgacgtacggggcctagccttcctggtggttgccgcctcgttcgtcgccgatgcacaggatgacgagtggtcccatccgctgattcgccgccagcgcctgacgctcgagcaatctttattggtggcgctattgcggcagcactatctcgttcacgagcaggagcaggggattggcgcgcaggaggcaccggtactggtcgaggaggtcgcgtcccagttacaactgtatctggggaacctgggcagcgatactcgtgaactccagcgcgcgcgcaacttacttgagaagctcaagccgcacggcatcgtctcggaggttgatcaacacgaccagttcttgattcgcccgatcatcgtccatcttgccaatccggagaacctgcaagggttgctgcaggcgcttaagctggcatcggcggacgcgcgcagcgatgtcgacgtcgagtcgaccccgggagaaggggcagccgcatga

SEQ ID NO: 49710 - DNA, 3327 bp, Ralstonia solanacearum
atgacctcgaccgaagcgctccctgccaccattgaggaactactaccaccagcgccgttcgtcctgactgatctcgacgtcttcaactgggggccctttagcgggcgtcatcacgcgcagatcgacattgagggtacggcgatcattggccagacgggcagcggaaagaccacgctggtcgatgcgttgatgaccctgatcgctgcacaaccccggtacaacctagcttcgacgggcgggcacgaaagtgaccgtgacctcgtttcctatgtacgcggggtgtccggagcggggcgcgaaggcgactcggaccatatcgcccggccgggaaagactgtgtcggccattgcggcgacctttagtaatggtagtacgcaagtgactattagcgggctattctcgcttgagggctcaggttcctcggccgccgagctcgaccgtatctggatggtcttgcggggcaacgaactagacctcgatggtgtgctggagctgcaccatgctggcggcaagcgcgcactcagacaacaggagcgagaggccggcatcctgaaggtcttcgatagtaagaaggcgtatatcggcgagctgcgccgtctcttcgaggttggcgagaatgcctttacactgctcaatcgcgctgcgggcctgaagcagctcaatagcatcgatgacctgtttcgcgacttggtgctcgacgatcggtcagtcttccaacgggctttggaggtggcatcggagttcgacacgctcgcccagatccgacaggaattggagattgcacgcaagcagcgcgacgcgttgttgccgattgaaaagggctgggcgcaacgggccgcgaacatcgagcagcgcgatcttcatgttcggctcatctcgatcctgccgatagcgggtgctctgcgagcacatcacctatggacccagttggcaagcgatctggcgcggaagctcgaactgtgtgaccaattggtcgagcagcgcacccagcgtcgggatgcgctggacgccgaagcgttgcgtctacgtgatctctattttcaggacggcggcagcagcattgaattgctggagtctaagttgacggccgaacgtcagcgcctggaaacgatgcataggcatgcaaatgactaccgcttaatcgccaagcgacttcagttcgatgacaccttgactgaggcagtgtttaaaaaaaatcaggcccaagcacaggctttgaaggacgaagtcgacgaaacgatcgaggcgctggagcacgaggtttataccgtgggtgcagctaagtccacgactgaacagaggcttcgcgagcagcaggctgcggttgcagaggccaaggggcgcccggggtcgaatatcccgccgcagtatcagcagtttcgtagggatttggccgacgaactgagactggatgaagaggagctgcctttcgttgcagaactggttgaggtgcagacggtgcaatctcaatggcgaggagcaattgagcgcgccattggcgggaaccggttgcggatcatgattccgcccacccacatgaagcccgcgctggcttgggtgaacggacgcgacaaccgtctgcatgttcgtctggttgaggtgatggcgctggagcggcccgccgaattcctcgccgatggcttcacacagaagctcaactttaagaaccatccctatcgggacgctgtacgcggcctgcttgcgcaaatcgatcggcactgtgtggtgtcgtcggaggtgctgcgacttacgccacatggcatgaccgctcaggggctaatgtcgagtaagagcggtttcttcgagaagcaggacaagacgcctctgagccaaggatggctgacgggctttgataaccgggacatcctggcggcgctggaccatgaggtccatggaacagagcgtgagttgaaagagcaggcggagtgttttgaagcagcaaaggcacgcgtcagcgcggcgcggtctcgcaacctcatgctcgagcgtgtgctggctatccagttcgtggacatcgatgagcccagggcacagcgtgaggtggacgattccacaaagcacctttcagcgctgatggatccgcagtcagacacggcccgggcgaagcaagcttgggaagacgttcgagcgcagttcaccaaaatcaacgaagaccgtgagaagagtatcaaactgcagcacacgctacaaaccgagctggccgcagcccagcgcgatcgtgagcgtgcttttgcactgactggagacgggcttgattcgggacagatgatgctggtccaggcgcatttcgatttctcagacgtgcaaacagtggatgcgctgaatggccgacagactcagatcgagcatgagttgcgtgcgcacgttgaagagttagaaaagaaaatcgccgattgcgagaagcagcttgttcgcaacatgggggtggcacatggcgttgacacgggtgccctggcggaagtggggtccgaggtggacgacgtcccgcagtatctggaacgtctgcgggtactgagagaagaggcgcttccggagaaattggaccggttcctgagctacctgaatcagtcctcggacgagggggtgacgcagctgctgcgcagcatcgacaacgaggtcgagaccatcattgagcggatcgaggatctgaatgccacaatgcgtcgggttgacttccagccgctgcggtatttgcgacttgagccacgcaaggtggtacatgaaagcttgcgaaccttggagcaagcccaacgcggcctgcgcaccgcgatgcttcaggatgatcagggcgaaagtcaattcaaggcgctcgccggggtcgtcggattgcttcgggaagcgggtgagcggcgctcgaccgtgggcgcgagagcgctcctcgatcctcgctatagattgcagtttgcggtgtcggtaatcgaccgaccttcggggaaggtcctggagacgcggaccggatcccaagggggcagtggtggtgaaaaagaaatcatcgcgagctacatcctgactgcatcgttgagctatgccctatgtccggatggtaaagaccgccccctatttggcaccatcgtgctggacgaggccttctcgaagagttcacaagctgtcgcagggcgcattatttccgctctgcgagagtttggtctccatccactctttgtgacgccgaacaaggaaatgcgcctgctgcgatcccacacgcgctctgccattctgattcaccgcaaggggccgcacgccactatgacctcactgagttgggaagagctcgatgccattgcccgttctcgacagatgaactcccccgatgaaatccccggatga

SEQ ID NO: 49711 - DNA, 1146 bp, Ralstonia solanacearum
atgaaatccccggatgacatctcggctcgcctcgccaaagcgtggcagtcggcggatatacgcgaagctcggctcctggaccccgagagttggccattgctgtacgcgatcggtcggccaagcccaagagccattgccgaacaaacagaacacgtcaaggcgcatctggaccgatggagagcggtcgagatcgggcgtgtgtactgggagactgtgacctatcgcgccggcggaggggcggttgaagttccacatcgttgggagatcaagaacccctctgaatgggtgcgcgcggcccgcagtgccacgattgctgcggagtaccgacggctcggagagcttgttcaacagataagctcgcagtttcacgcgctcgtggtgcgtcgccgtcaacttgtgatggagcgaccagtaccggaggtcatcaaggcagcggaagtcgccttgacgttatcccccggttgcgcggaaggtcggccgctgcgggcgctgagcgtttgcaacattgacaccaaattctttgaacgcaatcgggcgctgatttgccaaatgctcgatgttcgatttgaggggcaagttggcgaactgggactcgagcattttctcggcgccgccgaagagaatgagcgctggttgctggtggtaccgcttgcctcgggaatgctgccgtttcgccagcagcgcgtgagggcgagtgaactgtctcggcttgccgcggtggcaagtcatgttgtcattgtcgagaacgagcgatctcttcatcagctaccggagctgccaggtacggtggcgattctgggcgccggattgagcctgggttgggtgagtgatgcgtggctggccagtaagcaggtggcttactggggtgatatggatacctggggcctgagtatgcttgcgagggtgcgcctgatgattccatccgtgaccgcgttgctcatggatcaagattgttttgaccactacgcgctggaactggcggtgcgcgagcccgctccgatcgatggcgggatatccgacggactcactctggacgaggaggccttcttttcgtatctcttggcgcaggagcgggggcgcttggaacaagagttcttgccgaaggaacttgtcagtaaagccttgtgctcatggcacggcgcatga

SEQ ID NO: 49712 - DNA, 1473 bp, Pseudomonas citronellolis; identical to SEQ ID NO: 43373

SEQ ID NO: 49713 - DNA, 675 bp, Pseudomonas citronellolis; identical to SEQ ID NO: 43374

SEQ ID NO: 49714 - DNA, 3378 bp, Pseudomonas citronellolis; identical to SEQ ID NO: 43375

SEQ ID NO: 49715 - DNA, 1206 bp, Pseudomonas citronellolis
atgacatggagccagcccgccgaccttcgcgcgcagatcgaacggctgtggcagcgcggcgagttgctgcgtgccgtggtcggcgacggcacgctgggctggccgttgcgtctgtcgctgaaatcgccgtccgccgccgatctcagcaaccgtttcgatgccgcgcgcggctgggtgcgcgacatcagcgccatgccactcgtgcgcatcgaatggcgcgagtggacgcaccgggtgcagggacggcagcgcctgccggatacgctctggatcgatacgctggaagacgcgctggcgatgatcggtaagaccggcgatgcccaccgattccaggcgctctggcagcaaactgccgaagcgcaacccgcactgctgccgtggctgcacagagcaccgttgcagaccttggcactggccgaacactggccgcgcctgctggccgtggtggcctgggtgcaaacccatccgcgccccggcgtctatcttcggcaggtcgatgctccgggcgtggacagcaagttcattgaagcgcatcgcggtacgctggctcagtggctggacctggccttgccgactgaagccattgagcctgctgcaaccgggatgaccgggtttgcccgtcgctacggctttctggaaaagcccgttcgcatccgcctgcgcttgctcgatccgcaactgccccaacttcccggctgcaccggcctgaccgacatcaccctggatgaggacagcttcgccgcgctcgcactgcctgcgcagcgtgtcttcatcaccgaaaacgaggtgaacttcctggcctttccgccggtgtccggtgccatcgtcgtgttcggtgctggctatggctggggagcgctcgcccgggccgactggctgcatcgcgcctctctgcactattggggagacatcgatacccatggctttgccattctggacagcctgcgcaagtatttcccgctggccgcttcgtttctcatggaccgctccaccctgatggcccacgcacttcaatggggtgaggagcccctcgacaaacgccatacgttgcccttgtcccgactggtcgatgatgaacccgctctctacgacgacttgcgcggtgatcgaatccggccacaactgcggctggaacaggaacgcatcggctatcgctggctgtgcgcggcgttggtcgcaacagtccgggacgatttccggccgtag

SEQ ID NO: 49716 - DNA, 1473 bp, Corynebacterium simulans
atgtctgttgaagcacgcgctttgtcactccggcgcttgatgcatgattccgccgcgattcggctcctcgccgcggataatgcgccggtgattctggcgctgattgcggagtactttccacgcggcacccgggcgcgtccggcggcggaagtctatgagctcatggtcaccgatttcgaagtgattgccagcgagtttcccatgccgcgcaccccacaaaactattgcaatgactgggtcaaggccggttggctagtgcgtaaatccggaaggagttcgcgtggtgaaacactcgagcccagcgaggaagccctatccgcgttggaagccattgagcgctgggaacaaccggtgaccacggtgacggcctcgcgtgttgaatccattagctcggctctgcagaggttggcgcgggataccaatgaggacatcgccagccgcgtggccagtttggaggcagaacgcgcgcgcattgaccgcgagattgaaaaagcacagctgggtcagtttgaaaggctcaccgccgccgagactgaggaacgagtccaggatgtgctcaatatggctatggcggtgccgagcgatttcgccagagttcgccacgatcttgaagcgctcaaccaccagctgcgccggcagcttttggatccggaaggctaccgcggtgatgtgttggaggagatcttcaacggcgtagaccacatcgcagaatcagatgcgggccgcagcttccaaggcttttattccctccttatggatagggaacgcagcgtctggttggaccagtggattgaacaggtgctcgatagtgaagcgggccaagatgtggcaccggagagaagacggcagctgcgtcgtctctttcgcgatatggaagaaaccagctttgaggtcaaccagaccatgacgggcttggcacggagtctgcgccactacgtgtcctcggagcagttcgcggaggaccggcgcatgattgagctgctgcgagaagcccgcggcatggctattgatgccgcgcaaggctcagaactcaaggccttccaccggatggacacgccgctacagcgcatcggcatgtctattcactcggtctcccgcattcgtctggctaaccctggacgggaggtcgtggaggaagcacccgtggcctaccaaccgggcgaggacgacgcacacgccctttatgagctggtacgcgagtccgagatcgactttgaggagttgcacgaggcgattcggcagacagtgagcgactctggcccgtgcaccattgcgcaggtattgcaagctcatcccccaacacaaggcctagccagcgtggtgggattggtccatattgctgatcaacatccgctgcctgctgtacgggagtcgcaagaaaaaatcacgtggactgaagaagacggtgctgtacgtgccgcacagattcccactatgtatttcgatcacacaaccgttgaggagcttcagtga

SEQ ID NO: 49717 - DNA, 579 bp, Corynebacterium simulans
ttgacttaccactcgcgccgcgccttagtgcagctgctccaaggaccacttatccgcgtgcagaaggaaccagtgctgtggtcagcaattatctctgacgaagaaaatctgcgtgccaggctgcacgaggtatttttggagctcgtcatcgatgagaccgagggctttgcctttacccgcatggtggaagaagacagcctgagcatcccgcaggtgctgcgcacggacaagctcaagcacatcgataccgctatcttgttgaacctgcgccaggagctggggctggctctgcccggcgagcgcgtcatcgtggacgtagaagatctccgggagagcatcggctatgtccgcgcggtggataaccgcgacgaggccggattcaccaagcgcttcaacgcggctattaagcgcatccagaatgactattccctgctcagcaccacggagacagaaggccggttggaggtctcgccggtgctgcgccagcttttcgatgcctccacggtcaccgccatccgggatgaatacgcccgcctggcgcgagccgaggataccgaggaggacacctcagatgactaa

SEQ ID NO: 49718 - DNA, 3369 bp, Corynebacterium simulans
atgactaagcacacggagctttacccaggccagtatcgcatcagccgcatccagctgattaactggggcaccttccatggctatttttccatcccggtagcgcggaaaggtttcctcattacgggtggctcaggatcaggtaaatccacactgctggatgccatgtcagccgtccttgtcccccagaatcacgtgaagttcaacgccgcctcgcagcaagacctcggtcggcacaacggccgtaacttggtctcctacgtgcgcggagcgtggcggcagcaggagaatacacagactggtgagattaccccggaatacctgcgtgaaagtgcgaccaactcagtggtggcgttgacttacgacaatggccagggcaagcagcacaccctcatcgccatttttcgcctcaacggcggtgagaactccgtaggccagatcaagaagttgtatgggctggtgccgggcgatgaggacatcgataagctcagccccttgctcacccgcagcttggatagccgcaagatcagggccctgtataagggccccggcgcgttctttacgccgacctatgccacgtttgcggaccgcttccgcaaacgcttggggattaagaatgtggagggccagcttcttcttcaccgcactcaatccgcgaagtccctgtccagcctggaccagctctttagggattacatgctggatgtgccggataccttcaccagagcggatgaggccgtggaacagtttgaggatttgcgccaggcctacctgcgggttgaggacgtcaaggcgcagattgatacgctcgggccgctgccccaacttcactctcagcggtctagtgctgaagcggataaggagaaagcagaggcgatgagtgaggcgctgccggccgtacgcgcccgcctggtgacagaggaactagacttccgcatccgtgcgctcacagcacagctatcggaggcccagtcgcagtcggagaccctcaacgctgaggtcgcacacctggatgatgccgagcgcctggccgcggtggctgttacccagctcagcgctggcgagctcgatgccttaagcgccaagatagaaactgcggacaaagaaattgagcaccgcacgaaggaattccaacggttggctgcggccgctggagcgtggactgatgattacgagttcagtccacacggcttcgccgagctgcaggccaccgcgaagctgcgcatcgcagattttaaggttgacttcgccaacctcatcaacgagcaacaagaagctggcgtggccgcccgggacgctgccaccgcctgtgccgcgctcgatagcgagctgcgctcatttagctcgcggcgcaccaacatcgacaaggctctagttgaactgcgcgcgcagctggctcgcgataccggctatggcgaatccgagcttcccttcgccggcgagctcatcgatatcagcccgcagcaggccgaatgggagccggtgattcaaaagctcctccacggctttgccgccaccctgctcgttcctgaagctgcccgcgacaccatcaaccagtgggtcaattcgcgcaacgtgggcacccgtttggagtaccgcaccattccggagtttgcatcaccgcaggcctccgcgcacagcccgcggcagcttatccacaaactggaattccaagaccacgccatggcgcactggattcgccaacatatttcgcgccgcttcaactacgagtgtgtggactcggttgcggaactggaccatgtcaccaccaccccggcggtaacgcgcgatggcctggaaagccgccccaaggataaagacggctcaacccgcttcatcaaggatgaccgcaagcgttttagcggcactacctggtaccgggtgggttccaccaacaccgccaagattgagctcttacgcgcccagctcacgcaggccaaggccactgctcgtgccacggccaagcaggtccagaacctcaaccggaagatggacgttctgcgctcccagcgcgataaagcccagcaggtgctggaaacctccttcccggatatcgacaccgcctccgccgaggctcaccggcaggatctgcaggagcagtatgactcgctggcctcctccccggaggcccaagccctcgccgcagcccacgagcaagccaaggccaagctcaaggccgcacgcgccaggctgaacgccgcccagaagaacctgggcaacgtcgaaggcgagcttgagcgctcaaccgagcgccgccgtagcatcggtattgtgcccgccatcgaggaccaggacatcgcgaaagcagtcgaagatgccctgcacaagggcaagcgcaagctcaccattgatgacatcgatgcccggcgcgatgaggtgcaggctagtcttcagaacaccgcccgcaccgccacgcggcgcatcgaagacgccaacgccaaaattgtctctgtcctccacacatatctggcccagtggccggcggaggccgcggaccttgagccgcaggcgagcttcgctggcgagggcatcgagaagctcaagttcctacgcgccgaccgcctggcggatttccgcgcccgcttcctcgagcttctcaacggctccaccgtgcgaaacctctcccacctcaccacagacctgcgccgtgctcgcagtgatattgagaggcgcatggaattcatcaacaagtccctggagcgctctcccttcaacggtgagcgcaccctgcgcatcgacgtcaaggatgctcgcggccaggtggtccaggatttccagcgggatcttgatgccgccacctcccacagcttgggcgaattcggctccgatgatacagaggctgcccttgcgcgctaccacgcgttggacaagatcttgagccgtttgggctcgagccagccagaggatctccgctggcgcaacgtggtgctagatacccgccggcacgtgagctttatcggccgtgagttgtaccccgacggaacgacagccaatacctatcaggattccgcctcgctgtctggcggccaagcgcaaaagctcgtcttcttctgcctggctgcggccctgcgcttccggctggcggagccggaccaagacgtgcccacctatggttccatcattctggatgaggcctttgaccgcgccgatcccacctttacccgcactgccatgtccgtctttacgtcttttggtttccacatgattctggccacgcctttcaagctcatccagacgctgtctccttacgtggatggcacgattgtggtcaagtacgatgagcccatcatcaatggccgcccgcgggcgcgcacgggctattcgcttatcgacgcctccacctaccaggaccccgactatgcgcagccctaa

SEQ ID NO: 49719 - DNA, 1137 bp, Corynebacterium simulans
atgcgcagccctaaagacctgcaagcacacgcgtcaaaatacctgcgcaatcactttgccgaagcactggctgacccggattctgtgcgcgtcgactggcccctgcacccgcccactgccactgctgccgcccgcgatatcgacgccacgcagggctttatccgtgcctggcagcgctggccccaccaggaggacgtcatctacgagtcccgcaattggtcgcgcgcgggcctgggcacgaacaacataccggctcgcatcacaatcaacggtgccgaacgcatcgccaccgccgcgggccttaacctcgagtacgcccgcgcccgtgaacgagcgcacagcatcgctgccgtctttcccgattcccccgacttcgcccacaccgtccgccgcagctatacccaatggaaggatttaagcgcctatgatctgaaatgcctagaaccgtgcctgacctggctgcgcgccaaccctgactccggcgagtgggagcgcgccgtgccggtcaaaggtgtggacggcaaatggattggtacccaccgccgcctactcctcacactcctcgcgccgtttggcatcacagacttaggcctgcgccgcagcgacgcccgaatccgcctgcgctacctcaaccacgctccagcgctcagcgatatcgaaatccccctagctcacgccgccacgcttttcccgcatacccctccccgcgtcctcatcgtggagaacaaacaaaccttcctggctttgcccacgcttccggacacctcccctcccaccgtcgccctcctcggtgccggcaccgccgcccaccaactccacgcactggactggcttaacctcatcgacatcacctactggggcgacctcgacgccgccggctttgccatcctcaacgccgtgcgcgcccatttcccccacacgacgtcactgctcatggacacagccaccgtcaccgaattccagcacctggctgtccccgaccccggcgacggctccgccacccttacccacctcaccaccgaagagcagcgcgcctaccgccttctcttcactgcgggccggctgcgcattgagcaggagcggattccatttgctcatgtgaatgcggtgattcatgcaacgctcgcagcagcgtga

SEQ ID NO: 49720 - DNA, 1407 bp, Zhongshania aliphaticivorans
gtgtttctcgaccggatttcaaataatctttttaaacccttggcatcaaagaacgctcggctctacggtatcgggcttcacgccctctacaaacgactaattgaaagccaggaaagcggagacgaatgcacccccaaggaagcaaaagacttcattcggcgcgaactatttaatcagtcgcaaaccatagaatggcaagacgaagatgaacttattgccgataccgacacagatctggccggccgaatttacaatcgactcagagataccgactggctaatagaaatggacgaaatcggctatcgccgaattacttcctttccgcccgacgctgcccaattgctcaatgcgctgtccagcctcggcgaacaaggcgaactcgatctcggcagcatctgcttaggggtttattccagcttaaagaatgtgctggaatcaccccgcgaaaatgcgcatctaattagttttgccgcaaaaagtgcaaagactttttacgcagaagcttccgcattatcgtttaccacccgcgaactggcctaccgcatgcttaatcaaagcaagagttcggagcaactcgacactttctttaacatcttcatcaaccaagtttttactcgcgactacaaaaccctgcacagcaaggacaacccctaccgctttcgcggccgaatactgagccagtctgccgaaatcgcctttgacagcagtgtattaagcgaagtcgtaaacggtattctcagcaccagaaacgaagccagcgccgaatcaatacaagatgaagtgcgtgctgagctgcaggccatcaccaaagtattcaccaatatccccacactgatggaaggcatggagcgctaccgccggtctatgactcgccgcaccagagaggccattcgctactcatatcggtccacacctgatattgggcggcgcttagacgccgttatcggtaaaattgctagctgcagtgcagagcaatttccggcgccccttgtcggcgacactttcttagcagcccaccgactctatgagcgaccagggaaaaaggacaaagctgaagccacagccctatctcgaccaccgccaccacttgagcaaatcgcacgagaccgggcgttcaaggcttatctccagcgtcgcatggacaaccccgttaggctcaaaaactacttagaaaaaaacctcggtgacaacgccaaaataacgagctgcgatatgcaaatcgacaatcttgacgatctgttggcctatcttgaggtcagaaaattaatggcgggctcccaatcgaaaggcggcaattacgccgcattagcacagcaatttaatgttcaaatcaatcccggccacattaccgaaaacgaatatgttatcgccccacaactcgtaatccaaagggtagaaggatgctga

SEQ ID NO: 49721 - DNA, 636 bp, Zhongshania aliphaticivorans; identical to SEQ ID NO: 42946

SEQ ID NO: 49722 - DNA, 3465 bp, Zhongshania aliphaticivorans; identical to SEQ ID NO: 42947

SEQ ID NO: 49723 - DNA, 1227 bp, Zhongshania aliphaticivorans; identical to SEQ ID NO: 42948

SEQ ID NO: 49724 - DNA, 1491 bp, Zhongshania aliphaticivorans; identical to SEQ ID NO: 42949

SEQ ID NO: 49725 - DNA, 744 bp, Zhongshania aliphaticivorans
atgtctggagacagagcgtctgaaaaaagagtacctgataaaagagtacctgaagaaagagcgatagaggaagagatgctgaatgcagaggacaccgaacaggagccggaccaggctttgtatccgggcgatagcggtgagttgtcactggatacccgtcgtgtgctggtacagctccttgccggcccgtcactggacggtcagcggcactccaaactctggccaatcctgattcgcgatgaagcggcgatccgctgtcgtttgtcggagttgttcctgcagttggtgattgatcgggatctgcaagtggcttttacccgtcaggccgagaccggtgacctggaagctccccggctgctgcgtcgcgctaaattgactttcctggattccattctgctgctccacctgcgccagcgactcacccaggccgaagcacatggcgaccgtgcggtggtatcgaccgacgagatcattgagtttctcggggtttatcaacaggccggcaatactgatcgggcgctgttcgagaagcgtatccatgcatcgatcgagaagatcaaaaaacacagcatcctgcgcaagattcgcgcaagcgaaaatcgcttcgaaatttcgcccacgctgaagttgctgttctcggccgaagagattcaggcgctgacccggatttaccatgatatgcgggcgccggaagcatcgtcggaacaagatgatgaaatgccgtcaggggaggggaagggatga

SEQ ID NO: 49726 - DNA, 3366 bp, Zhongshania aliphaticivorans; identical to SEQ ID NO: 42951

SEQ ID NO: 49727 - DNA, 1188 bp, Zhongshania aliphaticivorans; identical to SEQ ID NO: 42952

SEQ ID NO: 49728 - DNA, 1470 bp, Streptomyces sp. WAC04657
atgcaattcgatcaggtcacggctctcaccagccacccggcatgggcactgctgcgcgcggacaacgctgccttggtgctgtcgttctgcggcacggtgttcgtcgacgagaacgcgcgcggtgtaccggaaaccgtactggagtcccggctggacgaccggctctacctcctcaacgaggaaaaccccggctcgtttccccggtccgccggcgcctatctggcggagtggacgaagaacggctggctgcgcaagtactacccacctggggaggacgaggcgcatttcgacgcgactgcggccctcgagaaggccgtggcctgggtgcgggacctgcccgcacgttcgttcatcggaaccgagtctcgcctgaacaccatcgtcgcgctcctgcggcagatggcgttcggaacggagaccgatccgcagacacgcatcgatgaactgcgccgggagcgtgacgcgatcgacgcccagatcgcacggctgcgcgccggtgaggtcgacatgctgtccccgctcgcactgctggaccgctaccagcaggtggagagcaccgcggtcgaactcctgcgggacttccgcgaagtggaggccaatcttcgggaactggacgtacgtctgcgccaccaggtcgccaccgccgagggcgggaagggagagcaactggcctcgttcctgctggaccgcgacgagatcgcccggtccgatcagggacagagcttccaggcgttcttcgactacctcctctcgccccgccgccagcaggaactgcgggagctgctgcagcaggtcaaccaactgccgcagttgggaggcagggccaaccagagcctgctgaagatccccttcgcctggctggaggcggccgagaacacccaggacacggtccggcagctgaccgagcagctgcgccgcttcctggtcgaccgcagccgagcagaggaccgccgcgtactggcgctggtgcgctccatccagcgtcacgtcaccgccttggaaggccgggccgacctgcccggcatggcgctggacgtccctcaggcacatctgacgctgccgatggagcgacggctgtacatgccggtcgaacgcatcgagctggacaccgctgcggtggaggaatccgaggacggggaggtggacatctccgagctcttctccggcgtccacgtcgacaccgaggcgctgaccggtcatgttctggaggcggtcgccatgagcccgagcggccaggcgaacctggccaccatcgtcgacgaccacccgctgaccctggggctcgcggaactgctcgcctacttccaggtggagcaccccggcctggacatgatcgtggacccggaccgcaccgacctcctggtctacccgcgcgtccacgtgcccgggcacacgcaggcgagagtgccgcacgtgacgttcgtacgcgacgaaggcggcaccgccgccggaaaggcggagcaggaatga

SEQ ID NO: 49729 - DNA, 585 bp, Streptomyces sp. WAC04657
atgagcgacgccctgaccgtccccgtggtccacctgctaaaagcgggcgtgctttatcagagcgatgcacctgccgtctgggagcagatcatcagccatcaggcggcaatcggcgactacctcagcgtgattggcctcgatgtcgtcatcgaccgcgccgagggctacgcctacgtccgacagcaggatctcgattcccgtgacgacggcgtcccggtgccgcggctggtcacccgccaccggctctcgttccccgtcagcctgatgctcgtcctgctgcgcggacgactcgcggacagcgacgccgactccgccgacccgcgcctggtacttacccgcgacgacctggtcgagatgatccgcagcttcctcccaccacgcagcaacgaagcccagctcgtcgaccagatcgacgcccacatcaagaagctcgtcgacctcaaggcactgcgccagacgaaacagaccagcacctacgaggtccgccgccacgtcaaggccctggtcgacgcccaagtcctcaacgacttcaacgacctcctcgccacctaccgcgacgctgcctcggccaaggacgacacatga

SEQ ID NO: 49730 - DNA, 3432 bp, Streptomyces sp. WAC04657
atgaccctcaccatcgacccggcagcgctcatcccacggccggcaacgaccgcagagcctgccggcacgttcgacgtcggccccggttaccggctcgcccgcctggaggtgctcaactggggcaccttccaccgcaccacctgcaccttcaccatcgacgggcactgcgccctgctcaccgggggcgtgggatcgggcaagtccaccctggtggacgcgctcaccacgctgcttctgcccgcccacaagatcgcctacaacaaggcggcgggcgccgatgccaaggagcgcgacctgcggtcctacgtcctcggccatcacaagaacgagcgcgtcgaggcctccgacaccacacgccccgtgggactacgcgaccacacctcctacagcgtgatcctgggcgtcttcaccaactatgccctcggcgcccatctcacgctcgcacaggtcttctactggacatccccgaccagcaccgggcagcccgagcggttctacctcaccgccgaagcaccgctgtccatcgacaccgacttcaccggcttcggcaccgacatcaccgacctgcgccggcagctgaaacagcgcggggccactatccacggcagcgcatacacccagtacggcaaggcactgctgagaggcctgggcatccccagcctgcaggccctggacctgttccaccagacggtgtcgatgaaggccgtgggcagcctggacgagttcgtccgcgagcggatgctggagccgttcgacgcgaagacagccgtcgacaagatcgttgcccacttcgatgcgctcaccgccagccacaacgaagtcgtccgggcccgtcggatgatcgaggacctgacgccgatcgtggtggcctgcaaccggtacgacaccgtccagggggagatcaccgccctggacaagcgccgcagtgccgtcccggcgttcttcgcccagcaccgccaccggctcctcacgagacgtcacaccacacttatgtccggtacggcggaactggaggaactgcagttcactcgcgaacggcagctggagcaactgcgcgggacggccgacggcctgcggcgccgtatcgacggcgtcggcggggagaagctcatctccctgaccggccggatcgaagaactcggccgcgaacgcgaacggcgccgcaagcgcgctaccgagtacggcgcctggctcgcgcaggccggcatggatcccgtcaccgacgccgcctccttccgcgagcggaccgaccagatctccaccgcccgctcccgggccgaggaacaagagcagcaggcccgcgggaaactcgacgatctcgccatcgcgcgccacgacaacaccaccgcgaccgacgcggtgcaacgcgagatcaccagcctgcagcagcagcgctccagcatccccgcccaactgctggccctgcgccgcgaactcgccaccgccacgggcgtctccgacgaggtcctaccgttcgccggcgagctgatccaggtccgcgacgacgaagccgagtgggccggcgccgccgagcgcgtactgcacgggttcgccttgtccctgctggtcccacacgcccactacgacaccgtctcggcctgggtcaacggccgtcacctgggcctcagactggtctactaccaggtccccgcccacacacccatcaccatgctgccggacgactccaccctgctgaccgggaaactccagctcaaatccgacagctgggcccgcgactggctcgccgctcggctgcgctcgcgtgccgactacctgtgcgccgaagaccttgacgcattcgcccgcgccacccggcccgccgtcacccggcagggccttatcaggggcggcggaggccgccacgagaagaacgacacccaccgcatcgacgaccggcgcaactgggtgctgggctggagcaaccaggccaagctcgacgctctcctcgccgaggccacccgcctcacccgcgaaagcgccgacatcaccacggccacccgggaactcgagaagcagcagcaggcccgcaccggaaccggtgccgccctcaccctgctggccagcgtcgacacccacgcggaactcgactggcagaggaccgtcgcggaaatcgagcagttcgagcagcagaagagcgccctggaagcagaagccggtctggacaagctcaccgcgcagctccggcggaccgaggacgagatcgtacagagcagcaagacgttcaccactgggcaggaggagctgggcggcctgcgccgcgacatccagcacatcgccgtcctgctgggcaggaccaccacgttcctcgcgaggtgcgacctcgacggcatggcggagcacgaggaagccctgaggaagttcctgcccgcagccgacggcgacggcctcctggagatgctggacgacgccgagcgccatgccgaagcacgtctgctgcgcagcagcggcagtcgccacgacgccctgcgccacgccagcagccaggcagcggggctgatgaccgccttccgcggcaggtacccggtccacaccgccgagttggacaacaccatcgaatccgccggcggctaccgcgcgttgcacagccggctcaccgacgaggacctgccccgattcgaggagcagttcctcctgtacctgcgcaccaacgtcatccgcgacatcgcttccttccaggcccatctcggcgctcaggagcagcagatccgcgagcgcatcgacgtgatcaacacctcgctggccggcatcgactacaaccccggccgctacatccggctcaacgccgcccccacgccgaacaaggaggtccgcgagttccagcacgacctgcgcgcctgtaccagcgaagcgctctcgaacgacgccgatgacgcgtacaccgaagagaagttcctccaggtcaaggcgctcctcgaccgcttcaagggccgcccggagcacacccgtctcgacaaggagtggaccgcccgggtcaccgatgtgcggcgctggttcgtcttctccgccagcgagctcaatcgcgaggacgacgccgagtacgaggtccactccgactccggtggcaagtccggcggccagaaggagaaactcgcctacaccatcctcgcggcttccctcgcctaccagttccgcatcgaccccaccgccgtcagccccaagaccttccacttcgtcaccatcgacgaagccttcggacgcggtgacgacccctccgcccacttcgccctcgacctgttccagcgcctgggcctgcaactcctcgtcgtcaccccgctccagaaactccatgtcatcgagccccacgtcacccgcgtcggctatgtcgaccgtcctgacaagacccgctcccgcctaaacaacctcaccatcgaggagttccgcgcctacaggcaggcagcggcccagcaggcgaaccggcccccgaaggagtag

SEQ ID NO: 49731 - DNA, 1179 bp, Streptomyces sp. WAC04657
gtgaccccggcagaatggacccgccccgagcatgtggtggaaactctgcgccgcaagtgggccagcggccgctacctcaccgccgccgcgggcggtcatcccttcgagcccatcggggtgtcgctgaagggcccgaccgcggccgatgccctgcagtattacgagcaagcactcgcctggtcccagtgctgggcccccgaccggaacccccatctgcgcatccagaccaaatccatcggaggccgcaacggcatcccgtcgaataccgtcccggcccgggcctgggtcgacagccgcgaccgcctctggacgctgctccgcgtcaccacccaggtcgaccgcttccacacgctgcacgagcagaccgcacgccaggaccccggcatcgcacggtggatggccgaccaccccatgaaggtccttgccaacgctgcagactggtgccggctcgtgcgcaccacgtgctggatccgcgaccacgacaccgaggcggtctacctgcgcgagattgacaccccgggcgtggacaccaagttcatcgagactaacaagggaatcctcgccgacctcctcgactgtgtgctccctgaaagccgcgtcaacaccagcgcaccgaagagcgatctcgtcgcacggtacggcttccgcaccaagcccatctacatccgcctgcgctacctcggcgcctctcccctgcccttcagcgaactcaccgtccgcgccgaggaactggccggctggtcccccggggtgcgcaccgtcttcgtcctcgagaacgagatcacctacctctccctgccgccggtccccgacgccatcgccatcctcggctccgggtacgccgccgccctgctgcgtcacctgccctggctcgacgacgtcgacctctgttactggggcgacatcgacacccatggcttcgccatcctcaaccaggtccgcggacgcttcccgcacaccacgtcactgctcatggaccgcgccaccctcctcgcccacgagtcccactggggccaggagaagacacaggcacgcggcggcctgacacacctcacccccgaggaggcccacctcgagcaggagctgcggaccggcgcctaccggccgcacctgcgcctggagcaggagcgcatcgccatcaccgccgtgcgagaggctctggcgcggcaccgggagtga

SEQ ID NO: 49732 - DNA, 1458 bp, Moorella mulderi DSM 14980
atgaaacttttcgaggtgataccggagcgcctgttccaggttttcagcggccggaaccggtatatttacgccgaggccctgctcctcctttatgagcagtaccgggtcaaccgctttggcatccagtatgaggtcatgcgggatttgatgcaggaactgatcgagagccaggaggaggccggcctggtcttcgaggtggaagaggaacaggagcaggagcctgctgccggcgggctgttcgacggcaacggcgaggacctggcccggttgaaggccggcgccctcttgcgccgcctggacaggctgaagtggatccaggtggaagtgcgtgagaatttccgccgctacatcgtcctgccccactacgccagccggttgctggccgttttccaggaattatgcgagaaccgtaccgttgagtaccagcgctttgccttcgttacctaccagctcctttccggcgaggaggccaggcagcggcccggctttgccatcctggaagcccacaggatgacccaggagttcctggaggagctgcgggtgctggccaacaatatgaaataccatatggagcaggtggtggcaaaaacctctatccaggaggtcctggaccaccatttcgaagagtacaaggcccacatcatcgaccgcagctaccaccgccttaagacttcggaccacgtttcccgttaccggcagcggatcctggccacggtccaggagtggctcctggacccggaatggctggcccgggccgtggaagatgccatgcgcaacgagttttttgccagcagggaagaggcggcggagcagctgcgccgcgccctcatggacattgaagagatctaccgcggcctggacgaaatcttttaccagatcgacctgcgccacaaccagtacctacgcgcctcctttgagcgggcccgctatttaagccagcacagctccggcgtcgaccagtacctggcgcggatcctggaatggatggcagcaggcatcaggaggggcgacctgccggcggaaaattgcctgcccggcctgttcaacctgatgcgcctcaatcaattaaacgagcagtccctttatacgccgcgccggcggcgggcgccccaccggccggaaccccaagtggtggtggctatccccgaggaactgaaaaggcagctgcgggagcagaacctgcagcgggtgcggcgggccattaccagggataaaatccgcgcctacgtcctgggccgcctgggcgagcgtcaggagatgggcatcgaggagctggcgcccaccaatatggaagaattcctgtaccttctctacgtttatctttacggctacgacggcctggccggctaccggctggtgccaaggggcgccaaccgtattctcaatatcggcggctatcgcttttatgaccggcgggtagtgcgggtggatacgggcaggaagcggcgggccgtttaa

SEQ ID NO: 49733 - DNA, 615 bp, Moorella mulderi DSM 14980
gtgcttaacctgggggaaaacctcagtgaacaggaagcagggcggctgcgggaggtcatcaaccgcctgctggccgttaattttttgaacaaggaacaggagcgggagcattacctggtggcgcggcgccaccgccagggcctggaggagtttttccgcttcctcggctgggagatcgtctttgacgaccgccacgaatgcctttttgtcctgtccccggaggccggctgccggcgcaacctgacccgggaggagagcatctggctcctggtcttgcgcctcatctaccaggaaaaacgccagggcctttctttgagtgagttcccggtgaccaccctccacgagatccgggccaagtatgaagccttccgcctgccccttttcaacaagaccaggctgcaggaactggtgcgcctgggcacccagtacaaactcctggaaccactggatgacgacatcaggtccgacgattgcgccttccgcctgttccataccctcctttacgccgtccaggcggatacggtagagaagctgtaccagaagatcgccggctatgaaccggagaaagaggaggggttgctggatgaagtggatgcgccgcctgcggctgattaa

SEQ ID NO: 49734 - DNA, 3501 bp, Moorella mulderi DSM 14980
atgaagtggatgcgccgcctgcggctgattaactggcactatttttacgacgaaaccctggagttcggccgccagaccctcatcgccggccgcaacagcgccggcaagtccaccatcatcgacgccctgcaggtcctcctggtggccaaccagaggcagatccgcttcaattcggcggcccacgacgaggccaaacgctccctcatcagctacctgcggggcaaaaccggcggggacgaaaggaagtatttgcgggaaggggattttaccagctacatcgtcgccgagttttacgaccagcagaagagggaaaactttgtcgtcggcgtggtgatggacgtctacggcgacgatgccatcgacgacgaatactttatcctcgccggggtgcagctggccgacctggatttctggagcccggcggaacgctggaaaaaccgggaggagtttcaccgctattgtcaaaacctgccgggacgccatatcttcgagcggagcaaaaccggctaccagaaggccctcctcaaccgcctgggccaggtaagcgaacgcttcttcccggttttcgtcaaggccctatcctttaagcccatccataacgtgcgggattttgtctaccagtatatcctggatgagaaggagctgcagctggacctcctgcggcagaactttgaaatccacgagcgctaccaggcggagctggaagctctggaagagcgccgggagcagttggaagctatctgccgccagttcgaaacttttgcccggctgcgggatacggtggccatccaggaatatgtcatccggggcctgaagcacgcccgggaggtggagctgcgggaacacctggaggaggagatacgcttcctggtagccgaggtggaacgcctggaccgggagctggacctggcgcgggccaggcacctggaggccgggcagaaggccagggaggcctatcagaaatggcagggccaccaggccaggcagcgggagcaggagttaaaggaaggcctggcccgtttggataaggaattgcaggagcaggagggactgctggcggtcctgcgccagaccctcgaccgggagaagatcctgctggccggcctgcagcaaatggaaggggatgaatactggcagtggcagccgggggagcaggagcgcctgggactggccctggagttgctgtccggcttggttccggccggggatgctgattgggtacccggggaagataccgtcgccgcggtgcgggataccggtcttttcctggccggcctgcacagccgctgcgcccgggccgccggccgcctggaggaccggctggcccagctgcagcaggaaaaaacggaactggaggggcagatccgcgacctggagaacaagaagcggccctaccccccgcacgtcctcaacttgaaaaggctcctggaagagcgcttgaacaggcgctcaccggtctggatcttctgcgaagaaatggacctgaaagatgaaacctggcgggacgccgtggaagggtatttatatacccagcgcttcgacctgctggtggaaccgcgggtctttgccgaagccttggccatttacgaaagggaaaaagggaagcaccaggtggaaggcgccggcctggtggatacagagaaggagcagaagtacctgggtacagcgcaggagggttccctggcgggggaaatggtaacggccaacccggtcatccaggcccacatcgaccacctcctgggccgggtcatgaaggcccgggacgagcaggacctgcgccgttaccgcactgccatcaccaggacctgcatgtcctatcacaacctggtggccaggcagctggaaaaacaccgctacgccgttccctacatcggcgcccgggccattgcgcgccagttagaaatcaagcgccgggagctggcggagacgaaagaacagatagaggtactgaaggacaagagggagaagctggcggcctggctggaacgcctggccgaaaagaagtccctttacgccggcatcagcgagcagctggacctcccggcccgcatccggcgcctgcaggaggaacgggccgccctggccgccgaactggagcggctggacctgggggaagtggagcggttaaaggaggagtattattactgggaacgccggggcaaagagctactggatgaagtcaccgaaatcagcggccttaaaaaaagccgcgagaacgagttaaaccagaagcagacagagcttcacctgcaggagacgagggtgcaggaggccctggccttctggcagtcctggcgggagcagtaccctgttgaactcctgccccgggccgaggaacgctggcgggaggtggagggtcaggacctgcccgtgaccagcaagctggtcaactgggagaacagccagaagggcaatatcaccaggcgggagcaggagttccagcgcctgcgcgacttgcgccacgagtacaacctgcgctacacctacaacgccgatcccggtgccccggataacgaagcctaccggcccttgctagcggaaatcgccacggtggatatcccccgctaccgggaaaagctggccgaggccctgaagcagtcggaagaggaatttaaatcccattttatcttcaagctccgcgaggccatcgaagcggcgcggcgggatttcaacgaactcaactacgccctgaaaaacttccccttccacgaagaccgctaccactttgagattaaacccagcgagaggtacaggcgtttttacgacgtgatcatggaccccggggtgatggagcagggctccctttttgagctgcccgaagacgaccgggcggccgtcctccacgagctctttgagaaactcatccgcggcgaagccggggaattggaggagttcaccgactaccgcaactacctggatttcgatatcgtggtcaccagcggtgaacaccgctattccttctcccaggtgctgcgggaaaaatcgggcggcgaaacccagacgcccttttacgtcgccatcctggcctccttcaaccacctctatgctacgggtaagaccatacgcctggtggtgttcgacgaggccttcaataaaatggatgaagagcgcatccagaccagcctccggcttatcaagcgtatgaacctgcagctcatagccgccgtacccgatgagaagatgcagcacatggcgccggaagtcgataccaccctgctggtgcaccgcaacggcttccagtgtttcgtagacatgattagccgccaggaaatgctggccggcgaagaggtgccaaccggtgacgggcagccggatggccacagcgatacggccgggggccacgcagaagggctgcaggaagagggctttgcgggtaccggcgctgatggcgccggtgaggaagacaaccggccgtggcgaggaggtgtaaggaatggccgggacgggcagggacctgcacgcgcagtaccggtacaggattctctctttgctgatcagtaa

SEQ ID NO: 49735 - DNA, 1284 bp, Moorella mulderi DSM 14980
ttgctgatcagtaaatacgaagggagccgctcctttcaaaccggcaccccgggtaaacagcggccccagttcgctatgaagaagagccccctggccggcgattattttgacgagatggaccaccgcaaaagggaggccatccacgccgtgctggccgaactggcagctgccggggtggtggaggtcacctggccccgcttccaggaaggccggcaggtggaaaaggtatatttgaactttgacgccatcccccgggcctatgagctggcgggcctggtgcccagggcggagcggatctataggctgcgccaggtcctagctcccctggcttcccacccctgggagtgggtgcgcggctggtgggccggggttaacgcggccttaggagagcgaaagaccgccggcctggacctggaggacctggacggctacgaggaactggtaaaggtactcctggccctgccggagctggaggacagtacaccggagcgtgtcttcagccagcgggtcttgggggattccaaggccttcgaacagagggtgaaaaagcggctgctggccatcctcaagtcttacagcccggaggaatatgaaaccgacgccgaatacctggacagcgtcggcctgaccgataaccccaaaatggtgctggtggccggaccctttactttccgggtgggagggaccgccgtcgacgtgggggaacttccgggcggcgtgggcctggccgctcatacggtgcgggtcatggagataacggccgttaccgccccttgggttctcctggtggagaatttgaccagttactatcaggttgtgcagggtgtaagtgagctggctgtaccaagtcgggaaagggaaggggaccgggatctagcgatccctgctggcttagtagtatataccggcggcttcccccaccgcggtgtgcagctttttttacgccggctccaggattaccgggagtcccctggaaccaccgccaggcccccggtctatcactggggtgacctggactacggcggcatccgcatttgcgaatacatccaccgtaacttaatccccgatttgcagccctacctaatggatgtcactacttataccaggtatttgccggcagggatacccttcggcgacgagtatgccgccaggctccggcacctggctgaggacccggcttacgccccctggcaccccctcctgcaagccatgctggagcaccgcaaatgggtggagcaggagagcatggggccgggcgcaactccacctgtcctgccgccttaa

SEQ ID NO: 49736 - DNA, 1500 bp, Bifidobacterium bifidum
atggaacggctgaggccggtctatgaaaccggcgtgttgagactgctgctccgtcagaattcgatgatgtacgtggcgctgctccgcgcggccttcgacccgttgaccggcgagctgccccgtgagaccctggaggaaagcttctcgcaaagcctgtcccggctcgtcgactccggcgaataccagctcagggaggatcagaccatcgcggacgcctcccggcgcatcctcgccgacctgacccgtgagggcgatgacgattacgcatggctcgccaactcgcatgacgccgcgtcgcaccggttcctgtaccgtctcaccgcccgcgcccatcgtgcgatcgaggcgctgtcgcggcttgaggatgactcccgcacgctgtcgggcgcgcaggcgaactcgatcatcatggagatcgagcatgcgcgcatgcagcttaccgccgaccccggcgagcgcgtggcgttgctcaaccgggagatcaaggcgcgcaaacacgagatacgtcagatacgccacggtcagcggcaggcggcgctcaccgaatcgcaggtcgaggacgtgattgcagtgattcacaacacgctgcgcggcgtgcccatagacctgcgtgaactcgtgctgaccgaacgggacaacggtgacgcgctccgccgccgcatgcaggcgggcgacatgagcgtcgacgacatcctgacctcgtaccacgacgaataccgcaggtccttcagcgagtccgacagcggaagacgcttcgaggacgcgttccaggtgatcatcaccgacgagggacggcagcagatcgacgcggccctgcgcgacatcgcccacacgccgtatctggccggcgagtccggcgtcctgctcgatcaggtgcgttccgagctttcgcgcatctatgacggcatcgaggcggtgcgtcgccagatgcgcgtatccgacgaggcgatcagccgtctggtgcgacagcagaccgatacccgataccgcacgatgctcggcaagctcaaccgtctgtatgcccacgtcaacgccgacgcgaaggcgcatcagggcgacgatgcgagaccgtaccggaccgataccgcggccggcaggttccctccgctgccgtcgcgccccgcgcgcccgatggtacgaacgaccaccccgggattgtccgtaccgcagacaccgggcgatgcgaccgcgcccgacctgcgttcgatgatcgacaacgggggaccgcggctgcggcgcatggccgcgctcatcctcgaatcgcccgtctacgcggacgacgggaacggcgccatcgacatcgtcgccagcttcaacggactgccgaaagccgagcggaaggaaagcgagctcgtcggtttcctgggagagctcggctgcggggacggagccggcgtcgcatggcattgcatatcggcagacggaagcccgagggactggatcaccggcccagtgctcgcacaagagaatgaattgcacgacatcgtgaaggaggactga

SEQ ID NO: 49737 - DNA, 1023 bp, Bifidobacterium bifidum
atgagcgacctgacgaacgacgccgcccagccggacgcggacatggacatgattggcgacgacatgaccggcaccgacagtgccgataccgacagtgccagtaccggcgcggatgacatgggtgcggtggacgtcgaatacgatggcgcggacgcggaaggcgcggtcaacccatacgccctgttcgagggcgacacgggcgacatgaccgccgacgcgcgcatggtggcgatcatgctcaaacgcgagcgctacatcagcggacgtttctatgacctggcgctcgacaaccgcgcggcggtcatccgttcgctcaacaacgacctgctcgatctggtcgtcaacgagcactaccgcgtcatgtacgccaccgcggtgagcgggccggacatgacgctgcgcgcgctcaagacccgtgcgagcctcaaacgtgaggaggcggcgctgctggcgttcctgcgcatccgcgtgctcgaatacgagaacgcccacgtcgcgccggacgaatggctggtcagcttcgaggagatccgagcggcgctcgccaccggcgccgggtacctcgcctcgcgcaacgacgaggagggcgtgctcaggcaggtgggcgcgatcgtgtccgtcatgtgcacgtacggctatctcaggcagctcgacgatgacgagacgatgtaccgcatcacgccgctggtgccggtggtgctggaccgtcagctggcggacagctggctcgcagttgcggaccgggacgacgatggcgagccggccggtgacatggccccggccggctcgcggtctgcagccggcgatacgtcgaatgccgatgcgagcggcgccgatgacgatggcgattcggacgatgcgggacccgacgccgaactgttcgaggctccgctgttcgatgacgacgccgatgtgggcaccgccgagaacatcaagggcgccgatgatgccaatggcgcgaacgacagcgacattgacgacgagaccgcctcggacggcggcactgcacgggaaggggagtga

SEQ ID NO: 49738 - DNA, 3585 bp, Bifidobacterium bifidum
atgagcggcaaggacatgcagatgatcgccgaccgatggatgatggaaagcaggaggctcgtcaactggggatcctatgagggttaccatgagttccgtccctccacggactcgcaactgccggtgacgttgctcgccggcgcgagcgaatccggcaagtcgacgctggtcgacgcgcagatatcgctgctctacccgaccggcacgcccttcaacaaggcgtcgaattcggggcgttcggaacgaagcgactacacctacctgcgcggaatgatcggcgtgggaggctccgacggcgtcgacgaaccgatgtacctgcgcggccgggacgagtccggcgcgccccggtccatatggggcgcgatcgtcgacacctaccgcaacttcaccaccggtcagatactgtcctgcggcaagttcctctatctgatgcccggcgacgggcgcggcgacgtccgacggctgtacctggcatgggacaagccgatcgacccgcgccgcatggacgtgttccgcgagtcgtcgttcacgcccacgcagctgaaatccacgtatccggggtgcgtcaccttcccgaacgccgaggcgttccacacccacatttgggatgtcatgggcctgagcgcggaggcatgccgtctgctggcccgcatccagtcggccgacgccccctcccgccttgacgacatcttcaaacagggtgtgctgggcgtgcccgaggcgctggacctggcccgtgcgaccgtggaggattacgagcgttacgacgcgaacttccgaagcatggaggaaaagaccagacgcatgggcaagttgcgtgccatcaccgccagctatggcgactacgagtcggcccgtgacgcggtccactcgttcgacgcggtgaacccggccacgaagtccggctcggcgacgatccgagcatgggcgatccgccgcatgatcggcgaggtcagcgaacggcagccactcgacaggcgtctgcgtgacgagcgacgcagtgaggcgcgggctgccggcaagcgcatcgaaagcctgcgcacccgcatcgacgcggtgcgcgagcgcatgcgaggcctcgacggcggcgacctgacacggctcgacgcggaaatgcggcaggcggaacgcgcgctggcggacattaccgccggcagacagcgcatcgggcgcatgttcgaggcggccggcgaggagttccccaaagacgagcacgcgtgggacgagcggcgcatcgaggccgtgacgttcatgcgctcatatgagcagcgcaagggactgctggacgacatgcgcaaccagacgtacgccgcgcacgcgtccgtcaagcagacgctgcagcggctgaacgacgattatgaacgccagaaatcgcagcgcacccgcatctcccgccagatggacgagacccgcgccatgctgtgccgggccaccgggctgggcccgagcgaactgccgtacgtcgcggagctcatggacgtgcgcgaggatcaggagcattggcgcctcgccatgaacgccgcatacggatccatggcccagaccatcctcgtcgacaagcgccatgagcgtggattcgcagccaaggtcagcgccatcgacccgcacgccatggcgcggcgcacctggcagttcgtcgacaccgaacgcgggggagccgggaacgggcccggcggcgcgaacacgggtgcgaccggcgggacggacggagaggtgtggctgtcctcgaagctacgctaccgcgaggattccccgttcgccggctggctgcgcgagcagaccagctccgagcgtctcgacgccctgtgcgtcgacggcatcgacgactccgaccatgccgtgcggcaggtgcaggccgacgggcagatcaaatccggcaaacgcggccagcatggcatcaaggaccgtcagcaggtcatcggattcgtcaacgaaagctatttggcgcaactgcgcacgcgcatccaggacgcgcaacgccaatgcgacgagaccgcgcaatcgtacgcgagcgcgaaggaacaggccgaccgcctgcagcgagagcgcgaactcgccgaccagctcgcatacaccgcatgggagaagatcgacgagaacagcgcgaaggcggcgatcgccgacatcgaacgcaccatcgcctcggtcaggaacaatcccaagctcgccgaactcgacacgttgcaggagtcgctgtccaaggagctcgaccgctcgcagcgccagcgcatcgacatcgaacggcaggccgagctcgccgatcaggcggtgaacgcagcgcaggcatggctcgacgagcatgccgcgcagccgcagccgcagacgcggccgctcgacggggaagcggcggacgtttcgccaaaagccgtcacgaacggacggactctcctgacggacgaggtggaggaggcgctcgccgaatcatatgagcagcgtctctccggtctgggggatgcgacgacccgcgcccacatgatcatcggcgcgggggcgccgcagcgtatggctcagggggataccttcgccgaccgtgtcattgccggcatcggcaaggacctggaggcgcgcgtctccatgctcgaaggtcgtgcggcgtcggcccgcaccgccgtcgaggcgcggatgggcgcctatatcgagatgtatgcgggcggtgacgatacgatcgccgccagcgtggacgactaccggtattaccaggacgagttggaaagcctttcgaagctcgccaccgtcgaagccaccgccgtcgaataccacaactgcctcgacaagctgctgatgagcttcctgaccatcaaacgcgcgatagacaccgacgccggagacatccacgaccagctggaacgcatcaacgcgatgctggacggccagcagttcggcccgcaccacggcagcctgtccctgcacgcggacgtgcggcgccccgagcgcgcgttctggtcggccctgacccgcgtgatcggcaccctcaacgaccgcaaggcggcacagacggacgacgatcttgacggggcccggtgcgcgttcgcgtcctgcgccgcgatgatcgacatgctgcgccgcgagatcgggcagatcagggacgtcaacggcgtgaaaagctacggcgcccgcaacctcgacccgcggtgccgatcctcgttctacgcgctcgtgcgccactcggacgggcaggtcgaacgcatcacctcgaccggcggacggtccggcggcgccctgcaggagctgacctcgttcgtgtacggcgcggcgctgatctacctgctcggcggcggcatggacaacaagctcaagccttcctacacgacgctcttccttgacgaggcgctcatcaaggccgacggccggtatacgcggcgcgcgctgtccgtactgccgagactgggtttccaggtcatcgtctccgcccctgaaagcaagacgggcgagatactggaggtctccaccaaggcatacgtgacccgcaaggaccccgacaccggctacaccacgctgcacgaagccagactggacggcatcgatgagacggaaggcgcagatgagccggaaggtaccgtcgagtcggatgacgccgccgaatag

SEQ ID NO: 49739 - DNA, 1632 bp, Bifidobacterium longum
gtggccgatgtgatgcgggagctggaacggctgcgaccggtgtatgagacgggcgtcctgcggttgctgttgcgccagaacgcgatgctgtacgtgtcgctgctgcgttccacgttcgacccgctcaccggcgagctgccgcgcgagaccgtggaggagcggttcgcgcaaagtctgagcagtctggccgacgccggcgagtatgcgccgcgcgaggaccagaccttcgccgaggccgcccatcagatcctcgccgacctgacccgtgaaggcgaaggcgactacgcctggctcgccaactcgcatgatgcggcctcacaccgattcctctaccgtttgacggcccgcgcccaccgcgccatcgaggcgctgagcaggctcgaagacgaatcacgcgccctgtccggcgcgcaggccaacagcatcatcatggaaatcgagcacgcgcgcatgcagctgaccgccgaccccggcgagcgcatcaaactcctcaaccgtgaaatcaaggaacgcaagcacgagatcaaacgcatccaacagggcaagcagcatgccacgctgagcgaagcccaggtggaggacgtgatcgccgtgatccacaacacgctgcgcggcgtgcccatcgacctgcgcgaactcgtgctcgacgagcgggacaacggcgacgccttgcgtcggcgcatgcaggccggcgacatcagcgtggacgagaacctgacccgctaccacgatgaataccgccgctcgttccgcgaatcagacagcggccgccgcttcgaggacgccttccaggtgatcatcaccgacgagggccgccagcaaatcgacgaagccctgcgcgccatcgccaaaaccccgtatctggccggcgaatccggcgtactgctcggccagatccgcgacgaactggcccgcatctacgacggcatcgaagccgtgcgccgccagatgcgcgtctccgacgaggcgatcagccggctcgtgcgccagcaaaccgacactcgctaccgtacgatgctcacccgcttgaaccgactgtacgcgcgcctcaacgcggatgcgaaaacccatatgggagacgcctcgcgcccgtacgacacggccacctcggacgcgctgttcgcgccattgccgatgcgcccggccaaatccatgacccgcgccaccgcacccggcctgagcgacctcgccgccgaagccccgcagtcgactccggtggccgatctgcgggacatggtcaacagcggcggcccccgactcctgcgcatggtcagcctcatccggcgcaacccggtgaccgttgacaggtccgatgacaggcccggcgcaaccctcgtggacatcgccgccagcttcaaccggctgcccgaaagcgaacgccgcgaaagcgagatcgtcggcttcctgggcgggctgggagccgtaagcggcaacgccatcgccgacgagccgtccactgacggcgtcggcgtcggggtcgacagcgacatcgccaccgagccggctccggcgcagcgcggcgatactgcgacctggcattgcgtatcgatcgacggcgagccccggaactggatcactagaccggtgctggccgacatggacgagctgagcatcattgtggaggaaggatga

SEQ ID NO: 49740 - DNA, 693 bp, Bifidobacterium longum
atgaccgtggccgaggaacacgaggaacacgaggaacacgaggaacacgaggagcatatggacaacgccaacccgtacgccctgttcgaaggcgacaccggcgacatgccggccgaggcacgcatggccgccatcgccctcaaacgcgaccgctatatcagcgggcccacctacgacaccgtgctcgacaaccgcgacgccgtcgtacgctccctgaacaacgacctgctcgacttggtgatcaacgaacgctaccgcatcatgtacgccacgcccgtggccggcgacgacgtgaccctgcgctcgctcaaaacccgtgtcagcctcaaacgcgaggaggccgcgctgctcgccttcctgcgcatccgcgtcctcgaatacgagaacgtgcacgccgaccccgccgactggctcgtcagctttgaggagatccgcgccgcgctcgccaccggcgccggctatctggccgcccgcaacgacgaggaaggcgtggcaaagcagatcggcgccatcgtctccgcgatgatcacctacgggtatttggtgcgcctggacgacgaagccatgtaccagatcacgccgctcgtgcccgtggtgctcgaccgcgaactggccgacacctggctcgacgtcgcggaacacggcgacggcgacacggaagatgacgatgacgacgagaagggagccgaatga

SEQ ID NO: 49741 - DNA, 3549 bp, Bifidobacterium longum
atgatgcaggcgacagacgtgcagatgatcgcggaccggtggatgctggaatcccgccgactcatcaactggggctcctatgagggctaccacgaattccgcccctccacggaccacaagctgccggtgaccctgctcgccggcgccagcgaatccggcaaatccacgctggtcgacgcgcagatctccctgctgtacccaaccggtacgccgttcaacaaggcctcgaactccggccgctccgaacgcagcgactacacctacctgcgcggcatggtcggcgtgggcagcaccgaaaccggcgacgagccgctctacctgcgcggccgcgacgagaacggcgcaccgcaacccgtgtggggcgccatcgtggacacctatcgcaaccagaccaccggccaggtgctctcctgcgccaaattcctctacctgatgcccggcgacggccgcggcgacgtgcgccgacagtacgtggtctggggcaagcccgtggaccccaggcgcatggaccaataccgtgacgccccgttcacgccggcccagctcaaagccacctaccccgactgcctcacattccccagcgccgaagcgttccacacacacatctggagcgcaatgggcctgagcgaggccgcctgtcgactgctgcacaagatccagtccgccgacgcgccctcccggctcgacgacatcttcaaacaaggcgtgctcggcgtgcccgaagccctggacctggcccgcaccacggtcgaggactacgaacgttacgacgagaacttccacgccatggacgagaagacccgccgcatggacacgctgcgcggcatccaacaggcctacggcgaatacgccgccgcacgcggcaaggcccgcgccttcgaaccggtcaagccggccgtcgacggcacggtaccggccgtgctgcgcgactgggcattggcccgcatgcgcggcgaagtcgccgtccaactgcccgccgaccgcgccgaacaacagaacagcgaggcggaagccaagctgctgcgccgccgaaccgaagacctgcgcacccgtctcgacatgatccgcggccagatgcagggtctggacggcggcaacctgacccgactcgaactcgaactcgaccaggcccgccgcaccctcgaagacgtgcaagccaaccgaacacgaatcgaacaaacgttcgcatccatcggcgagacgctgcccggcgacgaacaggcctggaacgaacgccgcatcaacgccgtgaacttcaaacgcgaatacaacaaacgagacggcgaatgcgaggaagccctcaccgccgccatcaacgcgcgggccggcgcacgcggcgacctcgaacgactgcaacgcgacttcgaccggcaacgctcccagcgcacccgcatctcccagcagatggacgaaacccgcgccatgctctgtcgcgccaccggactcacccccgccgaactgccgtacgtggccgaactcatggacgtgaacgaacacgaggaagactggcgtctcgccatgaacgtcgcctacgcgcccatcgcccagaccatcctcgtcgacaagcgccacgaacagggcttcgccgccaaagtcagcaccatcgacccgcgcaccatgccccgacgcacctggcagttcgtggacaccgcacgccactacgacgacaccggcgcgcacgcgaacatactcaccggagaacaggacggcgactggctgtccggcaaactgcgctaccgcgacgactcgcccttcgccgactggctgcgctcgcagacccaggacgaacgattcgacgccctatgcgtcaccgccatcgacgacaccgaccgcaccaaccgtcaggtgcaggccgacggtcagatcaaatccggcgcacgcggccagcacggcaccaaagaccgcgcccaggtcatcggattcgtcaacgaaacctacctcaacgcgctcgcagcgcaggtcgacgccgcccgcaacgcgctcagccaagccgacaccgactacacggccgccaaaacacagtccgataacctccaccgcgaactcgaactggccaaccagctcgcctacacgtcatgggaacgcatcgacatcgccggcgcgcaacggaccatcacggacacgcaggacgccatcgcatccatcaaaaacgatcccaaactcgccgaactcgccaaacagcgcgacgaactgaacgccgaactcgaccgtgtggaacgccagcgcatcgaatccgaccaggccgcggcccgcgccggcagcgccgtcgaagcggcgctcatctggctgcgcgaccatgccgacaccggcacgacggacgccgccggtgccaccgccgacaatgacgatgacgccgcttccggcccgctgccggacgaagtcacggcggcgctcgccgaatcctacgacaaccgattcgccgggctggcggacgcggccatgcgcgcgcacatgatcatcggcgcgggcgcggcaggaacgcaggcgccgggggagagtttccccgaacgcaccatcgccggcatcggcaaggacatgacctcccgcatcaatctgctgaacggccaggccgacgccgcgcgcaccggcgtcgaatcgaaaatgagcacctacatcgcgctctacgcggccgacgacgactcgctgaccgccagcgtggaggactaccggtactatctcgacgaactcgccagcctcacccagctggccgcggttgccgccaccgacgccgaataccggcgctgcctcgaacagctgctcaggagcttcctgaccatcaaacgcgccatcgacacggatgccagtgacatccacgaccagcttgaccgcatcaacgccatgctcaaaggccaacagttcggtcccaagcacggcagcctgtccctgcacgcggacgtgcgccgtcccgagcgcgccttctggacgcagctcatccgcgtcatcggcaccctgaacgattggaaatccgccgacgtcaacgattccgacgcctcgcgcaaggccttcgcggcctgtgcgccgatggtcgggctgctgcgcgccgaactcgcgcaggtcaaggacacgaacggcgtgaaaagctacggcgcccgcaatctcgacccgcgctgccgctcgtccttctacgccatcgtgcatcatgccgacggtccggacgaacgcatcacctccaccggtggtcgctcgggcggcgccttgcaggagctcacctcgttcgtatacggcgcggcgctcatctacctgcttggcggcggcctgaccagcgagccctcgtacaccacgctgttcctcgacgaggcgctcatcaaggccgacggccgttacacgcagcgcgccctcacggtgctgccgcgcctcggattccaggtcatcgtctccgccccggaaagcaagaccggtgaaatcctcgaggtctccaccaaggcctacgtgacctacaaggaccccgacaccggcctcacctccctgcgcgaggccgtgctgtaccagaatgacatggacgatgaatcatcgtcggatatattgaaggatgacggggttgccgaatga

SEQ ID NO: 49742 - DNA, 1185 bp, Bifidobacterium longum; identical to SEQ ID NO: 48178

SEQ ID NO: 49743 - DNA, 1470 bp, Stenotrophomonas maltophilia
atgaagcatcgcgaacgcattgcccgttaccgccacctgcgcgaacagccccagtggaagctgcttgccgccgaccacgctccggaaatcatcggcctgctgcagggcctgctgatggacggcgagcgcacgttgccgtcctcggtactgaacgagcgactgcagcgcgcgctggaccagctggccggcgatgaactctcgcgcgagctgccgcgcaccgcgcaggcctacatcgcgcactggctggcccagggctggctggaacgccgtctgcccgaaggcgccgaccaggagcagtacgagctggcgaccgcggcactgcaggcgatccgcttcgccgacggcctcgagcaggcccgcgtggccgccaccgaaagccgcctggcgctggtcattgagcagctctcggcgctggctgcgcagaccgaagccgatcccgatgcgcgcctgtccgcgctgcacgacgagcgcgaccgcatcgatgccgaaatcgcccgggtcggcaccggccgcgtggttgcgctggacggcaagcgcgcgctggaacgcacccgccagatcatcggcctggccgacgagctgaccgaggacttccgccgcgtgcgcgatgacttcgagcagctcaaccgcgatttccgcgaacgcatcatcgacgacgagggcgagcgcggcgatgtgctgtcgcagctgttcgaaggtgtggatgtcattggcgaaagtgacgccgggcgcagtttccaggccttctggcggctgctcaacgacgccgaacagagtgcccagctcgatgccgcgctggaagcagtgctggcgcgcggcttcgcgcgccgcctggaccgcaacgaacgcaacttcctgcgcagcttcaccagcaccatgctcgagcgcggtggccaggtacacgacgtgctgcagaacttcgcgcgcagcctgcgcggcttcgtgcagagccgtggctacctggaacagcgccgcctcaaccagttgttgaagcaggcgcagtccgaagccctggccctgcgcgacgaattccccgcacaacgcggcatcggccgcgacctgcagctgaccaccagccgactgcgctcgtggtcgcagtggaagctgcatgatccgcgcagcgcccaggtcgacggcaatgtcgagtacaacgacgcggccgcgatcagcctggagagcgtcggcgacctggtcgcttcgtccgaaatcgacttccgcaccctgcgccgcgacctgcacgacctgctcgatgcacagccgcggctcagcatcgcccaggccctgtcgcagcgcgaggcgccgcagggtcttggcagcgtcatcggctatctgtcgctgggcacgcgcttcggcaacgtggtcgccggcgagcaggagcttgcgcaatggcgtggtggcgacggccaggtccgtcgcgcccgcatcccgctggtttggttcacccaggagagacgccatgagctggcatga

SEQ ID NO: 49744 - DNA, 702 bp, Stenotrophomonas maltophilia
atgagctggcatgaagatcccatcgacgcagcgcaggccgacgtggcggaagacgcctacgaggccgaaccggtggcggccgtggcgcagccccgccgtggcaacgacgtgtactacctcggcgataccgggcgcctgccgctggacgcacgccgcgcgctgtgccagctgctgatcggccccagcatcgaccagctgcgccacgccaagctgtggccggcactgatccgcagcgaggcggccatccgctcctcgctggcggacctgttcctggaacttgtgctcgaccgtgacagcggcgtggccttcacccgccaggccgataccgaagacgtggatgcgccggtgctgctgcgcacctcgccgctgaccttcatcgactcggtgctgctgctgtacctgcggcagcagctggccgaggccgatgcgcgcggcaaccgcgcggtggtcgccgatgccgaaatggccgaagcactggccatctacgaaaagaacctgtccaccgaccgcgccggcttcaaccgccgcgtcgcctcggcggtgcagaagatgaaggacaaccacatcctgacccgcctcagcggccaggaagaccgccacgaagtctcgccggcgctgaagctgctgttctccgccgaagacgtgtcccagctctcggcggtctaccgccagctgcgcgaaaccccggccgccgaggcctga

SEQ ID NO: 49745 - DNA, 3381 bp, Stenotrophomonas maltophilia
atggctatctccaagcacactcccgccctgttcaacgaaggcctgccggacccgcgcctgcagcagttccgcatgcgccgcctgcaggtgcacaactggggcaccttcaacggcctgaccgaagtaccgatcgccgagcgcggcttcctgttcgtcggacgttccggctcgggcaagtcgacactgctcgatgccatgtccgcgctgctgacgccgccggccatcgtcgacttcaacgctgctgcgcgtgaagccgagcgcagtggccgcgaccgcaacctggtgtcctacgtgcgtggcgcgtgggctgaccagcaggacagcggcaccggcgaaatcgccacccagtacctgcgcaagggcgccacctggaccgcactggtgctggaataccgcgccggcgatggccgcgtggtcagcctggtgcgcctgctgtggatctccggcaacggcacctcggccggtgacgtgcgcaagcactacatgattgccgagcgcccgttcgacatcgccaaggatcttggtgggttcgacctggacctgcgcaagctcaagcagaagctgtccgacctgcaccacttcgacaccttctccggctacgccgagcgcttccgcgacctgctcggcatcgacaatgagatggcgctgcgcctgctgcacaagacgcagtcggcgaagaacctgggcgacctcaacgtcttcctgcgcgacttcatgctcgacacgccgaagaccttcgacgccgccgagcgcctggtcagcgacttcgccgagctcgatggcgcgcaccaggcggtggtcaccgcccgtcgccaggtggagaccctgctgccggcacgcgcctactacaacgacctgaaggaaatgcaccgccggcgcggcgacgacgaagccctcaagcttggcgtcgacagcttccgtgaaagccgccgccaggcgctgatcgaagcgcgcctgcgcgagatggacgtgcgtgaccgtggcctgcttggcgaagaagcccagcgccgtgccgcactggacaatcacaccgagcgcctggccgaactggaactgcagcgccgccagcagggtggtgagcgcatcgaagaactggaacgcgagcagggccgcgccgaagccgagcgcgaccgccgccaggccaagcgcgagcaggcaagcctggccgcgcagcagctgggggccgaactgccggacgacgcacacggcttcgccgaactggttgagcgcgcacagaacgagctgcaggaccgccagcgcgcctcttcggcgctggacgatgcgatcagcgatcgcctgggtggcaagcgcgatgacgagcgccgcttcggcgaggtccgtgcggaactcgaagcgatgcagcgcacgccctccaacatcccggcgccgatgcagaagctgcgcgcgcgcctggccgaggaaaccggcatcgctgaagcggcgctgccgttcgtcggtgaactgatccaggtccgctcggaagagcagggctggcagggtgccatcgagcgcgtgctgggtggcttcgcgctgtcgctgctggtcgacgacaagcattacaacgacgtcgccgagtgggtgaaccgtacccacctgggcatgcgcttcacctactaccgcgtgcgccgcaacgatgatgcgttcgcccgtgagccgtcggcgaagtcgctgctgcacaagctggaactgcgcgaacacgtgttcgaaagctggctgcgccgcgagctcggcaagcgattcgactacgagtgcgtggatgccaagcagctgcgcaacgtcgaccgcggcatcacccgcgaaggccaggtcaagcatccgggcgaccgtttcgagaaggatgaccgcagtgcggtgggcgaccgccgtcgctggatcctcggcttcaacaaccacgacaaggtgggcgccttcgagcgcgaagctcaggaactggccaagcgcatcgccagctgcgagaccgacatcgcgcgcctgcgtgggcagcgtgaccgcgacaacgaacgccgcctggcctgccacgagctggtcagcatcagctggaacgagatcgacatcgccgccccgcagcagcgcctgagcgacatcgaggccacgctgcgcgacctgcgcgaaggcaatgccgacctcgccaagctggccaagcagattgacgccgtgcgcgccgacatcgagcaggcccgccgcacctatgaagacgtccgcgtcgagcgcgggcagctggtcaaggaacgcgaccgcctggaccgcacgcgccagcagagccgtgcgctggtgctgccgagcctggcccaggagcaggaagccggccttgccgagcgcctgcaggagcagggtccgctcagcctggaaacgctggaagcgcacatgcgccaggtcagcaacgcgctgaacgagcagctgtcgtcctcgcagcaggacctcaaccgcatcgagaaccagctgatcggctgcttccgtcgcttcatccagcaatggccggaggaatcgggcgacttcaccgtgtcggtggcctcggccgaggacttcctcgcacgcctcgaacgactggagcgcgatggcctgccgcagcacgaagagcgcttcttcgatctgctgcagaaccagagcaagaacaacctgctggccctgcagcgccacagcgccgaggcccgcaagtcgatcggccagcgcctggacgaagtgaacgccagcctggaacaggtgccgttcaaccgcggtacgttgctgaccatcgaactgagcgaccgtcgtctgccggaagtgggcgagttccagctgcagctgcgcgaagtgctgtcgcagcagcagaccgagcagcgcgagctggccgaatcgcagttcaccgtgctgcgccagctggtcaaccgcctgggctcgcaggaaggcgaggacaagcgttggcgggagctggtgctggacgtgcgcatgcacgtggagttcatcggcgtcgagctggatgcggaaacgcgccagcaggtcgagatctatcgcagcggcgccggcaagtccggtggtcagcgccagaaactggctaccacctgcctggcggccgcgctgcgctaccagctcggcggtgctgacagccagctgcccagctacgccgcagtggtgctcgacgaagccttcgacaaggccgacaacgagttcaccgccctggcgatgaacatcttcgacaacttcggcttccagatggtggttgccaccccgctgaagtcggtgatgacgctggaaccgttcatcggcggcgcctgcttcgtcgaaatcagcggtcgccacgactccggcgtgctgctgatcgagtatgacgaggaaggcaagcgcctgaagctgcccgagcgcagccgccagcaggccaacgaaccggaagaagccgaggcctga

SEQ ID NO: 49746 - DNA, 1464 bp, Hymenobacter sp. PAMC 26554
atgtcctacccactctaccgcagcctcttcagcgccgaccgcgccccggcagcggtgcgggtgctgcgcagccacgaggcggcgctggtgctgtgctttttgcaggagaattttaaggcgggcagctacgcgccggtgcgggccaacgactggctggccgggcagctggccgactttctggaaacctgggacgtgcgcggggacgacgacgcgggcgacctgccgacgctgggcctctcgtgggctgagcgggcggcccggctgctgcgcgactgggtgcgcaagggctacctcacgctctacactgatgagcaaggcgctgaccagcacactcttacacccgagctagagagtgtgctcgattgggtgcagtcgctgctgaacaagcccacgttcgtgggtaccgagtcgcggtttctggatattttgcagaagctgcgcgagctggtgcaaaactcggccgacgactggcaggcccggctggccgagctggaaaagcaacgcagcgccctcgacgcgcagattcgggagctgaagctgaccaaaaccgtgcgcacctacgagaactacgaaatcgcggagcgctaccaaacggtgagcggcgtggcgcggggcctgctgcgcgattttcgggaggtggagggcaattttcgggacattacccagcgcatctaccagcagcaggcggcggccggccacaccaaaggcggcctgctgggcctggccctcgatgccctcgacgagctgcgcctcacggcccagggccgcagctttgaggcattttaccggcacctgaacgacccccggcagcgcgccgagctggatgcgctggtgcgccaggtgtttgagctactgaccgaccggggcctggcagccggcgacgagtttctgcgcaaaatccgcccgtacctgctcggcgaggggcgcaaggtgaatgactcgttttatgccctggcccgcaagctggaaaagatactttcggagaaaaacctgcgcgaccggcgcaagtcgctggcgctcatccacgacattcgggcgctggccttcgccgtgatggacagcccacccaccgacccggcttttctggagctggagggccgcgccgattacctcgccaccgaaagcacggtggccctcaaggagcgcgaaagcgccattgtgccccgcgtgctggccgtggcccggcccgaagagcccgagctggcggccctggtaagcccccgcgtggtggacaaggcccgcctcgccgccaacatcagcgccctattgcgcgaccagagccaggtaacgctgcggcaggtggtggccgcccacgccctacgccacggcgtgcccgagctgatggcctacggcagcatcgcggccaattcgcccaagcacctcatcaaccagcagcaaaaggatatttttgacctcggcgacgggcgctggtgcaaatttcccgaggttattttttgccgataa

SEQ ID NO: 49747 - DNA, 588 bp, Hymenobacter sp. PAMC 26554
ttgcccgctccctacgcctccgtcattattaagctgctgcaaagccacgctctttacgacaccgacgaccgcgcgcactggcagcagctggagacgcacgagacggccgtgcgggcgcactttgcgcagttgggggtggtgctcgacctgaaccgggccgatggctacgcccgcctcacccagcccgaaccggccgacgacgaccccgccccgcccctgcgtctgctgcgccgagtgccactcagctacgagcaggcgttgctgggcgtggtgctgcgcgaatggctggaagagcacgaaagcagcgcccacgccgccagcccgcgcctctacgctacccgcgagcagctgcgcgagcgggtggagctgttttttcggcagcaacctaatcaaaaggcttttttgagtaagctggacactattattgagcgcctgacggagcacggcttcctgaaaataacgcacaaggacgaccttcatcccgaccagacgcgctacgaggtgaagccgctgctgaaggctaaaatcagcctcgaaaaactgagcgaatttttagaaaaactacgaaaccatgccgagtctgtttga

SEQ ID NO: 49748 - DNA, 3441 bp, Hymenobacter sp. PAMC 26554
atgccgagtctgtttgaggcggtggccgggccggcgggctaccggctcaagctgctggaggtgttcaactggggcacgtttcacgagggcgacggtggccaggacatctggcggctggtgcccgatgggcagaatacgctgctgacgggtagcaacggctcgggcaaaaccaccctcgtggatggcctgctggcgctgctggtaaaccccacgaagcggtttttcaaccagtcgtcgggggccgaaagccggagcggccgcagcgaagaatcttacgtggagggccactacggccgcacccaggacgaggaaaagcagaacaccaagcccgaaaagctgcggcccaaccagcggcagacctactccatcctgctcggcgtgttcaccaatccgcacagcttgcctatcacgctggtgcaggtgcggtggtttggcacaggcgggatgcagcgcaagtttttggtggccaaagccgaactgaacattgccgaccacattccctttggcactaacacgccctgggtgaacgggttgaagaagcggttcgcgccgggcgtggtggaggactttcccacgttcgcgccctacgcggcggcgtttcggcggctgtttggcatgaaggaaaaggccctgacgctgttcaaccagacggtaggcatgaaggtaatcggcaacctggacgattttattcggaccaatatgctggaggaaagcaccgccgaagccgaattcagcaagctgatgggcaactaccagaccctgctcgtgtcgtaccgggcgctggaaaaagccaaaactcagctcgcgctgctgcgcccggtgcatgagcgcaaccacgaatacgaggacttgcaacagcggctgcgccagacgcaggaggataaacggcggctggaaccgtggtttgcccagcagcaaattcgcctctggacggccgaaaccgcccgcctcgaccgggagctggaccgcctcggcgggctgctggcccagcaggaagccgacctggaaaccgccgatgagcagcgcgttcggctggccgggcagcttgacaacgaccagattggccgcgaaataaaggagctggagcgccagattcgcgagctggaaaagagcaaaagcaccaaagagcaagccctgaacagctacaaccgcctggcccggcagctggagctggtggccgaccccgacgcgggcctattcgaggccaacattgcccaggccggggcggcccgccaggccacgcaggcgcttcagcagcagctcgcggagcagaaatacgccgcccgcacggcccgcgacgcgcaaaaagctgattttgagcggctggaagccgacgtgacgcagctgcaaaaaagcacgggtaaggtaacgggccgggtagccgatatccggcaggaaatcctggacgcggtggaggccagtccggtcgatattccgttcgtggccgaaatcatgcaggtgaaagccgaggaaaaagccgtgtggaacgaggcgattgaaaagctgctgcacagcttcgggcgcgacctgctggtgccggagcacctgtacgcggcggtgcgggcgcacgtgcatcacgagcgcgacctgcgtggcaaagtcgtgtttcatcgggtggataacaaaacgccccggcccattttcccggatgcgcggacggtggtggctaagctcgatttcaaccccaaaagcccgtttgcggcctgggcagaaaacgccgtggcggcgcggttcggctacgtctgcaccgaggatttcactacgttcgagcgggcggaaaaggcagtgctgccgtcgggccttattcgcaacaaaaaccggcacgagcgcgacgactcggccgcccaccgccacattctgggctgggacaaccgcgaattattgcgcgaataccagcgtcggggccgcgagttgagcacggctatcagccaggcggaaagtaatttgcggcgaatagacaaagaactggaacgcgcggcgaaacgcgaaaaggaccaggatgctttcctgcttttcaaccagtttccgaagctggactggcaggccgacgcgcaccacgttacgcagctgacgcggcaaaaagaggcgctggaacacgaaaacgcttccctcaaaacgctgaaagagcagctggccgcgctccggcaagacattgataaactgagtagagaccgggagcagacccgcgacgagttcaaggacgcggagaagagcctccaggccctggcggcggagcaacgggaacagcagcacctgctcgaaaccttcgacgcggctgacctggcaccgcccgccgccggcctggccgcgctgacggagcccgtgcgcgaggcgctgacgtatgggcagtttttcgtacaaaaggagcagctggaacgcatggtaacgcagcagttggccgccctgcaccacgacaaggaaacgcagaaaaaagccattcgggaggccatgcggggctttttgctgccgggcgaggaggtgctgcgcaagtttgcggactggcacagcgacacccgcgagctacgcaatgaaatggaccaactggccgaatacctggaccgctatgcgcaaatccgcaacgagcaactggcggagctggaaacccgcttccgcgatgagttcaaccggggcgtgaccaaggcgctgaccgactactgccagtcgctggagacgcagcacgaggccatttgcgacacgatagacgagataaaccagtcgctgcgcgacattgattttaacctcaacccggatacctatatcgagctggtccgcaccgactcgcgcacgcccagcatccgcgccttccgcgaggagcagctcaaaagctgggtgcccgacctgacgctactggattttgccgccgaccccaaggaggcgcagctggcgcatttcgtggcgcacattcagcccttcatcaccgagctgcaagccagggaaaacgagaaatggcggcagcaggtagccgacgtgcgcaactggtccaccttcaaggcccgcgagtattaccgggccgacaaaagcctgaaaagcgtgtacgaaagctcgggcagcctctcgggcggcgagggcgcgcagctggcctacacggtgctgggcgcggccatcgcgcaccagtttggcattgggcggcgcgcggcgcaggtggcccgctcgttccgttttatcgttattgatgaggcttttagcaagcttgatgaggacaagtcgaagtacctgctcaacctctgccgcagcctgggcttgcagctaatggtggtgacgccgcttacttccctacccctgctggagaaggatgtcgaagtcattcactgggtaaccaagggcaagcccgacacccgcaagtcggtggtcgtggacgtgcccattgggcgctacgcggagcggaaagaagccttgctggccgaatcggaagccgaagaagccgccgccgcccatgattag

SEQ ID NO: 49749 - DNA, 1155 bp, Hymenobacter sp. PAMC 26554
atgattagcctgcccgagctgcgcgccaaagccctgcgccgctacccccgcgtgctgcgggcgcacctggctggcgaagtccttttcccgctgctcatcccaaccgacaaaaccctggaccgcggccagggccacgaacacattcatgcccagcaaagggagctgctagcccacgcgaaaaaccgcacgggccacgggtactggctcactaccaggctaaaccgcaaaaccggccagagtgaaatcaagcgcgttgagtttgaaaccctaactgactacctatcctttatggataaaacggccgagttcgcggtttttgaaagcaacgcggccctaacggcggctaccgtgcccacgctgctcccgctacccgccctaccccccctgctgctcgactacgccgccgcatggcccgatttgctgctggtgtgccagtattttcagcagcacccgcagcccaatcaatacgtgcgcaacttgccgctggcgctgcctaccaagttcattgagcggcaccaatcggccttgcgcccgctgctggacgcgctgattcccgcaccacttcgagccgacgaaagcgattttttccggcgctttcacctgctgctggaggagcccggcatcaagctgcgcttcctggatgcggcgcagcggctgcacccggccgtatcgcagtgcagcctgtgggtcagcgagtttcggcagctaaacctagccagccagcgaatatttatcgtcgaaaacctgacgactttcctgtcctttccgcccgtgccggaggcagttgctatctggggcggcggcttcgcggtgagcctgctggccggggccgactggctggcaaccaagcagttgttttactggggcgacatcgacgtacacggcttccagattctggcccggattcggacgcactacccggccattcgctccttattgatggatgaagccacctttgccgcgcatcaccggggcgagcagggcgaccagtttcaggcggccgccctaccccagctcacggcggccgagcagccgctctatgattctttgctgcgcaccaacgcgcgcctggaacaggaaaaactgcccctggcttacgtaatggcggccatcgcgcaagccaccggccaccctacccggcgcggcgcaccttaa

SEQ ID NO: 49750 - DNA, 1383 bp, Thermovenabulum gondwanense
atggcctttttcgacaaaatacccgaaaacctattttcagtgctttcatcgaaaaataaacatatttatgtagaatgcctttttataatctttaaggcttacagggaggaagtgctgttaagaaaggacgaccttgtggaaaggttaaagagctttctcgaggtttccaacttttcacccgaaggtgaggaagaagaacttcccgaggataacaatctttcctccattgcccattttatattgaggaagcttgaaaaaaccgggtggatttatagggattacgctgaaaatttttttgaagaactgatataccttcacgactactctattaaaatcttaaataccctttatgaaatacaatatcaagagaaaaaagattacaattcctttgtccactcggcatacaataacttaaaaaatcaggatgtggaaagaagcgaagatgccatttttgcccttttggaagcccacaaaaagacaagagagcttatagatgaactgaaaagccttttaaacaacctgaggaaataccatcagatgctgtatgaaaaggaagaggtaagggagattctaaaagagcacttcgacgaatttaaagaactgatagatgacaggatataccaccctttaaagaccttcgactccattccccggtataaaacccccataattaatatattgaactcatggcttaccgacagggagatgatggacctccttgtaaaatcatcgctaaaaagaaggatatacaaagacgaaggagaggctatttcaaaaataacgggaatgataaacgatattttggaaatttactataaaatcgaccttttgctttacgaaatagacaagaaaagggcttcatacaccagggcttcggtggaaaggatgcagtacctcttaaatgcggatttaagcattaaggggaaaattgttgagatattaaaagccctgcccgaaagggaaaacatatacgaagcagtgaataaaaatatcaacatatttttacaaaattacatcgacgaaaattccctttacattaaaaagcctgagaggaaaatacccgacgataaatttattaaaatacccgaaatcggcgatgatgcaagcgattttgaaagggaaatggactttttaaaggagaggctaaaaaacagtttcacacgccagaaaatctataaattttttaaagagcttttaaaagggaaaagcgaaattctatcaaaggatataaagcttgaaaacgatgaagaattcataatgctcatcctcggggtattcatgcacgacgaaaagggctccttttacgatgtggtgttcgaaaagggaagtgttttcgtaaatgggtataaaatcccgcaaatgaggataaaaaagaaggtgtaa

SEQ ID NO: 49751 - DNA, 630 bp, Thermovenabulum gondwanense
atgtggtatgaagaatatgaaaatttaagcgatgccgataaaagggagtttacaaggctcgtcaactttttgctttctcacaattttatattaagggaaaaattcgatacaaaattaatgggcctcaggataaacccggactatagatttatcgagcgccactttgagatttttacgaactacctttccattgccggatgggaactgcaaaaggacaataattacggggtgatatctctttacaacaggtttgaactaaacagggcgagattgaagaaattcgacaccctggtgctctttgcattaaggcttttatacgaggaagaaagggaaaagctgtctttaaggaaagaggtaatagtgaccaagggggatgttgtaaaaaaacttttaaacataggtgttatagataaaaaaccggctgaaagggacttaaaggatgcgctgaattttttcaaaaattatcagataatagaaaaaatggataatgcagcggacgaatacgagagcaaaataataatttaccctaccattttgtttattattaccaatgaaaagataaactcaatttacaacatgctgggcgaagatttttccgatgaagaaaacgaccttgcggaggaggaataa

SEQ ID NO: 49752 - DNA, 3369 bp, Thermovenabulum gondwanense
ttgaagcttttaaaaaaacttttgcttatcaactggcattacatttaccatgaaataatcgaatttgaaattataaatttcctcaccgggaaaaacggtgccggaaaatccacgataatagacgctttacaggtgctcatacttggtgatacaaaaggagactttttcaacaaagctgccaacgataaatccaaaaggactttgaaaagctacctaaggggagaaattgccgacgacggtgaaggcggctttgtagttttaagaagcggcaattttacgagctacatagcgggagaattttacgatacggtgaaaaaaacgagcttttcttacggagttgcatttgacgtttacgaggatggagaaattaaccataagtttttttatttggactttgcattacccgaaaatcaattcgtaatgggaggctttcctttaaatataaggaatttaaggacatactttaactctaaatacaaagaaaggtataaaatcttcgattccaatcgggagtaccagattcactttataacaaaaatggggagtttgaacgaaaaattttacagggtttttagaaaatccgtccccttttctcctattatcgatatagaaaatttcataagcgagtacgtctgcgatgtgcaaaataagatagatatttccagtatgcaggaaaacctgaggtattataaagagctggagtaccaggccgagcaggttaaaaaaagggttcaaacattaaaggaaatagaagagctttttgaaagctttttaaacgaagaaaaaaggttaaaagagcaggaatacctcataaaaagagctgaagtggaaaagaagaagaacgaaatacaggatttacaaaaggcgataagtgaaaaagagaatacaataaaagaaaaagaacagcataggctttcccttgaggaaaagttaaaagccctcgaaggacagagggaagcacttataaaggaaaaatacagcttacaggcctaccagaaaaaggaaatgcttgaaagggaagaaaaaagcttattagaaaatatcaaaggcaaaaaggcaagcatatcaagctttttggaattcctttcaaggcttttaaaaaattgggaaaagaccgttgaagatttctctacctttgcagaagaagagtttggtgaaaatttagccttaaatataaaaaaaggtatacagggactaaaagccctttcctttgaaaatgtagaaagtataaaggaagaagatttgtcccttttaaaagagctcacttttgaatttaaaaataagattgaaaaactatacttttctttagaacaggaaaaatctgctctggaagcccttcttttagaactgagaagtgaaattgaaaaccttaaaaagggaataaagccctatgacaaaaagcttttagaactaaaaagcgaaatagagacggctttaaaaaataaatatagaagggatgtcaaggttgaaatactggcagaccttatagaggtaaaggataaaaaatggcataatgccgttgaggcataccttcacacccagaagttttaccttattacggagccgaggtattttgtcgatgccctaaaaatttacgatgaacaaaagtttaaaaaaggtttttacgacatagggcttgtggatacggggaaactggaaaggcaaagcatcaaggtagaaaaaaatagccttgcctttgaagtagtgaccgagaatagatacgcccgcctttttgtggactacatcctgggcagggtagtaaaatgcgaaagggtagaagaattaaggaattacgctactgccattactcccgattgcatgctgtatcaaaattacgttgcaaggcagctcagtcccgaaaggtacaggaccccctatataggtaaaaagtccttagaaaaactattagaggtaaaattggccgaaaaagatgaaaaggaagggcttttgaataagataaaggaaaaatacgataccttaagcaaaataaaaaatatagagcccgtaacggagatttttatagagaatgcaaaaagcgcaaagaaggaaaagcaagattatatttccttaaaagaggctctggaaagggtaagaagggagctttcaagccttgacctttcaaaaattttagaaatagatgaaaaaatacaaaaaacggaaagtgaaatggaaaatataaaaagggaaagggaaaaaattaccggcgaaataaacaaaataaattccgaaattcaggtggataactacaggttaaaggaagttgaaaaagagcttaatgaaaaacaaaaggagatagaactttcctttgaacacgaatttgtaaaggaaacgggtgagccaagatttttaagggagcttgaaaaccgaaaacttcccgaaaacattataagcgcctttttaagccaggtggcaaggacgaggagccagaaggaaataaagtggagcaagctaataaacaaaaggtcggactacaacagggagtacaaaatgccctacgatatatcgtcccccgataacggcgaatacaaaaaggaactggaaaggcttttgaataccgaacttcctttatacgaggaaaaaataaaggatgctaaggaaaaggcgaggatgcagtttcaggacgactttatcagtaagctaaagcaaaacatcgataccgtttacgctcagatagaggaactaaataccgccttaaagcagttttccttcggaaaggatagatacaaattcgaggtaaagcccaatcccgcttacagaaaattttacgagatgataatggacgggatgctgcttgagggatacaccatattttccatagaatttcaaaacaaacaccgggacgctttagaagagcttttcaaccagatagtctacgtgggtgaacaaaacctttccgtcgacgagagggcaaggcttgaggataacattcaaaaattcaccgactacaggacgtatctaaactttgacctcgtagtcaccgatgaacagggtagggaatcgaggctttccaggaccctgcttaaaaaatcaggaggcgagacccagacccccttttacatctccatccttgcatccttcggcaggatatacaggatggggaatatgtacagggaaaacaataccttgaggctcataatcttcgatgaagccttcagcaaaatggaccaccagagggtgcaggaaagcataaaactactgagaaacatgggttttcaggcgattatatccgcacctactgagaaaatccaggacatagccaccttggtggacaggaacctttgcgtgataaggagcaaaaacaggaccatcgttcgcgccttcgaccccagggaggtgctggaggagggtgatgtaagcattggattataa

SEQ ID NO: 49753 - DNA, 1224 bp, Thermovenabulum gondwanense
ttggattataaaaaagccctgttaaacaaactccttgaaaaatacgaaaaaagcaaaatattttccggcgaatctaaagtagaaagaaggataaagatagactttacaaagaaagaatttccccattacgacctggaaaatgtggaagcaaaggagaatatacattatgcattaaaggaattagaaggtgaaggagtcattgaaatcaaatgggcaaaattcgaagaagggaatatagtggaaaaagtgtttttaaatacgcaaaacttagaaaaagcctatgaaattgcaaaaagggagccgaaagagtccattttaaacaggatgacggaaaagcttttgaatttaaaaaaagatgtaagaggaatttggctttcggatttcatagattatgaattggaaaatattaaggctaaaaactaccccgcataccttccaaaggaagaagacctgtttgaactcaccttaaaagcattaaagggcatagacgaaaaagaggatgaagagctattagagagggttttcagcaaaagatatttaaaagggagcaaggaatttgagaaagtgagggcaaaggtatttgccgtattaaaagagttttttttaaaggaggatgtggaagaaaaagaagcctttgaaaaaataggcatagtaaagaccatagaagaaatattattttacggctcgttgaaggtaagcttaaagggtaatattttggatttttccctttttcccttcggcgcatccttaaacagcctgtctatcaaggaacttcaaataatcgatttatcctgcgaaaaaataattaccgtcgaaaacaaggcaaatttttattaccttataaaagatgcggatttaaaagaagatttcatcctctaccttggaggtttttacagcccatcaaaaaggctttttttagaaaagctttacgagtttattaaagaaaaaaataaacccgtaaaaatattccactggggagacatagacctcggcgggtttaaaatctttttaaaattaaaggaaataataccggatttaattcccttatatatggatagagaaaccctgataaagtataaagacttaggagaacctttggaaaaggtttatgaagaaaaattgaggagcttattggaaaaacaggattttaaagaattccatgatgtaataaaagagatgctgaaactcggcgtaaggctcgaacaggaggccgtgatttcgtaa

SEQ ID NO: 49754 - DNA, 1353 bp, Pseudomonas aeruginosa; identical to SEQ ID NO: 43230

SEQ ID NO: 49755 - DNA, 750 bp, Pseudomonas aeruginosa; identical to SEQ ID NO: 43256

SEQ ID NO: 49756 - DNA, 3306 bp, Pseudomonas aeruginosa; identical to SEQ ID NO: 48853

SEQ ID NO: 49757 - DNA, 1182 bp, Pseudomonas aeruginosa; identical to SEQ ID NO: 48503

SEQ ID NO: 49758 - DNA, 1461 bp, Mycobacterium immunogenum; identical to SEQ ID NO: 45554

SEQ ID NO: 49759 - DNA, 741 bp, Mycobacterium immunogenum; identical to SEQ ID NO: 45555

SEQ ID NO: 49760 - DNA, 3348 bp, Mycobacterium immunogenum; identical to SEQ ID NO: 45556

SEQ ID NO: 49761 - DNA, 1488 bp, Corynebacterium variabile
atgacgaacccacgtgccgaagccgcctaccgccatgcctcggcggccttccgcaaccccaccctctatctgctgcacggtcgttacgcgcccttcgtgatcgcggcattgtccctggtcttcaccgcggaacgtcccaccgtcaccgtggcggacgcccatgtcgaggtcggcgacatcgccgaggccctgcgggcgtccggtgaggagaatctcccggtcggcaccggccgtgagatctgccggtactgggtgcgtgtcggctggctcgtcccgcacatcgacgacagttccggcaccggcaccgaggtctacaggctctccgcccaggcggtcagcgccctggagatcgccggccgtgccggtggtcgggtgagggtgtcgcggtcccgtatgcggacgctcctcgactcgatcgaccagctcgtttccgactccgagaccgaccctgagacccgccgggccaccctccttgcggagcgggacgccttggacgcgcagctctcccggctggaggccggtgaggtcgagccggtggatgacgaccagctgctggaggaggcggagaacgtcctccacctctcccgggaactgcccgccgacttcgtgagggtggcggagtccatcaacgagatgcagcgcgatgtggtcgccgacctgcgtcgggacgtgcgtccggccggcgaggtgctgcgcgagtacctccaccgcggtcagcacgtcatggacgccaccccggagggacgggccttcgccggcgccctggagctcatcggcgaacccgagcacatcgaccggctcaccgaccagctgcagaacctgctcgcccagccgttcgcccggcatctgccggtgacgcagcagcacgacctcgccgccgtcgcacaccgtgtcgagcagggggtgacggaggtactcaccgcccaacgacgggcgtcccacgtcatcaccgcccaggtcaggacgcacgatccggtgcgagaccgggaggtcgacgacctgctgcgcacggtgatgtccgggctgcagtcctggatgccgcagtccagtaggggcgaccgggtcgatccgctgcgcagtttcccggcggcgaaggtcggcgcgctgcgtcgcaacctcaatgacctgcagcccgagtccgcacccgagccgctgcacgcttccgaggaggccccggagttcgagggcaccgagggtcgcgagtggggcgggccgcgctacgaggacctggagaactacatcgggtcgagagaggacgccgatttcgatctcgcggaggccttcgcacatctcgcggcgcccgccagaaggcccgtcgacctgctcgggctgctggagatcgcccaccgcaacggcatggtcgagaccggggacatcgccaccgtcgaggcgcggcgtcctgacgggaccgtcaggcgcttcgccttcggcgacgtgacagcaggaaccaccggcaccaccacaggacaggagaacaccgatgactga

SEQ ID NO: 49762 - DNA, 657 bp, Corynebacterium variabile
atgactgaccccttcgtcaccccggtcgccatggaggaggacctcgacgggtgcttcgccggcgaccgcggcgtcctcgatcctgcggtgcgacgggtgctggtgcgcctgctgcagcggcggttcctcagtgcggagaaacaccccgcggactggacggtgctgctggacaaccagcaggtcatcgagtcgcggctgcacgacctcttcgtccgcctcgtggtggacgccgaccgtggcctggcctacaagcagcaggtccgtgccgacgaggcagacgagaccgcggtctccgacattccggtgctgttgcgcgacgaggcctacacccgcgccgagacgctggtgctggtgtgtctgcgcagcgtgtggcagcgcgagtcgaccgccggggaaccgtccgcccgcgtcgacgtcgaggaggtcgagcagaccgtgctgacctacttcaccgagtccgacggtgacctcgcccgccggcagaaagcggtgcgccgcgccctggaacggttgcggcacgagggcatcgtcgaggaggagaccgagggacgctacctcatcagtccgctcatcgagatcgtgctcagcgcgcagaagctgcgggagctcgccgactggctcagcgcacagacggcacaggcaggagaacttcagtga

SEQ ID NO: 49763 - DNA, 3351 bp, Corynebacterium variabile
gtgaccatgctcgacaccctcttcggtctcatcccttcggggacccgcgggcagcagtggctcgccggtgacctgcagctggtgaactggggcggctacgacggcgcacaccgcgtccgcttctcgccctcggcgacactgctgtgcggtgggtccggttccggcaagtccacgctgatggacgcctacatcgccctgatgatgccgcacaccacgccgttcaacggggcgtccaacggtgcggtgtccggccgtgccaggggcgaggaccagcgcaacatcctgtcctacggtcgcggcaaaatcgacgagacccgtaccgagcacggcacgagggtgcgcgtgctgcgcggcgacgggacagacacctggaccgccgtcgccatgacctgggtcgacgccagtgggccggtggagaagcggttcaccgcggtgcgtgcctggtatatcccggccaccgcccgcgtcctcgatgacgcggtgaaggtccgcggcgtcatcgagggcgacgtcgacctcaccgacctggaggacgccgcgtcccgccgtctgtcggacgccgccgtgcgcgcgaccgggctggagacgatggccacggaccgcgagttcctcgcaaggatccacgcggtgctcggcatcggtgccgccggtgcgggtaccaaggcgatgaacctgctcgcccgtatccaggccggccagcagatcaccaccgtcgacgaactgtacaagcgcatggtgctcgaggagccggacaccttcgccaccgcggacgccgtggtcgagcacttcgacgagctggagagcacccggctccggatggtgaccgcccagcggcaggtccgcgcactgaccccgctgcgcgaggcgcggacccggatcggggacgcagccgaacggctccggctgatcaaggagatcggccagttccgggacgactcctcgccggccgcgatgtggcggacctcccggcggctcgacctgctgcgcgccgctgaggaggagctgcgaagccaggcggtggacgccgagtccctggtcgccacccacaccgccgccgccgaggctgccgaggccgagcgcgacagcctgatccaggtgctgcgcaactccggcggtgaccggctggagaccgccgagcgggagctcggggcggcgcgtcggcgctgcgagcagatcacccgtacccgcgagaaggtcgaggaggacctcatcccgctgggtgctgtcgtgaccgacgaagaggcgttcaccgcgctggtcgcgcaggggaagtccgcgttggcggatcccgaggtcaaggcgggtgtccgtgagagctacgcggaggcccggacggcggcgtccgtcgcccgtgaccggtggaatgagctggagtcggagaagaaggcgacggctgagcgcaccgacaacatccccggggagctgcacgccgcgcgtgccgccctggcggaggccgctggtctgtcggtcgatgagctgccgttcgtcggtgagcttgtcgaggtgcgcaccgagttcgagccctggcgggaggccttcaacctggccctcggcgggttcgcgaccaccttgctcatcgacgaggcacagctgccgcagttccgcgcggcgatcaaccaggtgcggacccgcatccgcgtccccttcgagggtgtgcagaccgggcaggcccggatcacctgtgacccccggcagctgcccggccggctcgactaccgcgacacccccttcaccgggtggctgcaggaccgcctggaccagcggttcggcttcgtgtgcgtggattccgccgaggagctccgcgcccaccggtcggcgctgacggtgtccgggcagatgtcccagggtgcccgtggggcccacggcgggcacggccgacgcaatgtgctgggcttctccagtcaccggcgcgtcgatgaactcgccggggagatcgcggcggcgaaggccgaggtcgaggctgcgtccgccgaggtcgccgcggccgaggccgagctggacgaggtggacgtgcgtctggccgcctaccgccggatcgtggacctgacctgggaggagatcgacgtcgccacggtcaccgacgaggtcacccgctgggaggaggccgtcgaaggtatctccgagggcagccccgagatcgcggcgatgcagaaccagatcgccggactgaaagtgaagatccagggcctgcaggagaagaccggccgcgccaagggtgagcaccagcacctcatggagcggtgggacgccgtcgccgaggagatcgatgaggcggaggtcgcactggatgaggcggccgaggccgggcgcgaactcaccggggaacaggacgcctggctgcgctcccggttcaccgtcaccgacggtgagaccggtgatccggcggcgcggctggcccgtctggatgcgtcactggagtcggcgtcccgcgtcctcgaggaggaccgtgcctcggcgcagacgacgctggccgaccagcgcgcggcggtgcgtcggacgatggagtccttcctggacgcctggccgaacccgaacctgcgggccgatcccgatgcgtcgctgaaggacttcgagcggatcctcgacgacctcgagaccagcgggctgcaccggctggaaggggagtggaaggagagcctgctgcggctgtccggcaacgacctgacgaacctggactcgacgctgggccgggcactgcgcgagatccgtgagcggatcgagccggtgaaccggatcatggctgacctgccgttctacgacgacgaccaccggctgcagatcacgctgcgggagaaccagtccgaggtgcggcgccggttccgcaaggagctgcgcgaggtgcgtgcgctcatcggcgacgcctcgaccgacgaggagcgtgccgaggtgtacccgcggatggcgcggctcatcgaccggatccgccggggcgcgccggactacgcctcgctggtggacgtgcgtaaccatgtccgcgtcagtgcggagaagatcacggctgtgtccggtgagcatgtggcgctctacgaccacatcggtgagaagtccggtggtgagtcgcaggagctcatcgccttcatcgtcggcgccgcgctgcgctaccagctgggtgacgccgatgcggagcgtccccgctatgcgccggtgttcctcgatgaggcgctgatcaaggcggacgcgcacttcacggcccgggcgatcggtgcgtggcgtgggctcgggttccagcttgtcatcggtgcgccgatcgacaagtacagtgccatcgagccgcacatcgacgtggagtacgacatcctcaaggacacctccggtcgctcctgggccaagccgaaggtcggcgtagcgtag

SEQ ID NO: 49764 - DNA, 1500 bp, Arthrobacter sp. 11W110_air
atgtccttcaccgaaaacgccctggcgcaccgggcggaactgcagcgcctgcaggccgcgccaggctggcggctcacctccgcgaacccctgggtgctggcgctcttccgtgaagccttcccccgtacccggccccgggtgccgctggaggacttccacgacatgaccgacacgttcctcgccgccctgcgccgcgaaggcgtcgccctgcgcgaggactggaccggcaagaactacgccgacgactgggtggcccgccgcttcctggcccgtccccgcgccgacggccggttcgtctacgaactcaccgaatcctccgtccgcttcctctcctacctcgacgggttcaccagcgacaagacctcgctgaacagctcccgcctggccaccctgctctcccgggtcgagaacctcgcccaggaatccaacccggaccctgaagcgcgcatcgccgtgctccgcgaggaaatcgcccggcgcgaggaaatgatcgccgccctggaagccggcgacgctcccccgcccatggacgccgacgccgcgctcgaagccgccggcgacatcctcgacctcgccgcctccctgcccgccgacttcaagcgcatgcgcgacggcctggagaaaatgctgcacgccctgcgccaggaaatggtggaatccaacgccgccaagggcctgaccatgggtgaaatcctcgaagccgaccggaagctgcgcagcaccagcgagggccgcacctacgagggcttcaccgcgttcctgaacgacgccgaccagcaggcccgcttccggcaggccatcagcgaagtcctcgaacgcgacttcgcggaccggatgagccccgaagaccggcaggccctctaccgattgatcagcgacatgcgcgcccaggccgcggaaatccaccgcatctacggccggctctccgaatccatgcacacctacgtgcagagcgacgaataccgcgaatccgtgcagctgcgccagctcatccgcgccgccgaaaccgccatccacaaggcaccgcgcggccgccgccgcgccgccgtcgtgcctgcaccgaagctgtacggctccgccttcgagtccctgggcatggtgcgcctgttcgacccggccgaccaccgcgcccccggccggctgccggagccgcccagcttcaccgaaaccgacatccaccgcgccgcccgcaccccgcgcgcggaccgcaaggtgctaggcgccgccgtccgcaaggcggccgcccgccgcggccgcgccaccgtggccgaagtcttcgccgaactacccgccgaacaccggcacctgaacagcatccgcgccctgctcgcccaggcggccgcggccggcaccgttcccggctccgcggccgacggcgcccccgcagcctccggggccggcgtgcggtccgaatccgtctccttcatccagatcgacggcaccgagcgcaccgccgtgctgcccgccgtcaccgtcgcgaaagacccagaccatgagtga

SEQ ID NO: 49765 - DNA, 921 bp, Arthrobacter sp. 11W110_air
atgagtgagcccacccccgcccccaccgcgcaggacctgcccgacgacggcactgacctgaacacggccccggatgggcccgccgtcgaggttgaactcgaggacggcaccgacttcgccgaggccgccgacacggacgacgtcgacgccgatgacacggactccgacgcccccgccccggcccgcgacgtcctcgtggacggcccggagctgttccccggcgacaccggcaccctgccgctgaagctgcgccaggccctggtccggctgctgcgcggcccctacctggacgcgacctcctccgacaacgtctacaacaccgtggtggacaaccaggagcagctgcgcgcccggctcagcgaactgttcctgcagctggtcatcgacgaggaccgcaaggtcgccctgctccgcccggtggacatggccgagccgcacacccaggtgctgcagcgccagcgcgaaatgacccgcgaggaaaccctgctgctgctgcgcatgcgcctgctgctggaccgccacgccggcaccggcaacgacgccgtgatcgcccgccgcgacatggtcgaaatcctcgaacagtacgtggacccgggccagcaggacgccaagggcgtggaggacctcaccgacgccgccatccgcaagctggcctccgaacgccgcctgctgctgcccaccgagctggaggacacctgggtgatctcccccgccctgccgctcgccctgccctacgagcacatcggagacatcatcgccttcatgcagtccctcaccgagcccgacgacgacggcgcgcccgccgcggccgacggcaccgcagccgcggcgcccggcccggagatgacggagcccgacgccgccggcaccccggcgctggacctcaccgagctcgataccgccgtggaggagcaggcatga

SEQ ID NO: 49766 - DNA, 3357 bp, Arthrobacter sp. 11W110_air
atgagcatcgaaaccaccctgcccatgggggacctgatcaaccccggccagaaccgcctcgcctcggtgcagatcgtcaactggggcaccttcgacggcgcgcacaccatccacgtggaccgcgccggcacgctgctcaccggtgactccggcgtcggcaagtccaccgtctttgacgcgatcctgcaggtcatggacgcccggcccaaaatgaacgaggccgcacagaacaacggcggcaccaccgccgaggaacgccgcaccgcgttcagctacatgcgcggccggctgggcacccagccgacgtcggcccccgcttccgcgcccggcagcgccgacgccgcccccggcacggatccggtcaccggcaccgcctaccagcgccccggcgccacctggtccgccgcgtgcctgaccttcgacaacggcctaggccaggtcaccagcctctccgtgctgatggacctgcccgagcacggcaccgaacagcacgtgggccggttttacctgctgcacaaccgcccgctggacgtcgccgccatcgagaccggcatgcgcggacggttcaccaagggcagcctggaggcgctgctgcccggcgcgcaggtcttcgactcgcacaagctgttcgccgagcgctaccggcacgccctgggcgtggaggacgagaaggcgttcaacctgctgcgcatcctgcagaccggccgcggtctgggcggcaccgtcaacgacttcttccgcgccaacgtgctggaaacccccaagaccctcactgccgccgaggaggcggtggaggacttcagccacctgcgcagcatccgccgccagctcgaacgtgcccgccggcagcgcgaccacctcgccgaggtccccggcctgcacgcccgctacctcaccgcccgcgccgagctggaacgctcccgcgccctgctggaccgcggcctgcccgcctaccgccgcagcctcgccctcgctggacaggaacgcgaggtcgcccggctcaccgctgagaccgacgccgcccgcaccgccctggccgacgccgaaacccgccgcggcgaactcaaggacgccatggacgcgctccgcgcccgctacgcctccgagggcggcggcgccgtcgccaccctggaacgcgaactggccgccgcgcaggcccagctggccgcccgcgaagcggtggagaccgccgcccgtgcagacctggacgccgccgggctggacgccgacttctcccccgccggccttcagaccgcccgacgccgggccgccgaccaggtgcgctccctcgccgccgagctggccgccgcccgcgagcgcagcagcgacgcgcacggcgaggcgtgggccgccaagggccggatccgccggctcgaggaggagatcgcgtccttccgccgccggcgcagcaacatccgccaggacagcctggacctgcgcgcccggatcagcgccggcaccggcatcccggccgaggagatgcccttcgcgggcgagctgatcgacctggccccggaacacgccgcctggcgcccggccgccgaacgcgccctgcgctccctggccgtgtccctgctggtgcccggcgagcacatggccgccgtcacgaagttcctgagcgagactaacctgcgcggcttcatccgctgcatcgacgtctccgtccccgtggacgggcgcaccgatccggacgaggaccacctggtcaccaagctgctcaccgcccccggggccatgggcgactgggtacgccgcaagatcaccgcccactacgactacgtgtgcgtcgccgatccggccgggctggccgacgtcgaccgcggcgtcacccgcggcggcgcggtcaagcgcaacgccagcaccaccgagaaggacgaccggcacaccgatcccggcgaccaggtgctcggcttcgacaacaaggacaaggtcgccgccctggaggccgagctcgaggcgctgcagcgctccttcgaggaggcggacacggtctcccgcgagcaggcccgcgcccaggacgccgtcgccgcccggctggccgccgcgtcccgggtcgccgaggacgcccgcacctgggaggaactctccgcggacgcgttccgcgccgagctggccgccgccgcggagcggctggacaccgcccgggacgcgaacgcggacctggagcagatccgcttcgagctggagaccgcggagctggaccacaccgccgccgtcgagaaggtcggcacgctcaagggcgagctggcccgcctgcaggcccagctggacgccgccgtcggccgtcgcgacgtgttcgccgcccgcggcaccgaggccctggacgaggagctgcgcgccgcgctggaggagctgttcgccccctacggggaggcccgcgacgccgacgccgtcaccgcggccgcggccgccgtcgaacgtaagctgctcaccggcgccgccgcgcaggagaaggcgctgctggaatcgaagaaccggctggagcggatcttcgagacctacaccgagaagtggggctcggacttcggcacctcggtggacgccgccgaggcgtacgcggaccggtacgaggacatcgtcaccgagggcctgccgcagcgcgaggccgagttccgcgagtacttcaacaaccgcacctacgaacgcttcagcgacctgctgcagctgctggacgaggagcggcgcagcatctcctcgcggctgctgccgctgaactcggtgctgcgccgggtggagtaccacgccggcagccacctggagatcgaggtgaaggacagcattccggacgccgcgcacaagttccggcaggacctgaagaacgcgctgccgctgatgggccgccggcaggacaaggcggacatggacgcccggtacgccggcctggaggcgctggtggagcggctgaaggaccccgaggagaagcgctggcgcgccgaggtgctggacgtgcgcgcgcacgtcaccatcacctgcacgcaccggctgcccgacggcggggcgtacaccaacctgcaggcctccctgatgtccggcggcgagggccagcggttcaccgcgttcatcatggcctcggcgctggcctaccagctgggcatcgtgtcccaggggttcagcacctacggcacggtgatgatggacgaggcgttcgtgaagtcctcgctttccttcgccgaggcgtcgatcaacgcgctgcatgagttcgggttccagctgctgctggccgccccggaggacaaggtggacctgtcccggttcctgggctcggtcaccgagatcctgcgcgacgacgcgaccaaccgctccggcgcgctgcagcggtccggcggttcggtgccggtaaatatcctgctccgctga

SEQ ID NO: 49767 - DNA, 1554 bp, Ralstonia solanacearum GMI1000
atgcacgacataaaactccaaagggatacgccagccgatctgttccgccacatcagcgctgaaaaggctgtgctttatcgttgcgtgatggactgcttcgccgcagccaagcgccagttccggctgcacctgcgccccgatgagattttgaatgaaggcaattgggatcggataccggaacatgcccaaccacgtatcgaagaagtccaggcggcgctcgcgcaactgaccgaatggggcaacctcgaatcgcagccggatacgacgcgggtggccagcatcagtgacttttaccgtgcgcgtttcctgtatcggctgtcgcagggtggcgaggcagtggaagcagcgctgacgaccttcgagcgcacgctacgtcgccgggcggaactgcagaccgtagcgctggaagatatctcgaaccgcctgcaaaccctgttgtccttggcggatagcgccaacccggatgcggcgaagatacacgagacactgcgcgatctcgtccgcgtgttcgaaagccttgccgacaacgcccaagctttcatggccggcatcggacgcagcattgaactacagcaggccgaggtcacagcggtgctggcctacaagaagcgactgatcgattacctagagcgtttcatcggcgacctggtggggcgctccggcgacatcgctcaacgcctcgtggcgctgtcccctcgcgtcgactccctcctctggctggccgcacagcgcgaagcgcgggacagtgcgccagacgacgatccagaacaactcgacgccgtggcacgcggctggcaagcgtggcgcgaacgctggaaagggctgcgcggctggttcgtgacgaccggccatgaacctccgcaagccgaactgctacgctcgaaggcacgcgcagcaatcccgcagctgttgacggccgtgtcggcgctcaacgagcggcgcagcggccgtagcgaccgctcggccgacttccgcatgctggcgggctggtttgccgcctgcgaagacgattcgcaagcccaccgcctggcacgcgccgccttcgcgctcaacccggcacgccacttttcgctcaaccccgcgctggcgcccggtgtgcaggatctgcccgccagcacgccctgggccgaagcaccaccgctgcgcatccacccgcgcctgcgcgaatacggtgaagccgcgccgcgcggcgctctaccccgtgtgcaagcccgcgacgaacagcgacgcctgttggccgcgcaactggaacaagagcacgcagagatcgaagccgcccgcttgcgcctggccaccggccgcgccacgctgctgtccgaacttggcgcccttggcacgcatgacttcgcgctgttcctgaaactgctgggagaagcactgaccgcgcagatgtcgcccgacgcaccggtggaaacgcaaagcggcgacggtctcctgcacatccggttgcagccgctggccagtggcacccaggccatgatcacgacgcccgcgggcgtgttcagcggacgcgaccacactgtcaccatcacgcgaatggaagacctgccatga

SEQ ID NO: 49768 - DNA, 1251 bp, Ralstonia solanacearum GMI1000
atgagcaatgacagccacgacatcggccgccagcaagcgcgacaccgtgatgacgaacgcactcaggccctgcgcgcgctgctgatgactccactgatgaccccggcccacgagagcttcgccgccgtgcgccgccacgccgatgaactgcgcgcctggttcgcgcgcgaaaccggctggacactgcacatcgagcgcgactgcgcgcgtctgtacaagcgtcccgccgacctgcaggatgccagccgcggcctgcccggctacgaacgccggcgctacgtgctgctgtgcctagcctgcgcggtactggaacgcgccgacccgcaaatcacgcttcgcgtgctgggcgatcggctgctggcgctggcagcagatccggcgctggcctcgcgcaacttccacttcacgctcggcgccgcgcatgagaggcgtgaactggttgccgtctgccgcagcctggtggagctgggtgtactgcagcgcatcgcaggcgatgaagaaagcttcgtgcgcagcacgggcgacgctgcggatagcggcgatgcactgtacgacgtgcgccgccgcgtactcgccggcttgctggcggcggtgcgcggcccgtccacgtggcctgcggaacagacccctgtgagcctggacgaacgcctggcatcgttggtggccgagcacatgcctgacagcgacgacgggctacgtactgccctgcgccatgatctcgcacgccggctgctggacaacccggtggtctacctgaacacgctggacgccgagttgcgcgcctactttgtcaatcagcgcggcgccatggcgacccgcctgtgcgatgccaccggtctcgtggccgagcagcgcgccgaaggtctggccctggtggacgaagacggcgagttgaccgatgtcgcgatgcctgctgagggtacggaagcccacgccacgctgctggtggccgaattcctggcctgccgcagccgtgccgatgcgcagacgcccaccacgctggacgagatcaccgcctttctggccgacgccagaacgcgttatggcagctactggcgcaaatcggcgcgcgagcccggagccgagcgcgagttgacgactgttgcgctggaacgcctgctcaagctgcaactcgtggcacgcatggccgaccggattcagccgctaccggcactggcccgcttcgcgctcggcgagaccgacatccgcgcgccgatccgctcggcaacccaatccaatttgttcgaatga

SEQ ID NO: 49769 - DNA, 4131 bp, Ralstonia solanacearum GMI1000
atgaccgatacgcgatcccctgcactgcccatcccgaccctcgcccgttggcagccgctgcgactggggctggtcgagcttttccactatgacagcgaagaattctggttccgcgacggccgcctgctgctgcggggcaacaacggcaccggcaagtcgaaagtgctgtcgctgaccttgccttttcttttcgatgcgtacctcaagccgtcgcgcatcgagcccgacggcgatgccagcaaaaagatggcctggaatctgctgctgggtcgccacgagcggcgcataggctacgcttgggtggaattcggccgcgtggacgaggatggaaggcatcactatctcacgctgggcagcgggctctctgccgtggccgcgcgtgggcaggtggacacctggtttttcatgctggacgagcggcgtatcaatcaggacttttggctcatgagcccaacccgggtggtgctcacacgcgaccgcttgcgcgaagctctacaggattgcggacaatttttcgacaccgccgccccctatcgccgcgccgtggatgaacggctgttccgcctgggttcgactcgatacgctgccctgatcgatacgctgatccagctacgccagccacaattgtccaaaaagcccgacgaggccagcctgtcgaacgcgctcaccgaggccctgcccccgatctccaacgacctgttggccgatgttgccgatgcactgaaccagttggaggaataccgtcgagagttggaggagtacgaggcgctggagcgtgccgtcggccagttcaaccaacgctaccaacgctatgccgccacgcaggcccggcgtcaggcccgcaatttgcgcaccgctcaaaccggattcgacaacgctagccgcgaattgaacgccgcgcgcgaggcgctggagacgacccaagccgaagagcagcacgccgatcaggcatggcgacaggccgacactgtgctgaccaccaaccgcacccgcctcgaggaactgcagaacgaccctgcgatggccgatgccaagacgctggagaaggccgacgccgattcccggcagcgccgcaaggaagccaataccgcgcggcagacgtgctatgacatgcaaacccgcctggagcgcgagcggcaagccacgcgcacgcgcgcccagcgcgccgagcacgccggccgcgcgctcgccgagtcgcgcgaagatgcggcgcaggccgccgagcgcgcaggcctttcgcctgcctactcggccaacccattggcctgtgccggcgcccatacgctgcagccgctggcgctggacaccgcacgccaagacctgcgccgcgccagtatcgagcgacgcgagcaggtggcactgctgctgcgccgctgcgacgaagccgaccacgcggaacaaacccacgcacgcgcacagacccagcacgacgaacgtgccgacgaggcggaaaccgctgccgcacggcgcgaagaggccgataccgccgtcgatcggcagggccatacactgctcgacgcgtggcagcgctatctcgacggtctgcggcagctacattgccccgatagcgccgacgcattggaagcgctggcaccctggaccgtcagcctgcagggcgataacccggcccgcaccgcgctgcaccgcgcccagcaggccgcaagcctgcgtctggcgcgacgccaggccgcactgcaaaacgatcgccatgtgctggaacaggaacgcgacaccctgcgcgacgaacgcgcgcgtcttgaacagggtgaagacaccatgccgcagcccccgcactggcgcgcgcccgacatacgtgccgtccgcgcaggcgcaccgctgtggcaattggtggacttccgccccggcacgtccgcagccgactgcgccggcctcgaagccgcgctgcaagcctcgggcctgctcgacgcttgggtgacgcccaacggcatgctgcaggatagcgacggaagtcatgcgcaactgccgcacgacgcgcaatggctcacccgcgaacgccagccgcagtcgctggccgcctggctacgccccgcggaagcggcgagcgacgccccgccccgggtcgatcccaccgtggtgcagcgactgctcgagggcgtggcgtgcggcgcagaggacaatcccgccgccgaagcctggatcgcgcctaccgggcgcttccggctcggcgcgttggcgggcgtatggcataagcccggcgccgagttcatcggctacgcggcacgctgtgcggcccgcgagcgccggcagcacgaaatcgacgcacgcctggaagcaatcgacgccgccctcacgttgctggcacaaaattttgcccaactcgatgccgatcagcgcgaagccgccgacgaatggcaatgcgccccatctgacgacagcctgcgcgccgcacacgtcgaagctgtatcgcgtgcacgcgaattcgacatggcccggcagcgcctggagcacacggatcggctactgcgcgctgcggccgagcaatgggagcaggctcgcacaatcctggaacgcgatgccgaggatctgacgttgccgcccgcgcgcgatgccttgcgggccatcgaccaagcgctgcagatgtttggagactgcctgcacacgctagccgtcgtcgtgcgggagctgcgcgacgcccagaccgaacacgccgagcagttgcagcgtgagcaacaggcggagtccgatgcccggcatgccctcgagcaatccgccgagcgcgaggccctggccgacgaagctggcatccgcttggaaacgctgcgcgcatccgtcggcgccagggtggaagagctgcaacagcgcctcagcgacgctcggggcgccgtcacgagcggcgagaccgagctcaggcaacggaacgacgcccggcgcttggccggcgaagcgcgcgcccgggccgagcaaaaggccgaggcagccgacgccacgcttgtcgaacgcacaaccgcacgccagcacgccgtgggacagttgcagggcttttccgccaccggtctgctggtcacggccctgcccgatgccgagctgccgtccatgcacgcgccctggaccatcgagccggcactggcgctggcgcgacgtaccgaacaggcactgctccacgttaaggacgacgatgaagcctggaaccgcgtgcaaaatcaagtctcgcaggattacaccgaactcggtcgcgcactcgccgcgctgagccaccaggcccaggccgaaaccaacgacttcggcctagtcgtcagcatcatctaccaaaaccgcccggaacgtcctgaccagttgagtgcgcgcctggccggagaaattgcccagcgccgagaactcctcacggccggcgaacgtcaggtgctcgagaaccatctgcaggcagagatcgccagcgcagtgcaaaagctgctgcgcgatgccgaacgtcaagtcaaggctatcaacgatgaattggacaagcgccccacttccaccggcgtgcgcttccgtctgcaatgggaaaccctgcccgaaggtgctgatggcgcaccggtgggcctcgaggccgcacgccgccgcttgctcaacaccagcacggatctctggagcgccgaagaccgtcgggtggtcggcgaaatgctgcagcagcgcgtcgccgcggaacgcagccgcgccgatgcagaccagggcggcagcctgctggatcagttggcccgcgcgctggactaccggcgttggcatcgcttccgcgtgcaacgctgggacggccaatggcgcccgctgtccggtcctgcctccagcggcgaacgcgcgttgggcctgacggtgccgctattcgccgccgtctccagctactacacgcaggaaagctacgcccatgcaccacgtctcgtattgctggacgaggtttttgccggcatcgacgacgcggcgcgcgcgcactgctgggcgctgatccgcgaattcgatctggacttcgtggtaaccagcgagcgcgaatgggcctgttccgccgaactgcccggcgtagccatcgcgcaactgcagcgccacgaaggcatcgacgccgtacatgtctcgcgctggacctgggacgggcgaaaccggcggcgcgaagacgacccgaaccggaggttccccaacgcatga

SEQ ID NO: 49770 - DNA, 1305 bp, Ralstonia solanacearum GMI1000
atgagttcctccgaagccaaactccaacgcttgctcggcggtcctgcgctcttgcccctgcgtcaacgcctgcgtcgccacttcgagcggcagaatgacggcgaaacccgagcgaccctgcagctgacccaactccgcgccggcgagcatgaggccctggcgctgctcaccggacgcacgtcgcgacccactcgctcaatgcgcatcgacatcacgcagatcgatgccgcattgcagaccgccggcatctgccgttcattgcgcgaggcgctggagcgactcgacggcccgatcctgaaccgggcggccgcacgcgccgcgatccaggcggcctggtccgaggtgactcaaggccgggaggtcgacgcgcgactgcaagcgtggctggatacgccggccgccggcccccagctcaagcgcctcgcaaagcagaacactgccgcagccaaaaccctgctgagacaggccgacgcggtcttgcgcgacctgccagccgtgggactcgcacgcgcgcaactggctgcgcaaacgctaggcaatgcacatgcgctcgatgctggccagcctgtagcgagcatcgtgcttgctgcgtggcgctgcgcggaagcagccatggcgttatcccggcaagaggagccaaccgacccggagcgtgaattcgacgacgatgaagccgaagatcgcgacgacaaagcgcgccttgcccatgaacgcacccgcgacatctgggcacgagccggcgtcctggtcaacgagctggcgcgaccggcactgatgctgaatctgccaatcgttgaccacgtcacggcaagctggacggccggtgagcccgcttacctgtcactgcgtcaactcgtgcgtacgcccccagcctggaccgtcaaaggcacgcccgtcttcgtctgcgagaatcccaacctcctggcaattgccgcggatcgactgggcgcgcgttgcgccccgctggtctgcaccgacggtatgccagccgccgcacagcgcgcactgctgacgcaactactgcacgctggcgcccgtctgtactatcacggcgatttcgactggcctggtctgaggatcgccaaccatgtgatccgcacctggcgggccatcccttggcgcttggccgcgagcgactacaaagccgcagtgaaagctgcgccacacgtacggcgcgaccttgacgaaacggacgccgtcgccgtgtgggatccgttgctgacccctgctatgcgcgatcacggcctatccatcgccgaagaggcggtagcggatggattgatcgaggatttacggctcccctga

SEQ ID NO: 49771 - DNA, 1620 bp, Streptomyces avermitilis MA-4680 = NBRC 14893
gtgtcagcggtggtccgtacgctcggtggcatggaggggaacgaagggaagccggtacgcggtgcggaagccgatgccgaggcctggcagcggctgagtgcgtactcctacctcagcgcgcccgagcgcctggagtacgtcgcggtgatgcgggtgttctgcggcacgctgctcgcggacctgtccgtacccgacctcctcgcgaagctggccgagaagggcgggccgggagcagcgctggacgcggagacgctcacccgcaggctcgaagagctcgtgcgctggggcaatctgctgcgtagcacgcacacggtcagggcgacgagcatcgccgaatatcagcgctcgcggtcccgctaccagctgtcgaagctgggggagcgcgtacagcgcgacgcggacgaggtactggccggggccgacgcggcacgcgaggtgagcagcgagctgctggccctcgtcgaccgcggcctgcgggagatcgccgccatggccgcggcaccgggcggtgccgatccgcagcaggccctggagcggatcagcacgctcttcgtgcagttcgccgaattcgccgagtccgtccgggacttctacgcctacctgggccaggtgctggcgcgctacgacctcgactcggccgagtaccaggggttcaaggaactgctgctcgactacgtggaggccatcaccgaggacgtctccttccgggccccgcgcatcgcggcccacctggacgccgtccggccgcacctgcccgcgctgctcgaccgtgtcgacgcacatgcggcgggcatcggagcgctcgcccacgggctgaccgagacgcgggtgcagcgcagccgcgggcgggacctcgcggactgggagggtctgcgcgactggttcaccgacaccggagggcacggaagccaggtcgaccagctcagggacgccaccctccgcgcactggagtcgctgctcgccaacgccaagcggatgctgcgttcggcctccggtgagatgtcccgccgcaaggacctgctgcggctcgcggcctggttcgacgccgcggagccggaagaggcccacgacctggcggtcgccgccttcgggctgtacggcgcgcgtcatctcggtgtggcgccggaccccgaccggtccgtgccggcgtacgtgagttggtggaccggacccgtggtggacgtgccggtggcgctgcgcgagcgcggcagcagggctccgcgcgggcgtgccgcggcggccgaggaccattccgagcagaaacgccgcctcatggagcgggcgcggcagcaggccgaggcccgacaggccgcggccgacgaactgcgcagcgcctcgggcaggttcgagcaggtgcgcctcagcgccccggccatgcgactgctgctggagctcctcacgaccgcactcggcaacgcccagctgcacaaggacgcccacgacttcctgctcgacggcgcgcaggcgcacgacgcggacctcgacatccggctgaccgcctggcgcacgcccggcaggtccacggtcctgcggtccgtggacggcgacctgacggcggacgatctcaccgtggccgtcgagagcgcgtccgcgcccgcggtgggggaggcgagcgcctga

SEQ ID NO: 49772 - DNA, 1338 bp, Streptomyces avermitilis MA-4680 = NBRC 14893
atgcccctgccctccgcgcacgacgtcgcactcgcggccgaacgccacaccgccgcccggctcctgctggcccaacccctggtcaccggcgccggaccgcacagcgacgccttcccgctgatccgacggcacgcggactggctggcccagcgcttccaacaggtgttcggataccgcctgctggtggaggcctcgtacgcccgtctcttcaaggcgggcctcggccccggctcgggccaccgcctggaacgaccgtcgaccggaacgccgttcagcccgcggacgtacgcgtacctgtccctcgcgctggcggtcctcgtcaccgccccggagcagctcctgctctcccggctggtcgccgacctgcgggccgcggccgtcgacgccggcatcgagatcgccgacaccgggcggcagggcgagcgacggaccctcgcggccgcgctgcggcaactcgtcgactggggggtcctggtggagaccgagggacatgtcgcggccgtcgcggaggaacgggccggggaggctctgctgaccgtggaccgcgagatcgcgcgagccgtcgtcgccggcccgctcgcccagagccgcgacggcgcggacctcgtacgccgggccgccgacccaggcttcggcgggccccgtacgtacgtccgctggcgtctcgtcgaaacccccgtcgtccacctcgacgacctcacggacgcggagcgagaatggctgcgtacccggcagcggcgcgaggcgcaggcattctccgaactgctcggtctggaagccgagatccgcgctgagggcatcgccctggtcgacaccgaggacgaactcaccgacctgcacctgccaggaaccgggacggtggctcaagccgcgctgctccttgtggagcggctggtcgaccggctgcgtcccgaagacccgggccatccggcagtcggcggacggctggtcatcggcgtacccgtcccggacgggctgctgcccgccctgctcgacgaactgatcgaggagtacggcaggcgcagcaactggcagcgcggtcacctggaggaccgggacggattcctcgcggccgtactcgacctcctcgtccggatgcgtctgatggctcccgccgggcccgtacgcgcggaaggtcacggcctgcccgaggggtacggggagacggtggccgacgaccgctccgtcaccgatgtctctcaggcgcgcggccagggccgtacggacggggtctggatcctgctcgccgcagccgcccggtacgccaccaccgtggcggtcaaaccccgcaccgaccagcccccagcggacgacgtctccaaggagtcgccccgatga

SEQ ID NO: 49773 - DNA, 4200 bp, Streptomyces avermitilis MA-4680 = NBRC 14893
atgaaccgcccgccgaacccgcaccgctaccgactgcaccgcgcgggcatccggaacgtctggcagtacgacgagcaggagttcgccttcggtgaggggcgcctgctgcttcgcggcaagaacggcgccggcaagtccaaggccctggagatgctgctgccctacctcctcgacggtgacgcccgtgcgttggacgccacgggaacggggcgcaccaccctggcctggctgatgctcgacggcttcgagcagaccaaccgactgggctatctgtggctggagttcgtacggacggacgacgaggagaacgaccaccatctgaccatcggcgcggccgtccgcgcgtcccggtcgaccaagacggcgaagccgatcttcttcaccacgcggctgcgggtcggtaaggacgtagacctcgcccccgccggtcggccacttcccgtcgaccagctcaagtcgctcgtcggcccggagaacgtcaccgaccgtgccgtcgagcaccgggccagggttgcccgtgaactgttcggcctcaccgactcggcgcgctaccgcaacctgctccatctgctgcaccggctgcgccgtcccaccatcggtgaccgcattgactccggcgggctggtctcggtcctcgccgagaccctgcccgccctcgacgacgaggtcgtggagcaggtggcccgcagcctggacgacctcgactccgtcagggcctacctcggacgcctcgaacgcaccgaccgagctctgcggaccttcctcgccgactaccgcggctatctgcacgggacgctgcgccgccgcacgggccgggcgaacggagcgctggagcagctgatggagtaccgcacgttcgcgggtgacgcgacgcgcaacgcggaagggctccgcgagcgcgagcgggaactcgatgcccgcaccgaggcgctcgaaggtgaggcgagtgcagccgagacggacctggccgcgctgcacgccggcgccgggtaccgcggtgtgaaggaactggcggagaagcgcgccaccgtcaccgccctgcacagcgccgctgccgccgccttcaaggccgtccgccaggcgcacagcaatcaggaggaggccgggcggcggctcaccgacgagtcggggcggttcggtgaagagctggtcgaactgagcacgctacagggcgagttggtgcgggaggccgaacggtccggggtcgaccccgtgcacctgggggagcccgtggggacccccgccgcgccggtcgcgccggccaggacggccgaactgaccgcgccggaaggtgacttccacctggtacggcacagcgaggtgctggcggtcgacatcgagacctgtgcgaccgcgctgtatgcctgggacgcccggctcgacgccgcacagccggtgatcaggaaccgctcccggttcgtcaccgaactgcgcgccctcatggggcggtcggacgaggcccagcgggaggcgcaggcggccgacgccgcccgggagcgtctggaggaacaggccgaccacgcgcgctccggcgccgagcagcgtcggcaggaaaccgtgcacgagggagaggcgtacgcggcggcggcccgagcgtggaccgagcagctgcggagcctcaccggggtgcctgtggacaccgccgtgtccgctctggccgggcatgatccggccgacggtccgctgtccgctcatgcccccgacgaggtggccgacgcggcccggtcggccgtcgacccgtggctggcggaactgggcgaggaacgcgacaccctcaccctggccgcccgtgaactgcagaccgaacgggaccgtctgcggcaccggcgcgaggaatgggaacgccgcaccgaccccgagcccccgcccccgtcccaccgcgcggctcctcgcgcacccggcacgggagcgcccctgtaccggctggtggatttcgcccatgacctggagccggacgcgcgggcagggctggaagcggcactggaggcgagcggcctgctcgacgcctgggtgcgcgccgacggcacggtcctggacccggccacgcgggacaccctcctggtcccggcagcacccgtgccgggggagacgctcgcccgggtcctgcggccggtcgacgcgccggacagcggagtgacggcggagcaggtcgagcgcgtgttgcgggcggtggccctggccaggggcgggatcggcgccggcgaggccgacacggcgggcgcggcgcacaccgcgatcggcgtcgacggctcctggcggctcggcgtggcccgcggccgccacgccaagcaggtcgccgagtacgtgggcgcggaggtgcgggcggagacccgccgccgggcgctggcggaactcgacctccggctgacccgtgtacaggatgagctggcggaacgtcagcgtagtctgcgcatgctcacccagcaccgcgaccaggtcggggacctcctgcgccgaccgccctcagcgcgtgggctgacggacgcgtgggcccgtaccgccgaggccgagcggaccgccgaatctttcgccgggcaggcggccacggcagcccgcgaggcggagcaggcacgggccggcgcggtcgtcgcccggcgtgaggccgaggcgacggcgagcgcccaggacctcccggcggacccggccgcactcgaaacggtccgcctggccctggaccgcctcgggcagggggcgcagcgactgcggcgccgggtgcgcgcggtcctgtccgcggccgacggccatcgcggcagccggacggactacgggcgtgccgagtcggcccgccgggaggccgagtcggactacgccgagccgctcggccgcctggaggccgcccgccgtaccgtccgtgctctggaagaggccatcggcgccacggaacaggagatcctcgaccgcgaggcggagacgatgcgccgcctggacgccgtgggacgccaactcccgcgcatccgaagggacctggccgacgtgcatgacctgcgcgttcgggcggaagaggaggagagggcacggcgcgaggcactcgccgaccaggaggccgaggcgttggcctgcggcaggggactgcgtaaggcccttgcgctgccgggtgtgctgagaggagcgggtctcgacaccgacggggacgaggtcgcgctgaagtccccggaccccctgcatctcgacgtgcgggagcgtatcgcggcgctgcgtctgctggtcgacgccgtgcgccgcggcctggacgccgaacgccacgacatctcggacaccaccctcctcaaccgccacaccgacctgcgcgaccagctctccggaggctacgacgcgacgatcgaggaacatgacggcatcaagctgtgccggctcgtcgacgaccacggcctccacgacatcgccgtggtcggcgagcgcatcgcggccgaggccgccgaggcacgtgaccgtctgacagagcgcgaacgcgaggtctttcagcgtttcctggcgggcgagttgggcgaccacctgtcctcgcaggtactggccgcgggcgccctggtcgccgccctcaacaccaccctcgccacggtccgtacctcacacggtctgggcgtcgccctcgactggaagctggccgacggtgtggaggcggacgtcaaggcggccgtcgacctcctgcgcagcccctccgggctgcgcacccgcgaacagtccgagcaactccgcgacgtcctccagcgccgcatcgaggacgcccgccgcgccgacccggccgccggatacgcggctcacctgcgtaccgccctggactaccgtgactggttcgccttcaccccctgggtggtgaacgacgcggcaccgggcagccgccgtagactctccggccgcacgggcctgagccagggcgaacagcgtgtcctctcctacctggtcctcttcgccgcggcggcggcgcacttcaccagcctcgccgacgccgccccgcacgcgccccgcctcatcctcctcgacgacgccttcgccaaggtcgacgagcccacgcatgcccgcctcggccgcatcctggtcgacctggacctcgacttcgtcctcaccagcgaacgactgatcggcaactggcccgacgtaccgtccctccacatctacgagtgcctgcgcgacccgcatgtgcggggcgtggccacactccattacacgtggaacgggcggcagcggaggctgatgtcggtatga

SEQ ID NO: 49774 - DNA, 1338 bp, Streptomyces avermitilis MA-4680 = NBRC 14893
atgacaggacccgagcgagccgacgtacgtcccccggacgccgacgccctcgcgtttctcacccggccgggcctcgcccgcctctggacggccgtacgcacccggctcgaacgcaacggccttcggccggccggagccatcagactggaccagctggacgcacgggaacgtgaggccctgtccctcctgctggccagacccgtcaccggcctcaccgtcacgatgcgcctgacggacctggacacccgcttgcgcgccagcgcggtcggacggggcctggtggccatgctggaagaactgggaccacccctgacggaccgtcgggcggtccgcgacgcggcggcggccgaacgcgcacatgtgtggtcgacggctcggtccgagctggaagccacgttgctgtccgcccagccctgggcggcacagtggttggaggagatccgacgcggcggcacactcgcccgccaggactcgcacaccgcgatcacggtcatcacccaggcgatccagaccctgggggcgctcttccccggcacgaaccaaccccccacccccgccacctggggccgcggcgaactggccacccgcaccaccggttcggcccacggcctggacgacggcacactgctgtcccggctggtcctccgcggcatcgcgctggcacgcggcgtcgagtcccccgccgacgcgccggcccgccgggccctgtggcgcatggcctcggtcacccccgacgaggtctccagcacggtgctcacctacggcctgcgccccaccggcggcacctggcgcgagcgggccctgcgcgagcgcgccgaccaccacatggaaacccacctgaccctgcgcgaactccgcgctctgcgcctggaggtgccaccgcgcacccgcgtccacgtctgcgagaacccccgcgtggtcgaggccgcggccgacaccggcggcggtacggagcccctgatctgcacctcggggagcgcgacgaccgtcgtcctcaccctcctggacgcgctggcggcggccggctgcacgttcgcctaccacggcgacttcgactggcccggcatcgcgctggccaaccggatcaggcaccggtacgcagccgagccctggcgtatgcgggcggccgactacgagtacctcgccacacgagctcagttgcacggcactccgcagatccccctcaccggcacaccgacggacgccgagtgggacccggaactgaccccgaccatggccgccctgggcatcgccttgcacgaggaggcggcgctcgatctgcttctggaggacctcggtacctccgtcggaacccacccgtccggcgattccccatga

SEQ ID NO: 49775 - DNA, 1491 bp, Geobacillus kaustophilus HTA426
atggacgccacgtggttgaagcccattgtcgaaacaaaatatttatcgacggaaaacgcgcaccgctaccgggcgattttgcgctatttctacattcagcacgagcggatgcggcaatatttgtttccggaagaagtgtacgcctttttaaagcagcacgaggagtttgccgattacactgaggaagagctgcagcaagacctcgaccagctcgtgaaatggaacaacttgatcgcccgtcaagagacgtcccacgtgcggacgattgaagagtttaagaaaaagcgattccgctaccaatgcagtccgtacacggtggagatcgagcggatgatccgcacgcttgagcagcttggggattcgttcggaggatcgcttgagaaaacgcggtttgaccgcttgtatgcttccctttcccgcatcgaggcgatcatcgcctccgggtttcaggaacagagagatgaaatgtaccaagtatgggaagagacgttcgattatttcaagaaaatcatccaaaattccgcagactatatggcctatttacatagcgaaaacgtggaagagcggatgacgtctgagtcgtttctcgtctataaagagcagtttaccgcgtatttgcgcgattttatcgtcgccttgcaaaaaacgtcgatgcaaatcgaacaattgctggaaaacttgccggaggatggggttcggcagttcatcgggcatgtcgtcgactatgagcggtcgattccgcgctttgccgatgcgccgccgccgcgtccgatgcagattgaagaaaaatgggagacgtggcgcagcttgtgtgaatggtttttaggccgcaacgggcgcgagagtgagcttttgtttttgcaatatcagacgaatgaggcgattcgccgcctgacgcgcgtcgtgcagcggcttggcgagcggcatcatcattttcgcagccgcaaaggcgactacttgcatttggcgcggtggttttcccgccttgaatcgattgaagaggcgcattgtctgtcggcggtcgtgttcggctgtttccatacgaaacatctcgtcgctgacacggaagcgaccgacaacatataccgcgatgtgtgggacgagccgccagccgagtgggtgacgaaaccgcgcgtccgccattatggggaaaagaaaaagccgcaggcgattgaagacaaagaacgggagaaagaagaagcgcgtcttcgctatttggaagaaaaagcgcgcgaggaagccgagctgaagcaatttgtgaccgacgggaaaatcgtgcttgccgaccttcctgaggtgaccccatacgtacggaaaacgctgctcggctggatcgccaaagcgatggggcgcgaggggcaagcaatgaagacggaaaacgggtgggttgtcaacgtggtgaacaaagaggggacgatttgccttcgcgcagaagatggagaactcgtaatgccgaactacgaaattcatgtgctttcgcgaggtgagtga

SEQ ID NO: 49776 - DNA, 1197 bp, Geobacillus kaustophilus HTA426
atggaaacggcgtttgacgacaaggcgaaagaggcgctcgccgcgctgttcgaacaattttggatcattcgcgacaaagagccggatttgtatcagctcgtccgtgagcgcgaacatgtgttgaaaaagtatgtggaggagaagtttggctatcggctcatcgttcaccgctattttgccaagctcgagaaaattcccgccgaaccggagccgtggatgggcatcgagtcgtttcaagagccgcttgactatgcgttgttttgctgtttgatggcgtatttggaaggaaaagcagtggaagaaaagtttttgctttctgacgtatgtgaagaaatccgcgccatgtacccgggtgatctaccggtcgattggacgaactattcgcatcggcgcgcgctcatccgcgtgttgaaaacggcggaacaaatcggactcgtccgccggatggatggggagattgaggcgttcgcccagcatgtggaggaagaggcgttgtacgaagtgccagtgttggctcgttattttatgcgcacgtatccgaaagatttgttgcaatatgaatcgatcgacgaattgctcgccgaggagtggaaagcatcaccgcaagattatcggcgccatcgcctgtatcgaaagctgtttttatccccggcggtgcaccggacggaaggggacgagcaagacttttactacttgcgcaacttccgccatcggctgcgggatgatatcgaagcgcatacgccgtttcggtatgaattgtacaaaaacgccgccatgttgacgcttcccgaacggcaggcgccgtacaccgtatttcctgatcagaaaggaacgtcggaggtcatccttcattttgccgccttggtgcgcgagcggcttggggaatatccgccggatgaatacggccgcatacgattgacgcctgaacaattttccgcctggcttgccgattgccggcgccgctacggggctgggtgggggaaaacgtaccgcgacatgtcggctgccgagcttgtccgcgaagtgcttgcggcgctcaacgaatggcgcatggccgatgtggagcacgacaccggaatgatcgtcctttatcccctcctcgggcggatgtcgggacggtatccggatgattttgacgcgaaagagggaggagaacatggcgaatccatgggtgcttcatcgtgcggggctgattaa

SEQ ID NO: 49777 - DNA, 4122 bp, Geobacillus kaustophilus HTA426
atggcgaatccatgggtgcttcatcgtgcggggctgattaatttttggtattacgacgagcagtattttcatttcgctgacggtaagctgctcttgcggggaagcaacggggcgggcaagtcggtgacgatgcaaagcttgatcccggtgcttttagacggcaagaagacgcccgatcgcctcgatccgttcggttcacgggcgcggcgcatggaagactacttgcttggggaaaaagatgtcgtcaatcgcgatgagcggaccgggtatttgtttttggaatataaacggaaagaatccgaccaatacgtcacaacgggcatcggcctgcgcgcgaagcggcaaaaaagcctcgatttctgggggtttgtcctctttgacaaccgccgcatcggctatgaccttcagttgtataaacaagaaaaaacaggtgaaaaaatcccgctgaccaagcgggagctggccacagcgctcggcgcgggcgggacggtcgtcgagacgcaaaaagactatatggagctcgtcaataagcatgtgtttcgctttgaatcgcttgaggcgtttcaagaattgatcgagctgctcattcaactgcgcagcccgaagctgtccaaagactttaagccgaccgtgatttatgaaattttggaaagctcgctgcctccgttgaccgacgacgagctccgccatttatcggacacgatcgaaaacatggaccaggcgaagcagcagcttgagcagctcgaacgcgacgagcgggcgttgaagcgtctttgcgatcaataccgcctttacaacgaatatatgatcgccgaaaaggcgacagaatacgtaaaagcggtcaagcaagctgaacagctcgctgctgcacaacaccgccttcacgatgaagaagagcaggcgcgaaagacgcttgatgagcttgatgagtccatcacccgcctccgccgtgaagaagacgtgctgcgttcacgcgaaatcgacttggctggccacgaagtgttccagcaagcggagaagtatgaacagttgaaatcggagagggagcgtctgcaggagcggtgggagcggcacgagcagacgatcgcggaaaaagaacggctggaacgccaacatcgccgccgcctcgatgaatcggaagcgcggctggatgaccttgaacggaaacttgaagacgagttggcgcagctgcgagcggatgcggaagaaggagccttttctttgcatgaaacgaacgaagacgattttcaccgccatcgccaaaagcaacaagagttttcgtttgccgcttggaaacaggaagctgaccgccatatcgagcagctcgaggagttggcgcgcctttggcgcaggcatgacgatgtgaaacgacgctatgaagaagcgagcaccgaagcgggcgagcggcggcgggaaatggacgaatggcgtcatcagcaacagaaatgggaagagctgctcgagcaggagaaagagcggtttgaacaagccgtgcttgcctgggtcgagcaaggaggaatcgacgtttccgaagcggacattcaggcgtttttgcgacaaatgggcgccctctatgagctgtattcgctcgatgatctgaagcgcccgttcgttcaagcgtattacgatgccgtcggtaagaaaaaggatgagaaatggcggctcgaacatgacatccgtctgttggaagagaaacgggcagaacgtgaggccgaactgcgtcaatggcgggaacaacgcgaccctgaacccgaacgggatgaacaaacgacagccgcccgcttggcattggaacgggaagggattccgtttgtcccgttttatgccgcggtcgaatttgtcgacgatgtgcctgacgatgtgcgcgagcggatcgaatcggcgctttcgcacgctgggttgcttgacgccctcattgcggcccgcgatgtcgacgtcgactgcgaccgtgtgctcatcccgaaaccggttcatatggtgcatacgttggccgattatttgcgcccagatgcggatgcccctgtgtcggcggagcggattgacgaagtgctccgaagcatcgtgatcaccgatgcggaacaagaaggcggcatgacgatcgacgaaacaggacgctattcgctcggccttgtccgtggccatgcgccgcggagagcgcgggcgatgttcatcggccgtgcggcgcgggagcggtggcggcttgagaacatcgcggcgctggaagccgagatcgccgctgtgggacaagagatcgaccgtctacgtcgtgagcatcaggcggtgggagcggccatccaagcgctcgccgactggttggcgtccttcccggcggaccgcgatgtgcgcaccgcgtttgaggaagggcaagaagcccgccgccaagcggaaagcaaagagcgggaatggaagcggcaagaagaaaaagcggccctccttgcgcgcgaatggaaacaaatcaaacagcagcttcgtgacgaatcggctgagcttgatttagccttcaccttggacggctgcgaacaagcccagctcgccatgaaatcgtacgtccgccatttgcacgaactcgaagtgctttaccgcgaaacgcgccataccgaggccatgatcgcccaacagcgcgagcggctcgcggcgctggaaacggagatcgacgaagcgaaaggcgaacgaaatcggattcgggatgaaaaagagcggatctccttggagatcgttgagatggaacggacgctcgcacaaatgggagcggatgacattcgcgccgaaatcgcccgcattcaagaacggttggcgtctttgcgccgcgaaattccgcgccttgtcaacgaacgggcgcggacggaacagcagctcatgcgcctggccgaagaacgggaaaaagaggcgcggcgggaagcgttcgcccgcgagctcgccgcgatgtgggaaaagtcgtttgcccgtgaagcggcgcttgggcttgtggatcttgatcgttcccgctccctcctggagcaggcgaaagaagcgaaacaacggtacgaagcagtgttaaaagagacgcgttcctcgcttctggcgcggctgaacaccgtctttttccaagagtcgtccaacttgaccgaatatcgggcgtccttcgagccgctggaagaacaaacgaagcccgaatggaccgccgctgccccagacgatgagatggccatgaaagccgcggactggcgggagaaacaagaacggcacgtcatttacctcgactacaaaggcgagcgcgccacgccgtttgcggtgctggcggaagtggagcgcgacatcgtcttgcagcacgagtatatgaaagaacaagaccgcgagctgtatgaggacgtcatcttaaaatcagtcggccgcattttgcgcagccgcattcagcgcgccgaacggtgggtgaatgatatgaataaactgatgggcggcctcgacacatcatcagggcttgtgctgtccattcaatggaagccgaaaacggcggagacggaagcggagctcgatacgaaagaattggtgcgcctgttgcggctcgatccgcggctgcttagagaggaagatttacagcgagtgacgaaccatttccgctcgaaaatcgcccgcgcccgcgaattgcttgaagagcgcggccaaggcagcacgctccatcaaatcattaaagaagtgctcgactatcggaaatggttttccttcactttgtactatgaaaaaacaaacgagccgaaacgcgagctgacgaaccaccgtttttaccaattcagcggcggggaaaaggcgatggcgatgtacattccccttttcgccgcggcgtattcgcgctaccaagaagcgggcgatgacgccccgtacatcatctcgctcgacgaggcgttcgccggcgttgacgaaaacaacatccgcaatctgttcggccttgtcgaacagcttggctttaactatatcatgaactcgcaggcgctttggggcgactacgacaccgtgcccgctttgtccatttgcgaactcgtccgcccgcgcaatgcatcgtttgtcaccgttattcattaccgttggaacgggcgtgtcaaacagctcatggttgatgacaaagaatgggagatgatcaaaacgtga

SEQ ID NO: 49778 - DNA, 1221 bp, Geobacillus kaustophilus HTA426
gtgagcaccgtcaaagaagcggccgcctttttccgctccgaacagggctttaagcggctgtttgtcgaaatgaaacgcaagtacgagtcgctcggccgcgtcggcggcgcggtttcgttgcagtcgttctccaaggaagagcgggagtcgatcgccgcctttttcggcaaagacgtctcccgcgtctttctctccgactttgaaaaacagctcggacagacaaggtttgcgggtgttggactcgtcgaactgctcgaacattatttcggcgtcccgcttatgtcgaacaaagaacggcgccaggcagaggcggaagagcgggagcgttttttcgcacgccttgcagaggaacatcattggttcgcggccgtccgcggccaacgcttcgtccaaacggcgtacgaagccgaccgcggcggccttgaggccgccgtccgccttgtcggcgccgccctctgccgcctcccgctctcttcatatatgcgcctcccgctctttgcccagcaagtggccagcgacccgcacgcgttcgatttgtccactcttccagggagattgttgttgtccgccttgcaagcgacgacaccaggccagtgggatgtggcgtccgtagagagtgtcaatgaactgttgcagtccgtcggcctgctccgcgaagatattttgaactttgtcacatgcgccaacatccttgctgaaaccgagggcggcccgcatcccgtcttctccgccgcctcggagacgaacacggcgctgaacatgccgcttagggacgttttgtcgcttgttggcgcccatcccgcccgcggcaagacggtgtacattgtggaaaacgccggtgttttttcgacgttgcttgacacccgcgccccgcttgtcagcacgaacgggcaaatgaatttggcgacgatgaagctgctcgatttgctcgcggcctctggcgccaagctgtattattccggcgacttcgatccggaaggattggccatggcagagcggctgcttgaacggtatggacaggccgtcacgctctggcgcttttccttggacgattatgcggccgccaacccagtcgttgaactcacacccgagcgcctcgccaaactcgcatccgtcacatcggaaccattgcggccggtgaaagaagccatcgggcgaaagaaaaaagccgggtatcaagaggcgatcattgggaggttgacaggggatatcaacgggtag

SEQ ID NO: 49779 - DNA, 1611 bp, Nocardia farcinica IFM 10152
ttgccggcgccgttcacgacattgtggactcggtgcccgatcgagcaggaggtgagtgcggtagccgaggaagcgggggcgccccggccgttcgcccacgtccatgccgcgaatgcggacctctatcgcgcgatcatgggttcgttcgcggcggccaaacgccgattcaccgtgcacctgcgccccgatgatgtattgcacgcgctgcgggccgcgcagttccctgccgacgagcagtcggtggcggccgcgctggatcagctctgcgagtggcgcaacctgcgcgccgatccggataccagccgggtgacgaccgtcgaggacttccgccgggcgcgcttcctctatcagctgaccggcgagggggaggccgctgagaccgcgctggtgacttatgacgaggcgctgggacggcggggggcgctgcagtcggtggcgctgaccgatatcgtcacacatttgcgggcgctgttgcggctggtagacgatcctgtcccggacgagggactggtgtacgcgtcactgaccgcgctggccggccggttcgccgatctggccgacaacgcgcaggcgttcatgagttcgctgcagaatgtgaccgatctgcaggacgcggagatcgaggccttcctctcctacaaggatcggctgatcgactatctggagcggttcatcaaatccttggtgacgaccggggccgagatcgcggtcctgatccgggaactcgacggtcaccgggtggatcggttgctcgatctcgcggcggagcgggaagccgccgacgccgcccccgacggcaccgacgactaccgggagcgcgccgttatccggcaccggacgttgtggcgggaacgatgggacggcttccactcgtggttcatcggccgggacggccggaccgaacaggcggccctgctgcgcggtgcggcgcgttccgcggtgccgcgggtgctggcggtggtggccgcgctcaacgaccggcgggcgggccggtcggaccgatcggctgatttccgcaccctcgcggtgtggttcgcgcaggctcccgacgacgaggcgcggcatgcgctgtggcggtcggcattcggcctgcattcggcccggcatctcacgatcgacgccgatacggtcgaggcgcgcgaacggcagccggtcgcgccggccacctcgtggacggacgcgccaccgatcgagatcagtccgcggctgcgcgcgaccggttcctatgagcgccgcggccgggcgaacaaggtgatcgaccgcagcgtcgagcgccggtatctggccgagctcgccgccaaggaggccgcgcagacccggcaagcgctggccgaactcacggctgtggccggccacccggtccggttgtcggcggtcggcgccttgaacgaaaaagcgttccggttgttcctcggtctgctcggcgacgccctgaccgccaagtcacccggcagtgccgaggtcaccaccacaacctccgacggcagcgtcaccgtccatctgaccgagctgcagtcaggcgagaccgcggaaattcataccgctgcaggtgttttccgcggacccgatcatctgctgtggatcgaggtccgcggcggcggtgccgcatga

SEQ ID NO: 49780 - DNA, 1233 bp, Nocardia farcinica IFM 10152
atgagcgcgctcaccgacgcgttgcacgccgaccgcgaggccgaacagcgccgcgcagcccgggccgtgctgcggaatccactgctgcggtccaccggccggagtcgggagctgttcgggctggtcaccagataccagcgggaacttcgggcctggttcgaccgggaaaccggctggcagttgacggttaccgcggaaaccgcccggctccgcaagatcgctaccggccccgatccgtcgtatccggcgctcgagaccgccggatcccggttgccgttcagccgccgccgttatgtgctgctgtgcctggcgctggctgccctggaacgctccgaggcgcagatcaccctgggccggctcgccgaacaggtactgctgggctgtgccgatccggccctgaccgcgaccggtctggccttcgccatggaacgccgtgaggaacgcgcggacatggtggcggtggtccggctgctgatcgagctcggcatcctggagcgggtagccggggacgaacagtccttcgtgagcaccaccggggacgtgctctacgacgtgcaccggcggacctcgtcactgctgctggccggtccccgcggtccgtcaatgctcaccgccgccgacgaccggtgcgcggctctcacctgggaagccccgcccgccaccgatgagctgcgcgtccgccggatccggcatcggatcacccggatcctgctggacgaaccggtgctctactacgaccggctcaccgcggacgaactggcctatctgaccggtcagcgcaccgcgctgtgccggcgaatcaccgagttaaccgggctgctgccggaggtgcgggccgaggggatcgcgatggtggatccgttcgacgatctcaccgatgtgcgcatgccggaggtcggcaccaacgggcatgtcaccttactgatcgccgagcgactcggccgttcgatcgggacgccggccgcgatcgccgacctgcacgccatggtgcgggaactggccgtggagttcacccacagccgggtgtggcgggccgacgctgccgatccgggcgccgaaaccgagctggtgcgcactgccttgacgaaattgtcggccttgcggctgatcgagtacgaccccaccggtgatcgggtgacaccgctgcccgccatcgcccggtacggtgtggccgcgcccaccgtcgccgaacccggcacccctgcccgccgaccgtcccggaagcgccgatga

SEQ ID NO: 49781 - DNA, 4149 bp, Nocardia farcinica IFM 10152
atgagcaccgacaccaccgattcgagcccgctgatcaccgcccccggactcccccggccgaccactcggcggtggaaaccgctacgcgcgggactggccgacctgttctactacgacaatcaggagttccggttccgggacgggcgactgttgttgcgtggtaacaacggcgcgggcaagtccaaggtgctggcgctgttgctgcccttcctgctcgacggtgagctggcgccgcaccgggtcgagcccgacgccgattcccggaaacggatggaatggaatctgctgctgggcggtgaacatccgcattcggagcgggtcggttacacctggctggaattcggccgggtcgaggccgacggcaccgaactgttctgcaccatcggctgtggattgaaagcggtggcgagccgtggaatcgccgcgcactggtatttcgtcagttcggcccggatgggcgtggggctgcgggtgctcgatgatcagggatatccggtcagccgggaccggctgggcgagcagctcgtcggcaacggtgaacgctacgacaccgctggcgcatatcggcgcgcggtcgacgaagccctgttcggtctcggcgaatcccggtacggcgtgctggtggatctgctgatccggttgcggcagccgcagttgtcgaagaagccgagcgagaaggtgctctcggatgcgctgaccgaatcactaccgccgatcgatcaggccatcctcgccgatgttgccgaggcgttccgcagcctgcaggaggaccgagacgaactcgccgatatgcagtccgcgctcgacggaacccggaactttctcacccattaccgcgagtacgcacggacggcgagccgccgccggaccacccggctgcggcaggcacattcacggtacgaacgcgtcggcaaggatctcggcggggccaaggacgctttggccaccgcggacgacgaactacggcggctgcgcgccgatactcgggacgccgaggatcagcgggagcggctggccgaacagcggcaggccctttacgacagcagcgcggccggcgcggcccgggaactcgaacgggctcgggaccaggcccgggacgcgcagaaactggctgccgaccgcgcaggcgaccataccgaagcgcagcagcactacgacgcgttccgcacccgagccgacgaggaacaggaaactctcgccactacggacacggaattccgcgccgcccgacaacaggccgcacacaccgccgcgcaggctctgctcaccaccgcgcacaccgccgatatcgacgccgctctcgatcggcagccgctcggcgagacggcgccgctgcgccgggcggcggaccggatcgccgccctgcaatcggcggcgatcaagaaactgcgcacactcatcgccgccgtcgataccgccgagcaacggctcaccgcaacccgcgcccggatcgacaaactcgacaccgacgcggccggcctcgccgaggcggcccggctcgccgaacaggccgttgacgccgaggccgcccggctcaccgatagcacctcgacatacctgcgcgcggccaccgagctggccctcgacgatctccccgcggtcctcgacgatctcaccgcctgggcccggatcctgaccggtgagtcgccggtgcgggtcgcggtggcggcgcgggccagtgcgctcgccgacgagctgacccgcgccgaatccagcctggaacatgaggaatccgtgctggaggagcagtgccgcgcacaccgcaccgagctgaaccggctgcgggagggcggtatcgaatatccaccgacccggcacacccggtccgcactcagcgacagcgaccgagacggcaccgcgttctggcagctcaccgccttcgccgaccgagttcccgaaaccgaccgggccgggctggaagccgccctggaggccgcaggaatcctcgacgcccggatcggcgccgacggcacactgcgcgcggtcaccggggaagttatcctctcccccgaaaccgttgccccgggccgcagcctcaccggtgtcctggagccggcactcgaccccgccgattcccggaccgccactctcaccccggcggcagtgacggccgtgctcacctcgatcggtctcggcaccggcagtactcaccacacctgggtcgatgtttccggcgatttccagatcggggtcctgcacggcgcctggaccaaaactgacgcgcagtacatcggcgcggtcgcccgggagcgattccgcctggcacggatcaccgccctcgaagccaacctcgacacgctggcccgacagctcgccgaactcgcggcacagcgccgggcactgaccgaacgtaagcgcgcactgcgggcggaagccgccgggctgcctgatgaggaggcgttacggggcgcgcatcgccggatcaccgaagtcgccacccagcgacgccgactgaccgcggaactcgccgacgcggccgccgacgcggcccgggaagaagccgctgtgcataccgcgagcaccgagcgcgatcggtacgccggcgatgccgggctcccggtcacgccggatgcgctggacgatatcgccgaggcgctcaccgactaccgcgtccataccgcagcgctctggatcgccaccacccgccggaccgaagcagccggtcgcgccgaaacggcccgagccgacgccgaacaggcccacaaccggctgctgctccgcgccgaagccgccgaagccgcccgtatcgacgcgctgaaagccgacgaacggcaccgaaccctggacgcttcggtcggtgccgaagttgccgaactgcgagccgaactcgcccgcgtcgccaccgcgatcgaggacaacaaacgccgccgcggcgaactcgcgaccgccctcgaaaccgcggtccacgcccatggcatcgccgaaggcaaactcgccgaactcaccgaacagctcgacatcgaacgcgccgaccgggatcacgagatcaccgcggtccaccgattcgccgaaaccggactgttcgagatcgcgctcaccgataccgcggtaccgacagccgatacctggtcggcggccgcggccatctccttcgcccgggccgccgaaagcgaactggccgaggtggccgaggacgacaagaccttggaccgggccgcgcgccggatcgccgaagaacacaaaactctcaccgatctgctcagcgcccagggcaacacgacgtccatgactccccgggacgacggcttggtcgtcgatattgtgttccggggtcgcccggtcaccgtcgccggtctcgccgaaaccctcgaacaggaggtcggcgaccgcaaccggttgctcaccgcccgcgaacgggaggtgctggagaatcatctggtggacgaggtcgcagccgccctgcaagaactcattctggccgccgaggaccaggtgctccgcatgaacaccgaacttgcgtcccgccccaccagcaccgggatgaggctgcgcctgaactgggtgctcggcgacgaggcgcccaccggcgcgcgggccgcgctgcggcaactgcggcagaccgcggacctgtggaacgagaccgaccgggccgcggtcggcgagttcctgcagcaggagatcgaacgggtccgcgccgaacacggcgtcgggacctggctcgaacacctcaccgccgcgttcgactatcgccgctggcacaaattcgtcatcgagttgcagcagcgtgggcagtggcggcccgcgaccggtccggcctccggaggcgaacgggtactggccgccagtgtgccgctgttcgccgctgcctcctcccactactcgtcggcgggcaatccacatgcaccacgcctggtgatgctcgatgaagccttcgccggagtcgatgacaacgcccgagccaaatatttcggtctgctggccgcgttcgacttggacgtggtgatgaccagtgaacgggaatggggttgctaccccgaggtacccggcctggccatcgctcagttggcccgcaccgacgaggtcgccgcggtgctggtgaccccgtgggagtgggacggcagcgaccggcatcggatgaactaccccgaaccggcggcggcagctgcggcaggtgccgatgctcccgccgatgcggccggcctgttctga

SEQ ID NO: 49782 - DNA, 1260 bp, Nocardia farcinica IFM 10152
atgagcatcgacgaaccccggttgcggcgaatactgggcggccccgagaccgcgtggctgatgtcccggctgcgggagcggatcgcccgcggactaccgctcaccggttcggtgcgactgcaacatccctcccctgaacagcgggccgccgtagaacgattgctcggccgccgcgccggcgccacagccgggatcagtgtgccgctggatcgtctcgacgagcagttgcgccgtgccggtatccacgccgacggactggaggcagcggtacgactgctcaccggcccggtcgctgtccggtccgaagccgctgccgctgccgatcgcgcctggtccatggcgttcgccccaggcgaccggctggccctgcgccatcccgagctcgccggctggtggcagcgcgtgaaagtatccgggacgatccgccgcctcaccggtgatcccgatgccgccgccgccctgctcaccacggtcggcgcggcactggacgcacttccggtgcaccgcgaaccgctgggtgtcttcgccgcccgggtcctcggccgggcacacgccctcgacgcgggcgaacccgtcgccgccatcgtgctctccgccctgcgcgcccgagccagtctcggcgacgataccgatcgccgaaccgtatggcggacagccggtctcatcgtcgatgaactgtccagtaccgtgctgacactcggtctcaccaccgccggccgcagccccgccgagcagatggtgaacctggcccgcgcgacaggccagcccctggtcctcaccttgcgccagatacgcgacagcatggccgctttcgataccgccgacaccggccggtatatcgtttcggtctgcgagaacgccgccgtcgtcgccgcggccgccgaccggctcggcccggactgcccgccgctggtctgcaccgccggacagcccagcgccgcggtgatcggtctgctcgatctactgaccgcagccggcggccgcctgcgttaccacggcgatttcgactggcccggcctcaccatcgccggcgggctgtaccgccgctaccggtggcagccgtggcgattcaccgcggccgactatgcctcgtgcgaacccccggtcgccaccgcaccgctcaccggtatcccggtccaggccgaatgggacaccgaactcaccgtcgcgatgtcccggcgcggaatacagatcgaagaagaactgacactgccgcagctgctcgccgatctcgccgcggagtacctcgcgcacacgtga

SEQ ID NO: 49783 - DNA, 1572 bp, Nocardia farcinica IFM 10152
atgcgtgccgtaggcgcgggcggcgaccggcccgctactaccctgttgccggtgaccgactccgaggacgggccgcgcggcgacgagctggacgagcgactgcggctgttcgccttcgccacggcggagaagcgcgcggactacctgcgcgtgttacgggccttcgacagcgcgcgggcggcctacgtggtgctgctgcatgccgacgacgtggcggagtggatccggcgggcgggcggcgccgagttgcccgccgccgagatcgggccgctgctggaccagctgcaccggtggggtgtgctggagcgcagctacgacggcacccgcgcggcgacgctggccgagtaccgcaaccggcactacgtctaccagttcacccagcccggcttccaggcgttccgcgcggtggccggggtgctggacgcgcgcggcgaggaagcgtcgctgtcccggctggtgctgccggagctgctcgccgacctgggcgcgctggccgaggcgaaccgccgcggcgacgccgaactcgtctaccggacgctgcgccggctggacgccgcgctcaccgacatggcgagccgggccgcgcacttctatctctcgctgggcgacctggtgcgcaccaccgaggtcaccccggaggcgttcctggcgcacaaggacacgctgctggcgcacatgcgcgagttcagcatggatctggcgcggttcgcgccgcggctggcggcggccatcgcggagatcgaacagaccggcgtcgcggcgatgctcgagcgggcggcgcggtgcgacgaacgggtgctgctgagcccggccgaccgggaagccgattggcgggcgcgctggcagggcttgcgcggctggttcgtcgccggtgagagcggcgcgaccgaggccgatcggctgcgcgaagccaccatgagcgcgatcgccgcggtgctggcgctgctgcgccgggtcaccgagacccgccgcggtggggtcagccgggagtcggcgctgcggcatctggccgcgtggttcaccgcggcgccgagcaccgagagcgcgcacacgctcttcgacgcggtgttcgggctcgggcggccgcggcatctggcgatggaacatcccgatgccgacatcgtgcccgcgagccgatcctggtgggacgcaccaccgttggagatctcccgcaccctggccgagacgggacggccaccctcggcggcggcgccgggccgcatccagcgcaacgacgcgagtatgcggcgcctgcgggaatcgcagctggccgcgcagcgctcccgggcggaggcggcgcggtcgctggccgccgcggacgtctacgagcgggtgctcgacgaccgcgaaaccgacatgctgctgcgcctgctggacgcggcgtcgacggcgtgggtgccggtgagcggacgggtcgcgggcacctcgggcagcgacaacggcgtcaccctcacggtgtccgagcatccgggcccgacggtggtgcgcaccgcgcgcgggttgctgcatctgaacaaccgcaagctggaggtgcgcgttcgcggaccgcgcacgtcgggaggtgcggcgtga

SEQ ID NO: 49784 - DNA, 1353 bp, Nocardia farcinica IFM 10152
gtgatccacgcgcaccgcatcggttcgctggagctggacaactatcagcgcgccgcccgggtgatcctggccaatcacgtggtcacccgcagctaccccgaccgggtggcgttgtcgctgatccgccgctgggccacggagctgcgcgaggatctggccgagttgttcggctaccggctcgaggtcaccgagacgaccgcgcgcctgttcccggtgctggacgaactcgacccgggccgtcccgcgcgcaccgtcaccgagcgggtcttcgaccgccgccgctacgcctatctcgccttggcgttggcggcgctgggtcgcgcgggcgaccagatcacgctgtcggagctggccgagcaggtcagcgcctacgccgccgagatcgacgggctcgaactcgcccccgaccgcgccgccgaccgggacgccttcgtcgacgccgtgggctggctggccacgcgcggcgcgctgaccctcgccgacggcgacgcgggcggctgggcggccgacccggaggcgggcgaggccctctacgacatcgaccgtccggtcgtcttcgccctgttccggccgccgcgggcgctgcagcatctgcacagcgtcacgggcctgttcggcgaggagccgacgaccgaggcgggcacgcccgccgcgctcgcccgggccgtgcggcgggcggtggtggaacgtccggtggtctacgccgccgacctcggtcccgaccagcgggcggtgctggcccaggaacgggtgatcgccgaggtggaggcgttcaccggcctgcgggccgagcggcgcgccgagggcgtggcgttgatcgacacctccgggcggctgtcggatgtgcggttccccggcaccggcaccgtggcccaggtagcgctgctgctgatcgccgagatcgccgacctggttctcgacatcgacaatccgctgccccagcgcgcgccgggcccggacgcgggcgctgagctggtcgcggcgctggacgcggcgatcccggcctcgacgctgttcgccccgatggtcgaggacggcgacgagcctgcggcggaacccgaggcggggcccgagccggtgcggtatccgttcgtcgccgccgaccgggtgcgcgagaccgtcggcatgctggccgaccgctacggcgccaccttcgccgcgcactggctcgccgacgtgcccgcgctcaccgccgaagtggtcgagctgctgcgccggttgcggctggtgcgtccggtcgccgacggggtgctggtgctgcccgcgctggcccggtaccggggtgcggtcgtcaccgtgcgtacgcggcgcaccgaggaattgttcgtcggcaccgggagggaagggatctga

SEQ ID NO: 49785 - DNA, 4209 bp, Nocardia farcinica IFM 10152
atgtcggtcatccacggcggagtgcgtttcatcccgaccagggccgggatcatcaacctgtgggactaccgcgatcaggagttctgcttcgccgacggcaggctggtgctgcgcgggcccaacgggtcgggcaagacgaaggctctcgaggtgctgttcccgttcgtgctcgacggccgtatcgagccgcgccggctgaacccgttcgcgggtgaggaacgcacgatgaagtcgaatctgctgtatcgcaagcaggattcggcgtattcgtatgtgtggatggagttcgcgcgcgggcggtgggccgatcccgaggtcgtcacggtcggcatcggcatgcgcgccacccgctcctcggacaaggtgacgcgctggtatttcgtggccgacggccgggtgggggtggacttctcgctcatcggccccgacgatcgcccgctgacccgcaaacaactcgccgaacagatcggcaccgacgcgatcgtggaccggccgatggagtatcgggcggcgatcgatgcgcgcatgttcggcctcggcgcgcagcgctacgaccagctcatcaatctgattctcacgctgcgccgtccgcagctggccaagaatctcgatccgcgcgggctctcgcaggccctcaccgacggcctgcgcccgctcgacgatcagctgatcctggacgcggcccgctccttcagcgacatggaggaggtcgggcgcaccctcgaagggctcgtgcacgccgacaccgccacccgcgctttcgtcgacgtgtatcgcaaataccttgcggtccaagcgaaaacggaggtcgaccaggttcgtgcccggctcgacgcggtgacgcacgcgagcacggcgctgttcgccgcgagcgcgctgcggcagcggcgcgaggccgagcgcgccgccgcgcaggaccgcgccgacgacgccgaccgcgcctacgagcaagccctcaccgatcgcgaaacgctgcaacggtcgagcgcctacgagggcaaacagcaactcgacgacctcgccgacgcggtgcgcaggctggagagttcggcggccgtgcaccgtgcgaaggcggtggaggcccagcagacggtggcgcagcgcgcgcaggagctcgaccgggtgcgcgcggacgtgcgggaggccgccgcggcgctcagccgcggggaggacgaattgcgcagcgccgccgaggccgcggggatcgcctggacgacgccgtcccgcgacgacgcgctcaccaccgccgtgctggccagggccgaggagcgcgacgccgacgtgcgcgcggtccgcgcggtgctcgcgcgggtggaagcggcgcaggccgagcggacccgggccgagcggctggccgagcgcgccggcgccgaccgggagcgggcggcggccgatgtcgcgcacgccgaggccgccgtggagctggctcgcggccgcgcggcggcggcgctgcgcgaatggtgggacgcacacggcgagacctacggcgccctcggcgccgaactgttcgaggccgtcgacgccgcgctgggccaggccggttccgacgaggccgccacgcccgccgaggtggtggccgagcgcaccgaaccgttgctggaggagttgcgggaggcccggctggccgcccgcacccgcgcggccgccgcgacggcccggatcgccgacctcgaggccgaacgcgacgccatcgccgcccagcgcgacgacgctccgcccgcccggcacacccgcaccgacgcaccgggcgaccggcggggcgcacccctgtggcggctggtccggttcgccgacgacgtaccggccgagaccgccgccgggatcgaggccgccctggacgccaccggcctgctcgacgcccgggtcggcccgggcgagccgcccgccggttatcgttccgatcagttcctgatcccgctgcccccggatcggcgccccaccggccgcacgctcgccgatgtgctcgtggtcgaggacgattcgcctgaactggccgttccgggcacggtcgtcgccgacatcctggcctccatcgcggtgcgcgacgccgccggttccgacgaggtcccggcgcatcccgcgctcgacgtcaccggcggctaccggcacggcgtgcaggtcggcaggcaccacaaaccgcacgccgagtacatcggcgccaccgcccgcgcgcgccgccgcgaggagcgcctggccgaactcgacgccgcgctggctgccgccaccgaggaccgcgaatccgccgaggcggccgcgaaacaggccgatgccaccctggcggcgctgaccacggcggccaaggcactgccccgcgccgccgccgtcaccggcgcgctgcgcgccgtcgccgaggcggcgggtgtggtccgctcccgcaccgaggccgccgcccaggccgaacgcgaactcgatcaggcggtcaccgaggtcaccgcgctggagaagaagctgcgcgccgcggccgccgagcaccgcacgccccgcaccgccgccgatctcgacgccctggccgccgccgtccgccatttcgagagcaccggcaccgccctggcgcggctgcgcgccgatcacgaacgcacgctcgaacgcgaacgcgagggcgccgaccgcctcgacgaggcccgcggcctggccgaggccttcgccgaggaagccgaagccgcgcgcgccggttacgacgagcagcagcgcaaactggcgacgttgcgcgaggcgctgggcgcgggcgccgccgagatcgatgccgaactcgcacgggcccgcgagcgcatcgacgcctgccgcgccgagcagaaggccgcccgcaaggccgccaacgcggccatcgaggcggtcggtgacgccgaggccgcctaccgcaccgcgcacgaggcgctcggcaccgccctcaccgaggtgctggcgcaggtccgcgcgctcgccccctacgcgcaaccggatctgctggcactgctcggcgtctcccccgagctgcgctggcccagcagcgacgccgcctggtcgacaccggatcagctgctctaccgcatcgcgcaatcggatcccgagaccgagccgcgggtcctgcccgacgaggtggccgcactgttcgaggcactgtcgacggccaccgcgacggtgcgggccggggaggccgcgcgcaaatccacccgcagcgccgtcaccgccgcgctgcaggagttcgacgccgcgctggccgcctcgggccgcgactaccggttgcgctgggacgccgccgacgggctcaccgtcgtgcaggtgcaggacgagcacggactgtgcccgctggccgatttcgccacccgcgtcgcgtccgcccgccgcgatcaggagctgctgctcaccgacgccgaacgccgcatcctcgaagacgccctgctcaccggcctggcccaacagatccacgaacgcaccggcgacgcgcgcgaactcatcgccaagatgggcgcggagatgaaacagcggcggatgtcctcgggcaacaccatcggtgtgcactgggtgctggccgacgacctctccgacagcgcgcgggcgatgtgcaagctgctcgaccgcgacgccgccgcgctgagcgcggaggatctcgccgccatccgcgcgcatttcgccgccgagatccgcgccgcccgtgccgcgcatcccgaacggtcctacccggagatcctggccgccaccctcgactaccgccgctggcgggtgttctcgttcaccctggtcggtgccgacggcagcgaggacaagctcaccgtcgcccggcacagcgcgctgtccggcggtgagcaatccgtgtcactgcacctgccgctgttcgccgccgcccacgtcatgctcgactccgccgacccgcaggccccgcggctgctggcgctggacgaggcgttcgccggcgtcgacgacaacgggcgcagcgaattgctcggcctgagtgtgcaattcgacctcgacctgttcatgaccggctacgacctgtggatcacctacccgcacgtgcccggctgcgcccactatgacctggctcactccgcggccgagcacaccgtcagcgccactctgctggtgtgggacagtggcgatctgctcgccgagcacagcggatcggatctgaccgccgcgctcggctcccccaaccgccgtcgggtgccggtcggcatcgaaggcggcctgaccctcgacgacatgccgggcgccccggcgcccctggcctga

SEQ ID NO: 49786 - DNA, 1482 bp, Symbiobacterium thermophilum IAM 14863
atgccgcctcgcgccgtcaccgccgagatgcccgaggccaactacctcatcggccatcccgacggcaagtactaccggctgctgatgcgctgtttctacgagcggagcctcagccacatcacctacgtgcgcaccgacgacctggtcgccttcgtacagcagtaccttccttacgatgatgcgacttgccgccagcacctggaccagatggagaagtgggggctggtcaccctcatccccgaacagagcaagccggccaacctgatggagctgcggcagaagccgcgcgtctaccaggccagccggatcgccctgcggctggaggccctgcgggcggagctggagcaggaggagggtgcggcctccctggatcccgctgcgctggatctgctggtgcagcgggtgcgggagctcgcggacttcatcgagcaggatggcctccaccgcgatggtgcggcgcctgaggcgcaccggctctgggcaggcgtctacgagtcgttcggcgccttctcccggcgaattcgggagtacctggaggacctgccccgccaccggcccagggaggtgctcgactacgaggcgttccgcgcctaccgggacctcctcatcccgtacctgcaggactatgccaggcgcctgttcgaccggcgggagcagctgcggatgcggctccgcgtgctggcgaggagcaaggaactgctggcgaccacggcggcagtggtcgaggcgcagcaggtgcgggccgacggttcccgccccgacttcgaccggcagaaggagcggttcctgcgggagatcgacgccctgatcggctacttcggcgaccagggcgacgtggacgtgctgctggagcgggcccaggcgtgggtgtcggagatcacccggcacgcgcgccgtctgtccgaacagcatctgggcggctctgtacgtgagcagacgctcctggacctcgcccggcgcttcagcgaatgcacatcgctggagcaggccgagagcctggcccaggtggtcttcgccgccacccttcccctgcactggcggggcgaggcgccgccgccggcggacaaagacccgtgggaggccgagccggtgaccgtgccgctttacgccgtgcggcgcgggcagcgcccgcgccagcagcccgaggcgactgcggaccgcaccagcgaggccctgcagaagatgctgtccgccaaggccgagcgggaccgggccgcccaggagctggccgagctcttcggcgacgaaagcgagctggacctgggcgacctgaccgtccgcgagcctcgccagcggcagctgctgctccgcctgctctacaaggccctgtcccagcaggggccggtcggcgtgggctaccggaactggagcgtgaccgccgaggtgaaggccgacgccccgctgggccggctgtccgccgccgacggcacggccacccttccgcacgtcatcctgcggctgcacaaagggggtccgcgctga

SEQ ID NO: 49787 - DNA, 1263 bp, Symbiobacterium thermophilum IAM 14863
atggccaccaccggcgccgccgaacagcggcagcttgccctgcaggacctgatggaccgctacctgatcagccaggccgacgagcccgaggcctaccggcgggtcgcgctgcacgagggctacctgaaggcctggttccacgagcgtccccggtggcggatcctgtccggacggggggtgtaccggctcgagcggatgccctcccaggtgctcttccaccggggcctgccccggctccgttccccgctgtcctatgcctgcctctgctgggtcctctggtttgccgagaccctggtgaccaccgcacgcgactggttcgtgatctcggaactggcccagcggatcgccaccgtgtctgaaggccgcttcaccctcgctgagcggtcgcaccgggaagccctggtgcaggcgcttcagtttctcatcgacctgggcggcctgctcctgcgggatggcgatgccgaccgctgggtggccggccaggactacctgggcgaacccccggaagtgatgtacgagttcaccgagatggctccccgcctcctggccaacttcagctacgagagcctggccgtggcggtcacggctgaccacgggcggcgaaccgccccgcccaccggggaggaggcgcccccgctgacccgggcctggcgtgccctgctcctggggcccgtcttctggaaagccgacgatccggaggcctttgccgcgctcgaggcgaactacgaggccgtctaccgggacctggaagcctccctgggctggcaggtggagctcacttcgagcttcgcccgcatctggcgcaccaccaccgcccgccacgccggcgcggtgctgctcgacctctacccggaccccggcgaggaggcggaggagcggcacacccgctacctcttccatcccatcctcctgctcctgggccgctgccaggaaggcgtggcggcaggtcgctggtcggcagacgccgacggggcggtggccatctccgccggcgaactggaggatctgctcaccgagctgcggagccagcaccgaccgtcctggggcgcggcattgggcgccctgtccatcgcggagttggtgacggtggtgctctccgagatgcggcggatggggctgctccggggccccgaccgcttcggccgctgctggctgctgccggcggccgccggaatccgggggcggtatgtgacccgggagacaggcgcccgcagggcgccggaaccggagcagcctcaggcccagcagatcaggctgttctga

SEQ ID NO: 49788 - DNA, 4206 bp, Symbiobacterium thermophilum IAM 14863
atggcactctggcagcgtcttgaactggacttggaggaggagcggcgcgccattcccggcgggccgcagggctggcggcccgagcggctcatcctgcgggactggtggcactggcgggaccaggagttcgggttcgcccacggccggctcgccctgacggggcagaacgccgggggcaagtcctcgctgctggcgctcgccatccccgtgctgctggacggccggaccgagccggcgcggctcgatccggcccagagccgcgaccggttcctgcattactacctgctgggcgccgacggtgcggaggcgggcaaccccgacgtgttccgctacgaggcgcgcacaggctacatcgccctggagttctaccacacggtggatcagcgcttcctgacgatcgggatgggcgtctccgcctcccggtccagcccccgcaggatcacagactggtggggcttcctgctcgtgaaggggcagcggctgggtcgcgattttgacgtgcgcggggccgacggcacatgcctgggtcggcgggagttcgcgcggctggtgggcgacggcgggatcgtcgtcaccgagaaggccgagtaccagcggctggtcaatgattacctcttcggcttcgagggggatgacttcgacgcgctcatcgccatgctgctgcaggcccggcggcccaaactgggcgagcaggcggggcccgataaggtctgcgacctcttgcgccgctcgctcccgggcatctccccggaccggctgagccgggtcggggaggtggtcaacaacatcgaagagtaccggcgcaacctggcggacgtcaccgagaaggcggaggcggtcggccgggtggacgcggccctgtacgccctcgcggaggtgctggtgcaggaggcggctgtgcagtaccagagcgtacagggctccctgggcggcgtcgtcggcaggctgaaggaggcgcgggcgagcctggcggccgccgaggaaggcctggccgcgctggaggagcaggggcagaaccgggcgcgggagcaggcggccctggaggccgaggtggaggagctccggcagggcgaaggagccgacctgcaggaccggctgcgggacgcgaaggaaagagccttccaggcggccggccgcgcggcggagctggaagggcgcctcagggaacaacgtgagcacctggaggaggccgaggcccggcggcggcagacggccgccgagttcgacgaccggcggcgggccatggccgctgaggtggagaatctggcccgggaagccgagggattgggctggcacgaggcggccggcgaactgcgggaagcccggaaggccatcgtggtgctggcggtggacgatccgcccgccgtggtcgaaggcgcctggcccgactccaggctcgtggtggaagccgaggacctgcagcggggcttcgcggatgcggccagggcccgcagggccctggatgaggccgagctggccttcgccgtcgcgcaggagcgcatcgccgatctgcgcgggcgagccggtctggccgccgacgccctcgaggcggcaaaagaccgtgcagaggcggagcgcgagtcgctcatcctgcagatcgccgcctggcagcaggagagccgcgtgctggcgcccagcgatacggacgtcgcgcgcctgaccgcacgggtgcaggccctggaggcgccgccggccggcggtgtgcatgaactggtggaaccgatccgcgacctggcggcgtacaggaagcggcaactggaggcccgggtcgcatccctggaggacgaactgcgtgcggcgcaactgcgggtggaccggttggccgagcggcgcgcggaagtggaggccgacgccggcgatccgccccggtcggaggtgcgggcccgggcacggcagggcgcgccggacctgcggcccctcttccgctgggcgcggttccgcccgggcgtgccgcaggacgtgcaggcccgggtggagacggcgattctggaggccggctggctcgacctgctggtcctgcccggggctgaatccggcgcgggcgagactcacgccggccaggcccggccaaccgatgcccgggtggcggatgccgtgatcctgccccggcccgtggcgggcccgtccctgctggaggtgctggagcccgagccgggtgcgccggcgacggtgctggctacactggcctccatcggctggggcgaggggaccggcgaccgctgggtctccccggacggccggtggcgcaacggcgtggcagaggggcaggtgggcccctgggtccaggaggaagccggctacctgggcgaggagaaccgcatccgccgccgggagcgccggctgcgggaggttgacgcggcgctgcaggaggcacaggccgcactggccgcggtcgaggcgcggcggcgggaggctgccgacgccgtcaaggtcgtggacgcggaactggaggcgctgtaccgcctcccctggcaggcgctgttccgcgcgctggatgacgtcctgcggcgggaggaggaggcgcagcaagccaggcaggccgtggaggacgaacagccgaaggtggcccaggcggaggccgaggtgcgtcgccgaacggtggcctttcaccaggtggctgccgatctgccccaggcggcggggctggactacgagggcctgatgcagcgcaggcaggacttcgccgccatgggagccaggatcggccggctcacggcgcatgctgaggcgctcgtgcgctgcgcggccgactaccggtcccagacggagcagctgcagcgggaccagcagagcctggccgccctggagcgggacatggaacgcatccggcaggagcaggccgccgcggcggccgcggtgaaggcgctggagcagcggctggccgaccccgacctccgggcccgccaacagcggctggagcgggcgctcgagcggctgagggcgctgcaggccgaggcgaagcaggccagcgaacaacggggccgcctggaggcgcagcgggaatccgcccagggacgcatcgccgagctggagccgcaggaggaggctttccggcgcgagctgggccttcggctggagcaggtgcgcaggcggcttgggctgcaccccctgctcacgccctacctggaggcgctggaccgggaaggcgtggtcagcaccatgcaccgcctcgcccggctggtggagacggaagacctggagcaggtgaagagcctgcggcagggggagttgaacgaggtcgtccatgcctgccgggatctgctccgggactacgttcccacctggaaccctgagcgcaccagcctctcgttccggcacgagcgggtgcccatgacggccacccagctccgggagcggctggaggcccgcgcccgggagtacgcggagctgatggaagaggagcagcggaagctgtacgaggacatcatctaccaggggatcctcgacgagctgcggcggctcatccgggcagcccgggagttcacccggcggaccaacgagaagctgaagggcctgcagctcagcaacggcgagcagctcagcctgcggctcagcctgctgccgtccgaccagatgccgggcgcccgcatcgcccacgaactggagcagatggagcagggcagccgctggctggacgaccagaagcgcgaggtcctgctgaacacgatcaaggaggaggtagagcgggtgcgggaggccgccagggccggcggagaggagatcggctaccaggaggcggtggcccgggccctggactaccggaactggtatgagtaccagctcctcagccgcatgcccggcgcgagcgccccggtgcccatccggacccggggcttcggccagcgctccacgtcggccaaggcctgggcgctcgccgtcccggtgctggcaggcgtggcggcgcggtacgacgcgtcgccccggaccgacctgccccggctggtggctctggacgaagcctttgccggcttcgatgccaacaaccagaagaactatctggacttcctctcccagctgggcttctgctggatcatcaccgcgccggacgagctgccctacagcgagtccctgtcggcggccatgacctaccgcatgagcctggagggcaccctgcacaccgcgtttcccatcctctggaacggaagcgtggcgcgggaacccctggccgacctggggccggagcctggagagggggctgagccgtga

SEQ ID NO: 49789 - DNA, 1308 bp, Symbiobacterium thermophilum IAM 14863
gtgagcgcgcgagaggcctttgccgccatgcgagaggcgggactggagccggtcctggccgcggcccggcagaaggtttacgaggcggacggcctgcggggacgggtacggctgacactgggcgcggcccaactggacgagctggccaacctcctggggcgggtgtccgtccgggacgggcaggtgctggtgcccctgcaggacctggacgcagccctcacccggagccggttccggacaggcctcctggacgtgctggaggcagggtacggtcccatcgtgacccggcggcaggaaagggaggccgcggcctcccggtgggcctcctggctgaaacaggtgggcgacgcgctgccgccggtggacggggtgcgggcgtggtttgagcgggtggttgccggcgagagccccagcgcgcggtgggtccggcgggtataccggaccgatgccgagcaggctgcacgggcggtggcggcggtgggcacggccctcgcccgcctgccggtcgaccgcggtgagcacgagctgctggcggtgttcgccgccagtctcgccggcgatcctcacgccttcgacgagaaggagccggccggcgcgctgctggagcatgccctgcgggagcggttcggtcctcccccggaggagctgcggcctcacgaggcccgggcgttcctcctggatcaggcggggcttggcgccgaccaggtgtcatccaccgtcctggtggcccacctggccggggcgcgctgggcgcctgcgccgggggcatctcatcccatggtggcggcgatgaccgcgtgcaccggcgcctgggccgtgacgctgggagagctgcggcgctggtcggccgccagggcccaccggggacgggcgtatgtggtggagaacccgccggtctttgagtggctgctcaggcggctggcgggtgcgccgccggagcggcgggccaccctcatctgcacgggcggtttcttgagcgccgccggctttcgcctgctggatctcctggcggcggaggggacggagatctggtatggcggggatttcgaccggagcggcatcaccatcgctgtgggactggccgctcggtacggcgggctgttccgcctgtggcggttcggaccggaggactatcgggccgcggccctgggcccgggtggacagcccctctcggaggcggaccgggctgccctgctgtcggtgacggggccgctggctcctacggccagggccgtggccaccggcggcgtgacggcgtaccaggagcggctggtggaggtgctggcgcaggacttgatggaacagtga

SEQ ID NO: 49790 - DNA, 1536 bp, Desulfitobacterium hafniense Y51
ttgagcaagaatcctaatttgcaatcgttgcgcagtgtaaaggaactgaaatacgtcaatgccgacaatgtcactcgttatcgggcaattatgcggtatctttatcagcaataccaaaaattaaactattggctgaaaccggaacaaatctataacggtttgatggcctggaatttgctgaaaacttatacgctggaacaatgtcaaattgatttagatcaactagtggagtggggaaatctaaactcccggcacgatggcggaagggctgtcactgtagaggagtatttgcgcaaaaagtctcaatacttaattaccccttattccattgaaatcgaacgtttgttggggaatctggaaacagttcgcggttatgggggatctctagagcccacgctttttgatacaattgggaacatattatcaataatccgtgaaaaagcgggattatacacagcgggggaagccttggagctctggaataatctctttgaatcctttcaaaaattgcatgaagcatcagtggattacatagctagcctgcagacagggacggcggaagagttaatggccacggatgcttttttactatataaagattccattacccgctatttacaggacttcgttcaagctttgcaaagacgttcctacaaaattgaaggggctctgaaacaaatgactgatgaagaaacccaacgtttcttccaggcagtgattgacgatgaagggcgaatcccgaaactagacgagcaggttagcccagagcagcagttcgatgaattagcggataaatgggacgggttgtataggtggtttgtaggaaagggcgactcaggcagtgagctgatgatgttagagcgggcatcaaaagatgccattatgaaaattgtgagaagtgtggtgcgcattcaggagcgaaagcgttcaggcataagccggcgaaaagaactggattatttaggacaatggttttatcgtctggataaattgaatgaagcccataagctggcggcttatgcttttgggctattctctgcccgtcatttgcagggagaggataaccgagaatcggacagccaggaacaatccatgtggaaagaagtgcccattcctcgaactctgcgctctcgcagtcggaaaaaaaatgagcgtcaagatacagaggcagttattgaccgaagtcgtcaaaaggaagcaatgcgagaggcttttagactgcaacataggcgggaactggagtttttaattaagatggtggcggccgaagaagtgaggatttctcagttggacgtgataagcactgaaactcggctgcaaattttgtattggatcggccggtgcaatgcttcatctacctcatcctttcaaaccccagagggaattgaaattcaattgcaccaacctgctcagggagagcgagcaatcttgctgtcagaagacggaaggttagagttgctggattatagattcaattttagggtggtaaatgagtcggcctggggggatttgttaattggattagaggcttcgtaa

SEQ ID NO: 49791 - DNA, 1251 bp, Desulfitobacterium hafniense Y51
atgaatggaggggcagcagtggagaaaataaaagttggaaaactgtatagcgccagaagacgcagatcaactgttgtcgatcaaaaggagtctaccaaccggataaaggtatgtatgaaagctttgctaaatcggccctggattgggaaagaaagcgatcctcagttgtattattggataaaggagcaaagcgatagtatacgagaatggtttatgtatcacaccggctattccctcatcatcaaccggaaattagcaaaactggacaaagtaccagtgattgccttcccctggatgggatttcaagagtttcgcgaagcgttggattatgctttgttcacatatagcctctggtttttagaagggaagacggaaggcgaacagtttctactaaccgatctggtcaaagaaatcaaagaatacatgacagagcaaggaatgacgattgactggaaaaattattttcagcgcctttccatggcgagggccttgaaaaagttaaagagtttaaatattgtccaggctatcgacgggaaagaagccgattgggcaatggatcaagaggcttataatgtgctgtatgaatgcacggcgtattcccgctatgtattacgcaattttccaagagatttaaccagttataccacgatggacgagatgggtgaaatccccgatgccggagataagcaggaagaaataaaccgggtgaggcgttatcggttatatagacgctttttacttgaaccggtggtatgggataaagactggaaagatgatttgctctattatcatggccagaagaattatttaattcgtcaattcaaagaaatgtttggttgggaaggtagtcgataccgcgaaggggttttgttcttcgaaccagaggcaggagcggaggcggaactatttcctactttatcctctctttccgacctaagcatgctggtatgcggaaaaatccgtcaggatgttaacaaccctgagctagaaaatctaaaggcagaattagatggatcggtgcgagttaccaaaagtgaggtagagcgaatattgatccaacttaaagaggaccacagtaagtattggatcagcgatcatcaaaaaatgcagtcttcggcactagctgaggaggtttgcggacatttgatcgagtggggctttgcccgttgggcagagggtggattcctaattctgcatgctgcagcaggccggtggctggctcaatatggttcaatggagctggatgaatag

SEQ ID NO: 49792 - DNA, 4089 bp, Desulfitobacterium hafniense Y51
ttgggacgttggcagatgaaacgggcgggagttctgaatttctggtattacgatgaggaagaattcttatttgaagaagggcggctgattttgcggggtacaaacggttcaggcaaatcggtcaccatgcaaagttttattcccttggtgttagacggggataagcgaccggagcgcctggacccttttgggtccagagatcgacggctggagtattatctacttggtgaggctgaccaaggacacacggaccgaaccggctacttgtggttggagttttatcacccagaaaaagaactgtataaatccgttggcattggcctaagggcacgacggggggtgccccagttgggtttttggggtttcctgattgatgacggtagaaggataggccaggatttccatctctatgattacccattatggctggagcagggaaaaaaagtacctcttaaccgcaagaacctagaagagaaaattgcctccggcggacaagtggtacaggagcaagccgcttatcgtgatttggtgaataaagctctatttggatttcgggagagtgaatcatacaaggatttgcttaagctgttattagaattaagaagccccaagctgtctaaagatttcaagccttcttctatctatgaaatcttaacgaatgccttgccacctttactggaagaagaattagggtctttgtccgacctgctggaagatatggatcagattacagaccatttggaagaattacaagatcacttaaaggaacttcagaagattgaaaaagtctatgatacttacaatcgttttttattaaaaaagcattccgctcaagtgctggagctgggagataaatatgatcactttaccaatcaggtaagcgtttacgaaactaagctggcggagctagaaaagcagcaacaggatatccagcagttgctggagacgagcaagcagcgattgacgactgtggaagccgaattggagattttgaaccgcagcgaggctatggagaagcagcgggaactggagcttttggaagatcaggtcaagggaatcgacaaacggctcatcggtatgaaagaaaggattgagtcaagccagcaaagattaataaagatggggcaagaaattgccgcaacagaagaacgcttaaaaatgcttactcttgaacagatagagaccctttctcgcttagaggattcggcccggatcatggagttccgtgagcatgatatctatcatgggatttggctgcggggtattccccaggaagggcaatggtcgaagccctggctgcaggatttggatacccatagacaaaagctggcagccgcttatcagactgcccaggaagagggcgaggcggcaagagcggcagcggaagccgagctaaaatggggggaaatatgcaaggaacgtgcatcagtggaggtcgagcaagaggtacaaagagaaaatttggaagcgatcaaggaaacgatgcgagaaaacctggtgcagtggcagcgaaacttagagcagatagtgatcaatggagaacaattgcgagaaatattgcaggcattaaccgagatatctgccaaaaatcgtttttatgaaccggttcgtcgaccagcattgcaggcttacgagcaaaaaaagcaaagttttatggaacaggccttgcattggcaacaacaaaggcaatcattgctagatgaacggcggagtttagaaaaggaacttgaagaatgggagcagaccagagaaccggaaccaaggcggacggaaggaaggagcctttcccgccagggaagggctaaaggtacgggggcacctttgtttgccgtctgtgagtttgcctcaagtttagatgagaaaggacaagctcagctagaagaaactttggagcaagctggcctattggacgcctggatctttccgggcggacaagtaacaatactagaccaagaacaaggtgaagaaatctggattgagcctgaatatgtggtacagggagaaactctggctagtgtattatcccctacgccctctcaagagagtgggttaaacgaagaggatattcgccgagccctcaattgttttgggtggctttcatctgggaagtcctcttcagagaaacgaaaagcttcaagcatttatctcactggtgaggggtactatcaactgggccctttggcgggcgttaacagttctaagcctcgggcggaatatatcggtaaagaaactcgactgcgcacaaagcaattgatgattgcccggattgaaggggaaatcaaagggctgataaaagaaattgctgaggttgacgaaaatatagctgccctaaatcaacaacggcaggttatggaaaaggaaatggcaacttttccgcatgacaaagatcttcaggcccaattggatgtcctgttggaatggtcctatcgccttaatgagataatgaatcaggaacaaaaagtggaaacatggtacaaacaaagggttggactttggagggatctacaggttagattagtagagcagacggtggaatggtccggcctgaaaaaggaacggcagttacgggaggctgtggaactgtgcggaagctatcgcagtgatgtgtcagaattgagttcattgtgggctcgctatcaggaaacgtcaaagtatatggaaaaccagaagcagcagcacctggatttacagggcatggtggaggaggatgaagaagagcgacttgagctagaggagcaaaaagggaagcattcgatccaaattaatcaattgttaaaattgatggctgagatggacatagaagaggttcaccgacagattaaggaagggaaagcggagaaagtatctttgaataaggccatcgaggagttgtataaagaacaaacagagcaaggtaaagaactgggacgtgtaatcacagaactctccaacaatcgcgtatctttaacagatagcagcaaaaacttagatgaagaaataaaacgctggagggaggaaacccagttaggtctaattccccaatggaaagaagcctttgcttttgccgtagatgatcggctcatccgccaagtctgtaagcagattatgaaagaattaagttctttgtttcaaaacactaaagaagagcagatcaacaggaatctttatgaggaatttaacaagagtcaggcgaatctgcgagactatatgttggaaattgataaccttgattcaggaaggcttatcatcacctcaaagagagatcggctgaatcccctccccccgtcaaagctgttggatgaattgacggagttggagaatgaacagcggatattgctaacggcacgggaccgggagctatatgaggagattatcattggcagtgtgggaaaagcaatccgcaatcgtatccaccgggcaagggattggacggcccgaatggatggattgatgaaacagcggaatacatccagtgggttaaaattatccttgaaatggataccattagggcaaaaaacagagaaagagctggacacgcagacattgatcgaattattgatgcgggatgcagagcggatggatgatgaagagtttgaaaagatcctcacccacttcaggaccaggattctcagggccaagcaagaggctcaggacgagaaagaaagcctgagacgatatatttatcagatgctggattaccgtgcctggtttgagtttaaattagagcaccgcaagggggagcagtcaaactacaccgagttgacggattctaaatttaacgtcctcagtggtggagaaaaggctatggcaatgtacattcccttatttgccgctgcttattccagatatagtgatgctgctccggaagcgccgaagattatatctttagatgaagcttttgccggagtggacgatgccaatatgcgggatatgttccaactcttaaccgatatgggctttgactatatgatgacgtcccaggttttgtgggggtgttatgatacggtgccgagtttagccatctatgagatatacagaccccgggatactgatgtgataactctgttccattaccgctggaatggaaaaaccaggtctctgattgaatag

SEQ ID NO: 49793 - DNA, 1428 bp, Desulfitobacterium hafniense Y51
ttggttatggaactaatcagtcgaaaaacagccagacaatactatggagatccccttttagggaatctcattgatgctgtcttcaaaaagtatcagggccagaatggagtaaggggtaacgcaaaaatttgcgtgagttcgagtgaagaagcccaacggttgcaggactattttggcaatcgcctgaagcacttaatccgtcccgggtcagaagtggaagtgcctcttaaggtatttgcagaggaattgcagttgggttatagactgtccattcctgatttgtacgaagtattaaagggtgaaatgttattgacaaaactggaacagcgtcaattgaaggaagaggcatgggcgcagatctttatgcaggtcaggatggaattgcgggaaaaggccgagattgacttggataatgaggtttttcgggcagaaacttttgattggttgaaaaggcttgagggcggagaagcatcggggtaccatgttcttagaagcgctatgaataagggtgaggatgctgttgatgctcttttctgttgcttaaagggtttatggtacctgttggtcgataaagagaagatcaaggacaaaataggaaagaatgttaaggaaattagaatccctatatttgctgtccatgtaacatcagataaagattcgcatggttttgattggacaaagacggcaggaagattattgtggtatgccctttatgatattgatatacaaagaatcaaagccggtaaaaaaatggctagtgagaagttgatagttcctgagtatatgcaaaagaggcagatatatcgcaattttggtttgaaagatgatgatattagctccttttcccatgtttttgcacctcactttgtttcgggaacatctcctcgaacattaaacttgagggaaattcaatcctatggaaaatttccgatgtactcggcattatatgtgtttgagaatcccgcggttttatctcacattatagatgaacttatccatttcttagatatgaacggattatcccttgagcaaattcccaaaaaattcccggccttgttatgtacttcaggtcaaccacgtagtgcagctcttgagtttattacaaagtgtcttgaggcaaaccccaattgccttatccgctattccggcgatctagatttaccgggggtacagatgatgcaaggaatacaagggcaatttacatttaggttcgaggcattcaggatggatgataagacttatcgcaattacagtgatgcgaatcatttacgcctatcgtttcaggataaaacagtattgaaacgaatgggagatgagttgtcaaaggtaatggtggaactaggcgtaaagatatatcaagaagaatttgtcaaagacttagcagaagatgtgttggagaccattaggcaggaaaaggagattgaatga

SEQ ID NO: 49794 - DNA, 1506 bp, Rhodococcus erythropolis PR4
atggtggaagaaacgagtgcgcccgattacgccgcgtacgccgacaccaatcgactgaagctgttttcgttcacgatcgcggaaaaacgggccgagtacctctgggtacttcgtgccttcgaccatgctcgcgccaactacaccgtcctgctgcatgccggagccgtcgcgcaaatcctcgagaagatcggtggatcggatccggcggccgatctgtcggcagcagaggtcactcccctgttggatcagctccatgtatgggagatccttgagcgcagctacgacggcacccgcgcggccacgctggccgagtaccgcaatcgccacttcgtctaccagttcggtcaggccggataccaggtctatcgatcagtcgaagacgttctcgccgcacgcctggactcggcctcgctctcgcgcctcgctctgccggacctgctcgcagacatgtccgaactcgccgaggccaaccgaagctccgacggcgacctgatcttccgcaagctcaagcgcctcgactcgacgctctccgacatggccgatcgagccgcgcacttctatctgaccctcggggacctcgtacggaccacggagatcactccgcaggctttcctcacgcacaaggacgctctgctcacgcacatgcgggagttcagctccgatctggcgcgctacgcccccaagctcaaggaagcgatcgagcacgtcgaatccaccggggtcgatcgcatgatccgcctcgccgccgccagtgacgaacgggtgttcgtcccgatcaccgaacgcgaagacgactgggctgcgcgttggcgaggattgaccgcctggttcgtctccgcggaatcggggatcagcgagtccgagcgtctacgtgagggcacgatgagcgcgatcgccgcggttctggcgctccttcgccgcgtcacggaaacccgtcgcggcggcgtcagccgcgagagccagctccggcacctcgccggctggttcgccgccacgccgtccgaagacgcagctcatgctctgttccaggcagtgttcgacctcggccgtccacgccacctctcgatggtgcatccggacgccgacatcatttctcactcacgttcgtggtgggaggcaccgccggtcgaaattgcgcgaacactcgccgaaaccggccgcccaccctcaccaggattgccgagcaaggtcgcccgcaacgacggcagcatccgccgcctacgcgaagagcagttggcagcgcaacgtacgcgcagcgccgcggcgcaatcactcgcgtcgaacggcgtctatcagcgtgaactcaacgagcaggagaccgaagttttgctgagtctgctcaatgcagcactgaccgcgcgcgttccggtagtgggacgcgtcaagagctccaccggtagtgagaacggggtgaagctgacgctcagtccctcggacggttcgaccaccatcaagaccgcccgcgggcgtatgcacctcgacggcatcgaggtcagtgttcgatga

SEQ ID NO: 49795 - DNA, 1443 bp, Rhodococcus erythropolis PR4
atgagagctcgcgagatcacgccccttgccctcgactcgtatcaacgcgcggcgcgagtgatcctgtccaaccacctgatcacctcgacgtacccggatcgaattgcgttgccgctcttgcgccggtgggccaccgagctgcgtgacgacctactcgaactgttcggctaccgcctcgaggtgacggagaccaccgcgcgcctgttcacggtgtcggatcgactcaacccgtcggcaccggcccgaactgcctccgagcgaaccttcgatcgcacgcgttacgcctacctggcactgtgcctggccgcgttgggccgcgccgggaaccagatcacgttgtcggagttggccgatcacgtcgcggccgacgctgcacaagtcgacggcgtcgaactctccaccgatcgtgcgtcggaccgcgacgccttcgtcgacgcagtgggctggctcggcgtcagaggcgccatcgcactcgccgacggtgacgcaaacggctgggcgtccaatcccgaagcgggagaagcgctctacgacatcgaccgttccgtcgtcgtagccctgttccgtccgccgcgcgccctgcagcacctgcactccatccgcggactcctggccacggagacctcgagcgctgccgaggacgacggaattcctgtggacgcgaaagagatcggacgccgagtgcgtcgggcgctggtcgagcggccggtcgtactggcgggtgaactcgatcagcacgaattgatcgccttggcgcagcccaagaccgcgtcggaagtcgaactactgacggggttggtggccgagcgtcgcgccgagggaatcgcgatgatcgatcccaccggtcgcctctccgacgtccgcttcccgagcaccggaactatcgcccaggtagctctactcctcgccggcgagattgccgaccgcgtactcgacgtcgacgctccggagctgccgaaacttccgatcccgcacgtgtcggacgatcacctgatcgaacaactcgatgccgccatcccggaggccgggatcttcgaggacctcgccgacgaggacgacgacttcgtgttgcctgccggcgaaccggccgagcccccggaacccgtcacgtacccgatgatcgacgacgactggctcgccgacaaggtcagcgagttggtggaccagttcggacgcacgttcgcagcgcaatggcaggccgatcacaacgggctgcgcaagcaggcgctcgggttgctgcaacgtctgcgcctgacgcatgcggtcgacggcggcgtactggtgttgcccgtcctggcccggtaccgcgacgtcgtggtctccgtacgcgaacgcgatcctcagatcgacttcgcggtagacaactccgcaccggatccggtcgacgaattcggccccgaatcttccaccaacggcgaactatcagaggtagagaacgtatga

SEQ ID NO: 49796 - DNA, 4176 bp, Rhodococcus erythropolis PR4
atgagcaacgcccgcttccgacctactcgggctggaatcatcaacctctgggattaccgagaccaggagttctcgttcgccgacggtcgactggtcctacgagggccaaacggatccggtaagaccaaggccctcgaggtcttgttcccgttcgttttcgacggccgcatcgaaccgcggcgcctcaaccccttcgccggtgaagagcgcacgatgaagtccaaccttctctaccggggccaggacagcgcgcactcctacgtgtggatggagttctgccgcggctccctcgaagatcccgagtcggtgaccgtgggaatcggcatgcgggcaacccgtaccaacgacaaggtcacccgctggtacttcgtcgccgacggccgcgtcggagtcgacttctcgctgatcggcaacgacgatcgtcctctcaccaagaagcagttggccgaacaactcggcagcgattccatcaccgaccgtcccctcgactaccgcaccgcgatcgacgcgcggatgttcggtctcggagtgcagcgctacgaccagctgatcaatctcattctcacgcttcgccgtccccagctcgcgaagaacctagatccgaagggcctttcgcaagcgctcaccgacggcctccgtccactcgacgaccaactcgtcctcgaagctgcacgttcgttcagcgatatggaagaggtcggccgcgcgctcgaggggctcgcagccgccgatcaggcagcgcagagtttcatcggcgtctacaccaagtacctgcgtcagcagtcgcgcggagagatcgaacaggtcagcacccgcctcgcagcagtcaccagaggcgttgccgccatggacgagtcgtcgctcgcccagacccgcagccgtgaagcccgggcagcagccgaggagcgcttcaaccaggccgagcaggcactcgagaacgcgcgcgccaatgtcgaggcgttgcaacgctcgagcgcctacgaaggcaaacagcaactcgacgatctcgctcaggccgtctcgacgctcaagctctcgaccgagcagcaggcagacaagtcgaggaaggcgcaggctgcactcgcgcaacgcggcgacgaagccgacaaggctgcatcgtcggtcaagcgtgcagccgaggcactctcgcgcgccgaggacgaactgcaggcagccgccgaggacgccggcatcgtctggactcccctgcccgacggctcacgcagcgaccagatcaccgcagcagtgcgtggccatgccgaggaacgtgacggcgacgtacgcgtcgtccgcactgcgctcgcgaccgtcgagaaggccgctaccgaacgaacccgggccgagaacagctcgcgccgtggacaagagctgctcgaagcgtccaaggccgctgtgctcgaaggcgaagctgccgtggaactcgcacgcagtcagtgcgccagtgggctgcgcgcgtggtggaccgatcactcctccctgttttcggctgtcggcgcggacacgtcgctgttcgaggctctcgacgcggcgctcgccgaggtcggcgacgaggacgctccggcgctgtccgcagttctcaccgagcacaccgaggcaggcaccgagacgctgcgcgagcgacgtcgtgaggccgaagctgaaatatctgcatcacacgcctccatcgcagctctgaaatctgagcgcaaggccgtctcggcggaacatgacgacgctccgccggccttccacgcacggaccgacaaccgcagtgatctgggtggggcgccgctgtggcagctggtgcgcttcgccgattccgtcgaaccagacgtggctacgggaatcgaatccgcactccaggcggcaaatctgctggacggctgggtctgccccgacgaaacgattcccgatcacgtcagtgagcagttcctgaccgctctgccggtcaagcagcgcccgaagggacgaacgctggccgacgtcctcgaggtcgaaggcaatgccgacgtacccgacgctcgggtacaggacattctcgcgtcgatcagtctcgtcgaggcaccgggcgactccgatgccagcgtcgcgatcggcgtcgacgggcgcttctggcacggcgtcgcgcgtggccggcacgtcaaggccgacgccgagtacatcggcacgacagcgcgggcgcgtcgacgcgaagctcggatcaccgagatcgacgcggctctggaagaacttgccgcggcagtcgatgcagccaaggcactggtgacgcagaccaacgagcagctgagccgaatcaactctgcggcaaaggaattaccgaagacagggtcgatcctccgcgcactcaaaactgtcaccgaatccgccggtgcactccgcactcgctcggaggccacggaaacagcgcaacgcgaactcgatgcggcgatcgccgatctcgcggcgaaggaaaagcaactccgggcgacggcgtcgcagcaccggaccccgcatatcggccgtgaactcgactccctcgcggcggcgatccgtcatttcgagaagcagggcgaactggcgctgcgctgccgacgcgagcatgccaaggaagtcgaactcgaacgcgagtctcgcgaccgtctcgacgaatcacgcgccaatgcggaggaattcgccgaggaagccgccatcgccgaggagagtctgcttcagcaggtccagcgcctcgagacactgcgcgacaccctcggggccagcgccgagcagatcgacctcgacctggcaaaagcccgcgcgaagatcgaagaatgcaaggtcgaacagcgtgctgcgcgaaaggcgtacgacgctgcggtactccagatcggcacggcagagggtgcgtacaacaccgccgtcgagacgttgcggcacaccctgaccgaaacccgcagtgatgcagagcgactcgcaccctatgctcgcccggaccttctcgagttgttgggcgtcaaggaacatctgagctggccggcaagttcagcggcgtggatgagccccgatcagttggtctaccgcatccagaacgaagaccgcagcgaggacgcggcccacccgcccgtcctccccgaagacgtcgacaagttgtaccgagcgctcgaggctgcgacctcggcggtacgcgtcaccgacggagcccgcaaggcaacccgcacggcactgacctcggcgttgcaggacttcgacgcccaactcgcagcggccggacaggactaccgcctgcaatgggacgcaccggacggactgaccgtcgtacgagtgcaggacgatcagggctattcgtcgatcggtgaattcgcaacgcggatccacgatgctcgtggcgatcaggagcagttgctcaccgaatccgagcgtcgcattctcgaagatgccctgctgaccggattggctcagcagatccacgagcgcacggtcgatgcacgcgtgttgatcgcacagatgggcacggagatgcgtgagcgtcggatgtcctcgggcaacaccatcggcgttcactgggtgctcgccgacaacctcgacgacagctcgcgggcgatctccaagctgctggatcgagacgcgtcggccctcggcgtcgatgaactggctactctgcgagctcatttcgcgacccagatccgtaccgcccgcgcggcgcaccccgaacgctcgtacccggaaatcctgtcctcggcgctcgactacaggcagtggcgcgtgttctcgttcaccctcatcagcggtgagggcaaggaagaccgccttaccgtcgcgcggcacagcgcactgtccggtggcgagcagtcggtttcgctgcaccttcctttgttcgccgcggcgcacgtcatgttggactcggccgacccgcacgccccacgtctgctggcactggacgaggccttcgccggtgtcgacgacaacggacgcagcgagctgctcggcttgagcgttcagttcgacctggatctcttcatgaccggctacgacctgtggatcacgtacgcagacgtccccggctgtgcgcactacgacctcgcgcactccacggccgaacaagctgtcagcgccgcgctgctggtgtggtcgaacggtgagctgctcgccgagcacgacggaacggatctggcgcgggcattgggctcgccgctacggcgccgggtgccgacaccagccgaaggtgcgttggactacgcctag

SEQ ID NO: 49797 - DNA, 1542 bp, Rhodococcus opacus B4
gtgagtgaatcaggcagcgatcccggtcggtccccctcggggctgcgcgccgcgcgcccagcggtcgctcccccgctgcgggacgaccggctgaaactgttctccttcgccaccgcggagaaacgagcggagtacctgtgggtgctgcgggcgttcgatcacgcccgcgccaactacatcgtcctgctccacgcgggcgacgtcgcccgcatcctggacggcctcgccggcgacgacccggccgggcaactcggcgccggagacgtcactcccctgctcgagcaactccacgtctgggaagtgctcgaacgcagttacgacggaacgcgcgccgcgacactcgccgagtacctgaaccggcacttcgtctatcagttcagtcaggccggctaccaggtgttccgggccgtcgaggatgcactcgcggctcgcctcgacgacgcgtcgctgtcccggctggcactccccgacctcctcgccgacatgaacgacctggccgcggcgaatcgtgccgccgacaacgacctggtgtaccggaaactcaaccgactcgatgcgacgctgtccgacatggccggacgcgccgcccagttctatctgaccctgggcgacctcgtccgcaccacggagatcaccccggaaacgttcatgtcccacaaggacgctctgctcacgcacatgcgcgagttcagctccgacctgtctcgatatgccccgaaactcgccgcggccatcgcgctcgtggaggactccggcgtcgaggcgatggtggcgcgggccgccgccagcgacgagcgggtgttcctcgatgtcgaagagcgcgaagctgattggcgttcgcggtgggcgggtgtgacgcactggttcgtcgggagcgaggcgggcccgagcgagtcggaacgcctgcgcgagggcacgatgagcgccatcgccgccgtcctgtcgctgctgcgccgcgtcaccgagacccgcaagggcggcgtcagcagggagagtcaattgcgccatctcgcgggctggttcgccgcgactccgaacgaggacgcggcgcacgcgctgttccgggccgtgttcgacctcggccgtccgcgccacctctcgatggtgcatccggacgccgacatcatccccgacacccggtcgtggtgggaggctcagcccgtcgagatctcccgcaccctggccgagaccggacgtcccccgtcccccggtctgcccgcgcgggtgcagcgcaacgagggcagcgtgcgccgcctgcgtgaggaacagctgactgcacaacgacttcgcgcggccgccgcacagtcgctcgcccggggcggagtctacgaacgggaactcgacgaggccgaaaccgacgtgctgctgagcctgctcaacgccgcactgacggcgcgggtaccggtcagcggccgcgtcaagagcagcaccggatcggagaacggcgtgaagctcaccctcagcccacacggcgaatcgacggtggtgcgcaccgcccggggacgtctgcacctcgacggactgcaggtgagcgttcggtga

SEQ ID NO: 49798 - DNA, 1389 bp, Rhodococcus opacus B4
gtgaaggcacgggagatctcaccgctcgccctcgattcgtatcagcgcgccgcccgcgtcatcctgtcgaatcatctcgtgacacaaacctatccagatcggatcgcgcttcccctgctccgccggtgggccaccgaactgcgcgaagatctgatgacgctcttcgggtaccggctcgaggtcaccgagacgaccgcccgactgttcacggtgagcgaccgactcgacgccgggacaccggccaagacggccaccgaccgcacgttcgaccggtaccgttacgcctacctcgcgctggcgctggcggccctcggtcgcgccgggaaccagatcaccctgtccgaactcgccgatcacgtcgccgccgacgccgcgcaggtcgaaggggtggacctgtccacggagcgcgcgtccgaccgggacgcgttcgtcgacgccgtcggctggctcgccgcgcgcggcgcgatcgcactcgccgacggtgacgcgggcggctgggccgccaatcccgatgcgggcgaagcgctctacgacatcgaccggtccgtcgtcatcgccctgttccggccgccacgcgcactgcagcatctccgctccatccgcggtctgctcgccggcgcggactcggtgaccgacgaggacaccgcggagacctcccggacggtcgacgtgaaggagacgacgcggcgggtccggcgcgcgctcgtcgaacggcccgtcgtctacgccgccgacctggacgatcacgaactggtgcaactcgcgcttccccgcaccgcggcagatgtcgagttgctcaccggactggtcgccgagcgtcgcgaggagggcgtcgcgatgatcgactcgtccgggcggctctccgacgtccggttccccgggacggggacggtcgcgcaggtcgcgctcctgctcgccggggagatcgccgatcgggtcctggatcccgacgccgcggagacggcccggatgccgctgccgcggggccggtccgaagacctggtcgaacaggtggacggcgcgattccgcagtccgggatcttcgacagcctggcaggccacgacggagtcgaacccgcggaacccgcccccgccgaccggctcttcccggtcgtcgaggaccagtggatcaccgacaccgtccggaccctgaccgagagattcgggcgcacgttcgccgccgggtggcaggccgaccccgacggcctgggacgcgccgcgctggcgctgctcgagcggctgcgtctcaccgcgtcggtgccgggcggcgtgctcgcgctcccggcgctcgcccgctaccggggtgtggtggtcacgatccgcgaccgcacaccggagatcgacctgttccagagctcagcgaacgacagcgaggacatcacagcatga

SEQ ID NO: 49799 - DNA, 4158 bp, Rhodococcus opacus B4
atgacgagtgcgcgtttccggcccacccgcgccgggatcatcaacctctgggactaccgggatcaggagttctccttcgccgacggccgcctcgttctccgtggccccaacggttccggcaagaccaaggcgctcgaagtgctgttcccgttcgtcttcgacggcaggatcgaaccgcggcgcctcaacccgttcgcgggcgaggaacgaaccatgaagtcgaacctcctgtatcgcgggcaggagagcgcgtactcgtacgtctggatggagttctgccgcggcgcgaaggacgaccccgaagccgtcaccgtgggaatcggcatgcgcgcctcccgcaccaacgacaaggtcacgcgctggtacttcgtggccgacggcagggtcggcgtcgacttctccctgctcggcacggacgaccggccgctcacgaagaagcaactcggcgaacagatcggcaccgactccatcaccgaccgtccgctcgactaccgcgccgccatcgacgcccgcatgttcgggctcggtgtccagcgctacgaccagctgatcaacctcatcctcacgctgcgccgcccgcagctcgcgaagaacctcgatcccaagggactgtcgcaggcactcaccgacggtctgcgtcccctcgacgaacaactggtcctcgaggcggcgcgctcgttcagcgacatggaggaggtcggccgggcactcgaagggctggcggcggcggaccaggcggcgcagagcttcgtcggcgtgtacgcgaaataccttcgccagcaggcgcgtacggacgtcgaccaacttgcgacccggctcgacgcggtgcggtccggcatcaccgccctccacggggcggcagccgaccgggcacgcagtcaggagagccgggaggccgccgaagaacgcttcaccgtcgccgaacgcgcactcgaccaggccaacgccaccctcgacgcactgaagcggtcgaccgcctacgaggggcggacgcagctcgacgacctggcgcaggccgtgtcgacgctcgagaagtcgacggcgctgcaggcagagaaggcacgcaaggccaaggcgaccctcgaacagcggtccgaggagcacgagaaggccggtgacgccgtcacccgcgccgtcgaggcgctcgcccacgccgaggacgaacttcacgtcgccgccgaggacgccggaatcacctggaccgcactccccgacaccgcgcgcgccgaccagttgaccgcggcgctgcgcgggcacgccgaggaacgcgacggcgaccttcgcgcggtccgggccgcgctcgccaccgtcgagagggccgccaccgagcggacccgcgccgacgacgcggcgcgtcgcggtcaggagcaactcgacaccgcgaaggtggccgtcctcgaggccgagaccgcggtcgaatcggcccgcagccggtgcgccaccgaactccgctcctggtggacggaacagtcgtccctctacgccgagatcgaggcgcccgctgcgctgttcgacgcactggacaccgccctccgcgggatcggcgacgaggacgccgccactctgtcggagacgctgacggagcagaccagggacgccgtcgacgcactccggatgcgtcgtcagcagtacgaccgggacgccgccgccgcggccgaggcgatcgccgaatacgaatctgtgcgcgcggcaatcgaatccgagcacgacgacgccccacccctcccggccggcaggcacgacacgcggtccgggctgaccggtgcgccgctgtggcgtctggtccggttcgccgacggtgtcgacgccgcggtcgcggcgggaatcgaagccgcactggaggccgcgaacctcctcgacggctgggttcccgtcgacgacgcgcttcccgacgtcgaatccgaacagttcctcgtggccctcccggccggggaccggcccaccggcaggaccctcgccgacgttctcgaagtcgaacaggacacgggtgttcccgacgaccgcgtgcgcggcatcctcgaatccatcgccctcgaatccctcgaccccgccgagggaccggtgggcgttgcccaggacggcgggtaccgccaggggatccagcggggacgacacacgaaatcggatgcggagtacatcggaaccaccgcgcgggcccgcaggcgcgccgcccgactcgtcgaactcgacagaacgctcgcggaaacccgggcgacgctcgacgacacccgggcgtccgcggaggcggtggcagagctgctgacgcggaccaccgcggcggcgcgggccctcccccgcaccggatcgatcctcaccgcgctgaagaaggtcaccgaatcggcaggcgcgctccgcagccgtaccgacaccgcgacagctgtcggtcgcgaactcgaccaggccatcgccgacctgtccgcgaaggaaaagcaactccgagccaccgcatccacgcaccggacaccccacgtcgcccgcgagatcgactcgctcgccgcggccgtgcggcatttcgagaagcagggcgagatggtgcagcggtgcaggcgcgaacacggcaaggaagtggagcacacacgacagtccgaggaccggctgcacgaggcgcgcggcaacgcggaggaatacgcggaggaggccgccgtcgccgaagaggtcctcgcgcaacagatccagcgcctcgggacactccgcgacacgctgggcgcgggggccgaggaactggaccggcaactcgaggaggcgcacgcgcggatcgaggcgtgcaagaaggagcagcgcgacgcccgaaaggcagacaaggatgcgggcgaggccatcggcaaagccgagggcgcctacaacaccgccgtccagacgctacggctggccctcaccgaaacccacgccgacgccgcccacctcgcgccgtacgcccggcgcgacctgctcgaactcctcggcgtcgacggaggccacacctggcccgccagcgcggcggcgtggatgagtgccgagcagctggtgtaccgcatacagaacgccggtcaggacatcccgatcctgccgcccgaagtggacgcgctgttccgcgcactggacagcgccaccgactcggtgcgggtcagcgactcggcacgcaagtcgacgcggaccgcgctcaccaccgcgctgcaggatttcgacgcacaactcgccgccgccggccaggactaccggctgcagtgggacgcacccgacggcctgacggtggtgcaggtgcaggacgacgagggttactcgtcgatcggcgagttcgccgcccgcatcgcgtccgcgcgctccgaccaggaactgctgctcaccgaatccgaacgtcgcatcctcgaggacgcgctgctcacgggtctcgctcagcagattcacgaacggaccgtcgacgcccgcgaactcatcgcccggatgggcaccgagatgcgggagcggcggatgtcgtcgggcaacaccatcggcgtccactgggtcctcgccgacaacctcgacgacagcgcgaaggccatctccaaactgctcgagcgcgacacctcggcgctgggcccggacgagctcgccaccatgcgcgcccacttcgcccaccagatcaggactgcccgcgccgcccacccggagcggtcgtacccggagatcctggcgtccgccctcgactaccggcggtggcgggtgttctcgttcaccctgatcagcggcaacggcaccgaggacaggctgacggtcgcccggcacagcgcactctccggcggcgagcagtccgtctcgctgcatctgccgctgttcgccgcggcgcacgtgatgctcgactcggccgacccgcacgccccgcggctgctggcgctggacgaggcgttcgccggcgtcgacgacaacggccgggcggaactgctcggcctcagcgtgcaattcgacctcgacctgttcatgaccgggttcgacctgtggatcacctacggcggcgtgccgggctgcgcacactacgatctggcgcactcgacggcggagcagagcgtcagcgccaccctcctcgtgtggtccgacggtgaactactcgccgaacacgacggcaccgacctggcgcaggcgctcggttcgcccctccgccggcgcgtcccgactcccgcggagggtgccctcgagttcgcctga

SEQ ID NO: 49800 - DNA, 708 bp, Thermobifida fusca YX
gtgatccgggagccagcagaccgacgcgcgaaaccgccgtacgggcgcgccgccgtgctcagattggcttcctggtttgaccaggccgacgcggccacggcccaccgcctcttcaccgccgcgttctccctctaccccgcgcggcacctcagcggcagcaccgaggagaccatcgcagtggccgccagttggtgggatgttccccccgcggacacgtcagcggtccgccccgcccgaggcggggctcttgccccggcagaagaccacagcgcccaacaggtgcgcctccgcgacaccgcagaagccgcggcccactggcggcgctccgctgctgaggaagtgcggtcccgtctcgccgaactgacgccccgcaccggccgtatcaccctgtcccaggcggcgctcggagtgctcgtggagctcctcacccgtgccctcggctccggcgacgccacggccgccccagtcagtgccggcgacctcgaactcgacatccggctccatgtgcgccacgatgccgatgccgtcctcgtgctcagtgaggacggcggcgacctcaccctcaccgggctgcggctgtgcgccaccccttacgcccgcaccgaacccgagcacggcagcgacgccgtagcggacaccgacacggagccccacacccccgtcccggcaatgagtgggtcggacgacgccgacaacctcgcggtgtaa

SEQ ID NO: 49801 - DNA, 1209 bp, Thermobifida fusca YX
gtggccgcgaaggaggacatcgcgctcaccattgagcgtcaggctgcggcccgccgactactggcggaccccctcatcaccgtgcacagccatcccgaggatttcgcgctcgtccaagcccactccgactggctcgtccgccagttccggcgcgtgctcggctacgagctgctcatcgccgacgaccacgccaggctggtgaagaccgggctggtccacacggtgaccaccccactgctccgcgacagcggcgcgccgttcaccccgcgcgcctacacctatatggcgttgactctcgcggccctgcccgatgcaggtccgcgcaccaccgtcgccgagctggctgcgggggtgcgggccgctgccgaggaggccgggctcgccctcgaccccgaagcgaggctgggggagcgccgcgctttcgtcgccgggctcaccagactcgtcggatggggggtgctcaccgagaccgggggacggctcgccgactacgccagggacggcacctgcgaagtcgccctggccgtcaaccacgggatcgccgcgcacctgctcgcccacatcccgcacacggccaccccggaggagttcgtcaacctggtccaacgcgactcggtctcctccgacgagaaagccgccgaactcaccctgcgccgcctgcttgcggaaaccccggtcgtctaccgggaagagctcagcacggtccaccgggtccagctcgcccgccaccagtggcgggccgcagcggaactcgcggatctcctcggctgcgacctggagatccgcgccgaaggcgtggccctgatcatgcctgcagaggccatggatgacccccgggaagccgtccatcccacgaccttccccggaaaaggactggtgagctactccgccctggtcctgctgtcccgcctcgtcaccatgctcgccccgccgccgttcagccacgggattccgatccccgcggagctgctcgacacggaactcgccgcggtcgttgacaacgtccaccagtggtcacacactgcccacagtcacgtccccgaccctgacgatctcgccgaacgcatcctgaccctgctccacgacagtcgactgctcgaccgtgtcaccaccgacgacgcgcctcaacgcctgaccgaagggtggcgactgctcgccgccgccgcacgctaccgcgacgccgctttcgcccggagcgatgccgaatga

SEQ ID NO: 49802 - DNA, 4347 bp, Thermobifida fusca YX
atgagacaggacaccaccctccccaagcgctaccggctcgaacgtgccgggatccacaacgtctggcagtacgacaaccacatcttcgaattcggggacgggcgcctgctcctgcgcggacgtaacggggcagggaaatccaaagccctggaaatgctgctgcccttcctccttgacggagacgcccgccgtctcgacaccaccggcaccagccggaccagcctgcgctggctcatgctggaagggcgcaccgccaccgagaccggggagaccaccgccacccagaccgacaccaccacgctgggctacctgtgggtcgaattcgcccgccgcggcgacgacggccaaccgcagcggcgcaccctcggcgccgcagtcctcgccgtacccgaccagcctgacgcccgcccgatcttcttcgtcaccgaccgccgcgtcggcgacgatctcaccctcatcgagggcggccgcccgctgcccatcgaacgcctccgcgccgcggtcggccccgacaactgctacgacaccgccctcggctaccgcaccagggtcatgcgcgacctgttcggcctcgacgaccccatgcggtaccgcaacctcatccacctgctctaccggctccgccgccccaccgtcggcgaacgcctcgaagccggcgaactcgtctccgtactgtccgaagccctccccccgatggacgacgccgtcctcgacgaggtcgcccgcaacatcgccgacctggaaagcgcccgcgcccgcctcaccgcgctgcgcaccgcccacgagcacgccaccgccttcctcaccgactaccgcggctacctgcacggcgtcctacgccagcaggccgcggcggtacgcgagcagatcaccgcattcgaggaacgcgacgcggaactcgcccggctcgaagccgaactcgacaccctcgtctccgcggagagcaaggcacaagaggaacgcgaccgcctgcgccgcacccgggacaccgcacactcggacgcggcgaccctcaccgcaagcgccgcgcacccgcggcaggccttgagccggggagaacgcgaagcccgctacgccgcggtagccgcctacatccgcgccgccgaagccgcctgggtcgccagcgaacacgcccgttccgcggaatcccaggcccaccaccgcatcgaccgcgactgcgccgccatcgaacgcggcatcgggggactgcgccgccttcacttcggtctccgcgacgccgcgcgcgcctccggcatcgaccctgcccgcctcggcgaagtcccccagccggtccgggtcaccctcgccccccgggaaagcgtcacccaggtcaaccttgaagggctcgagcaggccgtggaacgccccccggtgcagggactcgagatagacgcgctgcggcgacggctcgccgacctccacgaccggctcacccacaccgacgctgccgccgccgagcgcgaaaccctcgtcgacgacctctaccagcgcgccctggaactggaagcggccgaacgccgggaagccgacctcaccagcgaagcggaatgggcggacagccacgtcgaacaagcccgggaacgggaacgctccgccatcgaccaggtccgcgaagccagcgacgactacgctgccgccgtccgtgaatggtgcaacgccctgcgcgccgctgccccggacgacgtcgacatcgaaggggcgttggacgctttggaacagcgcgtcgagcctccgctcgacgaagacttgcgcgtcctgtccgcggatctgccggaaaccgtgctccacgaggcccacgcggtcgttgaaccgctcctcgcccaggtgcgccacacccgggacgcagccctcagcgaggagcacgacctcgccgcggaactcgcggaactcgcggagcgccgcgcagacgagaccgcccccgtcaccgcgcctcgtccggcctgggccaccgccccacgggacgctgacgccggcgttcccctctaccgcgcggtcgacttcgccgaccatctctcccctgaggagcgggccgggctcgaagccgctctggaagcctccggcctgcttgtcggacttatcacccccgaagggacagtcgtcgaccacgacactagggacctgctgctcagccccaccgcggcgctcagcggccgtaccctggccgacgctctggttccggtcgaggacgagtccgtgaaagtcgaccgtgccgcggtcaccgcactgctctcctccatccgcctgctcggcgacgaagaatcccccgcgccatccggagacggatcgtcctggttccagcccgctgacgcgtcttccggagcagagaactacgtctccctcgacgggcgctggcggctcggcgtcgcctggggacgccaccacaaggccaccgccgaatacatcggggaggaggcccgcgcccaggcgctcgaacgccaccgggccaaagctgaacggcgcatcgaaatggcggaggcgctgctcgccgaagcccaggagcgccgcgccgagatcgacaaccgctacgagagcctggtgcggatcaaccggtccgtcccctccggcgccgaccttgccgcggcctgggccgtgctggacgaggcccgcacctggctcgccgcgaccgtccgcgcccacgccgcggcccgcgcagccgctgacgcagcccgcagcgccgccctcgaacagcgggcgtcgctggccgagctcgccctgaaacaccagctccccgcccactacgaggagctcgcccggatccgcggggccctgggggcgctgcgcgtgcagatctccgcggcccaccgggacttggagatcctcgccggacgactcgaggactaccggcgccacgtcgccgactggaaacgggcccgggaagcccgcatcgtcgccgaggacgcggccagcgccgccatcaacgacatgatcaccgttcggcgcgagaccgagctcaccgaccgggccagcgccgccgacccggcgcagatcgagaacgcgatcgaacaggtgcgctcccgcgcccacaccgcggacgaggccctgcccgcagtcgaacgggacgcccaacgcatccgggacgagcgggtcgcggtcgagacccgccacagcgctgccacggtggaacgcgccgaacaggcccaccgtgccttggccgccggagcgcggctccgagccatgctcgccacccccaccggggaagtcgaccagggactgctggccgcggcaggactccgtgaactcgctgaacctgagggagcgctggccgcctacgatgcagcggaatccgacccggagcgcagcgacgacctcaccaagcgcatccgcgtcctcgacacgctgatcagcgcgatcgagtccggactcgaccagagcgacacggatgtcgacgacagcggcatcttgcgcggccacgaggagctgcaccgcggcctcgccgcaattcccgccgtggcggcccgcaccgaactcaccgaacccgcaggggtgaaacgggtcaccgtccacgacgatcacggcacccacgacatcgtcgactacgccgagcggctgcgcacgcggatcaccgaagcggaagagaccgtggcggcccgcgaagaggaagcctacgaacggcacctcctcggggagcttgcgggacacctgtcccgccagatcagcgaggcgcgagagctcatcgacgcgatgaacagcgtcctgggggaggtcaccacctcccaaggtctcggggtgcgtctggagtggacgctcgctcctgatgcggacgaggacatccacgcggtggtgccgcttttggaacgcccggccgaggagcgcacccgcgtggagaccacccggctccgcgacgccctgcgccgctgcatcgaggcgatccgccgcctcgaccccacagcgaccggaagcgcacagttgcgcgccgcgctggactaccggtcctggttcgccttcaccgtctacgtcaccgacgccgcccacccggaacgggagcggcgcctcacccaccgcaccgcgctcagccagggcgaacagcgggtgatcgcctacctggtgctgttcgctgcggcagcagcccagttcagcgcgctcgccgtccacgccccgcagaccccccggctgatcctgctcgacgacgcgttcgccaaggtcgacgaacccacccacggccgtctgctgggcatgctcgtcgaactcgacctcgacttcatgctcacctcggagcgcgtctggggctgcttcccgaacgtccccaagctcaacatctacgaatgcctgcgcgacccggcggaacccgggatcgccaccttgcacttcacctgggacggcaaacggcgccgcctcaatggagtgtga

SEQ ID NO: 49803 - DNA, 2016 bp, Frankia sp. CcI3
gtgctggtccaggcctgccagactcggccgtcgcttcagccaccgacgaccccgcagactcccgtcttccccagcagtgtcactggtagccggtcacccgccgttcacgcggtagcatggtgggcgatactgggcggtgtgacgagcgacggacagaccgggccggcagccggcggtgatgcgccgccccggcagccgttcgcgcacctgagcgcccccaacgcggacgtctaccgggaggtgctgacgacgttcgcgcgggcgcgggaccggttcatcgtccacatgcgccccgaggacgtgatcgcggatctggggcggccggggcagaccgagtcgatcgtcgccgcgctggacaagctcgttgagtggggcaacctgcgggccgacccggacaccggccgggtgaccacggtggcggacttccaccgggcgcgctacctgtaccagctgaccccggccgggcaggcggccgaggaggcgatcgccgtctacgaggtggcgatcggccgccggggcgccctgcagtcggtggcgctggaggacatcgccgcccagctgcgcgccctggtggagatgacggccggcgacgccgccgatctcgacccggcgaaggtacacctgctgctgctggggctggcggagcggttcaccggactggccgacaacgctcaggcgttcatgacgtccctccgccgagtgatcgacttctcggacggtgacgtggacgcgttcctcgcctacaagcaacggctcatcgactacatcaaccggttcatcgccgagctggcgaaccggggcgcggagatcgccaccctgctgggtcaggtcgagggggccggcgtcgaacgcctgctgctactcgcggcccgtcgggaggcgaccgacgccgtgcccgacgtgcccgaggtatccggctccggggcatccggctccggggcatccggctccggggcatccggctccggggcatccggctccggggcatccgattccggccggaccggagccgggcgaaccgacgctgagcggattcggaccgcctacgacgccgcggtcgccgcggccctggacggctggcgcaaccgctggcgcggcctgcacgactggttcgtgtcggcggattcgcgccgtccctcccaggcacggttgttgcggggcgcggctatcaccgcgatcacccagctcatcgataccgtcgccgcactcaacgagcgccgtaccggccgttcggaccggtcggcggacttccgcacgctcgctcgctggtttgccgaggctcctgacgacgcggcggcccaccggctgtggcgggccgcattcggcctggcctcggcccggcatctcaccgtcagccaggagaccgtcgccgcctggcaggaggacgagccgacaccgaacacgccgtggcaggatgcgccgccgatgcggatcagcccgcagctacgccggaccggttcctacgagcggcgcggaacgccgaaccgggtcacggaccgcgcgcggcagcggcggctgctcgccgagcaggccgcgcgggaggcggagcaggccgcgtccgctcgggcccggctcgccaccgacgggccagtgctgctgtcccagctcggcgtcctggaccggcaggcgttccggctgttcctcggcctgctcggggacgcgctcgccgccaggctggcgggcgataccgaggtggagaccacgtccagcgacggcacggtcctgatccgcctcaccctcgtccccggcgggggggtggcgcggatcgagaccgaggatggcgtcctggacggcccggaacacaccgtcgagatcgtcgacctggccggtgcggcatcgcgtccggcggcctggaacgacctgaacgacctgaacgactggagcgactcgaacgacaggaatgaccgaaaccggcaaaacgatctgaatggccggatggacggcctcgctccggtcgtactcgccggtgggccggaccggctcgagctgctggagaccggacgggtgtccggatga

SEQ ID NO: 49804 - DNA, 1269 bp, Frankia sp. CcI3
atgacggcggactcggtcgccgaggagaaccgggccgcgcggcgcagggccctgcgcgcgctgctggccgggccgctacgcaccgccggcgcggacgacgaggtcctgcggctggtccgccggcacgcgtccgagctgcgcgagtggctcgccgccgaaaccggctggcggctggtcgtcgacgccgaatcggcgcggctgttcaagacggcggcgaccatccaggacgacacgcacccggcgcgggaggggaagggccgagcgccgttcgggcggcgccgctacgtcctgctgtgcctcgcgctgtcagtgctggagggggcggacacccagatcaccctcggccggttggccgaaggggtgctggtcgcggcgagcgacccggaactggcccgcaccggggtcaccttcaccctcagccgccgggacgaacgttccgacctcgtggcggtggtccggctgctgctcacgctcggcgtgctggatcgggtcgccggcgaggaggacgcctatctgcgcgacagcggcgacgcgttgtacgacgtacgccgcagggtgctcgcgtcgctgctgaccggtacccgcggcccgtcgaccatcgacgccgacgacatcggggcgcggctcgccgagctgacccacgagcccgtccccgacaccgacgacctgcgcaaccggtcgcttcgccgccggttgacccgccggctgctcgatgatcccgtcgtctattacgacgagctcgccgaggacgagcgcgcctacctgatcagccagcgccgggcgatcaccagacggatcgaggacgccaccggtctgatcgccgagatgcgcgcggagggaatcgcgatggtcgaccccgacgacgagctcaccgacgtacggatgccggaacagcgcaccgacggccacgtgaccctgctagtcgccgagtatctcgccacccggccggatcccgcggagccggtgccggtcggccggctgcgtggatacgttcggaagatggcggccgagcattccacctactggcggcggggcgtcaccgaaccgggtgccgacgccgagctgctcgccatggcgctggacaagctgcgcgcgctgcggctggtcacggacgtgccgggccgggccggcgagccgccggcagtgctcgcccggcccgcgatcgcgcgctacgccgtcgaggcgccgacgatccacgacggccgggcgggcggcgccggcccggtcagaagcggtccggccagaaggaagaagacgagccgccgatga

SEQ ID NO: 49805 - DNA, 4332 bp, Frankia sp. CcI3
atgagcacctcgacccgcatgcccgcgacaccggcaccggcctcgattcccgcaccggcaccggcgtcggcctcgattcccgtaccggcccgggaggaccgctggcagccgctgcgcgccggcctggtcgacctcttctactacgacgtggaagagttccacttccacgacgggcggctgctgctgcggggcaacaacggtaccggcaagtcgaaggtcctggcgctgacgctgccgttcctgctggacggcgagctggccgcgcaccgggtcgaaccggacggtgaccgcaacaagcggatggaatggaacctgctgctgggcggccggcatccgcatcccgagcggctcggctacacctggctggagttcggccggctgggcggtgacggcatccccgagtaccgcacgatcggggccggcctgaaggcggtcagcgggcgcggcatcgtccggcactggttcttcgtgacccgccagcggatcggtccgcagctgtccctggtcagcccgacccgggtgccactgaccagggacaaactgaaagaagccgtcgacggccacggcgcggtgtacgacaccgcgtcggactaccgccgtgccgtggacgaagcgctgttcggtctcggcgggcaccggtacgaggccctggtcaacctcctgatccagctacgccagccgcaactgtccaagaagcccgacgagaagctgctctcccgggcgctcaccgaggcgttgccgccgctggaccccgcgctcgtggtcatcgtggccgaggcgttccggggtctggacgaggaacgggagacgctgcgcgccctcgccgaggcggaaacggctgcgcaggcattcctgacccattaccgccggtacgcccgagtggccgcgaagcggtacgccgcgccgccgcggcaggcgcacagccgctacgagcagcacgggcgggatctcgccgaggccgacgccgcgcatcaggcggcggtcgaggccctgacggccgcgcagcaggcgctcaccgaggtggaggaggcgaaggccacactgaccgcccggcgggacgcgctgcgggacagcccggagatgcgcgacgcggcggcgctgcggggcgccgaggaggatgccgggcggctcgcccggttcgccgcccagcgggagcgggacagccgggccgcggccgaggctgccggcgaccggaagcgccggctcacgggtgcggaacgcacggtccaggccgacgcggcgggcttcgacgccgcggtccgggccgccgggctggcggccgaggccgccctggtcaccggccggcacgccgcggtactcaccgagctggacggcggggaaccgccgtaccgcgacgcccggcgatccgccgaggccctggtcgggcagcagggcaccgccgtgaaccgtctcgacgggttgctgcgcgcggcggccgacgccggcgtggcgctgcgcgcggcccgggacgacctggaccggatcactgccgagcagcaggccgccgccgagcggatcgcggcggccgaggacctgaccgcccagcgcggggcgggcctcgtcgtggcctgcacggcctacctggccggctgcgcgtacctgcggccggccgacccggacgccgcgctggcggccctggccggctgggtggacacactcgacgggtccaacccggtcgccaccgcggtggacggggcggcgcggctggccaccgccgacctcgggcgccggcaggccgtcctcgacggcgagcagacggccgcccggcgggaactcgaacggctcgccgaggagatcgagcggctggcggccggtggccacgactcgccgccggccccgcacacccgcgacgagcacgggcgggacggccgggacggcgccccgctgtggaaggtcgtcgacttcgtcgacggcgtgcccgacgagcaccgggccggaatcgaggcggcgctggaggccgccgggatcctcgacgcctgggtcggcccggacgggcggctgcacgaccccgtcagcgacgacgttctggtcacgcccgggcggccggcgccggggggtgggctggccgcggtgctcacgccggcgatcgaccgcgacgacgcacgcgcggcccggctgagcgacaccgcggtcgccgccgtcctcgcgacgatcggcctgcgcggcgggcccggcccggccggcggctccttggtccacgggccggcggccaacgggacgacggccaacgggacgacggccaacaggacctcgggcaccgagacctgggtcaccgtggacggccggttcggtaacggggtcctgaccggcggttggcgcaaggaaaccgccggctacatcggtgagggtgcccgcgaggcggccaggcgggtccggctcgaccacctgcgcgccgatgcgacccggatcgagctacggctcgaagagctggccgcggccgccgcggagctggccgaccggcagctctcgctggccgccgagcacggggcccggccctccgacggcgacctgcgcgaggcgcacgcgcagctggccacggagcacaaggccaagcggcggatcgacgcccagcaccaggaggcggccgctgtcgcggcccgccggcagcaggccgcgggtgaggcgcgggcggcggccgaggagttcgccggcgacgtgcgcctgcccgcggagccggccgcgctggccgacgtccgggacgccctgggtgactaccgggcggagctggccgcgctgtggccggcggcggaatcgctggaccggtcccgccgcgcggcgaccgaggcggaacacgaactcaccctcgcgctggaacgccaggaacagaccgccgaggcggtcgccgaggcgcagacgcaggccgacgcggccgccgaacgtcaccgggtcctggtcgagacggccggcgccgccgtcgacgaactgttccgcaaactggccgccgtcgacaccgaactcgaccggtgcgggcagcgggagaagcaggcccgggccgccgaacgggatgcgctcgacgcccggggccgggctcacggccggcgtgagacgttgcgggaggcgatcaccaccgccgcggccgaacgcgaggcggctgtcgcgaggctccgggcgttcgcggccaccggcctgctcgcggtcgccgtcccggacctggagatcccggacccggctgccggctgggcaccgtaccccgcgatcacgctcgcccgggcggtcaacgccgccctcgacgacgtcgacgacaccgaccgccggtgggagctggcgcagcagcgggtgtcggccgagcacaaggttctcaccgacgcgctgtcccggcacggccactcggtcgggatggtcgtctccgacggcgtgatcgtggtcgacgtcctgttccagggccgcaagcaggacatcccggccctggtcgccgcgttggagacggagaccgggcagcgggcgatgctgctgtccgcgaaggaacgcgagatcctggagaaccaccttgtgaacgaggtggccggcgccctgcaggaactgatcagcgacgccgagggccaggttcgccggatcaacacggacctcgcgcagcggcccacgtcgaccggcatgcggctgcggttgcagtggcgggtcgcgcgcagcgcccccgaggggctcggcgcggtgcgcgaccggttgctgcggcagacggccgacgcctggagccccgccgagcggaccgccgtcggcgcgttcctccaggaggagatcaaccgggagcacagcgcggacaccaccggcggatgggccgagcagttgacccgtgccctggactaccgcgactggcacgagttcgctgtgcagcggttccaggacggtcagtggcggccggcgagcggtccggcgtccggtggtgagcgggtgctcgcggcgtcggtgccgctgttcgcagctgcctcgtcgttctacgactcctccggcaaccggcacgcaccccgcctggtcgccctggacgaggcgttcgccggagtggacgacgactcgcgggccaagtgcctgggtctgctcgccgcgttcgacctcgatgtggtgatgaccagcgagcgcgagtggggctgctacccgcaggttcccggcctggcgatcgcgcagctgtcccgccgggacggcatcgatgccgtgctcgtcacgccgtggcggtgggacgggcacgagcgcacccgcgtcgaccggccggtgccctaccagcccgagcggcccgaccaacccgaccagccccagctactcgaccagcccgaccaacccgaccagccccagccgctccgtccggcgcagagcggcaacaccgagcccctgccgttcgagtga

SEQ ID NO: 49806 - DNA, 1305 bp, Frankia sp. CcI3
gtgagcgcgtcgtcgaccggggcctcccgcggtacggaagccgcccgcgatgtggaacggctgcgtcgtctgctgggcggtgagcacacggcgtggctgctcgaccgggtgcggcgcaggatcgagctgggccggccgctcaccgggacggtcaccctcggccgggccagcgcggaccagcggcggggggtcgagcggctgctgggccgccgggccggcaccggcgcctcgctgtccgtgtcgttggacgaggtcgacgcggtgctgcggtccagcggcgccgcgccggacggactcgccgccgccgtccgccagctcaccggggatgtcacggagcgggcggagctggccgcggcgcagtcacgagcctgggcgcaggcgcaccagcccctggacgacctcctcgcccggcgccccgaactcaccccctggcggtcctggctggacagcaccggcctgctgcgccggctggctggcaccccggacgcggcggggccgctggccgccgacctgctccgggtgctcgacgcgttgccctcacccggcgtggcgctgggccggctggccgccaccagcaccggtgacgcgcacgcgctcgacgacggccggccgctggcgacgctggccctggcggcggcccgggtactgggcggatcccacccggcgggtgacggctcggccgcgggccgtcgcgccgcgtgggccgctgtcggggtgcaccgtgacgaactgtcgtccacggtgctctgcctgggtctgccgggcggggcggacagcccgaccggccggatcctggccatctgtcgcgaggcgggggagccctgcgtgctcactctgcgccaggtcggcccgggccaggaccgcggcgacctcggggtgggcctcggagtggtgtacctgtgcgagaatccgatcgtgctggccagcgccgccgacgagctggcgggccgcaccccgccgctggtgtgcgtgaacggccagccgtcggccgccgtcatcagcctgctcgcggcgctcgccggccagggcgcgcggtttgcctaccatggcgacttcgactggggcggcatccgcatcgccaacggcctgcgggaacggatcggctggcggccatggcgtttcgacgcccggtcctatcaggcggcgctgaccacggtgaccggcggcgagctggttggccggccggtcgacgcggcctgggaccccgacctgcgccccgcgctggagcaccatgcgatcagagtggacgaggaactcgtcctcgccgagctgatcaacgacctcggcgccccacacgcctggtaa

SEQ ID NO: 49807 - DNA, 1593 bp, Anaeromyxobacter dehalogenans 2CP-C
gtgcccatcggaagcattcccagcgatccgctatcacgcgagccgcggctcctcgacgccgtctcggtgttccgctacgtcgccgcggctgagaatgcgccgaactaccgcgcgatcatcgaggtgttcgcgcgggcccgcgagcactatcaaatcgagctccgccccgcggacgtgcgcgacgggatcgctcgcctcgcgctcttcttcgagcgtccagccgacgcggaccgcgagcgtcacctcgacgcgcacctcgagcagctcgtggcctggggcaacctccagcgctcccacgacaccggcgcggtcgcgcgcgtcgaggacttctaccgccgccgctttctctaccgcctaacgccggccggcgaggcggcgcaccgcgccgtcgtcgaggtcgaagagaccgttggacgctcgggctcgctccagacggcgatgctcaccgaggttcgggacgccttggaggcgctcgctaccggcgtagaggcgggggacgcagcggcgatcgtccgcgccctccaccggctccgcgccggcttcgagtcgctcactgccgaggcggacctcttcctctcagagctcgaccggcaggcaacggtggagcggctcgactcggacgagttcctgggccacaagcacgctctcctcggctatctcggccgcttcatcggggacctgcgccggctccggcccgaaatcgacctccgctttcgaagcgccgaggcggtcgggacggagcgattcctggatctggcgagcaccgctgcggaccttccaccaggcgctcccggcgaggatccgcgcgagcggtggattgccgaccagtgctcgcactgggacggtattcgcgcatggttccagcccgccggggccgcccgcccccgcgtcgaccggcttcatgatgcagcgcgaggagcggtcgtgaagctcacgcgctcgctggagcggcttgtcgagcaccgcgcccgcgccgtcgaccgcgccgcgagcttccgcacgctcgcgcgctggttcgcgacctgttcgagcgacgacgaggcgcacacgctgtgggccaccgccttcggtctctacccggctcgccacttcgcgctcgcggaggaggaccccgagcgcgttcggccggatgcgtcctggtgggacgccgagcccgtcgaggttcccatccggctgcgcacgcacggagcggtgtcgcgctcgggccggacgccggcggcgctcgatttctcggatgggcgcgcctggattgcggcggtgcggcgccgcgagcgggaggagctggacgccgcgctctcccggttcgcaggacgaggtgcgcagcggctttcggcggtgggcgtcctctcggagaacgagttggcccagttgctcgcgctgctcgaggaggcgctggtcgccccccgccacgcgtccggcgtgcggcgggcccgctccgccgacgggcggcacgacatcgtcctcacgccgccgccggacgaggcctgggtgctggtcgataccgcggctggccggctccgctgcctcgattatgcgctccaggtcgtgccggtggtggcgcggcggaccgctacgtcgggggaggggacgtga

SEQ ID NO: 49808 - DNA, 1209 bp, Anaeromyxobacter dehalogenans 2CP-C
gtgaccccggtgtgcctccgggacgagcgggccctggccgaacgccgctcggcgctgcgcgtgctcctcgctcggccgctcctcgtcgcggaccaggacccggagaccttcgcgtccgtggtgcgccaccgtggcgagctcgcgcgctggttcgccgatcacgcagggtggaccctcgttgtggacgcgggcggtcgccacgcgcgactcctcaagcggccggtccgccccgatcccacccggcccgcgggcgcgccggggaaggggccgttcgaccgtcgccggtacgtgctcttctccctcgcgctcgcggcgctcgacggcgagggggcacaggtcacccttgcgaggctcgccgagcgcgttcgcgagctgtcgctcgaagacgtggcgctggcgccattcgacccggaaagctccaccgagcgccacgccttcgtggacgtgctgcgcctgctcggggagctgggcgtcgtcgtgttcaaggacggagacgccgagcggtacgttcgcgaccgcgcgtccggtgacgcgctctacgacgtccgggagcggctcctcgctcgcctcctctcggccccgcgtccgccggccctcgccgcgaacgctgcacatatggccgaggaggagcgcgccgggaccgaggaaggggatcgcgcggcagggcggcacgaggtcttccgccgcctgctcgacgatccggtcgcctacagggacgacctctcgccgcgtgcccgggagtggctcgcggctgggagcggctttctttacgagcggctcgagcgcgacgcgggcctcgtcgtcgagcgccgggccgaggggctcgccgcgatcgatacctccggcgcgctcgccgacaccgcattcccggacggcggctcgaccgttaagcacgctgcgctactcctctgcgaatggctcgccgacgaggcgcgagagggacgtcggctccaccctgcgcagccgccgcctggcgtgctctggcgggcggtcgtagcgcggatccaggtgctccaggcggagcacgcgggccggtggtccaaggagttcgatcgctccgacgccggcgccgaggcgctcgcgcgagaggcggttcgccttctcgtcggcttcggcctcgccgcgatgctcccggacggcggcgtggtggcgagaccagcggcggcgcgctttgcgccccgggagacgatgacgggaggccgcccatga

SEQ ID NO: 49809 - DNA, 4044 bp, Anaeromyxobacter dehalogenans 2CP-C
atgacccgagctgccagaccggagctgttgccgctccctgcgggagcgcgctggaccttcctccggggcggcattcagaacgtctgggagtacgacgaccgtcgtttcgtcttcgagcgcgggcggattctcctgcgcggccagaacgaggcggggaagacgaaggcgatggagctgctcttcccgttcctcctcgacgcggacctcgcgccgcagcggctcgatccattcgggtcgaccgcgcggccgatgcgctggaacctcctcaacgaggccgaccccgagcagcagagccgtaccggctacgtctggctcgagctcgggcggcaagccgatcccggagcgatcgagttcctgacgctgggttgcggcctgcgcgcccgccgcagctcgccggacgtggatccgtggttcttcacgacctcgcttcgcgtggacgatccgctcacgttggttgtagaggggacgcccctcacgcgggcgcagctcgtcgaggcgctgggagcggcaggtcaggtgttcgagcgcggatcggactatcgccgcacggtgaacgcccggctcttcgggattccggacgagcagtacgacgcactcgtcgagaccctcctccaacttcggcggccgcagctctccaagatgctcgacctcgagcagctctcgcgcttcctgtcggctagcttgccgccgctcgatcggaccgtcatcggtcccatcgcggagggattcgagcggctcgatcaccatcggtccgacctcgagtctcgcgaggtgctcctcgaatccctgcgggggttcgagaacgttcaccgagcgcacgcccgcgccgccgcccgcgggcgcgcactggaactcacccgcgcagagagcgcctaccatgccgcccgcgccgaggcgcgcgagaaggcctcagcccgcgacgaggcggccgcgcactgcgcggagctcgaggatcggctccgaaagctgagtgagcaacggcaggagctggaagagcggcggcgggcgctggagggctcggatgcgtaccgggcggtccaggacctggatcgggcggaagcggatgccgccgcggcgctcgagcgcgagcggtcggccgcgcggcggctcgacgaggacgtccaatccgagcggaccgctcgccagacggccgcggattccgccacggaggtgaaccggctcgccctagtgttcgaactcgcacgcacctccggtctcgagcgtgcgcgagaggcggcgctcgcggcggcacatggcgccgtggacgccctcgcggcgaagggagatgtggccgaggccggcggggcgctgggcgccgcgcgcgaggctcgggaggacgtcctcgggcggctgcgccagctctccgccgcgcaccatgacgccctgtctaccgcgaggcgggccgacgctcgcgcccgcgacttggccgccctcctcgaggacgcgcgcgagcggctgcgcaaggccgaggaggcacgagacgcggccgaggctgagtgggtgcacgatgtggggaggtggaccgcgtcgctggaggtcctctcgcgcgaggccctaccgcagcctcgcagcgacgacggcggcgccgcgcccgaggcgcttcgggtcgccgtcgaggccgtcgcggcgccgcggcgccggcagatcgaggaggaacgggcgggcgtcgtctccaggcgcgacgtcctcgtcggggacgccggccgcctccgcgcggagcgcgacgcgctcgcggcccggccacacgtcgaccccgcgcccccaaactggcgcgagccccggcccgtccaaaggccgggcgcgccgctgtacctgctctgcgacttcgcgccagccgtcgagacctccgacgagcgggccgggctcgaggcggcgctcgaggcctctgggctcctcgacgcctgggtcgagccggacggcgtgctactcgatgcgcgcacccacgacacgatcctgcggccaggtccggcccacgtccggacgagccgaacattggccgacgtcctggtcccgacgcccgcgggcggcgtagatgcccggcgcgtagccgaggtcctagcggcggtggcgctcgttggtgcggccgacccggatcccggcccggacacggcggcgtgggtctcgccggatggtcgctggcggctcggcccggcagcgggcgcctacgcaaaggaagtgaccgactgggtgggcgaaacctcgcgcgagctggcccgagcgcgccggctcgacgagctcactgggaagatcgtcgctttggacgcgcacatcggtgcgttcgaccaggcggtcaccgcgatcgcccagcgcgccgatcgactcgcgcgcgaggtcgcgtcgcttcctggcggcgagctagccgttacggctcgcctgcgcgtcgacacgagcgcggaggcggtggcaacggcgcgggggcgacacatcgaaggcgagcaaacggcggcagccgcgacgcgagcggcggaggatgcggcatcgcgcctcgatcgtgccggggcggagtatgggctcgcggcgtgggcgcgcgatcccgaggcgctcgcgcggctgaccgaagcctggtcgcacgcggcagagcaactcgtccgggcggccggcgacctctggaaggcgagggccgcgggcgaccgcgccgccaggttcgtcgaggaagcgagtcagcgtgccgagcggtcgcgaagggaggcagatggcgcatccagcgaggcgaccggcgcggcggcgcgggtgaaggcgctccgcgagactgtcgggaaggaccgggacgggctcctggccgcgctcgctgacacccgagggcggctccaggcagtggacaccgagcgggccacggccgagcgcgcgctcccgggtgcgcacgaggcaaggggtgcgttccgtaccgcggccgagagtgccgagaaggtggtctcgacgcgcgatggggcacggcaggaggccgcgcgggcgttcgaagcgctggcccgggtcggcctcctcacggcagcggcgctcgacgcccccgcggacctgtcgagcttcactgttacgcttgagacggctcgcgtggtcgacgcccgcgtcgccgacggcgctacgcccgaggagcgggagaaggccgaggatcggttggtgaagcgcgcaaacgagctcatgtaccagttgccgccggacgtgcggctcgtctccgcgaagctcgacggcgtgctcgcctacgtgttcgcgacaggaggccgcgagtggccggcgcgggcgatggtcgaggacgtcgagtccgacgtggcctcgcggcgtgacctcctcgccgaagacgagcgcacgctgctcgagcggttcctctcgggggaggcccacgaccacctcgcaacacgcctgcgcgaagcggcggcgctcgtcgcccggatgaacgaagcgctgcttccgcgcacgacggcggcgggctcgcaggtgcggctcgcctggcacgtcgacgagttggcccaagaggacgcacgggaggcggttccgctcttcctcaagtcggggacgctcctgtccgagcggaaccgcgaggcgctccgggtgttcctcgagacgaggctcgccgccgcgcgcgagggcgagggaacgcgatcgctccaggaccggctcatcgaggtgctcgattaccggagctggcaccgcttccacgtcgagcaccacgctccgggagaaccctgggtgaagctcaccaagaagatgcatgccgccggatcgggcgggaagaaggcggtaatgctccacctgccgctcttcgctgcggctgcggccttctacgattcggccggccccaccgcgccgcgcgccatcgcgctcgacgaggcgttcgcgggcatcgatcggccgacgcgcggcaagctcatgggcctgctcgccgagttcgacctcgacttcgtcatgacgtcattcgaggagtggggctgctacgaggagctggacggactctccacgtatcacttgtcacgggttccggggcagcgcggtgtcttcgccgagtggttcctctggaacggccgcgagcgggtcctggtggacgcgtcgtga

SEQ ID NO: 49810 - DNA, 1452 bp, Rhodococcus jostii RHA1
ttgaaactgttcgccttcaccacggcggagaagcgcgcggagtacctgtgggtgctgcgggccttcgaccacgcccgcgccaactacgtcgtcctgctccacgccggcgacgtcgcccgcattctggacggtctcgcggtcggcgatccggccggacaactcggcgccggcgacgtcacccccctgctcgagcaactgcacgtctgggaagtgctcgaacgcagctacgacggaacccgcgccgcgacgctggccgaataccggaaccggcacttcgtctatcagttcagccaggccggctaccaggtgttccgagccgtcgaggacgcgctggcggcccgactcgacgacgcgtcgctgtcccggctggcgctgcccgacctcctcgccgacatgaacgacctggccgccgccaaccgcgcggccgacaacgacctcgtgtaccggaaactcaaccgtctcgacgcgacgctgtcggacatggccggacgcgccgcccagttctacctgaccctcggcgacctcgtccgcaccacggagatcacgcccgagacgttcatgtcccacaaggacgctctcctcacgcacatgcgcgagttcagctccgacctctcgcgctatgcaccgaaactcgcggcggccatcgcgctcgtggaagacaccggcgtcgagacgatggtggcgcgggccgccgccagcgacgagcgggtgttcctctgcatcgaagagcgcgaagccgattggcgcgcgcggtgggcgggattgacgcattggttcgtcgggagcgaggccggtctcagcgagtcggaacgcctccgcgagggcacgatgagcgccatcgccgccgtcctgtcgctgctgcgccgcgtcaccgagacccgcaagggcggtgtcagcagggagagccaattacgccacctcgcaggctggttcgccgccactccgaccgaggacgccgcgcatgcactgttccaggccgtgttcgacctcgggcgtccgcgccacctgtcgatggtgcatccggacgccgacatcattcccgacacgcggtcgtggtgggaggcccagcccgtggagatctcccgcacgctcgccgagacgggacgtcccccgtctccaggcctgcccgcacgggtgcaccgcaacgagggcagcgtgcgccgcctgcgggaggaacagctgaccgcgcaacgacttcgcgccgccgccgcccagtcgctggcccggggcggggtctacgagcgggaactcgacgaggccgaaaccgacgtgctgctgagtctgctcaacgccgcgctgacggcgcgggttccggtcagcggccgtgtgaagagcagcacaggatcggagaacggcgtgaagctcaccctcagcccgcacagcgaatcgacggtggtgcgcaccgcccgaggacgtctgcacctcgacggactgcaggtgagcgttcggtga

SEQ ID NO: 49811 - DNA, 1395 bp, Rhodococcus jostii RHA1
gtgaaggcacgggagatctcgccgctcgccctcgattcgtatcagcgcgccgcccgcgtcattctgtcgaatcacctggtgacacagacctatccggatcgcatcgcactccccctgctccgccggtgggccaccgaattacgcgacgatctgatgacgctcttcgggtaccgactcgaagtcacggagacgaccgcccggctgttcacggtgagcgaccgactcgacgccgggaccccggccaagacggccaccgaccgcacgttcgaccggtaccgctacgcctacctcgcgttggcgttggccgcgctcggccgcgccggaaaccagatcaccctgtccgagctcgccgatcacgtggccgccgacgccgcccaggtcgacggtgtggacctgtccacggaacgcgcgtccgaccgggatgcgttcgtcgacgccgtcggctggctcgccgcccgcggcgcgatcgccctcgccgacggcgacgcgggcggctgggccgccaatcccgatgcgggagaggcgctctacgacatcgacaggtccgtcgtcatcgccctgttccggccgccgcgcgcactgcagcacctccggtccatccgcggactgctcgccggtgcggacgcggtgaccgaggacgacacctccgagttcgggaccgcccggccggtcgacgtgaaggagaccgcgcggcaggtccggcgtgctctcgtcgaacggcccgtggtctacgccgccgacctcgacgatgacgagctgatgcaactcgcactcccccgcaccgcagccgatgtcgagttgctcaccggactggtcgcggagcggcgtgaggagggtgtcgcgatgatcgactcctccggacgtctgtccgacgtccggttccccgggacgggaacggtcgcgcaggtcgcgctcctgctcgccggcgagatcgccgatcgcgtactggatccggacgctccggagacggcccggatgccgctgccgcgggcccggttcgacgacctgatcgaacaggtcgacagcgccattccccagtccgggatcttcgacagcctcgccggccacgacggattcgaacccgcagaccccgcccccgaagaccggctgttcccggtcatcgaggacgactggatcgccggcaccgtccggacactgaccgaacggttcgggcgcacgttcgccgccggctggcaggcagacccggacggtctgggacgcgcggcgctggcgctgctcgagcggttacgcctcaccgcggccgtgccgggtggcgtgctcgcactcccggcactcgcccgctaccggggtgtggtggtcacgatccgcgaccgcacacccgagatcgacctgttccagagctcagcgaacgacagcgaggaagtcacagcatga

SEQ ID NO: 49812 - DNA, 4158 bp, Rhodococcus jostii RHA1
atgacgagtgcgcgtttccggcccacccgcgccgggatcatcaacctctgggactaccgcgatcaggagttctccttcgccgacggtcgcctcgttctccgcggtcccaacggttccggcaagacgaaggccctcgaagtgctgttcccgttcgtcttcgacggccggatcgaaccccggcggctcaatccgttcgccggcgaggaacgcaccatgaagtcgaacctgctgtaccgcgggcaggagagcgcgtactcgtacgtctggatggagttctgccgcggcgcgaaggacgaccccgaggccgtcaccgtgggcatcggcatgcgcgccacccgcaccaacgacaaggtcacacgctggtacttcgttgccgacggtcgcgtcggcgtcgacttctccctactcggcagcgacgaccgtccgctcacgaaaaagcaactgggcgaacagatcggcaccgactccatcaccgaccggccgctcgactaccgcgccgccatcgacgcccggatgttcgggctcggcgtccagcgctacgaccagctgatcaacctcatcctcacgctccggcggccccagctcgcgaagaacctcgaccccaagggactgtcgcaggcactcaccgacggtctgcgaccgctcgacgagcaactggtcctcgaggcggcacgctcgttcagcgacatggaggaggtcggccgggcgctcgaggggctggccgcggcggaccaggcggcacagagcttcgtcggcgtgtacgcgaaataccttcgccagcaggcgcgtacggacgtcgaccacctcgcgacccgtctggaggccgtccgatccggtatcgccgctctccatggggcggcagcggaccgggcgcgcagccaggagagccgagcggccgccgaagaacgcttcaccgccgccgaacgcgcactcgaccaggccaatgccaccctggacgcactgaagcggtcgacggcgtacgaagggcggacacaactcgacgacctcgcgcaggccgtctcgacgctcgagaagtcgaccgaactgcaggccgagaaggcacgcaaggcgaaggtgaccctcgaacagcgatccgaggagcacgacaaggccggtgacgccgtcgcccgcgccgtcgaggcgctcacccatgccgaagacgagcttcacctcgccgccgaggacgcgggaatcacctggaccgcactccccgagaacgcgcgcaccgaccagctgaccgcggcgctgcgcgggcacaccgaagaacgcgacggcgacatccgcgcggtccgggccgcactcgccaccgtcgagagggcggtcaccgaacggaccagggccgacgaggcggcacgccgaggccaggagcaactcgacaccgcgacggtcgccgttctcgaggccgagaccgcggtcgaatcggcccgcagccgctgcgccggcgaactccgatcctggtggacggaacagtcggccctctacgccgagatcgacgcgcccgcttcactgttcgacgtcctggacgccgccctcggccggatcggcgacgacgacaccgccaccctgtcggagacgctgaccgaacagacgacggacgccgtcgacgcgctccggttgcgtcgtcagcagtacgaccgcgacgccgccgccgccgaggaggtgatcgccgcacacgaatccgctcgcgcggccatcgaatccgagcacgacgacgccccgccgctctcgaccgcccggcaggacgcccggtcccggctgaccggtgcaccgctgtggcgtctggtccgcttcgccgacagtgtcgacgctgccgcggcggcaggaatcgaggccgcactgcaggccgcgaatctcctcgacggctgggtgcccgtcgacgacgcactccccgatgtcgaatccgaacagttcctcgtggcccttccggccggggatcggcccaccggcacgaccctcgcggacgttctcgaggtcgaacaggacacgggcgttcccaacgatcgcgtgcgcgggatcctcgaatccatcgccctcgaatccctcgacctgtccgaaggtccggtcggtgtcgccgaagatggtgcgtaccggcagggaatccagcggggacgccacacgaaatcggacgcggagtacatcggaaccaccgcacgggcccgcaggcgcgccgtccgtatcgccgaactcgacaggatcctcgaggaaacccgggcgaccctcgacgaagcccgggcgtccgcggatgcggcggcggcgctgctgtcgcggaccaccgcggcggcgcaggccctgccccgcaccggatcgatcctcacggcgctgaagaaggtcaccgaatccgcaggcgcactccgcagccgctccgacacggcgacagcggtcggtcgcgaactcgaccaggccatcgccgacctgtccgcgaaggagaagcagctccgggccactgcgtccacgcaccggactccccacgtcgcccgcgagatcgactcgctcgccgcggccgtccggcatttcgagaagcagggcgagatggtgcaacggtgcaggcgcgaacacgccaaggagatggagcacacccgcgagtccgaggaccgactgcacgaggcgcgcggcagcgcggaggagttcgcggaagaagctgccatcgccgaagaggttctcgcgcaacaggtccaacgcctcgagacgctgcgcgacacgctgggatcgggggccgagcagttggaccgccaactcgaggaggcgcacgcgcggatcgaggcgtgcaagaaggagcagcgcgacgcccgcaaggcggacaaggacgcgggtgaggccatcggtaaagccgagggcgcgtacaacaccgccgtccagacgctccggctggcgctcaccgaaacgcacgccgacgccgcccgcctcgcgccgtatgcccggcgcgacctactcgaactcctcggcgtcgacggcggccacacctggccggcgagctcggcggcgtggatgagtgccgaacagctggtgtatcggatccagaacgccgacgacgacacccagatcctgccgcccgaagtggatgccctgttccgcgcactggacggcgccaccgaatcggtgcgggtcagcgactcggcgcgcaagtcgacgcgcaccgcgctcaccaccgcgctgcaggacttcgacgcacaattggcggccgccggccaggactaccggttgcagtgggacgccccggacggcgtgaccgtggtgcaggtgcaggacgacgaggggtactcgtcgatcggcgagttcgccgcccgcatcgcgtccgctcgctccgatcaggaattgctgctcaccgaatccgagcgtcgcatcctggaggacgcgctgctcacgggtctcgcacagcagatccacgaacggaccgtcgacgcacgcgaactcatcgcccggatgggcaccgagatgcgggagcgccggatgtcgtccggcaacaccatcggcgtccactgggtgctcgccgacaacctcgacgacagcgcgaaggcgatctccaaacttctcgagcgcgacatctcggcgctggggccggacgagctcgccacgatgcgcgcccacttcgcccaccagatcaggactgcccgcgccgcccacccggagcgttcgtacccggagatcctggcgtccgccctcgactaccggcggtggcgggtgttctcgttcaccctgatcagcggcaacggcaacgaagaccggctgaccgtcgcccggcacagcgcgctctccggcggcgagcagtccgtctcgctgcacctgccgctgttcgccgcagcgcacgtcatgctcgattccgccgacccccatgcgccgcgactgctggcgctggacgaagcgttcgccggcgtcgacgacaacggccgggccgaactgctcggcctcagcgtgcaattcgacctcgacctgttcatgaccgggttcgacctgtggatcacgtacggcggcgtgccggggtgtgcgcactacgatctggcgcactcgacagccgagcagagcgtcagcgccacgctgctcgtgtggtcggatggcgaactactcgccgaacacgacggcaccgacctggcgcaggcgctcggttcgcccctccgcaggcgcgtcccgacgcccgcggagggtgccctcgagttcgcctga

SEQ ID NO: 49813 - DNA, 1566 bp, Anaeromyxobacter sp. Fw109-5
atggcgccgcggtgcaccctcgcacgcatggcgatccgggacgacacgacaactgagtcgctcgtcgcgtcggtcaccgacgcgcggacggcgctggtctacctcgtcgtccgcgagtccgatcagtacgtcgcggtcatggatgcgctcgagtcgtcgatcaccgacctcaccccgcgcgaggtcggctcgcgggtccgggcggcgacgggcctcgcgctcgaggacgcggtggtggaagctcgcctcgacaagctccgggactggggagcagtgtcggcccggaccgacgcctcccggatcctgaggcacgcggacctgctcgcccggaactggcgctacacggcgacgcccgtcggacgccaggtccagcggttctaccgggaggtcctcgccggtacgccgaccgttcgcgagatcccgctctcgagcctcgcccgcgtcgtcgagacggccgaggcgctcgtcggatccacccagctcggcccggacacggcggggctcgtcgggcagcttttcgtcaaccacgacgacctcgactcggcgctcgtcggcgccgaggacaaccttgccgccctcgtcgaccggttcgacctggacgaggagtcgaccgccgagctcaagtcgctcctggtcgggtacgccacgcacgtggccgtcgagctgggacgtggctcggcgcgcgcgcaccgcgcgctcgtcgcgctgcgcggccggttccccgagctcgccgctgcggcggtccgtgcttcggatgcgcgtgcgctgatcgagcgcggtgcgatcggagcgtcgcgcggtggcaccgtcgaggactggagcgcgctcctcgcgtggttagatcccgactccggacgctcggaacgtttcgccctgaggctcgtgcgcgccctgccgggcatgcacgtcaacctgcgccggctccacacgtcgtctggaaccgcgacgaaccgcagccgtgcgctcgcgctcgcgcgtgcctgtgcgcacccgacgctgggcacggcggttctcctcgccgcgctcggcgaccacccgtggcgaaagctgtacgccgaggcgccggacgccgatctccctcgcgtgcgctcgtggcgcgacagcccgcgggtcgacgtgccggagctcctccggctcaccgggcgcgccggggctcgcgggcgcgcgcccgccgcccgcgacgacgctgcggcgcggagcgcggtggcccaggcacgtgcgaaacgaatggccgagcacgccgcggccatcgaggaagtgctgatcgcgggggcgggagcgtcgctctccgagcgggcggctcgggtcgcgctggcggcgctcaccgccgccgcgagggcgaggagcgacggcgggcgccgggtcgcggtccacgacgggctcggatgcacgctcttccacaccggcgccggcctggggtgtgtcgtcgcaccgacgtggcgcgtcctcacgccgggacgcgttccggtgtttcatcttccgaccgagaccgcccgcgcgcccgaggtggccgtgcgccacgaagacgaccagccgcggatcgtgctcgcgggcggtgcgacatga

SEQ ID NO: 49814 - DNA, 1308 bp, Anaeromyxobacter sp. Fw109-5
atgagcgaatcggatcgcctcgacgtcgcggggggagcgaacggtggccccgatgacgagccgcgctcgagcgagcactcccggcgccggcgctgggcgccggaggccagcaccgagacggccgcggtgcttcggctgctcgccgtgcggccctggcttgtgtcgggacgcgacgacgaagggatcgcggccgtccgacggaacctcccggccgtccgcgatgcgctttcgcggctcgggtgggttctcgtcgtcgagcgcgacctcgtgcgcctgcgcaagtcgccgccggcgcgcctcggagcgtgggcggcggatggtccgacgccgctccaagcgtcctggttcttcctgctcgtcgccggtgccgagtccgtcgcgccgcgcgtcggactcgcgcagctcgtggccgccgcgcgcgccgcagcggccgaagccggccttcccgtgacgcacgacatcgcggagcgtcgagcgatcgtgcgcgccctgcgcatgctcgacgaacgcgccgtcgtcgtgcaggtggacggtgagctcgatggcttcatcgaggacgaggacgcgcccgtgctgctcgccgtccatcacgcgcggctcgcgcacgtcatcgcgaacttcggcccgggagatcccgcggaggaccccgcggcgtggctcgagcgagtcgagcgcgagccggaccccgcccgcaggatgcgcaggcggctcgtcgacgacgccgtcgtgcacgtcgtcgatctagaccccgccgagtcggactggctgtcacggcgcgtgcgtggcgacgacggcgcgccgctcgcgatggcgttcggcctcagggtggaacggcgggccgagggcgctgcgttcgtggttcccgaggaggcgttccggcatctccacgagctcgggcccgtcgcgttccccgctcccggaaccgtgcctcacgcggccctcctgctctcgcaggccgcctcgctgaagggggcgctcggctccacgacggaagggccgggaccgggctggagagggctccgcgaggacgacgtcgtcgaggagctccggcgtctcgcggggtcgcgcgccgacggtcgcggtggctggcggcgcgagctggcggacgatccgcggcggctcgcggaagcggtgcagggtctcctctgggccctcgatctcgtccgcctgggcgcgaacggcggaggcggcacgtggtggtggttctcgccggcgaccgcgcggtggtccgcgccaccggacccgaaggcgagcaagcgcgcggaggcgctcgcgttcgacttcgataccgatgggagctcggaatga

SEQ ID NO: 49815 - DNA, 4164 bp, Anaeromyxobacter sp. Fw109-5
atgaacgctgcgccgcagatgccggaggtcgccgcgccgaaggggcaggcgggcgcgccggacaggttcgggcgccggtggcgtctcgtcggcgctggcctgagcaacgtctggcgcttcggagatctcgagctgccggcagcgagcgggcggctcctgctccgcgggttgaacgggaccgggaagacgaccgcgctcgaggcgctctggccgtacctgctcgacctgaacgcgacgcggctcgcggcgggcaaggcgcggccgacgagcctctcgtcgctcatgcgagagggggcggccggcaagcgccggttcgggtacgcatggctgacgctctgcggtcccggggacgagggcgtctggtcgtacggcgtgaggctccagttctccgaaggcggatcgccgcccgtccgcgtcgtcccgttcgcggtgccgggccgcccgcttcacgacctcgcgctctacgtcgaggggaggacgccgctcacggcggagcagttcgagcacgaggtcatccgctgccgcgggcaggtcttcgcggacgaggacgcgtacgtggcgcacctctccgcccgcctgttcgccgtggcaaacaccgagccggtgatcacgctcgcgacacggctccggcaggtacgcaacccgacgttgctcggggaggtgtcaccgcaggccgcggcggacgccctccgcgagtcgctgcccggcgtggcggacgaagtcgtcgccgcgaccgccgaagcgctggccgagtcggagtcgacacggcaggcgttcgcgaaggaccgggaggcgtcggagctgctcggcgagttcggtgcggcgtggtgcgcgcacgcggcggaggtcgtcacgggcgcgcactccgcggcgctcgaggccgcgaagaaggtgcgcgcgtgtcaggggcagctcaagacgcgcggcaccgaacacgagaaggcgcacgccgagctcgagacggccgcgtcggccgtccggcgcctcgaaggcgccgtggcggacgcggaggccgaggtccgagcgctcgaggcccaccaggcgtaccaggatgcggggcggctcgccgacctcaggaccacgctcgacgtccgcgctcgggcgagcgacgccgcggccagagcgatgcagggagcggcgcgggccgccgtgtcgcgaggcgagtcgctccgccgcgagctcgacaacctcatcgaggacgtgaacgagtgcgtggccgacgcggtcgagggggggagcacgcgccggccgccgatcctgtcgtggaccgacgctccacggccggtgcttcgcgcgggtgcggtgacggcggacgcgggtcccgagctcgtgatccacggcactccggatctcctgaagaccaccgccgcctcctggaacgagaccgccgacgcccgcgcgcgagagtcggacgcggcggcgctcgcgctctccgaccgcaggacggcgcaagtggccgaggcggcggccgtggaagcggaccgcgccgcgcgtgaggccgcggcgaccgcggacgcggccgtcgcaagggcggaacgcgcgggcgcagcggcgcgcgaggagagcgcggcgctcctgaccgcggtcgcggcgtggacgcaggcgaactcgcgcctcgcgatgccggctggcatcgctggcggcgaggagcggccggaggaggcgcaggacgagggatggttgcggtcggacgtcgacgagctcgcgaccgcggagccgggacaggtgctcgcgacctgcgaaggatggcagagggaggcgcagcaacgcgccgaggcaatggctgccgagctccgcagccggtcgcaggcggaggccggcgcggcgcgcgaccttcgccgcgacgcggcggcgctccgcgccgaggcgcgcgagcttcggcagggtcggctgctgccgcttccgaggccggagtgggcgggcgccggtgatgacgaggtcgccctcggctcggcgctcgagtggcagcccacgttcggcgacgagcgggagcgagcgctcctcgaggaggtcttcgcttccgcggggctcctcggcgcgacgctgagccccggcggcgcctcctcgccggcgtggcgggtcgacgccctggggcgcgaggtcgccccgagcctcgcgaatgtcgtcgccgtggatccggagcaccccctctccggcgcggcggccgccgtcctcgcgcgcatcgcgctcgcgcccactgccgacgtgccctcgtgcgacgaggcgggcttgatcgtcggacgcgacggcaccttccgcgcgggtgtcctccatgggcgtgttccaggcgcggccgatccggcgaagctggtttcatcccggcatgtcggcgcgcgccggcggagggcggccgcgctccggaaggcggaggagctcgacgcgcaggcggtcgagatcgagcgacaggccgccgagcgggaggggcgctcgactcagctccgagcggaggcggacgggatctcgacctcctcccggaggtttccgccgacggcccacctccgcgccgccgagtcgaagcgtgcggcgctcgtgagcgccgcgcgcgaggcgcaggaccacgcgagcgaggctcggacccgcggcgacgaagcgcatgcgaatgcgcgccaggagctcgcggcgtgggtcgagcggactcgcgccgtcgggctcccggccgagctgccccgcctcgagcggatgcgcgatggaggagccgctgcggcaagccgcctgcgactcggcgcgacgcgcctcgcgaaactcgcggaccggctcgccggcgtcatcgcccggcggcccgtcggggaggtggaggacctcgagcgattcgaggccgtcgcgtgcgaggcgtttagagaggccgcagacacgagaacggccgtcgaggttctcgagcagaccgcgggcgccgcgatcgcggacgttctcgcgcggcacgaggccgcgcagaagcggctcgcaccgctgcggctcgagctcaacccggcgcgcaagactcagctcgaggccgtgcagcgagagaccgcggcgcggcacgcgctcgatgaggccgggcgcaagctgcgcgacgcggagcccggggcggcggaggcgctcggcgccctgcgtgcgctgctcgaggttcccggcgtcgcggacgcggtcctcgatggcgagccgcccaggaacgacgagtcgcttctccgacaggtggagtccaagcttcgggaccgccggacgatcacgaagaagacgctccgcgagcgcgccgacaccgttcgagctgggctcgcggggacgtggtcgctcgatccgggcgaggaccacggtgagctgctcacgtgggtcctcacgcatcgcgacgaatcgtacacgccgacgcaggcggccgcgcacgccgcgaccctgcgccgccgcgccgagcaggccctccaggcgacggaggagagggcgctccgggagttcgtcctcggtcgccttccgggagcgatcggcacggcctggacacggctccacgactgggtgtccgaggtgaaccggaagatgcgctccgcgtcggcgtcgtcgggcgtcggcgtgcaggttcgggtgccgcggcgcggcggcgacgatctctcggccgcctcgaaaaccgtgctcgagctcgcctgcgaggtgtccgacgcggagcgcacgcccgaccagcagcggtgcctcggggaggcgctgcaggcgctcctcgccgcggcgccgggcgagacgatgcagcagcgcgtcgcctcggccgtggacgtccgggagtgggtggacctcgagtacgagatcacccggcccggcggcaagtcgcagcgctggaactcgaagaccggtttgtccggaggtgagcgccgcctcgtcgtgctcgcccccatgctggcggccatcgcggcggcgtacgatcggttcggaccgcaggtgctgcgcatcgttccgctcgacgaggttccggcggaagtcgatgagcgcgggcgcgaaggcctggcgcggtacatcgccgcgctcgacctcgatctcgtctgtacgagctatctgtgggacgggtgtcccggggcgtgggacgggatcgacgcccacgacctggaagcgggaccggacggcacggtcgtcgccttcccgatgctcgtgcgcggactcgccgcgatcccggagctgggacggacgcccgcgccggagcggcggtcatga

SEQ ID NO: 49816 - DNA, 1341 bp, Anaeromyxobacter sp. Fw109-5
atgaacggctgccgcctgtgcggcggcgcgtgcgtcggtgccgacctcgggccgctgttggtcccgcgcctcgcgtggctgtgggagcaggtcgcggcggcggcggatcggcgtggcgacccggcgctcgcgtctgggatcctggacatccgcgcgccgactgagccggacccgcgcgccgccgccggcggactccttggaggacgcgggctcagggccggtcagtcgcggcgagtggacctgtcggatctcgctgacaggctgcgcgtgcggggcccgctcctcacccccggtgccgtcgccgcgcacgcgatggggcgcgcgctcgccacgcgggcgagggcggaagcggaccggaccgacggcgagcggcgcctttacgaggcgttcgtggagacgctgtcggcgaagtcgccgcgcgtcgcgggtggccttgaccgcgaggtcgtctgggcggccctgcggcgcaacggctgggtcgcgaggctcctctccgcgccggacgcgtcctcgctgctccagcgcgtgaacggcgtgttggcggccctccctccggacacggcttgcgtcgatcgccgcaggctcgcgtccgacgtgaccggagatcctcacggcctcgacggtgggaccccgttggctggcctgacgctcgcgatcctggcggcgagcggaacaataatgccacggcagcgaccgcgttccgcgtgggccgaaatcggcgtggagtgcgacgacgtaacgggtggtcttgtcgccgttgggatgatcccggagggctggaacgtacccgctggtgcggcgatcacactctcgccgcgtgttctgagtcgctgcgagtggccgcgaacgggggagggcgagcgatgggtcttcgttaccgagaacccgtccgtcgctgcggcggctgcggatttggcggacgactgtgacgtccggcttctctgtacggacggtactccgtcgcgacgcgagatcgacgccatcgctcgactcgcggctgccgggtggcgcgtcgccgtgcgagcggacttcgacgaggcaggcctcggacacgtcgcggcggtgctcgcggcggttcccgcggcgacgccatggaggatggcggccggggactatctctcaagcgttccggcggacgtcgccgctggcaccaggctcgatgttgatcgcttgcccgaggcgccgtgggacgcacgcctcaccgagacgatgcgcgcgacaggcgcggcagcgtacgaggaggcgctccttcctttattgatgcaagacctccgcgtcggagcgccaccggcgatggacggcgccgaagctccggcgataacggcggcgccgactccgtag

SEQ ID NO: 49817 - DNA, 1698 bp, Frankia sp. EAN1pec
gtggcgggggtcgcggcgtcggagcgggcagggggccgcgaccggcccgcgaacgtctctcggttcgggcccttcgcccatgtgacagtggagaaggccccgctgtaccgcgccatcatgcgcacgttcgtccgggcgaagcgcaggttcaacgtccacctgcgccccgaggacgtcctggaaatgctcgcccgcgagccgggccaggacggggacgggctggacggcctggacctcggcggcatcacggatgtgagcgccgagctacgcagcctggtcgactggggcaacctgcgcggcgatccggacacgagccgggtcacctccgtcgaggacttcaaccgcccccgattcctctaccagctcacgcccgccggcgaggccaccgagaccgcgctggaggcttttgacgaggcgttgggccggcgcggggagctgcaggccgtcgccctgtccgacatccacagccagctgcgggcgctgctagccctgctgccggaaccggagatcgatgcggcgaaggcgcaccagctgctgcgtgacctggccggggtctttcgcgggctggcggacaacgcccaggcgttcatggggtcgctgcagcgcaccatcgatctgcacgacgccgacctcgacgtcttcctggcctacaaggaacagctcatcgactatctccagcggttcatccgcgacctcgtcgtcacctcggcgcggatcgtcgacgtcctgcgggagatcgaggagcacgacctgtcccgcctgctgcgggcggtcgccgagcgcgaggcccgcgacgcggcacccgacctcgaccacccgcccccgccgacaccgtcgcagccggctctgacgtcgcagccggagctgacgcagggggagccggccgagccgctggcgagcggggtcgtcggcgatcggctggcgttgtggacggagcggtgggaggggttacggcactggttcgtcggcgatcggacgcatccgcctcagtcacgcctcctgcgggagcgggctcgggccgccgtgccggcgctgctgtcggtggtgctggtcctcaacgagcgcaggtcggggcgcagcgaccggtcggcggacttccgtgcgctcgcgctctggttcgcgcaggccccgaacgacgacgacgcccaccggctatggcgggtgtgcttcgggcttgctccggcccgccacctcacggtcgacgcggcgaccgtggaggcccgtgacgccgagccggtgccggcgtcgacgccgtggagcgaggcgcctccgattctcgtcgacatccggctgcggcgcaccgggcggtacgaacgccggggcgcacccaaccgcgtccgcgaccgcgcggccgagcgccggctgctggccgagagactggcggccgaggaggatgtggtgcgggccgcgcgccgccagctcgccaccggcgaacccgtgcgcctgtccgagctggccgagctcgacgacccgaccttccgactgttcctgaccgtcctcggggacgccctcgcccgccgccggccgggggaactgagcgtcgtgaccagcagcgccgacggcactctgtccatctcgctcacgcccaccgacgacggtgtgatcgcgaccgtgcccaccagcgcgggcctgttcaccggccccgaccatctcctggagatccacgacttgctgacagcgacggcggtgacggcgtga

SEQ ID NO: 49818 - DNA, 1284 bp, Frankia sp. EAN1pec
gtgaccacccagcgccgcaacatcccgcgcgggtcgcgtcccgggtcgtcgtcgacagcggtcatcgacgcacttgacgcgcagcgcgccgccgagcgccgccgggccatgcgcgcgatcctgcgccgcccgctgctcgtcgcgcacggtcccgacgccgacgccttccgcctcgtccgccggcaccagacgtggctgcgggactggttcacccgagagacgggctggtcgctgcgggtcgacccggaggtggcccgactggccaagatcccggccgacctgaccgacggcacccgcccggccacggcaggatcggcccagcagccgttcggccgccgccgctacgtcctgctctgcctggccctggccggcctggaacgggccgacaaccagatcaccctgggcagcctggccgacgacgtgatgatgggctgcgccgcccctgagctcgccgaggcgggcgtcagcttcagcctcgacagccgggacgagcgcgccgacctggtggcggccgtccgcgttctccttgacctcggtgtgctgcgccgggtcgccggtgacgagacgaccttcaccaccggcaccggcgacgccctctacgacctcgaccgccgggcgctggccggcatgctggtgacccggcgcggcccctcgacagtccgcgacatcccaggcccggccgatgtggaaggccggctggccgccgtcgtcgaggaactgacggccgacaccgacgacgcgcgcaacctggcccgtcgccacgcgctgacccggcgcctgctggacgacccggtcgtctactacgtggatctggacgagggcgagcgggcctacctgaccagccagcgggccgtgctgacccggcggatcaccgaggcgacgggcctggtcgcagaggtccgcgcggaggggatcgcgatggtcgaccccgacggcgacctcaccgacacccgaatgcccgaggacggcaccgatggccacgccaccctcctgctcgccgagcatctcgcccgcgagggcacccgtctcggcccaggtgagccgatagctgtcgccgacctcgacgcccacatgcgcgagctgatcgcccagcaccagaagcactggcgcaagggcgtcaccgagcccgacgcggaggccgagctggtcgaccgggcgctgtcgcggatgcgagccctcggcctgctgcgccggcgcggggacgacgtgttcgccctgccggcgctcgcccggttcgcgctcggcgatctgcgggacggcggcggccaggagtcactggcatga

SEQ ID NO: 49819 - DNA, 4236 bp, Frankia sp. EAN1pec
atgacggagccgacgaccgaacgctggcagccgctgcgcgccgggctggtcgacgtcttcctctacgacgaggaggaattccacttccacgagggcaacctgctgctgcgcggcaacaacggcaccggtaagtccaaggtccttgcgatgctgctgccgttcctgctcgacggtgaggtgtcggcccaccgcgtcgaacccgacggcgacccgaagaagcggatggactggaacctgctcatgggcgggcgccatccctacccggagcgcctcggctacagctggctggagttcggccggctcgacacgtccggcgccgccgagtaccgcacgatcggggccgggctgaaggcggtcgccggccgcgggtcggtcaccacctggttcttcatcgccgacgcccgtgtcggcgtcgatctcgacctggtcggcccgacccggaccgcgctgacgaaggaacggctgcgcgatgccctcggcccgcgcggcaacgtctacgaacaggcgtcgcgctaccggcgcgccctggacgaggcgttcttcggcctcggcgaggaacggtacgacgcgctggtcaatctgctcatcgcgctccgccagccgcagctgtcgaaaaagccggacgagcgggccctgtcggcggccctgaccgaggcgctgaccccgctggaccaggcggtgatcgcggacgcggccgaggcgttccggggtctcgagcaggaacagtcggacctgcaggggttcgaggaggcgcacgaggccgccaccgccttcctcggacactatcgccgctacgcccgcatcagcgcgcggcgccgggcccgcgagccccgcgccacccaggccgcctacgagtcggcgtcccgccagctgaacgacgtccgggcggagcgggagcgggtcgaggccgaggcgatccgggtggacggggaggacaaggagaacgaggagcgcatcaccgcgctcaccgccgaacgggacaccctcgccgcccgcccggagatggaccaggcccgcgaactcgtccggctgcagcagcggatgtccgacctggagcgcgtggccaaccgggccggggccgaacttgcggccgtgacgacccggcgcgacggcctcgcccgccggaccgccgacgcccgctggcgggtcgaggcgaccgtagccgcgctggagcgggcggccgatgccgccggcaccggtgccgagcatgctggcgtcggcgccgagcaccaggcgctactcgcccccctgcacatacccgacggtcctcccgttgagcgggttgaggaggcctcctcggccgcccggcgcgcggccgaggatgtcacccgacgccgcgaggacgcggtcaagctggtcgccggcctgataacggccgaccgccgagcccaggagcgggcggccgaccggcggcgggagcgagacgaggcccggtcggtcctcgatggggcgaccgaggccgtagccggcgccgaggcggcccgggagaccgccgccgccgcgttcgtcgacgcggcgcgtcgccacctcgagggcgccgaacaactccgcctgaccaccctcgacgacgtcctcgccgcggtggcctactggctggacggcttcgacggggacagtccgctggtcgccgcggtcacggggcgcgcccgcgagctggagaacgagttcggcgccgccgaccagcggctgcgtaccgccgtcggcgaggcacaggcgcgggtgggcatcctgaccaccgagcgccgcgccctggccgagggtgcacggctgtccccgccggccccgccgacccgcgctgccgaccgggacggacggccgggagcgccgctgtggcagctcatcgagccgcgcgaggcaggtccgacgcccgcgccggccctgtcagcttccccgccgctgggtccggcggagatcgccgggctggaggcggcgctggaggcgtctgggctgctggacgcctggctctgccccgacgggcggctgctcgcccccggcacacacgacgtggccatcgtcgccgacggcgccggtgcgggccgtgtcggcgaccaccatctcggcgcggtgttgtgtccagcggtcgaccgctccgacccggccgcggctgccgtccccgacgcgatcgtggccgccgtcctagcccgcgtcgggtacgtccctgcggatacgtccggcgtggtggatccggatgccgtcgatcgtgtcggcgacacctgggtcgccgcggacgggcggttccgcgtcgggcggctgcgcggctcctggaccaaaccggcggcctgctacctcgggcacgcggcgcgcgagctggcccgccgcaaccgcctcaccgacatcgacaccgagctggccgccctcgaccgcgagatcgccgagcacggcgcggcccgcacggccctgcgccagcgccgggccacgctcaacgacgaggtggccggcctcccggcggacaccccggcccgccacacgttcgccaccgcccgccaggccgaccgcgaccgacgcatggccgacgcctcccaccagacggccgtgcgggccgccgagcaggccgaggacgcgttccggcaggcccgggccgaacgcgacgagaccgccgcccagctcggcctgcccgtcgcgaccgacgagctcgaggagacccgcgaggcgctcgtcgcctaccgcgtcgccctgtccgcgctgtggcccgccgtgcgggaacgcatcagcgccgcggcccagctcgcgcagaccgagcaggacctggccgacgcccaggagcaggtcgagcagcgcgagatccagcactccggcgcccgcagcgagtacctgtcggcccgcacggcgttcgagacgatggaacgcacggtcggcaccgccgtcgccgaggtgcagcgccagctcgccgccgcccagcgcggtctggactccgccaccgtccgccgccgggaactcggccagctccggctgacgatcgccgaggcggtcggccaggcccgcgggcaggagagcggcctgaccagccgggtcgcggacctcggcgagcagcgccgggacgcggccggccggctgcgccgcttcgccgcgggcggactgctggccatcgccctgcccgagctgacgttccccgacaccggccgggaatgggcgcccgacccggcagtgcgcctcgcccgccagatcgaggcggcggtcggtgaggtcgacgactccgacgccggctgggaccgggtgcagaagctcatcgcggccgagcacggcaccctgcgggaggtgatgagccgccacggccaccacgccgccgcgacgctcaccgacgacggctgggtggtcgaggcgacgttccgcacccgcgtgatgagccccgcggagctggccgacgcgctcggcgtcgaggtcaccgaccggcgtcgcctgttgacggaacgggaacgggccatcctggagaaccacctcgtcagcgaggtcgccagccatctccaggacctgatcagcgacgccgagcaccaggtcgagcggatgaacgccgagctcgacgagcggcccaacagcaccggcatgaaactgcgcttccagtggcgccccggcccggacgcaccacccggcctgggccccgcccgggaccgcctgctgcgccaggtctcggacgcctggtcacccgccgaccgggaagccgtcggcgcgttcctgcaggcgcagatcaaggccgagcgcgaccaggacgccggcgggacgtggctggaacacctcggccgtgccctcgactatcgccgctggcacgtgttcgccgtgcagcgcttctccgacggccagtggcgctcggcgtccgggccggcctcgggcggcgaacgggccctggccgtcaccattccgctgttcgcggccgcctccgggcactaccgctcggccggcaacccacacgcgccccgcctcgtcatgctcgacgaggcgttcgccggcgtcgacgacgacgcccgcgcgtcctgccttggcctgctcgccgtcttcgacatggacgtcgtcatgaccagcgagcgggaatggggctgttacccgaccgtcccgggcctcgccatcagccagctgtcccggcgggacggcatcgacgcggtcctggtcacccgctggcgctgggacggccgccagcgcctccccgccggcgtcaagcggcccgccggtgttgccactgttgccggggcgagggaacccggcgccaccgcacctgccgagaacactctgtgggacgagccgtga

SEQ ID NO: 49820 - DNA, 1425 bp, Frankia sp. EAN1pec
gtgggacgagccgtgagcacggagccggtgatctacaacaatgtgaccggctccgacctgaccgaggtcgggacagccgtcagtgggacggtcgacatcgaacggctcggccggctgttcgggccgccgacccagtggatcattacgcgggcgcggtcccggctggagcggggcgggtccctcaccggcgagctcacattgccggacccgtccgagcagcagcgcgttgccctcgccggacttctgggacgccgccctcggtcgggccgttccctgcgggtcgacgtggacgacctcgacacggtcgtgcggcgcagcggatgcgcgccgagcctcgcggccgccgtcgtcgcgctcaccggtcccatcgtcgaccgagccgcgctcgccgccgagacggcccgcggctggcgggccgtgttcgccttggccgatcctctcgtggacgctcgcccggtcctcggggcctggcgggaccggcttggcaccaccggtctgctgcgccggctcgccggttcgctggaggaggggcaggcgctgatggcggcggctgtatccgtgctgggcgcgctgccggccgacggcgcgccgatctcggtgttcgccgcccgtgtgctgggcgacggtcacggcctggacgccgatcgtcccctgtccaccctggtgctcgacgccgtcgcactgctcggccggtcgatcagcgccgatgccgacgatgccggcgctggtccggacgagctggcgggtcggactgcgcggtccaccgagtggcggcgggaggcctgggccgcggtcggcgtcctcgtcagcgagctggcactgcccgtgctgacgctcgggttgcccggagaccggcacagcgtgactggccgcgtcctggacctgtggcgggcggccggtgagcccgtgcacctgtcgctgcgccagctggtgcgtgacccaccgatcctggacgcgctggccggcgtagccgtgttcgtctgcgagaacccggcggtcgtgagcgccgccgcggaccggctcgaagccgggtgccggccgctggtctgcgtcgggggtatgccggctgcggccgccgcttcgctgctgcgcctgctcgccgacgcgggcgccgtcctgcgctaccacggcgacttcgactggggcgggctggccatcgcgaacaccgtcaccacccggtttggcgccgtcccctggcggtacgaccgcgcccactacgagcgggcgctgcggcccgggctcgccgggctcacgggacgccccgtcgacgcccggttcgaccccgacctgagcgacgcccttagcgagcaccgctatcgggttgaggaggaggccgtcctcgacgacctgctggccgacctcatctccgatccgccggccgaccccggtagcgcgccgagcgtcgccagcagcgatccccactga

SEQ ID NO: 49821 - DNA, 1623 bp, Candidatus Desulforudis audaxviator MP104C
atggatgaacaagtcctgaagcccatcgcggaagtctcttatcttaccgtcgggaacgcctggcgttaccgggccatcctgcgctatttctacgaccagcacgaacgcctgcgccactatctcttccccgaggaggtcctggagcatctccggcgaagcccgtattttcacgattacaccgaggagcaactgcagcaggatctggcccagttggtggagtggaagaacctggtccctcgtcaggacaccggcagggtgacttccatcgaggagttcaagaaaaagaggtttcgttaccaggcgaccccgtacaccatcgagatcgaacggatggtacagcagctggaacagatgggggagtcgttcggcggctccctggagaagacccttttcgaccgcctgctggcctcgctgaagcggctggtggcggaggacgagagtgcccggccggcgcgcgctgttgacggcatcgccgccggcggagcccaggcgcgtgacctggattccgggccggggcacggcggagacggttccggctcctaccggacgcacggccgcgacggctccggccgggcgtacgccgcggacggcttcaccggcgaggaactgaacgccctgtggcgcgacacctacgagagcttccgcaagctgaccgagaacgccaccgactatctggcccacctgcaaagcgaacgtgtcgaagagttgatgatgacggaagcctttttgacctataaagaggctatcacccaatacctgcgcgatttcatgaccgtgctgcagcggacctcgctgcagattgagacggtgctgagggggaccccgcccagcctgatcgaacgagtggccgggcgcctggccgactaccacctgagcattccccgcctggaggaaacgcggacccgggaagagctggcgcaaagacacctggtccagtggcaggccctgcgggactggttcttgggcggcgccggccgggagagtgacctcgtctacctgcagaacgccaccaacgagaccatccgccgaatcacccgcttcgcccagcggctgggggagcggcaccacacctttcgcagccgcaagcgggactacctgcacatcgccggatggttcgcggcctgcgccgacctccgggcggcgcacgaactgtcggcggtcgtgttcggcgcctttcacacccgccacctgtacgccgcccccaaggagaccgaggacatctacgcggagatatgggaccagccgtccatggaaattacgctgaggccccgggtgcgggcgtaccgcgagaagaccaggcccaatgccgccgccagtcacacggacgaaaaggcccgggtggcggccgagtacctgcgggaaagggaggccgagcgggcgcttatcgaccggttgatgagcggtgaccggattgtggtgggggaactgccggtgatcgagccccacgtccgcaaaacgcttttgtactggattaccaagtgcatgggcagccgggaccgggtggggaagacggagaccggccggtcctttcgcctggaaaagatcgacgaccgcgagatagtcctgcgttcccgggacgggagtctcacgatgcccaactacgtgctgcagttctatggatag

SEQ ID NO: 49822 - DNA, 1212 bp, Candidatus Desulforudis audaxviator MP104C
gtgggaagagagcaagagcagcccaaagccgatttcgaccacctggcccgggaagccgccgagcacctcctggagcagttttggatcctgcgtgacgaggagccggacaagtaccaggcggtgcgggaacgggagcaagtcctgcgcgcctatttcctggacaagccggggttccgtcttatcttgcaccgccatttcgccaaactggagaaaattccggcggagcccgagccctggatggggatccaggagttccagcagccccgggactatgccgttttctgctgcctgctggcctacctggagggtaaggccgtggacgagcagttcctgctgtccgatctgtgcgaggaactccgcgccgtctaccccggtgaggacgccctggactggacccactatgaacaccgcaagtcactggtacgggtcctgcgcaaagccgccgagttggggattgtcaaagtggtggacggcaccatcgaagggttcaaccacgtcgaggacaacgaggtgctctacgaggtgcccgtcgtctcccgctacttcatgcgttcctatcccaaggacctcttccagttcgccggcaaagaggagatgttggcggcggattggccggaagggaccgacgagggcctgcggcgccgccaccgggtgtaccgccggctgctgctctcgccggtggtgtacgcaaaggacgtgccggaggcggatttccagtacctgcgcaactaccggcaccggatccgcgaggacgtggagaggcacaccgggttttgcttcgagctgtacaagaacgcggccctgctgacgctgcccgagcagcgggcccgcttcactctcttccccgacagcaaggccgtctccgacatcgccacccagttcgcggctcttgcgcgcgagcggcgggcgaaggacgatatccccctgcagttcgacggcagtctttgcctgaccgccccgcagttccgggactgggtgcggatctgccgggagcgctgggggacgggatggagcaagcagtaccgcgaggccggcatcgcccagacggccagggacttactggcgtttctggaggagtggaagatggcggagcgcgatccggagacgggcgccgtgtgcttgaggccccttttggcccggaccaccggccgttacccggccgattttgaccccggtacgctgcaggagggagagaacggtgtcgaggaataa

SEQ ID NO: 49823 - DNA, 4215 bp, Candidatus Desulforudis audaxviator MP104C
gtgtcgaggaataagtggcaactacaccgggccggcatcttcaacttctggtattacgacgacgaggagctggactttgcgggcggcaagctgctgctccgcggcagcaatgggtcgggcaagtcggtcactatgcaaagcctcattccgctgctgctggacggcagaaaaagcccggaccgcctggacccgttcggttcccgggcgcggcggatcgaagactacctgctcggcgagaaaggggtggtcgaccgtgacgagcgcaccggctatctttacctggagtacaagcggcagagaacggaccaatacctgaccacgggtatcgggttgcgggccaagcgcgagagcaacctggagttctggggttttctcatcctggacaaccggcgcatcggacgcgacctgacgctgtacaagaccgaatacagcctgcaagacgggaaagaacagaagattcccctggtcaggcgggagttggagcacaggctgggaccgggcggccgggtggtgcggacgcagaaggagtatgtggaactggtcaacaagcacatttttggctttgaatcgctggacgccttcgaggacctgatcaagctgctgatccagctgcgcagccccaaactctccaaagatttcaagcccaccatcatttacgagattctgaacgattccctgccgggcctttcggacgacgagttacggcctctttcggagaccattgagaatatggaccagaccaagcagcagttggaccagttgttgcgggatcagcgttccctgaagcggctttgccggcaatacgacgtttacaatcggtttgtccggtgggagaaggccgaggggtatctgcgcgcgcacaggagaggtgagcgcctggaaagcagggagcgggaactgcggcggttgctggaacagcaccgcgaggaccgtgcccggttttccgccgaatgggagcggcttaagcgtgaacagacggtgctcaaggaggaagaggccgccttgagggagcacgacgtattcaaggccgaggccgaaaaggtgcaggtcgaaaggactatcgcggcccttcaggagagcatccgcgccaagaccaaggggctggagcaaaagcggcggaccgaggtccggctgcgccgggagatcgatgcggaagaaaacaagaccaccgaggccgagaccgtcatgaaaggcctgctggagcgcctgaccgccgaggccgaccaggcgctgtttgccgggcaccacgtggccgcggcggagttccgcaagaagtacgccgaggagttcacgtttgacctctggcggctggagaccggggagtacctggccaggctggacggtgtcctgaaggtgttgaaagagcagacccgggccagggagaaatatgaggatgccgaccgggaccgggcggaggcgcaaaggctgctggacagggccgaacacgaggcgtccagggccggcgtgttcttcgacgaggaaagggaccgttacctcggtgcctttcacgcctgggtcaagcaaaaccgggaactgcttctgtcggaggacgagatccggcggacgtctgagcgggcgttgcagatgttcgagccctaccgcctggaggaggtgcgggagccggcggcggaagcctaccaccggcactccgagaggctgcgcgaggaactggcggacctggggcagcaaatcaggcagaaagagcgggccatcctcgagaagaaccgggagctggacgactggaagaagaaaaaggacccggaaccggagcgccacccggacacggaggcggcacgggcggggcttgacgcggccgggattccctatctgcctttcttcgcggccgtggagttccgcgaggggatcaccgaagagatgagggagcgcatcgaggcggcgatcacccagatggggcttctggacgccctgatcgtcccggagcgttttctggcgcgggtggaccggtatgaccgggtgctcgagcccgcgccgcagttttttgcccacacattggccgactttcttgtcccggcgccggcggagaactccgccgtcaccgtccaggacatcgacaacgtgctgcgcagcgtgctgattgacgacaccggggagcatcaggcccgggccttggtccgcgaggacgggcgctaccggatggccctgctcaagggacacgctccccgtcaggaccggtcgatttatatcggccgggagacacggcgccggtaccgccgggaggtcatcaacgggctgaaagcggaactggagacgctggaggaggagcgcgccgccctgcaacaggcggagcggcagctgcagggccggctgcgccggctccgggaagagtatcaaagctttcccgccgatgccgacgtggccgaggcgcaccgcatgcgggaggaggcccgccaacaggtcaagctgcggggccgggaggtgcagaagaaggacgaattgctcaaaaaggccatggagcggcttcaagacgtgcgcgctcaactgcgcggcctgactgaaggactggcgctgcccggcacggaggaagcctacgatacggccctcaggcacatgcgtgggtaccgcgattacctgcacaaactggaattgattcacaaggactttgccaactgccggagccggatcgttcattaccgcctgagccttgacgaggcggtggccgacgccggcgttttgcagggggagcttgccgctttcagcggggaactcgataccaacaagctgcgcctggtgcagatcgcgcggcggttggaagagttgggcgcagacgagatacgggcgcggatcgaggatgttttgcggcgcctggcgggtctgccggaggcgatcgatgcggcgaagacgaagataatggaggctgagcataagatcgaaagcaccgggaaggagatcagggacacgctcgggaagcgggaaacggcgcgtttcctgcaaggactttggaagaggacctttttggacgacctcaaactcgggttgcccggttcggtggaggtcggcgccgacccggcggatgacgaggtggccggaatcgcccgcgccatcctgcggcaggacggcccggcttccggggaacagcttgatcgggcgaaagtgaccgaccggctgaacgaggctttctaccgggaacaggcggtgctggtcgagtaccgaccggcgcaggagacagtgctggcgctggaggacagcgccgtacgggaagtggaacaaggggacgaggagccggctgttctgctggatgaactgaggcaaaaggcccgccgggtgcagttgctcatggagtacgacggcaagcgggtcagcccgttttacgtgctggaccgcatggaaaaggacattgaaacccagcgggcgatcctgaccgaaaaggaccgggagctttacgaagaggtcatcatgcacagtgtcggccgcatcatccgcggccggatcaaccgtgccgaacggtgggtggagaagatcaaccggctgatggaggacaggaacacctccagcgggctgaccttctccatccgctggcggccgcggacggcggagcacgaaaacgagatggacacgaaggacttggtggaattactgcagcgtgatccccggctttacaaagacgaggacgtgcggcgggtcaccgagcacttccggtcgcgggtggaccgggccagggcggcgttggaggataagggctatggcgagacctttcaccaaattgtcaaggagatcctggactaccggaagtggttcgctttcaccctgtactaccggcgggccggggaacagcgcaaggaactgaccaacaacgtgttctataagttcagcggcggggagaaggccatggccatgtacatcccccttttctcggcggcctattcccgctacctggacgcccgggacgacgccccctacatcatctccctggatgaggccttcgccggggttgacgaacacaacgtccgggacatgtttgacctgatggaaaacctggggttcaactatatcatcaactcccaggttttatggggcgactacgacactgtgtccgccctctccatctgtgagctggtccggccccggaacgagccctacgtgaccgtgatccactaccgttgggacgggaaggttaggcgtcttttaagctgggaggggggtgaccggcgattcggcgcggaagaggacaaagaggcgcggaccgggacaccgtaa

SEQ ID NO: 49824 - DNA, 1344 bp, Candidatus Desulforudis audaxviator MP104C
gtgcgctacttccgggagaaccggggtttccaccgactcttctccctcatgatcaagaagtaccaggggttggggcgagccggtgggagcgtcaccctcaagaacctgaccgcccaggagcaggaggcgctctccctgtttctgggccgagactgcacggggcgggcgtcggtcacggtgtccctgtcggccttcatcgaggccatgaacaagacgaagtacgcgggaatcgggttcaaggaactgctggacggctatgtggggcgggacgtcctgacgcgttcggaggaactggaagaccgtcgcaaccggaaagccttgttcttccggaacctggccgagaagcacgacagcccgtacggacgcctgtggcttgagcacataaggagggcgggtccgggcacgcgggggattcacctggcttttgagaagcaccccgatgtcctggcgggacagctgaagaacgttctggccgcactctgccggctgacgcggatgcgccgggccgggaagacggcggcctacgtgagactgccggtgttcgccgaccggacggtccacgacccgcacggattcgacctggacaccgaacagggccgatacctgatctcggctctgcagctgatccggagccatgaggaccaagggtacacggtcagcagccgcctggccgccgaggaagtgactgaactgctcggccactttgggatcatccgggatgatctgctgaacttcgttacctgcgcgggtcttctggcggtaagggaagacggcacgcccgtggcgtggtggcgggcggcctgggatgacggtgcggtgcttaatgttcccctgagagagatggccggagtgggggctgttgttccggccgcctcgttcggccgtgttgaccggcccaaagtggtgtttgttgttgagaactccggtgtgttttcggaaatcctggacggcttcggctggacgcgcctcccgccgctggtgtgcaccaacggccagctcaagctggcctgcctcctgcttctggataaactcgtcgctgataatactaccgtccactactccggcgattttgacccggagggcttgcagttggcccaccgccttctgcaacgctatccggaccggctggttccctggtgttacacggtcaacgactacgagcggtgtgtctccgaggttgcacttcccgagtcccgcctgaggaaactggacgccgtcggccatccgctcctggcccctgtacgggagaagatgcggtcggtgcgcaaggcgggttatcaggagggtctggtcaaaaccctggtggacgatatcaaacgcatactgccagatatgaatgactga

SEQ ID NO: 49825 - DNA, 1503 bp, Anoxybacillus flavithermus WK1
atgatagaaggggagcataagatggatacgtcatggctaaagccgattacggaggcgaagtatttagtggttgataacgcctatcggtatcgggcgattttgcgctatttttatacgcagcatgagcgaatgcggcaatatttgtttccagaagaagtatacgcttttttaaaacaattcgatgaatttcaagattatacagaagaagaactgcaacaagatttagagcagctcgtcaaatggaaaaacttaatcgcgcgacaagaaacaggacatattcggacgattgaggaatttaaaaagaagcgatttcgctaccaatgcagcccatatacggtcgaaatcgaacgaatgattcgcacgcttgaacagctaggagatacgtttggcggctcgctcgaaaaaacgcggtttgaccgcctgtacgcatcgcttgtccgtatggaagcgattattcacgctggatttgtcgaaaaacgtgaagaaatgaatcaagtgtgggaagaaacgttcgattattttagaaaaatcatccaaaattccgccgactacatcgcttatttgaacggagaaaatatggaagaacggatgatgtctgattcatttcttgtgtataaagagcaattcaccgcctatttgcgcgattttatcgtcgcattgcaaaaaacatcgatgcaaattgaaaagctgctcgaagatttgccggcggacggggtacgtcgttttatcgaggaagtggttgcctatcaacttgctattccgcgctttgaaggcgccgttctttcgcgcgaacagctaacggaagagaagctagacacgtggcggagcttaaaagaatggtttttagggcgaaacggacatgaaagcgaactgtcgtttttgcaaaaacagacgaatgaagcgattcggcgaatgacgcgtgtcgtccagcgattaggcgagcgtcaccatcattttcgcagccggaaaaaagattatttgcatttagccaaatggttttcgtcattagaaacggtagaagaagcgcataaactgtccgcggtggtgttcggctgtttccatacaaagcacattgtcgccgaaaacgatgcaacggagaacatgtaccgcgatatttgggaagaacaaccgacagaatggctcgtaaaaccacgcgttcgtcactatcgagaaaagaaaaagccagaagcaatgactgatagacgaaaagaaaaagaggaagcgatgactgcctatttagcagcgaaacaacaagaagaagaagcgctcgcacagctgataaccgacgggaaaattgttcttcaggagcttccagtcgttgcctcacatattcgtaaaacgttgcttggctggattgcgaaagcgatgggacgagaagatcggatagtacaaacggaaaacggatggaaagtgaaagtggtccaacgtgaaggaacgattacactgaaagcggaagatggtatgttaatgatgccaaattacgaaatccatttgctagattag

SEQ ID NO: 49826 - DNA, 1167 bp, Anoxybacillus flavithermus WK1
atggaaaaagaatttgatgagaaagcgaaagaagcgttaacggcgttgtttgaacatttttggattgttcgggaaaaagagccggaactttttcaaaaaatacgcgaacgcgaaaaagtgttaaaacggtatgtacaagagaaatttggctatcggctcatcgtccaccgctattttgccaagcttgaaaaaataccagcggagccagaagcgtggatgggaatagaatcgtttcaagaaccgctcgattacgcgttgttttgttgcttgttagcatatttagaaggaaaagcggttgaagaaaaatttttattgtcggacgtatgcgaagaaataaaagcgatgtacccaggcgaaacagtgcttgactggacgaactatcaacatcggcgcgctttaattcgcgtgttgaaaacagccgagcaaatcggaattgtacaccacgtcgacggggaactcgaggcatttgccaatcaagaagatgaagaagcgctgtacgaagttccagtgctatcccgctattttatgcgctcctatccgaaagattttatccaatatgaaacgatggagcaactgttggaagaagagtggaaagtatcccctgacgactaccgccgccactcgatttatcggcagctctttttatcgcctgtcgtgtatcgccgacaaaaagatgacccaaacttttattatttgcgcaacttccgccatcgtttacgtgacgacatcgaagcccatactgattttcgctacgagctatacaaaaacgcagcactattgacgattccagaacggcaacatgtgtatacattattcccagaccaaaaaggaacgtcggatatgattcttcatttggcagcagttgtgcgtgctcatttggataaataccccccggatgaatatggacaaatccacgtgacgatgtccgattttcatcagctgctcaaccactgtatggagcaatatggtgaaggctggagcaaaacgtatcgggaaatgacgacagcacaacttgcctctgagctacttagtgcgttaaaagcgtggaagatggcggagcatgaacaggaaacgggcatggttactctttatccgctgcttggacggcttgtcggccgatatccagacgattttacaatgaagggaagagacgatgatgacgaataa

SEQ ID NO: 49827 - DNA, 4140 bp, Anoxybacillus flavithermus WK1
atgatgacgaataaatgggtgcttcatcgcgcgggattgattaatttttggtattacgacgagcaatatttcgaatttgccgacggcaagctgttgcttcgcggcacgaacggctctggaaagtcggtgacgatgcaaagtctcctgcctgtattactggacggcaaaaaaacgccggaccggctcgacccgttcggttctcgggcacggcgaatggaagattacttgcttggcgaaaaggaaattgtcgatcgcgatgaacggacaggctatttgtttttagaatataaacgaaagcagacggaacaatatgtgacaacgggtatcggattgcgggcaaaacggcaaaaaaatatggatttttgggggttcgtcatttttgataaccgccgcatcggtcacgatttatttttatataaaacggaaaaatcagcgaacggaacagaaaaaatcccgctcacgaaacgcgagttaaccaatttgcttggcaacggcggaacggtcgtcgattcacaaaaagaatatatggagctcgttaataagcacgtcttccgctttgaatcgatggaggcgtttcaagaattaattgagctattgattcaactccgcagcccgaagctatcgaaagattttaagccgacggtgatttacgagattttagagagctcgctcccagcgttgacagacgatgagttgcgccatttatcggaaacgattgaaaatatggaccagacaaagcaacaactcgagcagctagagcgcgacgagcaatcgctaaaacggctttgtacgcaatatcgggcatataatgagtatatgatagcggaaaaagcgagcgaatggctcaaggcggacaaacaggtgaagcggctagcagaagaagaaaaacaatggattgcggagaaagcagaaaaacaaacgcaccttgtcgatttgaacgaatacattcaaacgctcgcaagcgagcaagacgtattgcatcaacgagaattagagttagcgagccacgaagtgttccaagcggcaaaagaatacgaacgagttcagcaagaaatacgagatattcatgaaaagcagcaaaaactattgcggcaaatcgatgaaaaagaacagttagaacgccgctataagcgccagctagaagaagacgaagaccggcggtatcaagtagaaaagcaactcgcgcagcaactagaagatttacggcacgatgcgatggaaagttcattctctgcgcatgatctcaacgaagccgatttctctcgccagcgccaaacgaaatttgactttaccgtctggaagcgggaagggcaagaatacgttgaaaaactagaacaaatcattgcgctttggcgccgccatgacgaaaagaaggcgcgctatgaagagacgagtaaagaggtaggtgacttgcagcgggaagtagacgggttgcgccatgaagaagcaaaatggctcgaactgctagaaaacgaaaaatcgcggttccagcaagaagtatttcgctggctcgaacaatgccaagacgtttccgtacaggaagcatctgtccaactgtttttgcagcgccttcatgaactatacgaaacgtatcatgtcgatgagatgaagcaaccgtttgcggaagcgtattacgacgcactgaatcgaaaaaatgaagaaaagatgaaacaaaagcatgcgtgcacgttactagaagagaagattgccgcaaaagaggcggaatggagccaatggaaaacgcaaaaagatccagagcttgcgcgcgatgaacaaacgatggcagcgcgggcggaattagatgaaaaagggattgcgtttgtcccgttttatgcaggagtggaatttcaagaccacgtaccagaaccgcttcgggagcggatcgaatcagcattgtaccatgcagggctactggatgcgttaattacggaaaccaatgtcgacataaagtgtgaccgagtgattgtgccacgccctgttgaactggcacatacgttagcagactatttgcagccagatgtagaggaaggatgcaaagtgtcaacaacgcgcattaaagaagtactccaaagcatcgtttttgccgatggagcaatggaagggacatttacgctcaatgaagaagggcactatacgcttggggtagtcaaagggcatgccccaacgcgggaaaaagcgctgtttatcggacgggctgcccgcaagcgttggcggctagaaaaaatcgctgccctcgaagccgaactcctcgaacttcgcgcccaacttcataagcaaacggacatgctcaagcagctcgaacagacgattgcgcaaataaatagctggtttcgcgcctttccaaccgaccgcgacatgcgtgcggcctttgaagaatgggagaaaacgaagcggtacatcataagcaagcaacaagaacgggagcggaaaaacgaaaaactagcgcagcttgcccgcgattggcaacaagcaaaacagacgttgcgcgagcaaaccgaaggacttgatttagagttttccaaagatggttatgaacaggctcttcttttgatgaaatcgtatatgcgccgacttcacgaactgcaaatgacccatcgtgaatttcttcatttgctcgacatgattcatcatcgtacagagcagctagaaacgttgcaacaagaaatcgacgaaacaaaaggcgaacgatatgtgcttgcaaaagagcagcaaaaaattgaactaaagcgacaagaaatcgaacgaacgctgcagctaatgggcgcggaagaaattcaagcggaaattcaacgcgtccgcgaccggctggcatttttacagcgagaaataccagcgaaaatgaacgagcgcattgcgctagaacatgcactaaaaacgattcgcgaaaaatgcgcgcagctgtcagtgaaagaagcgtttgctaaacggctagcagcggcatggaagcagtcgtttgagcgggaagttgctcttgaacttgtcgaacttcatggcgctgatttgttagaaaaagcaaaagaggcgatgcagcgatatggggcgctagcgaaagaaacacgaacatcgcttgtgaatcgattaaatagcatctttttccaagagtcagcgagtttgacggaataccggctcagccaagagccagtggcgatagagggaacgaatccatttgcggatatcgagctagacgaagaaatggaattaaaagtcgctgggtggagagaaaaacaagaccgaatcgtccttttgcttgattataaagggcagcgtgtatcgccattttatgtattacacgaaattgagcatgacatttttttgcagcgcgaatatatgaaagagcaagaccgcgaattgtacgaagaaattattttaaaaacaatcgggcggattttgcgcagccgcattcaacgagccgagcgttgggtaaaagatatgaacgaacggatgcagcagctcgacacgtcttctggtcttgtattgtttattcaatggaagccgcgcactgcggaaacggaagaagagatggatacgaaagaattggtcgagttgttgcggatgaactcgcggctattaaaagacgaagatttgcagcgcgtgacgaaacatttccgctcgaaaattaaccgcgcccgcgagttgttagaagagcgtggacaaggcaatacgctccatcaaattattaaagaagtgctcgactatcggaaatggttctcattcaccctttactaccaaaagacgaacgaaccaaaacgggaattgaccaaccaacgtttctatcaatttagcggcggagaaaaagcgatggcgatgtatattccgttatttgctgcgacgtattcacgctatcaagaagcagcagacgatgcaccgtacatcatttcgctcgatgaagcgttcgcaggggtagacgaaaacaacatccgcaacatgttcgggcttgtcgagcagcttggatttaactatgtgatgaattcacaagcgctctggggcgactacgacaccgttccagcattatcgatttgcgaacttgttcgtccgaaaaacgcgtcgtttgtgacggtcattcgctattattggaacggaaaagtaaagcagcttatcactgaagcaagaaaggatgagctcattgaaccggttagatga

SEQ ID NO: 49828 - DNA, 1245 bp, Anoxybacillus flavithermus WK1
atgagctcattgaaccggttagatgaagcggtacaatttttccgcggtgaacgttcgtttcaccgccttttttgcgaaatgaaaaagaaatacgaatcgcttggccgcgtcggtggcacgatttccgttacgtctttctccgccgaagaaaaggaagcgattgcgtcgtttttcggcaaagaaatgagtcgtgtgtcgctcgcggcatttgaacaacagctcggcaatacaaagtttgccggcatttcccttgtggagctgttggcatgctattttggcgagccgcttgtaacgaaaaaagagcaacaacaagaaatagcgcgggaaaaagaagcatatttcgcgcggttaatgaatacgtatcgagcaccgcgcgattggctggtagcggtagagaatcagcggtttgtgcaattagcctatcaacaaaatcctcaagcgctagaaacagccatttccatcgtttgccgtgcgctcgaacagctcccatccacctatgtacgtctgccggtgtttgcgcaacaagtggcgaacgacccacatgcgcttgatttgcatacgcttgcagggaagttattgctttcagcgctgcaattttatgcggaaaaagaatacgacctttcgtcagtggaagacgtaaacgagctattgcagtcgtatcgcttgttgcgggaagatgtgttgaattttgttacatgtgctggcgtgctggcagatacagacaagggacgccatcctgtgttcgttgccgcatgcgaaacgaatacggcgctgaatgtgccgctacgggaagtgatgccattagtgcgggcgtatccatatttaggaagtgttatctttgtcgtcgaaaatgctggcgtgttttcgacgttattagaggcgaacgtgccgctcgttagcacaaacggtcagctcaatttagcgacgatatggctgcttgatttacttgtcaaagaaggaacgaccttgtattactcgggcgattttgatccagaaggattaaaaatggcgcagcgccttgtcgaccggtacggttcatctgttcggctttggcattacgacaaatttgattatttggcgaccaacccaaccgttccgctatcgggcgaacgcttagcgaaattgcaatcggttacacttcgcgacttgcagccggtcaaacaagaaatgatacggcagaaaaaagcaggataccaagaggcgattgtggaggaattgaagagagatacgtatttagggggatag

SEQ ID NO: 49829 - DNA, 1488 bp, Thermoanaerobacter sp. X514
atggaaaataaacttgacttgaatgtgataaaaccgattgaagaggtaaagtatttatctgctgagaatgcgtcgcgatatcgcctcatcatgaggtatttttatgaacagtaccagaaatttaaatattggctgtacaaagaggatgtatatgaatatgtaagtcaatttgatatgtttgctgactatacaatggaaaaatgtgagcaggacttaaaagcacttactgaatggaaaaaccttattgcgacacaagataccagtaaagcttctacgattgacgaatttaaaaacaaaaaattcaggtatcagctgagtccatattctattgagatagagagaatgaccataaggctggaaagcatcgtcggttatggtgggtcactacagccgtctttatttgaaaggatttaccgcaatttaataaagataaatgaaatggcgaaaaaagaggatttacaggaaataaacagatggtgggaagacctcaataccgactttgaaaatatatatcacaatgcgacagattacattgcaagtcttcaaagctctaacgctgatgaacttatgaagtcagagcagtttatcatttacaaagacaaacttatagaatatttaagagattttataaaagaccttcagagattttctgttgccatagagagttttttgaaaaaggtgagtccggagattgtcaattccgttgtagataagttatgccaatatgaaatgagtatcccaagaattgacagggttttaaatgaagaggaagtaaaagaagatttgatggataagtggaataacatatctttttggtttacaggtcataattttgaagacagcgaggcagtaaggcttcttaatatatcaaacgaaataatcagaaaaataacaatgtatgcggcgagaatagcagaaaacaggatgaaagctgccagcagaaagaatgaatatattgctctttctaaaatgtttgcaaaagcaagtaatataaaagaagcacaccttttgtctgcggcggttttcggttgcttttacacaaggcacataaaaggtgattttgaaagaaagacagaaagtgtaaaccagagcgtatgggaagaaccgccctttaaagtgattataaagccaaaaacaaggagctacagtaattctgttaagacaaatgcgattattgatagaagtgctgacaagacggagatgctgatggactatctcaatcagaaaaatatagaagatgaaataatagcaagttgcattgttggcaatagaataaggataaaggatttacctgttgtaaaaccttttgtgagggcaacgatacttaaatggataggaaaagcgatggcaagaaatggctttataggtaagacagaagatggaagaacatacaagcttcatatgccaaagaatggtgagagggcaatactaaaatgcacagatggtaatcttgatatgcctgatattgtaattgagtttgttgattga

SEQ ID NO: 49830 - DNA, 1152 bp, Thermoanaerobacter sp. X514
atggaagaacttcagatgcttcttgaaaatttttggatactgagagaggatagagaaaatttcaacaaaataagagatgcggagaataaaataaaaccttttgttgaagaaaaattaggatatagattgattataaacccatatattattaagttggaaaaagtgccgtcagatgttgaagagtggatggggatagatgcatttcaaatgcctatggattatgcatttttgtgtttgctcttagcttttttggaggataaaggacctgaagaccagtttgtgctgtctaatataacggaatacatagaggcgcagtatgatggacctgataaagtagattggacgctttttcagcacagaaagtcacttgtgcgggtgctcaattttgctgtagatattggcataattaaaatagatgatggtgaccatgagaggttttcagaaagtgaagatactgaagttctttacgaaaacacaggcatttcaaggtattttttgaggtcttttaacagagaaattacagaagacatgaagattgaggattttttgcaggaggatttaaatctttcaaactccaaagatgcggttatacagagaaggcacagggcgtaccgaaaacatattctttcacctgctgtgtatagtgaaggacctgatgaccaagacttcatgtatataaaaaattacagaaatactatagcgaaagatttagaggagtatcttggtgcaaaacttcacctccacaaaacttctgcttttgtcctctttaatgacaacaaatatttaaggtcttattttcccgacaaaaacaaaaacatatctgatataatgctgcaggtaagtaaaattataagggaaatgattgaagagggaaaactcgcctataatcctgatgatactatagatataactgaagcagaatttataaatattattttgaaagtaaaggaaagatttagtgatggttggtataagtcttacagggagatgaatgaaaagcagcttatagaagaggtcattgaaaacatggaaagctttaagatgataaaaagagttgaggaattgcattctattaaaatattgcctatggcggcaaagttaattggggaatatcctccagattttgaaaaaggagaaggtgcagatgagtga

SEQ ID NO: 49831 - DNA, 4167 bp, Thermoanaerobacter sp. X514
atgagtgaaaaattagccgaaagatggatgattaacaggattgggcttcttaatttttggtattatgatgatgaaatatttgagtttgcagatggaaggcttcttttaagaggtgctaatggttctggaaagtcagtgacaatgcagagtttcatacctttagtattagatggcaacaaaagtcctgaaagacttgatccctttggctcaaaggcgagaaagcttgaggactatcttcttggggaagaagaggtaagtgggcttgatgaaagaactggctatcttttcatggaatttaaaaaagagaaaaaagacagctacattacaataggcattggactaaaggcgaaaaggcatcaaaatatggacttttggggctttgtaatacttgacggcaggcgtataggtatcgacttctttttatacaaaatggaaataggcgatgacggcaaaagagcaaaagtcccacttaccaaaaaagaacttaagaatagaataggtgaaggcggagaagtagttgaaagccaaaaagagtacatggaaatggtcaataaatacatttttggctttagttctatcgaggaatacgacgagctcataaaactgctgatacagcttagaagtccaaagctttccaaagacttcaggcctactgtgatatatgaaattatgaaggcttcactgccttcactcacagatgatgatttgaggcctctttcagaaaccatagaaaatatggaccagattaagatgcaccttgatgttctttacaggaatatggctgcagtaaaaaagcttaaaaatgagtacgacaactataacagatacattctttatgaaaaggctggggatttagtaaaggcatacagcgatttatacgcatcaaaaaaagaatacgataatttaactaaagatattgaaaattacagaagtacaatagcaaacttaggaaatgacatcatttctcttgaaagtgaaagagaagccttaaagaaaaaggaagaacagctttcaagtggtgatgctaaaagaacccaaaaggagttattagaagaagaggatcgatataagcagtatttggaggataagtctaaaaaagaagaagaactccggaataaacaagataaatattatggtttagaaagaaagataaaaaacactgaggaacaaaaatacaaactggataaagaactacaggataaattagaggatatatcttcaattgcacaggatatagatttcatggaacatgagttttctgtaagtgaacttaaaaaagtgtatggaaaagaatttgattttacttattggaaaaatgaattaaaaaagcataaagataaaataaagcgtgcaatgagtgcattgagagaagaaatagaagcaaataaaaggtatgatgccgcacttaaagagcaggaaaggcttaaaaaagaaagagaagacagggctaaaaagcttaatgaggcagaaaggctttttgacgaacaaaaaagagaatacgttgaaagagtttatagttggtcgcagggcaatgcagaacttaagcttttaagtagccaactggaaggcttaagccgtgtcatactggcgtatggagaggataaaggatttgacgatattttggcttttgtgagaaaaccctatgaggaaatactaaatggaattcagcaagaaattttaagattacaaaatcaaagagaggtaaaagaaaatcagcttcatgagaaagaaaagttattggaggaatggaaaaacaaaaaagatcctgagcctgaaagagatgaacaagtcataaacaacagaaaaaggcttaaagaagctggaattccttacattcctctttacatggcgattgattttaaagaggatgtggatgaagagacaagaggcaatatagaagctgcgatagaagacatggggcttttggatgctcttatcgttcccaaagaatattttgaaaaagctcttcaaatggacagcaatatggcggataaatatgttatgcctggaagctttaatatgatgttaaatgtatctcaatattttaaagtagttgacaatgaagaaggagtttcaccagaagatatttcggatgctttaagcaatatatttgtatccgaagaaagcgggacaacctatattgattcaaatggcacatatggaataggagtaataaaagggaaagcgcgggataaagttaaatcaaagtacatcgggagtgagtctagaaagcgctacagagaagagcttattaaatctatacaagaagaaatacaggctataaaagctgaaatatctgcaatcgatgaggaaataaatgcaaaaaaatcaaggatacagaggctggattacgaatattcggcatttcccgggaaagaagatattgaagaagcatatagatatttaaaaacggcaaaggctgattacgaatacacctctcataaactggatgaacagctttttacagttaaaaactgttttgaggaccttcagaaaaagaaagctgttgtaagagaattgacatctggcataaacatacatccagatattgatacctattcttctgcgtatgaatatgcggaagaatacgcttcagggcttaatgaagtagaaatactatacaacaaatatgttttgcacatttcaaacgaagaaatgttattgcagcaaaaacaagatttagaatacgatattgataacttaaagtacgaaatagacgtactggaaaacaaaatacagagttctgttaagaaaattgagatgctaaaagagacattaaaagaacttggacttgaagaaattgagaaagaactagagttttgcctaaaaaggctggaggaaatacctaaagagattacaaataaatcagccgaaaaagcaaaacttgaggagcggctacagagaagcttaaaagaccttttaaacattgaagaagagattcatcttaaagaggaaatttacaatattgttgaagagggtttaaaaaaggaattagcacttggctttgtcaagcaagacgttgaaatggaggatatgttaaaattaagtaaaagcattctttctgaatacaaaggcttttttgacaaagcgggctttgacagagaaaagtttacagagagacttcaaaatgtgtattttgaaactcgcaacgaacttttagaatatggactttcaattggcaatatctttgacgaagcttgtgagggagacaatgaaagaataaaagaagcaaagagtaagcagagaagacttaatattacggcaaatataaatggtaaagttgtttcattatatacgctttattctaatattgaagaggatataatggcgaatgaaagccttttaagagagacggataagattctttttgaagagattataatgcacaatgtgggaattaagataagggcaaagatttttaaagcagaagaatgggtaaagaaaatgaacaaactcatgtctgaaagggatacttccagcggacttaagttctctattgagtggagaagcattcctgcttccaatgaagaagaacttgatacaaaggaacttgtagatattttaaaatctgatgctgatatgctgaaaaaggaagtcttcgataaagttgtaaatcattttaggtcaaaagtagaaagagccaggagggcaatggaggaaaaaaacaatacagaaacttttcacaagattatgaaagaaatattagattacagagattggtttgagtttaagctttactacagaaaagaaggggaaagtcgcaaggagcttactgataatgcctttaataagttgagcggtggagaaaaggcgatggccatgtatatacctttgttttccgcggtttactcaaggtatgagggagcacccccgactgcacctcgcataatatctctagatgaagcatttgcaggggttgatgacacaaacataagggatatgtttaaactgattgaagatctaagatttaattatataatgaattcgcaggttttgtggggagattatgacactgtccccaagctttcaatttatgaacttataaggccaaaaaatgcaaaggctgtattggtcatgaagtatttgtgggatggaaaggtaaagcatcttatacttcctgaaaaagaggaggttgccgctcttgaggtgggtgctgtaaatgaataa

SEQ ID NO: 49832 - DNA, 1296 bp, Thermoanaerobacter sp. X514
atgaataaagaagaacttaaatattttaaagaaaaaaagggatacaagaggatttttaaaggtataagggaaaagtacagaagtttaggacgtcttggaggcgttgtaaagcttgataatcttacggaagatgaaaaagaagtacttacaaaccattttaaaaaagactataggacaaaaaaatctgcatccattgatgtggcaaagtttgaagagtcgctaaaaaatacgcgatttgaggagtatacgctaaaagacatactggaatactattttggcgaaaaactcaccagcaaaaaagaggatatggaaatattggcaaaagaaagagaagagttctttaaagagctcttctctaaataccaggaatgtaagtgcattgattggctaaaaagtttgtatgagggaaccgctgtaggggtaaggacagtaaatcagaggtatttaaatgatagaaatgggctaaaaaaagatataatgtatgtatgtgatgctataaataatttgcctgtttataaaggggaaaagaaaagactgccggtgttttcttcccagattgcacgtaatcctcactattttgattcaaatacagaagctggaagtatgtttataaacgctttatgcactttaatggggctgaatgaagtaaaaggaagtgaagaaatatcagaactttattacaacgttggcattttgatagatgaaatatccaattatgtcacactctcaggacttttggcatatgagggcgatacggaaaatcaagtatttaaggctgcttatgaaagcaatcaagtcttgcaagttcctcttttaaatttgagtaaaattgagagggtcataagcccttctaagaaagtgtatgttgtagagaatccttcagtttttacatctttaatagatgccacaagcaaagtatttcctcttgtatgcacatatggccagccaaaactttcttctctcctgctcttggacatgctttataaagaagggacagagatatattactcaggagattttgacccagaggggcttatgatagcagatagattgtacaaaaggtataaagacaagtttcactttttaaggtacggtgtagaagattatttaaaatctctttcaaatgaagtcataaatgatgtaaggcttagtaagctaaataagattgaatcacctttactttttgatgtggcaaaagagatgaaaataataaaaaaagcagggtatcaggagcttataatagatgatattataaatgatataaaattgattgaagaaggtaagggggagtggtaa

SEQ ID NO: 49833 - DNA, 1488 bp, Thermoanaerobacter pseudethanolicus ATCC 33223
atggaagataaacttgatttgaatgtgataaaaccgattgaagaggtaaagtatttgtctgcggaaaatgcttcgcgatatcgcctcatcatgaggtatttttatgaacagtaccagaaatttaaatattggctgtacaaagaggatgtatatgaatatgtaagtcaatttgatgtgttttccgactatacaatggaaaaatgtgagcaggacttaaaagcacttactgaatggaaaaaccttattgcgacacaagataccagtaaagcttctacgattgacgaatttaaaaacaaaaaattcaggtatcagctgagtccatattctattgagatagagagaatgaccataaggctggaaagcatcgtcggttatggtgggtcactacagccgtctttatttgaaaggatttaccgcaatttaataaagataaatgaaatggcgaaaaaagaggatttacaggaaataaacagatggtgggaagacctcaataccgactttgaaaatatatatcacaatgcgacagattacattgcaagtcttcaaagctctaacgctgatgaacttatgaagtcagagcagtttatcatttacaaagacaaacttatagaatatttaagagattttataaaagaccttcagagattttctgttgccatagagagttttttgaaaaaggtgagtccggagattgtcaattccgttgtagataagttatgccaatatgaaatgagtatcccaagaattgacagggttttaaatgaagaggaagtaaaagaagatttgatggataagtggaataacatatctttttggtttacaggtcataattttgaagacagcgaggcagtaaggcttcttaatatatcaaacgaaataatcagaaaaataacaatgtatgcggcgagaatagcagaaaacaggatgaaagctgccagcagaaagaatgaatatattgctctttctaaaatgtttgcaaaagcaagcaatataaaagaagcacaccttttgtctgcggcggttttcggttgcttttacacaaggcacataaaaggtgattttgaaagaaagacagaaagtgtaaaccagagcgtatgggaagaaccgccctttaaagtgattataaagccaaaaacaaggagctacagtaattctgttaagacaaatgcgattattgatagaagtgctgacaagacggagatgctgatggactatctcaatcagaaaaatatagaagatgaaataatagcaagttgcattgttggcaatagaataaggataaaggatttacctgttgtaaaaccttttgtgagggcaacgatacttaaatggataggaaaagcgatggcaagaaatggctttataggtaagacagaagatggaagaacatacaagcttcatatgccaaagaatggtgagagggcaatactaaaatgcacagatggtaatcttgatatgcctgatattgtaattgagtttgttgattga

SEQ ID NO: 49834 - DNA, 1152 bp, Thermoanaerobacter pseudethanolicus ATCC 33223
atggaagaacttcagatgcttcttgaaaatttttggatactgagagaggatagagaaaatttcaacaaaataagagatgcggagaataaaataaaaccttttgctgaagagaagttaggatatagattgattataaacccatatattattaagttagaaaaagtgccgtcagatgttgaagagtggatggggatagctgcatttcaaatgcctatggattatgcatttttgtgtttgctcttagcttttttggaggataaaggaccagaagaccagtttgtactgtctaatataacggaatatatagaggcgcagtatgatggacctgataaagtagattggacgctttttcagcacagaaagtcacttgtgcgggtgctcaattttgctgtagatattggcataattaaaatagatgatggtgaccacgagaggttttcagaaagtgaagatactgaagttctttacgaaaacacaggcatttcaaggtattttttgaggtcttttaacagagaaattacagaagacatgaagattgaggattttttgcaggaggatttaaatctttcaaaccccaaagatgcggttatacagagaaggcacagggcgtaccgaaaacttattctttcacccgctgtgtatagtgaaggacctgatgaccaagacttcatgtatataaaaaattacagaaataccatagcgaaagatttagaggagtatcttgatgcaaaacttcaccttcacaaaacttctgcttttgttctctttaatgacaacaaatatttaaagtcctattttcccgacaaaaacaaaaacatatctgatataatgctgcaggtaagtaaaattataagacaaatgattgaagatggaaaactcgcctataatcctgatgatactatagatataactgaagcagaatttataaatattattttgaaagtaaaggaaagatttagtgatggttggtataagtcttacagggaaatgagtgaaaagcagcttatagaagaggtcattgaaaacatggaaagctttaagatgataaaaagagttgaggaattgcattctattaaaatattgcctatggcggcaaagttaattggggaatatcctccagattttgaaaaaggagaaggtgcagatgagtga

SEQ ID NO: 49835 - DNA, 4167 bp, Thermoanaerobacter pseudethanolicus ATCC 33223
atgagtgaaaaattagccgaaagatggatgattaacaggattgggcttcttaatttttggtattatgatgatgaaatatttgagtttgcagatggaaggcttcttttaagaggtgctaatggttctggaaagtcagtgacaatgcagagtttcatacctttagtattagatggcaacaaaagtcctgaaagacttgatccctttggctcaaaggcgagaaagcttgaggactatcttcttggggaagaagaggtaagtgggcttgatgaaagaactggctatcttttcatggaatttaaaaaagagaaaaaagacagctacattacaataggcattggactaaaggcgaaaaggcatcaaaatatggacttttggggctttgtaatacttgacggcaggcgtataggtatcgacttctttttatacaaaatggaaataggcgatgacggcaaaagagcaaaagtcccacttaccaaaaaagaacttaagaatagaataggtgaaggcggagaagtagttgaaagccaaaaagagtacatggaaatggtcaataaatacatttttggctttagttctatcgaggaatacgacgagctcataaaactgctgatacagcttagaagtccaaagctttccaaagacttcaggcctactgtgatatatgaaattatgaaggcttcactgccttcactcacagatgatgatttgaggcctctttcagaaaccatagaaaatatggaccagattaagatgcaccttgatgttctttacaggaatatggctgcagtaaaaaagcttaaaaatgagtacgacaactataacagatacattctttatgaaaaggctggggatttagtaaaggcatacagcgatttatacgcatcaaaaaaagaatacgataatttaactaaagatattgaaaattacagaagtacaatagcaaacttaggaaatgacatcatttctcttgaaagtgaaagagaagccttaaagaaaaaggaagaacagctttcaagtggtgatgctaaaagaacccaaaaggagttattagaagaagaggatcgatataagcagtatttggaggataagtctaaaaaagaagaagaactccggaataaacaagataaatattatggtttagaaagaaagataaaaaacactgaggaacaaaaatacaaactggataaagaactacaggataaattagagaatatatcttcaattgcacaggatatagatttcatggaacatgagttttctgtaagtgaacttaaaaaagtgtatggaaaagaatttgattttacttattggaaaaatgaattaaaaaagcataaagataaaataaagcgtgcaatgagtgcattgagagaagaaatagaagcaaataaaaggtatgatgccgcacttaaagagcaggaaaggcttaaaaaagaaagagaagacagggctaaaaagcttaatgaggcagaaaggctttttgacgaacaaaaaagagaatacgttgaaagagtttatagttggtcgcagggcaatgcagaacttaagcttttaagtagccaactggaaggcttaagccgtgtcatactggcgtatggagaggataaaggatttgacgatattttggcttttgtgagaaaaccctatgaggaaatactaaatggaattcagcaagaaattttaagattacaaaatcaaagagaggtaaaagaaaatcagcttcatgagaaagaaaagttattggaggaatggaaaaacaaaaaagatcctgagcctgaaagagatgaacaagtcataaacaacagaaaaaggcttaaagaagctggaattccttacattcctctttacatggcgattgattttaaagaggatgtggatgaagagacaagaggcaatatagaagctgcgatagaagacatggggcttttggatgctcttatcgttcccaaagaatattttgaaaaagctcttcaaatggacagcaatatggcggataaatatgttatgcctggaagctttaatatgatgttaaatgtatctcaatattttaaagtagttgacaatgaagaaggagtttcaccagaagatatttcggatgctttaagcaatatatttgtatccgaagaaagcgggacaacctatattgattcaaatggcacatatggaataggagtaataaaagggaaagcgcgggataaagttaaatcaaagtacatcgggagtgagtctagaaagcgctacagagaagagcttattaaatctatacaagaagaaatacaggctataaaagctgaaatatctgcaatcgatgaggaaataaatgcaaaaaaatcaaggatacagaggctggattacgaatattcggcatttcccgggaaagaagatattgaagaagcatatagatatttaaaaacggcaaaggctgattacgaatacacctctcataaactggatgaacagctttttacagttaaaaactgttttgaggaccttcagaaaaagaaagctgttgtaagagaattgacatctggcataaacatacatccagatattgatacctattcttctgcgtatgaatatgcggaagaatacgcttcagggcttaatgaagtagaaatactatacaacaaatatgttttgcacatttcaaacgaagaaatgttattgcagcaaaaacaagatttagaatacgatattgataacttaaagtacgaaatagacgtactggaaaacaaaatacagagttctgttaagaaaattgagatgctaaaagagacattaaaagaacttggacttgaagaaattgagaaagaactagagttttgcctaaaaaggctggaggaaatacctaaagagattacaaataaatcagccgaaaaagcaaaacttgaggagcggctacagagaagcttaaaagaccttttaaacattgaagaagagattcatcttaaagaggaaatttacaatattgttgaagagggtttaaaaaaggaattagcacttggctttgtcaagcaagacgttgaaatggaggatatgttaaaattaagtaaaagcattctttctgaatacaaaggcttttttgacaaagcgggctttgacagagaaaagtttacagagagacttcaaaatgtgtattttgaaactcgcaacgaacttttagaatatggactttcaattggcaatatctttgacgaagcttgtgagggagacaatgaaagaataaaagaagcaaagagtaagcagagaagacttaatattacggcaaatataaatggtaaagttgtttcattatatacgctttattctaatattgaagaggatataatggcgaatgaaagccttttaagagagacggataagattctttttgaagagattataatgcacaatgtgggaattaagataagggcaaagatttttaaagcagaagaatgggtaaagaaaatgaacaaactcatgtctgaaagggatacttccagcggacttatgttctctattgagtggagaagcattcctgcttctaatgaagaagaacttgatacaaaggaacttgtggatattttaaaatctgatgctgatatgctgaaaaaggaagtcttcgataaagttgtaaatcattttaggtcaaaagtagaaagagccaggagggcaatggaggaaaaaaacaatacagaaacttttcacaagattatgaaagaaatattagattacagagattggtttgagtttaagctttactacagaaaagaaggggaaagtcgcaaggagcttactgataatgcctttaataagttgagcggtggagaaaaggcgatggccatgtatatacctttgttttccgcggtttactcaaggtatgagggagcacccccgactgcacctcgcataatatctctagatgaagcatttgcaggggttgatgacacaaacataagggatatgtttaaactgattgaagatctaagatttaattatataatgaattcgcaggttttgtggggagattatgacactgtccccaagctttcaatttatgaacttataaggccaaaaaatgcaaaggctgtattggtcatgaagtatttgtgggatggaaaggtaaagcatcttatacttcctgaaaaagaggaggttgccgctcttgaggtgggtgctgtaaatgaataa

SEQ ID NO: 49836 - DNA, 1296 bp, Thermoanaerobacter pseudethanolicus ATCC 33223; identical to SEQ ID NO: 49832

SEQ ID NO: 49837 - DNA, 1488 bp, Thermoanaerobacter pseudethanolicus ATCC 33223; identical to SEQ ID NO: 49833

SEQ ID NO: 49838 - DNA, 1152 bp, Thermoanaerobacter pseudethanolicus ATCC 33223
atggaagaacttcagatgcttcttgaaaatttttggatactgagagaggatagagaaaatttcaacaaaataagagatgcggagaataaaataaaaccttttgctgaagagaagttaggatatagattgattataaacccatatattattaagttagaaaaagtgccgtcagatgttgaagagtggatggggatagatgcatttcaaatgcctatggattatgcatttttgtgtttgctcttagcttttttggaggataaaggaccagaagaccagtttgtactgtctaatataacggaatatatagaggcgcagtatgatggacctgataaagtagattggacgctttttcagcacagaaagtcacttgtgcgggtgctcaattttgctgtagatattggcataattaaaatagatgatggtgaccacgagaggttttcagaaagtgaagatactgaagttctttacgaaaacacaggcatttcaaggtattttttgaggtcttttaacagagaaattacagaagacatgaagattgaggattttttgcaggaggatttaaatctttcaaaccccaaagatgcggttatacagagaaggcacagggcgtaccgaaaacttattctttcacccgctgtgtatagtgaaggacctgatgaccaagacttcatgtatataaaaaattacagaaataccatagcgaaagatttagaggagtatcttgatgcaaaacttcaccttcacaaaacttctgcttttgttctctttaatgacaacaaatatttaaagtcctattttcccgacaaaaacaaaaacatatctgatataatgctgcaggtaagtaaaattataagacaaatgattgaagatggaaaactcgcctataatcctgatgatactatagatataactgaagcagaatttataaatattattttgaaagtaaaggaaagatttagtgatggttggtataagtcttacagggaaatgagtgaaaagcagcttatagaagaggtcattgaaaacatggaaagctttaagatgataaaaagagttgaggaattgcattctattaaaatattgcctatggcggcaaagttaattggggaatatcctccagattttgaaaaaggagaaggtgcagatgagtga

SEQ ID NO: 49839 - DNA, 4167 bp, Thermoanaerobacter pseudethanolicus ATCC 33223
atgagtgaaaaattagccgaaagatggatgattaacaggattgggcttcttaatttttggtattatgatgatgaaatatttgagtttgcagatggaaggcttcttttaagaggtgctaatggttctggaaagtcagtgacaatgcagagtttcatacctttagtattagatggcaacaaaagtcctgaaagacttgatccctttggctcaaaggcgagaaagcttgaggactatcttcttggggaagaagaggtaagtgggcttgatgaaagaactggctatcttttcatggaatttaaaaaagagaaaaaagacagctacattacaataggcattggactaaaggcgaaaaggcatcaaaatatggacttttggggctttgtaatacttgacggcaggcgtataggtatcgacttctttttatacaaaatggaaataggcgatgacggcaaaagagcaaaagtcccacttaccaaaaaagaacttaagaatagaataggtgaaggcggagaagtagttgaaagccaaaaagagtacatggaaatggtcaataaatacatttttggctttagttctatcgaggaatacgacgagctcataaaactgctgatacagcttagaagtccaaagctttccaaagacttcaggcctactgtgatatatgaaattatgaaggcttcactgccttcactcacagatgatgatttgaggcctctttcagaaaccatagaaaatatggaccagattaagatgcaccttgatgttctttacaggaatatggctgcagtaaaaaagcttaaaaatgagtacgacaactataacagatacattctttatgaaaaggctggggatttagtaaaggcatacagcgatttatacgcatcaaaaaaagaatacgataatttaactaaagatattgaaaattacagaagtacaatagcaaacttaggaaatgacatcatttctcttgaaagtgaaagagaagccttaaagaaaaaggaagaacagctttcaagtggtgatgctaaaagaacccaaaaggagttattagaagaagaggatcgatataagcagtatttggaggataagtctaaaaaagaaggagaactccgtaataaacaagataaatattatggtttagaaagaaagataaaaaacattgaggaacaaaaatacaaactggataaagaactacaggataaattagaggatatatcttcaattgcacaggatatagatttcatggaacatgagttttctgtgagtgaacttaaaaaagtgtatggaaaagaatttgattttacttattggaaaaatgaattaaaaaagcataaagataaaataaagcgtgcaatgagtgcattgagagaagaaatagaagcaaataagaggtatgatgccgcacttaaagagcaggaaaggcttaaaaaagaaagagaagacagggctaaaaagcttaatgaggcagaaaggctttttgacgaacaaaaaagagaatacgttgaaagagtttatagttggtcgcagggcaatgcagaacttaagcttttaagtagccaactggaaggcttaagccgtgtcatactggcgtatggagaggataaaggatttgacgatattttggcttttgtgagaaaaccctatgaggaaatactaaatggaattcagcaagaaattttaagattacaaaatcaaagagaggtaaaagaaaatcagcttcatgagaaagaaaagttattggaggaatggaaaaacaaaaaagaccctgagcctgaaagagatgaacaagtcataaacaacagaaaaaggcttaaagaagctggaattccttacattcctctttacatggcgattgattttaaagaggatgtggatgaagagacaagaggcaatatagaagctgcgatagaagacatggggcttttggatgctcttatcgttcccaaagaatattttgaaaaagctcttcaaatggacagcaatatggcggataaatatgttatgcctggaagctttaatatgatgttaaatgtatctcaatattttaaagtagttgacaatgaagaaggagtttcaccagaagatatttcggatgctttaagcaatatatttgtatccgaagaaagcgggacaacctatattgattcaaatggcacatatggaataggagtaataaaagggaaagcgcgggataaagttaaatcaaagtacatcgggagtgagtctagaaagcgctacagagaagagcttattaaatctatacaagaagaaatacaggctataaaagctgaaatatctgcaatcgatgaggaaataaatgcaaaaaaatcaaggatacagaggctggattacgaatattcggcatttcccgggaaagaagatattgaagaagcatatagatatttaaaaacggcaaaggctgattacgaatacacctctcataaactggatgaacagctttttacagttaaaaactgttttgaggaccttcagaaaaagaaagctgttgtaagagaattgacatctggcataaacatacatccagatattgatacctattcttctgcgtatgaatatgcggaagaatacgcttcagggcttaatgaagtagaaatactatacaacaaatatgttttgcacatttcaaacgaagaaatgttattgcagcaaaaacaagatttagaatacgatattgataacttaaagtacgaaatagacgtactggaaaacaaaatacagagttctgttaagaaaattgagatgctaaaagagacattaaaagaacttggacttgaagaaattgagaaagaactagagttttgcctaaaaaggctggaggaaatacctaaagagattacaaataaatcagccgaaaaagcaaaacttgaggagcggctacagagaagcttaaaagaccttttaaacattgaagaagagattcatcttaaagaggaaatttacaatattgttgaagagggtttaaaaaaggaattagcacttggctttgtcaagcaagacgttgaaatggaggatatgttaaaattaagtaaaagcattctttctgaatacaaaggcttttttgacaaagcgggctttgacagagaaaagtttacagagagacttcaaaatgtgtattttgaaactcgcaacgaacttttagaatatggactttcaattggcaatatctttgacgaagcttgtgagggagacaatgaaagaataaaagaagcaaagagtaagcagagaagacttaatattacggcaaatataaatggtaaagttgtttcattatatacgctttattctaatattgaagaggatataatggcgaatgaaagccttttaagagagacggataagattctttttgaagagattataatgcacaatgtgggaattaagataagggcaaagatttttaaagcagaagaatgggtaaagaaaatgaacaaactcatgtctgaaagggatacttccagcggacttaagttctctattgagtggagaagcattcctgcttccaatgaagaagaacttgatacaaaggaacttgtagatattttaaaatctgatgctgatatgctgaaaaaggaagtcttcgataaagttgtaaatcattttaggtcaaaagtagaaagagccaggagggcaatggaggaaaaaaacaatacagaaacttttcacaagattatgaaagaaatattagattacagagattggtttgagtttaagctttactacagaaaagaaggggaaagtcgcaaggagcttactgataatgcctttaataagttgagcggtggagaaaaggcgatggccatgtatatacctttgttttccgcggtttactcaaggtatgagggagcacccccgactgcacctcgcataatatctctagatgaagcatttgcaggggttgatgacacaaacataagggatatgtttaaactgattgaagatctaagatttaattatataatgaattcgcaggttttgtggggagattatgacactgtccccaagctttcaatttatgaacttataaggccaaaaaatgcaaaggctgtattggtcatgaagtatttgtgggatggaaaggtaaagcatcttatacttcctgaaaaagaggaggttgccgctcttgaggtgggtgctgtaaatgaataa

SEQ ID NO: 49840 - DNA, 1296 bp, Thermoanaerobacter pseudethanolicus ATCC 33223; identical to SEQ ID NO: 49832

SEQ ID NO: 49841 - DNA, 1599 bp, Opitutus terrae PB90-1
atgaatcaggcggaaccacagcgagatgatttggaatgcccgcccggcggctaccagacgttccatcacttggccgcacccaaggtcgatttctatcgcgcgatcctccgtgtctttggacaggcgaaggaacatttcgagatttcgcttcgtcccgctgaggtagccgatcggttggtgaacggttctgcgctccccgatgtcgaagaactgagcctggccctcgaacaacttcacaagtggggaaacttggacgcgagccaggacaactccgaggtgcaaacggtggaggaattcaaacggccacgattcctgtatcaattcacgatggcaggcgaggcgaccgaacaggcactcaccgcgttcgacctgcacttcctgcggcctggcgaactacagacgaccgcgctccgcagcattcaagaaacgcttgatgaattgcagcgtcttctcgccaacggggacctcgacaccgcaaaggccgttcgcgccctgcgcgaactcgccgaccggttccaccaacttgtaacccgcgcacagtctttcatgcgcactgtgcagcgcagcatcgacgctccgtcgtctgaattggacctgtttctccagcacaaggaggcgttgttgagctatcttgaacggtttgtcggcgaacttgtgctggccaccttccgcgtcagcaccagcctccgccacatcgaggccggtggcatcgaccgggcgctcgatgccgcagcggaggcggacttggtcgatgccttgcagcctgacgaacgccagcgggccgcggcgcgcgaacaatggcaactccgctggcagggactgcgccgatggttcctcggcgaattggaggcgccatctcaggcggagattctacgtggccgggcgcgagccgcgattcccgccttgttggaaacggtgcgccggctcaacgaccagcgggccagtcgcactgatcgcgcaaccgacttcatcacgctggcgcggtggttcgcagcgtgcccagccaacgacgacctacatcgcctatggcgggccgcgtttggcctcacgccggcgcgccaccttcgcgtgaacgaggatacgttagctgcatgggagagcgagggcgccaattcccgcacgtcgtggaccgaggcaccgccgttctacctgacaccgcggttgcgagcggtggggcgttcgactccgcgcggcccggtgcgcgccgtcattgatcgttccgcagagcgcgcgcgcttggcgcaactcgccaccgaagaggaggagcttgcggcagcggctcggcgcaccctcgccacaggacaaccgcgtcgactgtctgccctgccagtgctgaaagagcgggaactcgaccttttgctcgatctcctgggcgaagccaatgcaagcgtgtccaaaccgggcgaatccgttgaagcgacttccgaagatggttcgttggtgatcgtgctcgaaacgccggccacgggcacgccgctggctacggtcgaaaccgaagtcggcaccctgcgggggccggatttcctcgtcacgatcacggatctcaacgctcctgccgctacggacgtcgtcgggcaaaccgtagccctttccgcatga

SEQ ID NO: 49842 - DNA, 1239 bp, Opitutus terrae PB90-1
atgagtgttgccacaccaccgcctggcgaagccgcggtcctggaccacctgcgagtcgaagaccgtcggcgggcgttgcgcgctttgctgcgcaagcctctcctattggccgaagaccctgccgatgcgaccgaattcacgcgggtgcgccgacacgccgacgatctgcgtgaatggttctcgcgccaggccggctggagcttggacgtcacggcagattttgcacgcttgcggaagacaccagccgacctcgccgatgcttcgcgtccggcccaggacgaccggagcaatgagccgttcacccgccgtcgatacgttttgctatgcctcgcgcttgctgtgctcgttcgcgaggagcgccagacaaccctggggcgcgtcgccgatcaggtggtcaacttgtggaaccaggacaccacattggttgccgccggcatggcgtttcgcatggaaagccccgacgagcgccgtgatctggtgcaggtcgtgcgcttgttgctcgcatggcaggtattgcgccgactcgatggcgctgaagatcgcttcgtctatgatcgtgcggcagatgttctctataacgtccgccatatcgtgctttcgcgacttttcgccggccgtcgcgcgccaagcttggtgccggccgagactctcgacgagcaactcgccgcgctggtagaagagccgctcattgacaccgatgaacaacgcaaccgccgcattcggctgggactggtccggcgactgttggatgatcccgtcatctactaccgcgaactgcccgcggaagaacaggcctacctcttgcgccagcgctggcacttggtcggccaactggccgaggcaaccggtttcgtccccgaggagcgggcggaagggttcgccctgactgatccatttggcgactgctcggatgttggaatgcccgaggaaggcaccgacggtcacgctacaatccttgttgccgaatttctggcggcacgccggagcgagtccgaaggctcggtcgtgccgatgcccgctatcgcggattttgtcgcggccaaggcggtcgagcaccgcagccgctggcgccgcgaggctaccgtcgccggccatgagcacgagttcgctcgggaaattgtggcccggctcgccggactgggcttggtccgcatcatccgcgacggcgtcgtgccgatgccggcgatccatcgtttccggcttcgtgctccgcttgaaaccgcgcatagcgtcgcgtaa

SEQ ID NO: 49843 - DNA, 4104 bp, Opitutus terrae PB90-1
atgcttcccgaacccacatccgaacggttcaagccgctgcgcagcggtctcatcaatctctataaatacgaggatcaggagttttggttcgaccacgggcggctgctgttgcgcgggaacaacgggaccggcaagtcgcgggtgctcgctttgcagcttccctttcttttcgacggcgaaatcagttcgcatcgcgtcgagccggatggcgatcccgcccgcgccatggcgtggcatctcctgatgaacgactacgacgaccggctcggctacacgtggatcgagtttggccgaaggaaagcggatggcaccgctgaattcgtgacgttgggttgcgggatgcgcgcgattcgcggcgtcgacgggctgcctaaccgctggtatttcgcgacgcacctgcgggtcggaaaggatttccggcttcttaccgatcagcgtcagccgcttagccgagatcaacttgagctggccttgggcgagacttccttgtttcgccgggtggaggactatcggaagcgggtggatgaactcttgttcggccttaagctccgctacgactcgctgattgaattactcattcgtctgcgcgcgccgcagcttgcccgcaagctcgacgaagaccgtctctccgctgcgttgagcgacgcgctgcctccgcttggggaaacgctggtcaaggacgtagcggagtcattccggaacctggactcgatccgggctgatctacagacccaccgagacatccacgccgaagtgggaaagtttttgcaggactaccaacgctacctgcaggtcgccgtgcggcgtagggccgaaggggtccgcacacagcattctcgctacgaggagaccaaccgtgggatcgccgaccagacccggcaaaaggaacaagcggagggaaggatcacagaggcggaggcaaagaagacggcggcggatctcgccaaacaagaggcgacctcgcagatggaagcgctccgtgatagcccgtttcagcgcgacgcgattgcgttggagaacgcgcgcagccaggccgcatcgtggaaggagcagctcgttacgcgcacggcggacaagatgtcccgcgaaacccgcttgtccgtaacggaaacggagcacacgcggcaggaaaagcgtgccgaagacacgcgtatccagatttccgccgtgctccagagcgcggacattgcagctaaggcggcggcgtttttggaggaccacgaacgccacgttcccgacctcacgacatggccgagccaagccggatggctggcgcatgcggagaaagcgctcggcgatcgtgtgcaacatcgtgaccgtgccgttgcccaacttgaggttctccaagccgcgtgcctcaaagcccaggccgaactggcgcaggcgcaagaacgcgagaatcacgctgaaacccgtgtttccggagagcgagagaatgagcggatgctcgatgccgaactcgcgaatgccggcgaaacgttgctcaaggaatacgccagatggaagacggccttgacctggctgcgtccgcccgatgttgcggccttgaacgatgcgttgggtcgctggcttgaaaccggcgatccgtccgaccgcacgctacccgccgtgatggaagcggcctccgcggaggcggagggcgaacggtgcggcgagctcgccggtgtcgaacaggaaatcgaccggttgaaacaacaactcgccggacttgccttggaacgaaccgaactcgaaggcggacggcacttgccgccgccgatgcccgttacccgagaccccaacgtgcggagccaaattgcgggtgccccgctctgggaagtttgcgatttccaagaaaatctcactggcgaggagcgagcccgcttggaggccgcgctagagtcggcagtcttgctcgatgcacttatcacgccgacgggtagactcgtgccacaggaggcctgcgacagttttattggctctggtaacggcgtccccctgggaccgacactgacgcagtggcttcgcgcggctgttccggtcaatcgatccgacgtgctaacggcggatgcggtcgaatctgcgctgcaacagataagcgccggacgcgacacgggcgaacactgggtaagtctcgatgggagctggaggcttgggccgattcatggccgcggtcagaaggttgccgcgcagcatttgggtcagggcgcgcgcgaagccgagcgacagcggcgactcgcggaaattgcaacagagaccgcgacgctgacggcgcaaaacgaactggccgcagcgaagcgtgcggaactagtcacgacccgcgtcgaagcaattcgggctgaacgcctcggcgcaccgaccgacacggcgattgccgacgcgcttgtccggagggccggagcgcgcgatcgtctgagcctcgcgcgcaaggaatatgccgatgcccaagaggtcacggaagtggcccgacgaaaaacccaagaagcatccacgcagcgtaattccgcagcagccgacctcggtttgaccgcgtggcaggacaaaccggagacgctgcgtgtagtgtggcaggagtatcgtctcaaactcgcggaattttggcccaccgcccggctatggaacgaagcccgagaacaggtcgaactggcggcttgcgaggtaatccgagcgcgggaagaactcgaagcggccgaacagcgccgggctgaaaccgaaaaggaatcggtgcaggctcaagcccgattcaacacgctgcatgaaaacgtcggggcctcggtggaggcgctgcaaacgaagatcgccacggccaatatcgcccatgcggcagcggagaaggcggcgaccgaggccaatgacgcgctcgtcgacgcccgcaccgatgccaagctcgcgatccagcaattacagcagctcaatgctcaactcaacgacatcgtccgggatcgagccgccgccatcgacaaggtgcgcttgttcgcccatcacggactattcggcgacgcccatccgacctttgccccgattgaggcggatgcctggtccgtcacacgttcggttgaaatcgcgcgcgacatcgaacgcactctgcgcgacatcgcggctgacgataatgcgtggcgcaaccggcagaccgcgttgctccagcacttcacggaattgcagacctcgctgggcgggcgtggctaccagccacagatgcagtatgcggatgacagtctcggggtcgttacttgcgctttccacggcggaccgatgcggttgggacaattgcacgcggctgttgcaaccgaaatcgccactcaggagcgcgtgttgacagagcgcgagcgcgaagtcatcgacaatcacctgatcggcgaagttgccactgcgcttcaggacttgatccgcaatgcggagtcgcgggtagccgacatgaatgccgagatcgtgcgctgttcgaccagcaccggtctttccatgcgcctgaaatgggagccccgcacggaagatgtgcctgaaggtcttgaagaagctcgaaagctcctcctgtccgatcccgagctgtggacgccggacgagcgggcgcagcttggccagtttctacacggcctcatcaaggatgcgcggaattccaatccgctcggactgtgggccgatcacttgcgacaggcactcgactatcgcacttggcaccgctttagcgtcgaacgccggcagaacgagaagtgggacaaactcaccaaacgtcgctacggcaccgggtcgggcggcgagaaagcgctgatgctgaccgttccgcagatggccgccgccgcggcgcattatcgttcggcggcaccacacgcgccgcgtttgattctgctcgacgaagtgtttgtcggtatcgactcgaaagtccgagccaaatgcatgggactgctggaagcgtttgatctcgatttcgtcatgacgagcgaacgcgagtggggggcttattcgaccgtcaagggcctcgccatctaccaactcacgacccatcccggtatcgacgcggtgggtgcgacccgttgggtgtggaatggacggcaaaaagtgctggcgaatccgcctgattatgccgctggcgggcacaacggctcgactccccatgtcaccccaacgtga

SEQ ID NO: 49844 - DNA, 1254 bp, Opitutus terrae PB90-1
atgtcaccccaacgtgagcgcctgcaggccttattcggacgcccggaacttcgtcggctcatcgaacgcctcaacgaacgccgggagttgggccgcccgcttaccggcactttgaccctcgacactccgtcagtggaagagcggcgggctgtcgatcaattgctccgccgggcaaccagcaccggcgcctccctgtcggtttcgcctgaagcacttttgattcagcttcgcacggccggtctggcgaatacttgggaggaagttctcgaagcggtctgtgggcaaccggaccccacgcgcgcactggctgcggcaaatgcgcaagcatgggaagacctttggaagcgggtgaagggaacggttggcccttcattgcacatctggctggatcagcttcggcgcgacggcttgctcaaacgcctgagcgaagggaatgcagacatcgccgggcattgggtcgatcaggccgtcgccgtgctccgtcagatgcctttcgaggacgagcccattgccagcgtcgccgcacgcctcgctggcaacagtcacgccctcgatccaggttcaccactcgcaacgattatcttgcggggcgtctccgttgtccatcagtgcgctatgccgctcaatgcggccgagcgtcgtgagctttggtcgaaggcaggcgtcgtttgcgacgaactcagcgctcctgttctcgtattcaatcttgtcctgcccggcgcttcaccgttggaggagattctggcggcagcacatgccgcgacgataccgattcacgtcacgacgcgcctcctgctggccacctcctggacacaggtggtggctccgccgagggtgtatgtttgcgagaatccttcgatcgtcgccttggccgcacggcagctcggagcgggctcggcaccaattatatgcgtagacggtgaaccaaagaccgccgcgtggaatctactggggcaccttcgccgcgccggcaccgagatctggtatcacggggacttcgattggaaaggcctcgccatcgcctcgcgtgtgattgctcgcctgaatgcccggccgtggcggtattcagaacatgactacaattcggcgattggaacggaagatttaacgggagcagtgttcaacgcgccttgggcaccggaactcacgaccgcaatgcagaagcgcaacaaactggtgcatgaagaagcggtggcggacttgctgctgtcggaccttgagattgtgtccgatcgatcgcaccgcctatcttga

SEQ ID NO: 49845 - DNA, 1500 bp, Desulfitobacterium hafniense DCB-2
atgtattctctctatgataaaattgaagaaacaaaatacttatcagaaggcaaggcgggtatatatcggccaatttgtcatcttttgttccagaaaaccgcacaagagtttcaaggcagtatgtacacggttggcgaaatcttagcagatttgaaacgtcggcctgaatttgaggacaggtttatggatcttacagacagagatcttgatgaagcattgaaaagtttggagaaatgggggaacgtaataggtcatcaagatacctccaaagcaaaacgaattgaagagctgaaaaatcgacgttcattatatagtattacggatattacaatcgaattggaacggatgatagaaggacttcaaaatagcctccagtccattcgagggatagaatttgaacggcatattcctgatcgaatgatagaggagctcgttaagttaaaaacttggcatgaaggtcaaacttatgatttgcggattgtttggaaagagcttatggatcggtttaaatcccttcaaaccgaatcttcgaacttctttgctcagattagccgagcttcttcaaatgaagagctaatgcggacggcctcatttttagcgtataaggaaaaatttgtacaaatgctccgtaactttgtcttagttattatggagaagcaagagaaagttaagcactatttcctcgatattcctgatgatgctattcaacgtattgttgaccatatcgtaactaaagaggcagggtcagatttgactggtgactttagtgctgaagaatctcgtgcggctcgtcttttagaatggcaggggttaaaagggtggttcgttgagatcaatgggaaaaaaccaggtgttcgctttctaattgatcaggctaagaacacgattgttcgtgttgttaaaattgccgaacaagtaactgatcgctacaatcattttaagagccgcaaaaacgattgcttacaactagcccgactgtttgccagcgcaagaacgattgaagagtgtcatcgcctttctgcatatgtgtttggtgtacagcaaacctttcatctttatactgtccctaaacgttcggatgactatcatgatacagtttgggagtatgatccacacgaaatcactatcagcaaaaataggcccgggcggcgggaaggaaaaatcaaacaggcacttgatgaaaatccgcttaaagagtacgaacttttaaaacagcatcaagagctgcaaacgattatccggcgttatttcgatgaactttcagctgatcgaaaaatcgtctttgaagaattacccatccttcatccaatcatcaggaatactttgcttgatctcataggacaagcaaacgcttcgagtaaaaaaaccgcacgaacggataatggaatcaaattttgcttaaaagagcgctcagatcgttggattaaggttcggtttaaggatggaacactgatgatgaaggacttggagcttgagcgaatcggaggcggcaacacatga

SEQ ID NO: 49846 - DNA, 1155 bp, Desulfitobacterium hafniense DCB-2
atgaatgaagttataccatttcaagactgcgtacgagcactatttgatcattattggatccgccaagaggatgatcctgaaatgttttatgcgattaagaagcaggaaagggatttggaagcgtattttcgaacccaatttcggtatcatctgatagttgaggctacttttgcaaagctcgaaaaaatcccctttaaagcacagccttccatgggcattttcgagtttgaaagagagaaaagctatatattttttgcatgtttgcttgcctactttgaagataaaggagaagatcaacaatttcttctccaggatgcctgtgaagcaatacgtaattatgcaccagaggaagcggggcccattaggtgggaagatagaagtacgcgaaaggcgtttgtggaagcacttaaattttgtcgagaccaacatataatcgaagagattgatcagcaaattgaaggcttccgtgatcaaatggagcatgaagtactgctccagaccacgccgctgtttcgccgtattttaaccttgtattttagcgatctatcccagatccaaacagtccaagaatttgaagatgcggttaaaagggaaattggagaagccacaacgccaaagcaacggattatgaggacttggtttttagaatctgcccttcgtcatgaagatcttacacctgaagagcgcgatgccttgaattgtggatttgagtcatggcaagcggaaattgaaggccggttcgattttatgcatgttgagcgatataagtctatgagtatgattgttcatagtgaatatcaatatggtgagtattacccggatgctcgcaataaccaaacgatgagaactgctattcagtgggcaactgaggtacttaaccaggttcgaaggggtgaagttatccctgatttatacggccgaatccggatgcatgagcgcgaagcatttcaggtttttcttacggtgaaagagaaatttcaatatggctggaataaggaatttacacaaataaaatctccggaggctgcttggaagatggtacttgaagcacttaaacaattttcaattgtcaaatcgattggagataagcaattatattgttttgatatagcaggccgaattgcaggccaatatcaggaggaggggaatcaatga

SEQ ID NO: 49847 - DNA, 4113 bp, Desulfitobacterium hafniense DCB-2
atgactgttcatcgttatcagcccaatcgcttggggctctttaatttctggtatcatacagactcagtgcttgagtttgtagatgggaaattgttcgttcgtggcgcgaatggcagtggaaaatctgtaacgacaacgatggcagtcccgatattgctggatggagataaaagtccaagccgtctggatccctttggggggaaaagccgactgatggttgatttattgcttggtgagaaaaatatctctcaaaaagaagaggcgacggggtacttgtattttgaattcaaaaaaggcgattcgtatttgacgtttggaattgggatgtatggtaaccgtaaagaacaacgatcccccgattattggtatttcatgattaacgacggtaggcggatcgggtatgactttcttttatatgatgaagaaaatatccgtggggagattcggaaatttcctctcactaaggcacagttagaagaaaaaatcggatggggcggagaatttacaacgagccaagcaagctataccgaaatggtcaatgagcatttgtttggatttaatagtgttaaaacatttaaagaattgattcatattttaattcaactaaggagccccaaactttcccgggatactaagccaacggatgtgtctaacctattgtcggattcgcttcccgagcttactgatgatgaattattaccaatgatcctgacgatcggaacgattgatgctcatcaagaaaaacttgaagaattggaaaaatcgctttcctatcttcgggcacttgaatcggcttatcaaacctacaacgaataccgattatatgaaatcgcaaaagagaatacgaagattcaaaaacagattcatgaatcgaatcatttacttgggatagatcacaggcagttggagcaatacgaaactgaatttgcagaattaccagagcagttagcaattcttgaaacagaaaagcaaacattggatatggaagagcgccagcttagggggcatgagatatttggtcttcggcagcaacaaactcaactggaagaggatgttacgaaatttgataaaagctttaaatcactggaagaacaatataataacaaacgtataaagattgataggctaactcatgatcgaacagccaatgactacgaaaaagaaaagacgaagaacgctattgatgaaatagctgaagaattaggggacctggccaaaaggacattgttttcatcccatgaccagtacttattgcatttggagcaaaacccaaatgcggaattaactatttttcacaaaaattgggaagaggatttactgaatcaccgaaaggaactttctttaattcggcaattggcccaagaagttgagacttgcagactgcgtgaaaaggatgctgaagaggcagtggaccgtgtagaacagcagttagaaatagtcaaaaagagaagaacagaattacaaaaaacagccgaatacatttatggggatttaggtgaaagtatggaaacctggcagacccaagtacaagtgttcgtgctgggacagaatgcaaaacaacaattgataggcttatttgaatcgtttctttatgaagagatagaggatgcttcgcgcgaaattgagatttggtgcagcgatcagaaacaaatatatgaaaactcgatcattaaagagatggagggacagcggtttgtcatagcgcaagaaaagagccggcaaactatttggaaagagcaaatcgaggatattcaaagtcagcctgaaattgaacctgtctattccaaagacgaacaagctcgccgcaactcccttcgggaacagaatgtcatgtttagaaacttttatgaggctgttgaattccgtcctgaattggatgccaaagcgagagagaatttagaggcggccatttcaagagcaggtcttttaacggctcttttggtttctgaagaagacgaggaacgtattcttgaacttcctatcctccgtactcagcagattaagactcataatctaatgcagtatttggtggctgtgccagatgagaccatctcacgagccaaaattgagcgcttacttcaagggatatctatttcgaaattggatgaatcctatattttggatactggggagtttcaaaatgggtttatttatggtaatgctccgtttcaagaggaacaattcatcgggaaagctgcgcgagaagccactcgggcaaaacgtattttgagtttacaagacgagatacagtcttcgcaaaatcgtattgaagaagcagacgatcaaatatcatttctagaaaaccaaaaacgtcgcttaaatactgaattttcaacttttccttctcttgaacccataagagagatggagaggcagcgcaagggtctggacacggaagaaaaactagccaacagtcaagtagaacaacaaaaagtaaatttccaagctttgaagcaaagcaaccaaccaattatcaatgaattcctgttaaagtctgcaccctatcaccgtattgagggaacatcggccgcttaccagaatattctcgatgagcttaacgaatacaggaaccaactcaagaactttttttatttcatgctgcagagaaaaacactggaggacaaagtggatgacgcttcaaatagaattgatgacctagaaaatgatctgatcgatttaaaagagaagcagatggaggctcagcgggatctgaattctagtaaagctaaaagagacatgattctgaacctgatcatgaaccaaagtgatgaacagaatatcttggctcggattgataagattgctttgatgaaagagaagaacgaaggggccttaagagaaaaaattcaacgtcaatctgatctgcgatcagatatttcaaagcttaagccccagatagaagctcaaggtttggacattttaaatttggaagagctaaaacaagcatgggaatcattatttcaagaggagaaaagctttggttttattgatgctcactggactgcccctctggcagttaataatttagagttaacatataaggagtcaaagatcagtgaaatacaagagagattgaatcgaacgagctatgatgccgaacgtgaattaatagagcaaaacatgaagcaaacccaacatacattaaagattaggaagatgggtaaaggacgagaatgggaacagcttcaacattgggttgatcgacggtttattacgttcacgcctagttatattgagatgaagcctgttcagttgcttagggagctgcaagaaactcgagatgagacagcacttgctattcaggaaaaagagcggcaattgtatgaaaaagtactgattgatgatatcggttcgacaatccgtgaacttatcaaaaaagcaagagaatgggtggaggaggctaatcatttcctttcaagtattgatactactattcggatgcagctcaagtggaggcctcttccagctaaagaacaaggagagttgtcgacagacaaactggttgaacttctttcaaaggagactcgttggttaaataatcatgatctagagcggattgcggagcatttcaaaaccaaagttgatcaagcgcgggccatggcgaaggcggacacacgcttttcgttaacagataagatgaaagaactgctggattatcgaaaatggtatcggtttgtgctgtactatcagaaagaagggcaaacagattttgatgagttttctaacaaagaatttgagaagatgagcgggggagaaaaaggcatttcgatgtacagcccattattcgctgcagcagctgcaaaatacgctcatgcagcctctcattctcctcgattgttctcgctagatgaggcattcgctgggattgaccatgataatattgaaaatatatttgggttgatctcccaatttgattttgattatttaatgaactctcagatcctttggggaacatatgaaaccgtaaataaattatcgatcgtggaaattttaagaagagtacacgaaaaaacattagttttaggccgatattattgggatggggaaaataaacacgatcttcccattggacatttaatagaggagtattttgcagaaaaactttctagatga

SEQ ID NO: 49848 - DNA, 2130 bp, Desulfitobacterium hafniense DCB-2
atggagtcttcattgcaggaactcgttcaggtttttcgcaatgagaaagggtttaacactttgttttctctttttcgggaaaagtatcgaagttatggaagaattagtaagggaaccaaagtcatcattactaatccatcagtacatgaattgcaaacgttagcaggtttttttggtgaagcttataagggtaataatgcaatcatggtcactgcagcaaaatttgagagagctattatgaaatcaaaatacaaagaactttttcaaggccatgatgtgaatgatctgctgcaactgtattttgggggctatttaacatccaaaggcgaagatagatgtaattttgatcggaagaaagagcagttctttcagttgtttttgagtcaatctaaatcaggaagttttttctataactttatttcgtttataacgcattataaaaatgcaccatttattcatttaatgtataagaaggattcagatgtacttagacagttgcttttacttattaataaactgtttgatcagttgcctttaaatagtgatgtctttttacctatgctatcttataaacttacagataactttcatgctttagctcctaaatcggatagcggtaggatgatattatttgcattacaagttttaaatcatttggataatggagcagatatcatttcgaaaccagatgaagaccagattacagatattttgcaggggtaccatatcaggttctgtccagattctaacaaattggctcatcgcctgtggatatcagaaagcactaataatggagattatagatatcaattaattccgttgatcaagattggtacaggtggttttgcagaagtatacatggtttttgacccgattgcaaaaaaggaaatggcttgtaaagtgctttatgaaaaagcggtttttttacaatggtatggcaaagaaggggaggattatttacagcggtttaaaagagaagttaaacttttacgtgaaaagatatctcatcaaaatattatagaaattgacaaaatgcagctggagcatgatcccgcttttttcacaatgccgttagcggaaacttctttagagaaatggttagagctaaacccatccctatcagaagaaacaaagctaagcatatttaaggacatattaaatggtgtgttttatcttcatgattataaaatcagtcatcgtgatttagcgcctcacaatattttgttatttccccaaagtgatgagactagactggcgaaggttgccgattttggattggccaaagaccatcgatcactttcttcaataacaagacattccaatatgtcatatggtagaggcgcatttaccgcaccagagcaaaggaaaagcttgaaaaacgctgattttctgtcggatgtttattcactgggggcattgcttttttacatatatagtggaaaatcgccagagcaaagattcacatcatttattaggtatcagcacattgttgggaaagcaatggaggaggagcgttccaagaggtatcaaagcgttcaggaattaatggacgatattgatcagactatttataattcagctcaaaatagttattcatttaatagcttactaacttatgagtttaggaatgtttgcggggatgtggatcatgttttaaaatgtcttcctacagttaatgtggaaagcccaagtcaagtttgtggtaaatttgttagaccttttatagctattccgactgaggtactgacggaatgtgcaaaaaacgaaactgtcatgattccttttctacatattgcaaaagaaaatatttctagagcgaaagattgtagtgaagcggagtggaatcatgtttcattgcggtttaatggaatttatgaagggacagaaaaacttggactaaaaatgtactcattgaatctaatattaattactgcactcgaaaagaagaaccttttagctcaaactatacttgtgagcattctaggctcattggagagtcaggggagactttctcaacaaatagcacacatgattgagaaagaatttcctgtgtatcatgaattattaattagccttttgcaagaaactaattatccactcgatatacgcgatgctttaaatgactattaa

SEQ ID NO: 49849 - DNA, 1464 bp, Caldicellulosiruptor bescii DSM 6725
atgataaatagttttcaagctccacttttgggcaaactcaaatattttgagtacctcacagcgcctaactcagaaagatacagaacaatcatgagatattgttttttgtgccatttagaatacaaaaacaggctcacaaaagaagagatatttacatttttaaaaggttttccacagtttgcagactacactgaacagatgtgcgaacaggacttgaaaagtcttgttgagtggggcaatttgaattcaattcaggacacttcaaagactagaactgttgaggagtttaagaacaaaagatttttatatgaacttacacatatcggacttaagattgaaaggtttttgtttgaacttgaaactcaagaggacacaaaagcagagttaaatcccaagcatattgagaagatatttctcttgcttcagcaggtggatagtatattgcaagagccacaaaaaagagcagttgactggtgggacgagctaacaagatcttttgaggagattgaaaatagctattctgaatatatttcaatgttaaagtcgtacgaagctgaaaatctcatgataaaagagaattttttagagtacaaatcaaagcttgtgcagtacctttacaacttctatattgtatttcagaactatcttccaaaaataagatccatctttttgcaattaaaaaactctgaggttgaaaagcttttgaaatatataatcgctcaggaaaaggaacatcccaaaaacatattcaaagatccagagagtatagaaaggaatataaaagcaaggtttgacaatataaaactctggtttgttgctccccatggtcaggcagaaaaactttctgatcagatacagggacttataaaaaaggtgtctgaccttgcagcaaggctttcagagatgtcgagtgtcaaagtaaacaggcaggaagagtacaaacacttagcaaaaatcttttcaaaccttgatttggcaacctgtcacaagctttctgcagttgtgtttggtgtgcttttgccgcgatacattgcaaccgaggaaaagaggcagagcgaacttgcaagtcttagcattcttgacgtgccgccaatgaagagtttgcttcactcaagaggaaggcttgtgagagaaaagagcaaagttttgccggcatctgaattttctgaagacaagaaaaaaagatttgaggagtataaaaagaagattgaagaggaagaaaaacttgttgctgagcttataaaagatggaaaaattgagtttgaaaatcttcctgttttgactccacaggtgaggaagaaacttttggtgtggctttcaagaggactttcaacaggttttggtaatacagactcaggtaaaagatttaaagtggtaaaaccaaaggatgggagatattgtgttttaaaatctatagatggtgagcttgagatgccggcgtatgtgattgagtttgttgagtaa

SEQ ID NO: 49850 - DNA, 1233 bp, Caldicellulosiruptor bescii DSM 6725
atgaaaagtgcacttttaaaattacttgaaaacttttggattttaaaagaaaaagaggttgaaaactattatgagtgtaaaaacattggcaaagagttaaaagactttatagttaccaaactgggacttaaattctatgctacatctgacatagtcagacttgaaaagataccacttgttccaagagagtacatgggtattctggagtttgaagagccgaaagactatgtatttttctgtcttgttcttgcatttttagaggacaagggcaaagacactcagtttttgcttgaggatatcacgcagtatatacggtcgaattatccttacgaagaaattgattggactatgtattctgatagaaggtcgcttataagagttcttaagttttgcgaaaagatggggctaattaaaatagatgatggcaatcaagagctgtttgtggaaagagctgatgtagatgtactttatgaatcaacagggctatcaaagtactttatgaggacatttcctaaaagccttgttgagtattcgtcagtcgaagagattttaaatagcgagtttgagtttacaaatggactttctgaccaaatcactgatataaagagaataaaagcctacagagggcttttgatagatggaattgtagactttgaaaatgaagcaccactttattacattaaaaagcagaagacaacaatttcacaggaccttgaaaagtttgtaccagagcttgagcttcacctgttcaagtcgtttgcatatattagcgttgagggagattacagatatacttaccctgacaattcaaatatatgcgatgtgttacttttgtgttcaaaagagatttttgaaagggtagaaaagggtgagctgaggctttcacccccacatgagatgcttgaaatttcgcttgaccactttaagctaattgtggagaatgtcaagaaaaaatacggaaatttttggaacaaggagtggagggaaaagtcaacagagaaaatatttgaagagcttttagagtttttacagcttcataattttgcaaagacaaatgaggatgggtatcttgttatatcacctatttttttgagagttgttggtgaatatcaggactatgaaataaataatcagctttctgttaaaaatgagagtacagtaagatcgtttgaggatatagaagatataaatgtagatggaggtttatattttgaagatgagcaaggaaaatag

SEQ ID NO: 49851 - DNA, 4053 bp, Caldicellulosiruptor bescii DSM 6725
atgagcaaggaaaatagatgggtgctcagcagagccggagttttcaactactggtattatgacgaggagtattttgactttttcgatggcaggatgcttattcgtggtgctaatgcttcaggcaagtctgtgacaatgcaaagttttattaccctgcttttggatggcaattaccacccatccaggcttgactcttttggctcaaatgcgcgaaagcttgaagactatgttcttggtgatcaggggcctggtcagaaaaatgaggcaatagcctatctttttcttgagtttaaaaaacaaaatgtatttgtatccataggtatgggaataagagcgaaaagaggtacaaatcctgatacttggtattttgttttgacggatggaagaagatttggtatagatatattcttttatgaaaagataggagaccagaagatcccacttaccaaaaaaaagtttgaaaatcttttaggagacggtgggaaggtattttcagctcgaaaagattatatggaagaagtcaataaaatattatttggttttgaagacacagaagagtttgaaaatttaattgaactgatagttcgaataagagcgccaaagctttcaaaagatataaaacctgattctgtctataagatgcttcaggagtctttgccagctctttctgagtcagacttgcgtagcctttctgactcaatagaaaatatggacagaattcaaacagagcttaaaaatcttgaaattataaaagatgtgttagaaaaattaaaaaaggtttacgatgagtacaataagcttttgcttgcgcaaagtatacttaacgtgcttgagaagagcaaagaatattttagtcttaaaatagatcttgaaaaagctcaagctgaggttgagaaaaataaggaagaaaagcttaagatagaagaaaaaataggagagctaaaaaaagaacaagagtctttgacattgaggcttgaaagtataaaagaaaacgatatattcaagctacaaaaggaacttttaaatataaaagaagagctcaaagaagttgatgagcagaaaaacaaaaagctttcccagataaattcagcttctcaaaagcttgagaaagaaagacaacagcttatcgctttagaagaagagcttgaaaagtacaaaagaaaaataaaagatagcgtcgaagaaggcaaattgctaatcgaatcaattggttttcagagatttttagaaacgcttgatatgtatctttttggacagggaagtcttgacattttaaaagacgaaatttcatctttcttatatcaggtggagatagtacttaaaaattatgaaaaattagctgaaatcaagaaagatttagacggcttttataaaaatcttgatatgaacaaggcagaagcacaaaagattgaagaagatatacaaaatcttttgcttcagcttgaggaaataaaaaatagtctgaagaatgctatttctatttactttgaacaaaatgaggttttcaaagctttagatgagcagagaacagcaattttccaggcaataaatagttgtgagaaaaaaggtgattatgtcagaatatattcaatcttagatgatatttataagtttcattatcttgctatctcagatacaataagaaggcttgagtttgaaatagaaacgttaaataacaaaattaaagctaaaaaagaggaaattgaaaaaataaaaagccagaaagatgatgaaattatactttcaccccagcaaaagaaagtaagagacaggcttttacaaaaaggggtgccatttatacctttttatatggctgtggattttaaagacggtgtggacgaaaaaaagaaagctatcattgaagatgccttgaactgccttggtattttgaacgctttgattgttccagaaaagtacagagatgttctttcagaacttatggatgatgaaaaagaaatgattctaatttcaaaacctgcatatttttcgcatacgctgaacgagtttttagaagttgccaactttgacggacctgccgagctaaaacaggaagtggcagctgtgattgacagcatttttgctaccgaaaaagatgatggtatttatatctgtgaagatggaagatttggtaatagcatcttaaaaggcagaacaactacatgcgaaaatgcaaggtttataggaattgaaaatagaagaagatacaggcagatgctaatatcacagctggaagatgaaatagctaaactttcagttgaagtagataataaaaaacaggagagaaacgcacaaaaggtattgcttgaaaagttacaaaacgagagagacagtttcccttcattaattgaccttgacactgcatttgagatgattgaagaaagagaagatagaaaatcagacatacaaaaagagatagagtttttggaaaaaaagataagagagcttcttactaaagaaaataatttaaaacatgagatttctgtcattgcaacaaagctttctgttacagcagcaaaagataattttttgaagctaagtaaagatgctcaaaaacttaaaagtttgcttgttgatttagaaaaccaagtggaaaaagaaaaattggtttcaaggacattagacttacgaaaagatcaaatcctacaaatagaagaaaatattcaaaatttaagcttcgatttgcaggttttaaaaacaagatgggaaggcttagaactaaaaaaaatagaaattgaaaaaagactctcaagtgatgatgctcaaaagctttttgaagaacagcaaaaggcaattgaacggcttgatagtattcctaaggagatagaaaacttcaacaaagatcttcaggataaagttgcaaaaatttcgcgatatgaagcacaaattgagacaaaagcttcgcagctcgaaaaagctaaaatggagtacacaaatagccttgaagtgttgaagatagaactttcttttggttttgtttgcagggaagaaaatcttgaggatgagagcagacttttagagtttgcaaaggaaaaaagtagctttgccaatgaatataaatctaaggatttaaatcaggttttacaaaagcttattgctacacactatgaagcacaagttcagcttgcagagtttggtgcaaatctttttcttaaagaagatgaaaaaaccagatatttaagatatttgtggactgctaagaaggatggaagattgctttcgctttatgaatttttagagagaatagattctgaaataatcgagaagaaaaatcttatcacccagcaagaaagagaactttttgaagaggttttggcaaaagacataggctttaaaatctcgcgcaagataatgcttgcccaggactgggtaaagagaatgaatgagctgatggacggcatggacctttcaggaaatcttaaattcagactttcgtgggaacagaagaaacaggaacttgaagatgaactttcaacatcagaacttgtaaaacttattagtaaagacccggcaacaacttcagataccgacagacaaaagattgtcaagcattttagggcacgtattgaaagagcaaaaaggcttcatgactcacctgaaagttttcgaagtctttatgagataatgaaagaaattttggattacaggcagtggtttgaatttagactctactttcaaagaggtgaagataacagaagagagcttacaaacaatgcatacgacaagttttctggcggtgaaaaagcgctttctatttatgtacctcttttggcagcgctgtgcgcaaaataccagagtgctgcaagctatgcaccacgtataattgcgcttgacgaggcgtttgccggcgttgatgagaacaacattgaaaagatgtttgaactaatagaaaatttagagtttgactatatcatgaactctcagattctatggggagattacaaaacagtgccaggactttgcatttatgaacttatttcagaccgaagcaaaggctgtgttctcaaagtaaaatacatctggaacgggtacaagaaggtgttggtggagatatga

SEQ ID NO: 49852 - DNA, 1269 bp, Caldicellulosiruptor bescii DSM 6725
atgacaaaagataagattttcgatgagtgtgtagagtacttttcaaagccaggatttaagcgtgcgctgaagcttattcatagtaagtataggtctttggggcgattttctggcaagattattttagaaaatccatctgaagaggaaaaagagactttatcgcggtatcttagaagggttttgagaggcgagaaggttgtcattgatgtaaaagactttaccgtgacaaagtttcaggacactaagttctcagggcttgattttaaaagcattctgtcagcagttttgagaaaagaggttatcaccaaaaaagaagaaaaggagttgaaaagtggaaggatattaaagttttttaaaagtttgtcagcacattttgagggtgatgaaaatgctgcagaggttttaaatgcttttaaagagaatttcaaatcatttgagagcttttataaaaagtattcacaagaagagtttttagagataatgaaaaaggtcatagaagcaattttaaaaaaaccacaaagccctgagactttggctatttttgcaacaagggttacaggcaaccctcacttttttgatgatgagcaagatgcaggaaagatatttttaaagcttttgagcattataaacggtagagagtttccccaaaatgcagaggaaaaatcagaactactttttggtaacaacatcttaattgatgaactttcaaactggtgccttttgtataacattggcgggtatattgaagatggaaaagaagatgaagggctcaagtactttagcaatcaaaaaaagcctattatcttaccactttatactataaaggattataaaggattttttgcatactcaaataagcttgtggttgttgaaaaccctgctgtattttctgcgattgtgcaaagagtcccagctatttctgctgtgtgcacaaatgggcacctgaggctctcaagcaagataatcattggaagcattgcaaagacaaatatatctttgctgtactcaggcgactttgacccagaagggcttttgattgcagacagagtaattcaaaactttggtgcaatgccactttgtatggatgaagtccactattttttggcactgtctgaaaataagatagatgaaaggcgcttagagatgttaaagaatgtaaaaagtgctcagctacaaagcgtctgcaagaaaatgaaggagcttcagcttgctgggtatcaggagaggattgtggataggattgttgagaagctaaaagttaatatttaa

SEQ ID NO: 49853 - DNA, 1479 bp, Actinosynnema mirum DSM 43827
gtggaaccagcccgcttgaagctctacgcctacctggacgcgcgcgagcaccagcgcacctacctggcgatcatgcggctgttcacgtccacgctgctcgccgacctgtccgcgggcgaggtcgcgggcgcgctggccggggccgagcgcgaggggcgggtcgaccacggcgagtcgcgcatcgagaacgtgatcaaccggctcaagcagctggtcgagtggggcaacctggtgcagggccgccgcgaggtggtggcgtccagcatcgccgagttccagcacggcagcgtccgctaccaggtcagcaagctcgcggtgcgcgtgcagcgggacgtggacgagctgctgcgggtgcccgagggcgcccgcgaggtgtcccgcgagctgctgcccgccgtcgagcgcggcctcggccagctcgggcgcaccctgtccgaggcgctgctcaccggcgggcgcgggccgcgcgaggcgctcgccgagcaggtcaccaccctgttcctgcagcacgccgagctggccgcgacggtccgcgacttctacgcctacctcggccaggtcgtcacccggcaccacctggcggccgacgagatcagcggcttccgggacctgctcgtggagtacatccagcgggtcgtggaggacgtgctgcggcacaccccggcgatcgcggcggcgctggcgaacctggcgggcgcgcggcccgagctgctgcggctgctgggcgcgtcgggcctgggcgagcgggtggagcgggcgcgcgggcggtccgccgaggactggcgggagctgaccgactggttcgtcgaccggcccggccgccccagccaggtcaccgcgctgcgcgacgcgacggcccgcgccatcggctcgctgctggccagcgtgaagcgggcgacctcgggcggcgggctgctgcccggccgcagggcggagctgctgaagctggccgcctggttcgacggcggcacccgcgagcaggcgcacgagctgtacgcggcggcgttcggcctctacggggcgcggcacctgtcccccgcgcccgagcacgacggcgacgacgagcgcaccccgtgggccaccggacccgccgcggacgtgccggtgagcgtgcgcagccggtcggaccgcagcgcgcgcgggcgcacctcgcgcatcctggacgacccgatgaccgagcagtccctgctcgccgaggccaggcacgcggacgagcggcgcgccgcgtccgtcgcggagctggcggcggcggcgccccggctggccgaggccgagctgtccggcgaggcgctgggcgtgctgtgcgagctgctgaccctggccatggcgcagcgcgacagcgccgtcgaccccggttcggcggccgacccggtgcgcgggctgcgggtgaccgtggagcacgtcgcgggccgcgccgccgtgatccgctcgaaggccgggaccctgaccctgcacgactcgaccctggtgctggactga

SEQ ID NO: 49854 - DNA, 1170 bp, Actinosynnema mirum DSM 43827
atgttcgacgacctctccgagatcgactccgcgatcgtggtgcgctgcgcgcgcaccctgctgcgacggccgctgctgcgcgccgacggccccgacggcgagctgctgggcgcggtgtaccggcaccggttcgcgctgcaggacctgttcgcgggcctgctgggctaccggctggtggtggagcgccggttcgcccggctgtacaaggccgggcccggccacgacgacagccggggcgcgggcctgacgccgcgcggctacgcgtacctggcgctggtgctggccgtgctgaccggcgtcggccgccaggtgctgctgtcgcggctggtcgccgacgcgcgggcggcggcggccgaggccgggatcgccgtggtggacgacgtggtggaccggcgggcgctgacctcggcgctgcggcacctggtggcgctgggcgtgctgcacgagaccgagggctcggtggacgcgcaggccgaggcgctgatcaccgtggacaccgacctgctggggcagctgctgaccggcccggtgggcgaggcggacggcgcgcggcggctggtggagctggcggcgcggccggggcccaggggcgtggagcacgcggtgcggcgcaggctggtggagaacccggtggtgctgtacgcggacctgccgccggagcaggcggactggttgcggcgcaaccagcgcaaggagtcggcgctgctggagaccgcgttcgggctgcgcaccgagtgccgcgccgagggcgtgctcgcctccgaccccgaggactacctgacggacctgtacttccccggcacgtcgacggtggcgcggatcgcgctgctggcgctgccggagctgctggagtcgcggccggtggcgggcgggcggcacccggtggacccggcccgcgcgcgcgaggtgtgcgcggagctggtggcggactacccggcggcgtggtcgaagcagtacgtggaggacctgggcgggctgaccgccgaggtgctggagctgctgcggcgcaccgggctggccgcaccggacgccgaggggccggggtggacgctggcgccgaccgcgcaccggtgggtcccggtgccggacggcgcgccggagcgcgaggtcgaggtcgtggcggcgccggagccgcagagctggtcgttgttcgatgaggagagcgcgtga

SEQ ID NO: 49855 - DNA, 4065 bp, Actinosynnema mirum DSM 43827
gtgagcgacaggtggcggctgcaccgcggcgggatcgtcaacatctggcagtacgcggagcaggtgttcgacttctccggcgggcgggcgatcttccagggcaccaacgggtccggcaagtcccggacgctggagctgctgctgccgctgtgcctcgacggcgacctgcggcaggtcggctcgaagggcttcgacacggtcagcctgcggcggctcatgctcgacgactacgacggcgggccgaaccgcatcgggtacgcctgggtggagctgcggcgcggtgaggacgagtacctgacctgcgggttgggcgtgaaggcgtcgaagacctcgcaggcgatcaccgactcgtggcggttcatcacgccgctgcgggtgggcaggcagctccagctggtgggggccgagcgcaccccgctggggcccgcgcacctgcgggaggccatcggcgcggactgcgtgctggaggaggcggcgttccgggcccgcgtggccgaggaggtgtacggggtcccggccgcccggtacggggacctgctgcacctgcagcggacgctgcgcaaccccgacgtgggcctgaaggtcctggaggggcagctggagcagatcctgtcggacgcgctgccgccgctggaccaggcgatggtggagcagctggcgacctcgttcgacgacctggagtcgatccgggagaacatcacccggctgtcgacggcggactcggcgctggggacgttcctcaagacgtactcggactacgcgctgggcgggctgcggtcctcggccgagcggctgggcgcggccgaggacggggtgcgcaagctggagcgggagggcgcgcggctgacggcggcgctggagcggacccgcgcggagcgcgccgacgccgagcggtcgcagagcgacctggaggccggggagcagcgggccgaggagcggatcggggcgctcaaggagctgcccgcgttccggggcctggaggacctgcgcacccgcgagcggctggtggaggagaagcggtcgtcggcccgcgtcgcgctggaggtggcggcgaagcagcgggcgcaggaggacggcgcggtcgacggggtgctgcggctgctgcggcggctcgccgaggacctggggacggcccgcgagctggccgagccgctgcgcgggcggctgctggcggccgggctggagctggagctgccgcaggtgcccccggtggcgtcggcggaaccggtggtgcgggccgagtcggtgcgggccaagcccgacccggaggccgagccgcagccgatcgagcggcgggtgccgcccgcggcgccggtggtgccggtggaggcggcggcggaccgggtggccgaggtcgcggccgaggccgggcggcgcggggcgctggtgctggcgctgcaccagcggtcggtggagctggactcggcggcgcgcgccctggagtcgttggagggcgcggtcggcgacgcggcgcgggccgcctcggaggcggtggcgcggcgggaccgggaggccggggagctggccgggaccgggcgcgagtggttgggcgcggtggccgcgtggcgggacgccgagccgttcgccggggtcgcgctgcggctgccggaggcggtggacccggcgcgggcccgcgcgctggcggcgaaggcccgtgacggggcgaggccgctggtgtcggcggcgcgcgaggccgagcgcggcgcggcggaccgggtggccgggctgcgggcgtcgatcgacgagcgggacgtggagctgaccgggctgcggggtggctcggagcgcgcgcccgacgccgcgcggttcaccggcggtgggcgggactcgggcgccggggcgccgttctaccggctggtcgacttcagggccggggtggacgacgcggggcgggccgggctggaggcctcgctggaggcgtccgggctgctggacgcctgggtgcccggcgaccccgcgctcgcggcggtggacggggcgcgcagcgaggtgttcgcggtgccgggcgaggcggtgggcggggcgtcgctggccgacgtgctggagcccgccgtcgagccggggtcgccggtgtcggcggagctggtcggggcgctgctggcctcggtgtcgctggcctcggtgtcgctggcctcgcctgcggggacgccgggttccggcgcggtctcggcggacgtcgacggcgggtggcgggccggggtgctggtgggccggtggggcaagcccgccgccgagttcatcggcgcgggcgcgcgggagggcgcgcggcggcggcggatcgccgagctggaggagcggctggcgggcctgcgcgaggagctgggcgcggccgaggccgaggcggtggcggcgcgcgagcaggtgcgccggtgggagtcgcacctggagcggttccccgccgaccgggacctggtggccaggcacggccgggtgcaggccgcgcaggagggcgccgagcgggccgggcggcgggtcggcgagctggaggaggagctgggccgggcgcgggcgcgggacgccgcggcgcgggccgaggtcgtgcaggaggcggcggcggccgggctggtcgccgagaccgaggcgctgcggcaggcgcagcaggcggcctccgacgcgcagcgcaccgccgaccggctcgcggacgtgctgcgcaggcagtgcggcgggacgctggcggacctcgcggacgcggcgcaccggtaccgggtggccgagcaggaccgggtggcggccgagcaggacgccgaggagcggtgctcggactacgcggcccaggcggcgacgctgaccgagctggcaggcgcggtgggcggcgaggcgcggaaggtcgccgaccagctggccgcgctggaggccgggcggcgcacgacccgcgaggacctgcgggagatgcgggagcaggtcgcggaggcgcgggagaaggcggcgaagctggaggcccagctggacgcgtccgccgagcagctggccggggcgcgggagggcgcgggacgggccgaggagcagttcctggcggccgtgcgcgcgccgggcgtgctcgtggcggcgctgccggacgccgggcccgagtgggagcccgcgcgggtgcgggaggcgctggcaggcatcgaccggcggggcgcgggcgaggccacggtgatcaccaagttgcaggcgttgcagacctcgctggcgggcagccacgacatcgcggccgagcagcacgccgggctgctgacggtgacggtgaccggcgaggagggcgcgcggccggtggcgctggcggcgcggcaggtgacggcgaggttggccgagcagcgcgggttcctggacgagcggtaccagacgatcttcgcggactacctgatccgggacctggcggagtggctgcgcgggcaggtcgcggtggccgaggacctgtgcaggcggatgaacgaggtgctcgggaaggcgcggtccagccagggcgtgcacgtgaagctggcctggaagccgtcggccgcgctggacgagggcacgcgggacgcgctggcgctggtgcggctgccctacgcggagcgcgacccggagcaggacgcgacgctgcggcgggtgttcaccgagcggatcgagcaggagcgggacgcgcacagcggcagctacgccgaggtgctgtcgcgggcgctggactaccggacctggcaccagttcacggtgaccgtggccgacaccggcccggacggcgggcccagggagcggcggctgcggcagctgtcgtcgggcgagacgcgactgatctcgtacgtgacgctgttcgcggcgggggcggcgttctacgacgcggtgagcggggagttctcgccgctgcggctggtgctgctggacgaggcgttcgagcggctggacgacccgaccatcgcgcggatgctggggctgctggtggacctggacatggactgggtgatcacctggccgtcggggtggggcgtgtcggacaagatcccgaggatgcacatctacgacgtgctgcggcccaagaacgggcgcggggtggcctgcacgcagaccacctgggacggggccgggctggaccgggtcgacccgtag

SEQ ID NO: 49856 - DNA, 1497 bp, Geobacillus sp. WCH70
atggatgcttcctggctaaagccgatttcggaggtaaagtatttagcggtggataatgcgtatcgctatcgcgcgattttgcgctatttttacacacagcacgaacggatgcggcaatatttgtttccagaagaagtgtatgcgtttttaaaacagcacgatgaatttcgggattatacagaagatgatttgcagcaagatttagatcaactcgtcaaatggaaaaacttgattgcgagacaagaaacaacgcacattcgcacgattgaagagtttaaaaagaaacggtttcgctatcaatgcagcccgtacacggtcgaaatcgagcgtatgatccgcgcgctcgagcagcttggcgattcgtttggtgggtcattggaaaaaacacgatttgaccgcctgtatacttcgcttgtccgcattgaaacaattatcaaaaatggatttgcggaaaaacgagatgagatgaaccaagtatgggaagaaacatttgactatttcaaaaaaatcatccaaaattccgccgactatatcgcttatttaaacagcgaaaacatggaagagcaaatgatgtcagaggcgtttctcgtatataaggaaaagttcacgacatatttacgggattttatcgtcgcgttgcaaaaaacatcgatgcaaattgaaaaactgctcgaagacttgcaggaagaagaagtacgtcagtttgttcatcatgtcgtagactatcaaatgacgattccgcgttgggaagatctttcgctttcaagagagcagatggtggaagaacggatggaaacatggcgcagcttaaaagaatggtttttaggccggaacgggcatgacagtgaattggcgtttttgcagaaacaaacgaacgaggcgatccgccgtattacaagggttgtgcagcggcttggcgagcggcaccatcattttcgcagccgaaaaaaagattatttgtatctagcacaatggttttctaaactcgattcgctagaagatgcgcataaattgtcatcggtggtgtttggctgttttcacacaaaacatgtggtgacggacaatgatgcgaccgaagatatgtatcgcgacatttgggaagaagcaccaagcgaatggacggtgaagccgcgcgtccgccattaccaggaaaagaaaaagccgcaggcaatcgtagacaatgaaaataaaaagaaacaaacaatggtggagtttttacagcaaaaacagcgtgaagaagaagagctcaaacagttggttcaagacggcaaaattattttacgcgagttgccggttgtcgctccccatgttcgcaaaacgttattaagctggattgcgaaagcgatggcgcgcgaagatcgagtcgtgaaaacggaaattggctggaaggtgaaaattgtcaaaaaagatgattcatttattgaattgcacgcggaagacgggacgatgatcatgccgaattatgaaattcattttcttgaggatagggaggactag

SEQ ID NO: 49857 - DNA, 1167 bp, Geobacillus sp. WCH70
ttggaacgtgattttgatgaaaaggcgaaaatagcgctaaaagtgttactggaaaacttttggattacccgcgagcgtgacccggaattgtttcagctgattcgcgaacgagaaaatatcgtaaaacgttatgtgcaagaaaaattcggttatcgcctcattgttcaccgctattttgctaaacttgaaaaaataccggcggaacctgaggcatggatgggaatagaatcatttcaagaaccgcttgattacgcgttgttttgttgtttgatggcatatttagaaggaaaggaagtggaagaaaaatttttgctgtcggatgtctgtgaggaaataaaagcgatgtatccaggggaagttccgcttgattggacgaactaccagcagcggcgcgcgctgatccgtgtattaaaaaccgctgaagaacttggggtcgtgaagcgggtggacggcgaaatcgaaggattcgcccagcgggaagaccatgaagcgctatatgaagtccccgtgctttctcgttattttatgcgttcctatccgaaagatttgacgcagtacaaaacgatggaagaattgttagaagaagagtggaaaaccgctccgcaagattatcggcgccaccgcatttatcggcaactgtttttatctccagttgtttatcgacaacaaaaagacgatcctgacttttattacttgcgcaactttcgccatcgattgcgcgaagatattgaagcgcatagcgattttcgctacgaactgtataaaaacgccgctttgctcacccttccggaacgggaaaacgtatatacgctgtttcccaaccaaaaaggaacgtcagatattattcttcatttcgcttctattgtccgtgaacatcttctagattatccaccagacgaatacgggaaaatcagaatgacacaagcggattttcagcggctgcttacaatatgcaaggagcgctatggagaaggatggggaaaaacgtatcgcgacatgactccagcgcagctaacatcggtgctgttggaggaattaaaacagtggaaaatggcggatgtggaaaaagaaacgggaatgatcatgctatatccactgctcggacggatagttggccattatcctcccgattttatgaagaaaggaatggatgatgatgacgaataa

SEQ ID NO: 49858 - DNA, 4131 bp, Geobacillus sp. WCH70
atgacgaataaatgggtgctccatcgcgcgggactattaaatttttggtattacgatgaagaatatttccattttgcggacggcaggctgtttctccgcggcagcaacggttcgggaaaatcagtgacgatgcaaagcttgattcctgttttgcttgacggaaagaaaacccctgaccgccttgatccgtttgggtcacgggcgcgccgcatggaagattatttgcttggggaaaaggaattagttgatcgtgatgaacggacaggctatttatttttggaatataaacgaaaacatagcgaccattatatcacaaccggaatcggtttaagggcgaaacgccagaaaggcatggatttttggggatttgtcatttttgacaaccgccgcatcggtaaagatattacattgtacaaaaaggaaaaaacgggcgaaaaaatcccgctgacaaaacgagaattaatcacggtgcttggcgacggcggaacggttgtcgatacgcaaaaagagtatatggagcttgtcaataaatatattttccgtttcgaatcgctcgaagcgtttcaagaattgatcgagcttttgattcagcttcgcagtccgaaattatcgaaagatttcaagccgacagtcatttacgaaattctcgaaagctcgctgccggcgttgacggatgacgaattgcgacatttatcggaaacgattgaaaacatggaccaagcaaagcagcagctggaacagttggaacgggatgaagcgtcgctgcgtcgactctgccagcactatcagcaatataacgaatatatgatatgggaaaaagcgaacgaatggctcaaagcagcaaaacaagaggaaaaattaacggaagagcgcgagcagtgcctccgcgatcaagagcggtatgcagcacgaaaagaagagctggcaacggaaattcagggcttacaaaatgagcaagcggtgcttcgcaaacgggagctggatttagcgagccacgaagtgtttcgggccgaagaaaaatatcgggaaacgaaacagcgccttgcgaacgtgcaagatcaaataatgaaaaaagaacgttatcttgatgataaacaacaacaagagcgcaagttgaaacaagagattgccaaaagcgaagacgttcttcaccagtctgcgcaaacgatcgacgaacaactggaagaattgcgctatgccgcgcttgaaagcgcctttgcctcacatgaactaaatgaagaagactttcagcggcatcgaaacgagccgtttgactttacgctttggcgaaaagaagcggaagcgtatgaaaaacggttagaggaaatattgtcgctttggacgcgccatgatgacctcaagcgccgatacgaagacgcataccacgagcttggagaacagcagcgtttactagacaatctccataatgacgcgaaaaaatggcacgagctattggaaatggaaaaatcgcgcctgcaggaagcggtgtttgcctggaaagaagcacatcctgatattccgatcgatgaagaaacaatccaatcgtttttgcgttatttaaacgagctatatgaacgctatcattttgaagatgtaaagaaaccgtttgccgaccgatattatgaggcgttggaccagaaaaaagcggaaaaagtgagatgggaacacgaaatcgagctagtaaaacgagaaatcgcagaaacagaagaagagctgcgccgctggaaagaacaaaaagaccctgaattagagcatgacgaacaaaccgcacaagcccgcgcggctttacaagcacgaggggttgcgtacgtgccattttacgcaagcgtcgagttttacgaccacgtgccagaatcgttgcgcgaacgaatcgagtcatcgttataccacgcagggctattggacgcgttagtgaccgaaacagacgtttccatcgtgcatgaccgtattctcaagccaaatcctgtggaaatggcacatacgcttgccgaatatttgcgtcccgatgtggatgaagacctcggtgtttccgccgagcgcattgaatctgttcttcgcagcattcttatttctgatgaggcgcaagaaggacgatttgcgatggacgagtcgggccattattcgtttgggctccttcaaggccatgcgccgaaacgagaacaagcgatctttatcggccgcaacgcccgcaagcggtggcgcctttcccaaatcgcgcaaatcgaggaaaagcttcaacaactagatgaacttcttcagcaaaaaaaggaacagcttgcgcgtgtggaagcaacaattgcctccatccatgaagcgtttcaaacgttcccgtctgaccgcgatgttcgcgcggcctttgacgaatgggaccgtacaaaacgcgccatcataagcaaacaacaagaagtggaacgaaaaagcgaaaaattgaatagcatcgcccgcgactggcaacaagtaaaacaaacgcttcgcgaaaaagcggaaggactcgatcttgaatttacaaaagagcggtacgaagaggcgcggcgatggatgaaattgtatacgggccatttaacggaattggtgctggaacaccgttcgtttctccatcaattgcaagtcagccgctatcatcaagaccagcttgaaaccgtccaagcggaaatcgatgaagcaaaaggcgaaatcaatatattagccagcgagcaacaacgcctccttttagaaatacaacatatggaacaaatgttaaaacagatgggagcggatgacattcgcgcggaaatctcccgcgttcgcgatcgccttgaatgggtaaacaaggcgttgccggaaaagataaacgaacaagctcacatcgaacaaacgatcaaatccactcaccgtcaactagaagatttagagcgaaaacttcaatttgctagcacgcttgcagcagtatggaagcgatcgtttatcgcagaagtggaacgcggtcttgtcgaagtagcggagaatgtagatccgcatgaacaagcaaaagatgttgttcgccgctacggatcaatcggaaaagaacaaacgcgttcatccgtgattgctaaattgaatagcgtattcttccaagaaagcgcgaatttagtggaataccgcctatctcaagaacctgtcgcattagaagaggaaaatccgtttgctggtatcgatttggacgaagaaatggagttaaaggtgagcgattggaaagaaaaacgggatcggatcattcttttgcttgattacaaaggacagcgcgtcactccgttctatttattaaaggaaatggaaaaagacattctccttcagcgggaatacattaatgaacaagaccgcgagttgtacgaagatattattttaaaaacggtcggacgtattttgcgcagccgcattcagcgtgccgaacgctgggtgaaagacatgaacgcgctcatgcaacagcgagatgcttcttccggattattgttgtccattcaatggaaaccgaaaacagcggaaacagaagaagaaatggatacgaaagagcttgttgaattgttgcggatgaattcgcgattgttaaaagaagaagatttgcagcgggtcacgatgcacttccggtccaaaattaaccgcgcccgtgaaatgttagaagaaaaagggcaaggcaacacgcttcatcaagtcattaaagaagtgctcgattatcggaaatggtttacgtttacgctctattatcaaaaaacaaatgagccaaaacgggaattaacgaaccagcgattttatcagtttagcggcggggaaaaagcaatggcgatgtacattccgctttttgcggccgcgtatgcccgctatcaagaagcaagtgaggaggcgccatacatcatttcccttgatgaagcgttcgccggtgtggatgaaaataatattcgcgatatgttcgatcttgttgaatcgctcggctttaattacatcatgaactcgcaggcgctgtggggagattacgacaccgtgccgtctctttcgatttgcgagcttgtgcgcccgaaaaacgcttcgcacgtcaccgtgatccgctattattggaacggaacgatgaagcggcttgtgacagattgggacgaacaagaaatggtggtgaaacaatga

SEQ ID NO: 49859 - DNA, 1278 bp, Geobacillus sp. WCH70
atgaaatcattgccggaaccagcggcggaagcggcgcaattttttcgcggtgaagctggatttcgccgccttttttgcgaaatgaaaaagaagtacgaatcgctcggccgcattggcggcaccatttcccttacgaattttacgaaagaagaaaaagaagcgattgcggcgttttttgggaaggaaatggcgcgcgtttcgctgcaggcgtttgctaaacaactggataagacaagatttgcgggtatttcgctggaagagctgttagtccattattttggggaaccactcgtcgcaaacaaagaaaggcgtgaagcggaacagcaggaaaaagcggcgtttttccagcggctgatcgccgcttacccgagtggggcggaatggcttacggcagcgctggagcatccgaacgaataccgtcttcttcaccaagcgtacgcccagcagcgcgatgagctgtatgcttccatttgcgcagtttgcgaagcgcttcgccagcttccgaagcaaggaacgtacgaacgcctgccgctattcgcgcaaaaagtaaccggagacccgcacgcgtttgatttgcacacgtttcaaggaaaactgctgctatccgcattggaattttactctcgaaaaaaatatcagctttcgtctgtagaagaagtcaatgaactattgcaatcgttcggcatattgcgtgaggacatcctcaatttcgtgacgtgcgcgggaattttggcagaaacgaaagagggcattcatcccgtattttccgccgcttgtgaaacgaatatggcgctgaatgtgccgctgagggagatagtggcactaacccgcgcgtatccagcgaaaggaaatgccgtctttgtcgtagaaaacgccggcgttttttctgaactgctagacgaagcgatgccgcttgtcagcacaaacggccaactcaatttggcgacgctattgcttcttgacttgcttgtggagtcgggcgcacgtctttattattcgggcgactttgatccagaaggtctgaaaatggccgatcggcttgccgggcgatacggcgagaatctttccctttggcatttcacgtgtgaggactactttgcctcgatgccgagtgtgtcgctttctgaggagcggctggctaagctccaatcgatttcctctcccaaactgcagccagtaaagcaggagatcgagcggtgcaagaaagcggggtatcaggaggcgattttgccggtgcttcggaaagatatagagaaggaaaaggcggagttaagttaa

SEQ ID NO: 49860 - DNA, 1503 bp, Paenibacillus sp. JDR-2
atgagcttcgtattaaattccgtaaaagaggctacgtatctttctgtcactaaagcagaaagataccgtcccatctgctacgttttctatcagaaataccgccaggaatacaactcttatatgttcctagatgatgtgtatcgagagttaataacgtcagagcagtttggccctcactttaaggattactccgagaaagaattggaagaagacctaaaggcgcttgtgagatggaacaacttgattgtccatcaagacgaatcccatgcacagcgcatcgaggatttttataaacgtaagaattattatgaggtcacacaatatacaatttcactcgaacgtacgctagaggagatgcagcataatctgcaggcgattcgcggcggatcgttcgagcgcgtattgacggaccatattttagaggacctgaccaaacttcgcaagtggagtccttctaacaacgggacgctaggcgatatccgtaacatctggcgcgacctcatgtctcggtttgaatcgcttcgcaacggcaccgccgattttttgtcgcatgtaaacagcgaaccatatgaacgcctagtccgcacggagtcttttttgccatacaaagaaaaatttgtacgtttgttaagcgacttcgtggtcggcattatggagaagaaagatttgatagaggagcgcctcgggtttatcgatgaaagtgagatcgagcacattatttccgtgattgtttcttacgaagcggagcagcagattgatgaaacgtttgaggcggagcttgcctctgatcgaagaagggcagaatggctcggttttagagggtggtttgtggaaatcaacggtcgaaaagctagttcacgttttctcatcgaacaaactcgcggcaccatccaaaaaattgtgcgaattgcagatcaaatcagcgataaattcaactactttaaaagccgcaaaaatgactatttagaattggctcgcatttttgcgaacacttcggacttgcgggattgccatgttattgctggcgcgatgtttggcgcttccaccgcaaagcactttttagtccctcgtaaatctgaggatgacactacaaagcatgtgtgggaatgcgatcctttcgaagtgtcccttaacaaaaagacgcctgggaaccgcagcggacgcaccaaagtacctgtatatgaagaccccttggcgcagatgcttctggttcaagagcatgtggagaaaacgcggatgatacgggagcaatttaacagcctaattaaggaaggtaaaattacgctggatgaaatcggtgtcgtgtatcccgaagtgagggaccttctacttgaattgttgggacaagctatgattacaaaaagcttaaaaagccgaacggaagatgggcgccgattttatgttaagttacgttccagcaagcgtattcggctgcgttccaccgatggtacgttgacaatgaatgattacgaattcgtgtttatggaggaccagaatggataa

SEQ ID NO: 49861 - DNA, 1143 bp, Paenibacillus sp. JDR-2
atggataaagatcggttggtgcttcaggaatgtattgaagccctgtttcattaccattggattcatcgggacacgcaggcggacctatattttcagattctcgctcgaaaagcggatattgccgaaatcgtgcgcgaatacttcggatatcgtttacttctgcgtaatgagtttatcaaactagagaaaattcccgtcacgtcaaagtcgtttatgggcgttggcgactttacaacatcactccactatatgtttttctgctgcttccttgctttcttggaggataacggggaagaccagcaatttacgctgcaaaacgcttgtgatgccatccgtatgtattatccagaagaagccgttcctttcgcgtgggaagagcgttcgcaccgtagggcttttgcagacgttctgcatcattgtgtaaaattaaggctcgtctatgtcgtggaccgtgaaatagacgggttccgagacaatgaacggcatgatgttttgttgcagactacgccttattttcgtcatttcgcactgctttacttctttgatctcagcaaaattcaaaatcttaggcagttggaagaacatattagcaaagagatcgtccatatcacaaccacgaggcagcggcttctacgcagattatttttagaatcagttgtatatgatgatgaattgtctgcagaggaagccaagcttttggaagattgggaagagtttgagaaagtgaatgcgatgatatcagaactgtttgaatattggcaccttgaacgataccatcgtacgacgatgctcacccatgcagaaagtcgttacggagactattatccgaaagatgatcagatctccaatgcagctgtgcagtatgcaacccttatttgggataaggtaaacggtcaagaagtagctcttgatcataaaggccatgtcctatgttcgaaatatgaggcaatcgtatggtttcaagagatcaaggatctgcacggccatgggtggaccaaatcatttacagaacgatctcttaccgtcatttgggaagaggttataggatttatgtctgactttcacatggcagatgcgcttgcggacgatcaggttgtattctattccgccgctggccgtgttacaggggaatatgtatcttaa

SEQ ID NO: 49862 - DNA, 4104 bp, Paenibacillus sp. JDR-2
ttgagttcattccatttgaatcgctttggtctcattaatttctggtatcacggtgacacagtttttgaatttagtaatggacgcctttttgtacgcggcgctaacggttctggtaaatcagtatccactaccatggcagtaccgttattgctcgacggcgataagcgcccgtcgcgtcttgatccattcggctcacaggatcgacggatgatcgatctattgctcggcaataaacatgtatcaaagcgagaagaaggaacgggatatctctacatggaatatcgcaaaggaaacaactttatgaccgttggcataggcttgaatggaaaaaggcgggagagcgacaacactatgcgcacgtggtattttattctccgcaacaagcgtattgggtacgacattgagttgtatgatgaaaaaattataaacggggaacccaaaaagtttcctcttactatgggggacttggcagaccgcattggcagagacggggaagtcaccgacagtcagcagcgttatgtggagctcgtgaatcaagaaatctatggatttagaactactcaggaatttaaggaactaattggcgtgctgctccagctccgtagcccgaagctctccaatgccgtgaaagcgagcgaagtgtccaacgtcctcgctgatgcccttccagaattgtcgcaacatgaattgttgccgctttcttcgtcgctggagagcatggatagcctgcaagaaaagaaaaatcgtcttgaaaaggaacttggtttccttacgaagttggtagaagcgtacaacgtctacaatcaactttctctctatgagaaggcgaaacatctgttgtttagcgagaaacgatttaatgaatccatgaaacgcatcaaggattgtaaggctgccgaagtcgaagtctccgcggccaaaacagaactggagcggaagcaggaagaacaaattaacataaaggaaaccatgcagaagaaaatagcatcactacaagggcaccctattttcacacttgagcaagaattgggtcaggtaagacaaactctaagagattcaggggagaaactgcagggaaagactgaggccatagagaagaatgaaaaccagcaacgacaagtggaggaccggattaagcagattgagggaaataaatacaaagcagtccagagtcgtgaggaggcgctttcggaactggattcgctggcggacgagagctgcttctcaccccacggtaccttacgtaaccactttaaatcttgcctcgaaagtttttcagacgcagcttttaaaaattggcaagaaactctccaagagtaccgaagcaaggtacaaaagattgccgatcagctcctttcgctgaaatctcgcctcgaacatgaggatcaaatgcagcgaaatgtggcgaccgaagaagagcgtgccaatcagatagaagttgagattggcatcttagtgaaagagatttcggtatgttcaacatctgttgaacataccgttgccgaatgggcggaaagcgctcaacaatttcaaattcagcccgcagaacttctcgaagtgaaggaaatcttgcaagggattggagatcttttggatgacgtctctccagcagcggttactgaatggctgagttccttatacgacaaacgctttcgtgcacttcaggagcagcatgcaaatcttgcggcttccatccgtcttatcctagagcaaatcgaggagaccgaaagaaaggctgaagccttatctgcacaaaaggagatggagcccgctcttaccgcttcggaagcgggagaaatggagcgcttgcgcatacaaaacgtacgtgttgcttatttttatgaaacgtttgaatttctggaacacatacagccgattgtaaaagaagccatcgaagacgccattacccgcgcgggactccttacggctcttgtggtgcccgagagtgatcgctccatggtcgctgcctcgatggccgtggtgcaagtagggtcgtacaaaagagaaaatttactgacttatgtacgtccaacgccaaccaacggtctcacagaggaggatattaacactgtactgcaaaccatttctattgttccccatgaggaaggttatgtgttggaaaacggggaattccgcagtggtatggttggggggctggcacctcagtacgaagataaatacattggcaaatcggcgcgggaacaaatccgtctgcgcaagctgaaagaactgcaaagtcagtgtgatgaactcacgcaccagaaagatagcctggaatccgaacagctttctatagaaaagcagcagcatctccttgtcatagaacgggaagtgttcccatccctcaaggggcttgaagagtcgcttagacgccatgaaaccaagcgtcatgaatgcgccactcaactttctgtggtagaacggctccaagatgctttgcgtgtctaccgcaacgaaacacaagttttgcgtaatgctctctattatgctacgcagcagttggaattgccgcttaagcttgccagctaccaaaaggctcttagcgaccttacactttacaaagatacactcgttgatctccgcatggcgcacaacgcatggcttgcagcgaatcagtcgctgtcagatcttgcgtcggaaaaagaacgtttgacaggtgattatgactaccttacagaagagaaaacggatctcgagcgggatatcgcgaagaacaagtcttatgaaacgatgtttcttgagcgtatacaggaccttggcgatacggacgtaaaacaggagatagaggcagcgagaaatacggcgcagtcggcggatgggtggttagagtcttatcgcaaacaaataaacgaagcagagattaaaattcgcggcctaattgaaactcaaacgaaggagaaaccggtgatggaagagcggctgcgattgctaaatgggtggatgaaattgtaccaagaggagctatctctcggttttgtatgtcctccacggagcgcttctgagaccgtaatggcactggaagaatcgtgcaagggactctcgttcgatgtagtgctttcagcgttaaaagaagcagaaggctacgcccagcacgaacttgtggattacaatcttaagccgtcgaggcgtacgatttcgcttgagattcagaccgaagacatggagaatccgtcctggcagatccttgtgcagaactgctcgcggcaattcctggtcttttcgccccagcatgtggagaacacgccacttgaagtacaccgtgatgtgaatgatcaacttgagcgcatttcggggcatattcgggaagaggagcaaaaattgtttgaaaaggtgctcattgatgttgtcggtactacgatccatgagaaagtgcgggccgcgaagcgctgggaacaagacgcgaacgtgatgctgcggcgtgtaacaggcactattcagatgcggctcgaatggatccctctcacgagcaaagaagaggaccaaatttcgacgacagagctgttgtcgtacctatccaaggagtccatctatttgacgccatctcaaaaggaaaaagtgcgccagcacttcatgtccaaaattaatgaagctcgaaaaaagtacaaggacgacgcgagtttctccatgtttgaagagatgaaaaaggctctggattaccgcaaatggttccgctttgacatgttcatcacgcgcaagggcattccagaggagcgcttcacgaacaaagtgtttggggaactcagcggcggggaaaaggcgatgagtatctactcgccgctctttgcggcgatagctgccaaatattcttatgccgcgcctgatgcaccgcgtgtcatttctttggatgaggcgtttgcgggcatcgataacgaaaacattgcacagatgtttcaacttgtgcatgattttgagttcgattatattatgaactcccaggtgctgtggggttgctacgaaacggtagatgaactctccattgcccaaattctccgacctgtggattctccagtactcgctgttgcacgttactattgggatgggaaagaaaaacatcttctatcgctagagcaacttatcgaggagcgttcccgaaatgcaggataa

SEQ ID NO: 49863 - DNA, 1431 bp, Paenibacillus sp. JDR-2
atgcaggataacaggcaactggtcgagatttttcggcagagcggcggctttggccgccttttcgacttgtatcgcaagaagtttgaaagctacggagcattcggcacggtgccaatgcggcccaccgaagaagaggaaaaagctttgcgtggctttcttggcattcgctacaaggggccacgtttcccagctgccgattttgaaaaagcagctatagaagcaggatactcagtttctttacttgaattgttggagttatactacggccatcaactttccaccaaacgccaacaaaaagagtcaaagcttttcgcttgggctaatctatttattcaagttgaactagattttattactcgatttaatatctctaatactgaactagaaatatttattcaaaagacatttaacttttttcaaagattaaaggaaggagatgccaaaggctatagggttttgagaactgtttttgacagagacataaatgtttatccagaattgcttacatgtctgagcgctttatggcatttgctcatgagaaaagatgaaatgtttaaaaaatgtgggatctcaactggaaaaattagattacctatgtttgctgcttatgttactgaggattcacatgcctttgataaaaaaaatgcaaaaggaagattattatggagcgctctcaatgatataaatagccaaagtttaaatcaaagcggaaatattgataaccataagacggtcataccagagtatttgttcgaacgtcaaatttataggaatttcgacgttttggatgatgatcttagttcaatttcacatgtttttgtaccacatctcgtcaaaggaacttcccctcgcacgttaaatttacgtgaaattgaagaaatgcagcaactaccaaagtactcgtcaatatatattatcgaaaatccgtctgtaatttcttacttagttgatgaaaccattcattttcttaatctaaatgaattctcattaaaacaacttccaccggattttccagttcttctttgtacgatcggacaagcaagaaccgcttctaaagtgtttatagaaaaatgtattgaagcaaacccaagctgcatcatttactattcaggggatctagatgttccaggcattcagatgttaaacaatatgaaggagcaattctcagcagaattttacgcttggcgtatggagacttccatatatcgcaatcatgttgcgactaaaagcaaatctttatctgatgcagacttaaaaattcttcaagaattagagggaggtttagcaaaagagatgatacaaattaaagcaaaagtttatcaggaattatttggtaaagaactgaggagtgattggattaaggaagtgtcctctgagatttctaaaaatcaagttgataatgaacaaaaagaacgatggaaatattcatag

SEQ ID NO: 49864 - DNA, 1623 bp, Catenulispora acidiphila DSM 44928
atggcagacgtgaccgacgcgccggcgccacaacccttcgcttacctcggcaccccgaatgcgccgctctataccggcatcctggacgtgttcgccttggccaagcagcgtttcaccgtccacctccggcccgaggacgtcctggcggactggcccggcgcgcgggccggcgaccgcgccgacgcggttcgtccggcggctgagcatctggtccaggccctggacagactggtcgagtggggcaacctccgctccgacgccgacaccgggcgggtgaccacggtcgaggacttcaaccgagcccgcaggatttaccagctcacccggcacgggcaggcagcgctggcggcgatcgagcactacgagcagaccctcgggcagcgcggtcggctgcagacggtcgccttggccgacatcgctgagcagttgtcggcgctcgcggtccatgccgaggcggccgaggcgccggaccaggccacggtcggcctgctgttgttcgcccttaccgagcgtttcaccggcctggccgacaacgccgaggcgttcatgtcctcgttgcgccgcaccgtcgactttagcgacggcgacggagacgaggaagcgttcctcgcctacaaggaccggctgatcgagtacatcgacaagttcatcgccgacctcgccaaccggggagcccagatcgccggactcatcgagcggatcgagacggccggcatagcgcggattctggacgcagcagcttgccgggaggcggtcgacgccctccccgacgtcgaccgtgccgatgtagcagatgcccccgacgtgtacaccgcggccgtgcaggcggtgacccgcgactgggaaaaccgctggcgcggtctgcgcgagtggttcgtcagctccggatcccgtcgtccgtcgcaggcccggctgctgcgcaacgcggccgtcagcggcatcacgaacctggtgaacacggtcgccgccctgaacgagcggcgcggcggacgatcggaccgctcggcggacttgcgggcgctggcccgattcttcgcccaggccccggacgacgccgccgcgcaccgtctgtggcgcgcggcgttcgccctgtcccctgcacggcatctgaccgtggacgccgacactgaggacgcctgggaacaggccgagtacccgccggggacgccgtgggccgccgctgcgtcgctgcagatcagcccgcgcctgcgcgagaccggttcctacgagcggcgcggtgcgccgaacagggcggtcgaccgtgaggcgggacgccggcagcttgccgagcgggccgagcgcgaggccgccgagatcgccgaggcgcggcggctgctggcgaccgatggtccggtcctgttgtccgaactcgccggggacgccggactggatccccgcgccttccggctgttcctgtccgtgctgggcgacgcactggcggcacgccgtcccggcatcgctacgacgacggccaccagcggcgacggcacgatggagatccggctgaagctggtggacgcgggccagatcgtcacgataccgaccgaggacggcgtcctgtccgggccggagcacgtcgtggagatcatcgacctgaccgcgcgtccggcggcggtccgatga

SEQ ID NO: 49865 - DNA, 1284 bp, Catenulispora acidiphila DSM 44928
atgagcgccgtggacacagcggccggccaaccggacccggccgcgttcggccacaccgtgtccgacgagaccgtgaccggccagacctcgccgcaccagccgtccgatcaccatgtcgagcgtcgccgggcggcgcgcgccctgctggcctcgccgttgctgaccgcccgcgacgacgacttccgcctggtccgcaagcacgcggccgaactggcgggctggttcgccgaccaagccggctggcggctgaccgtggacgccgagacggcccggctgttcaagaagcccgccgcgctggacgatgccacccgccctgcccacgccccgaagagcaaggtcccgttcacccgccgccggtacgtcctgctctgtctggccctggctgtccttgagcggtcggagtcgcagacgaccctgggccgcctggccgaaggcgtcctcaccggcgccgccgacccggctttgaccgaagccgggatcacgttcgccatggagcgccgcgaggagcgcgccgacctggtcgccgtcgtcaggcttctgctggcctggggagtgctgacccgcgtccaaggcgacgaggacgccttcgtcgccgacagcggaaacgacgtgctctacgacctcgaccgccgcgtcaccggcggactgctggccacctcccgcagcgcctcgaccgttaccgcgacggccttcgaacaacggctgacgacactggccgccgaaccgatccccgacacggatgacctgcggctgcgctcgctgcggcacgcgatgacccgccgactcctggacgacccggtcgtctactacgccgacctcaccgagcccgaacgtgcctacctcgccggccagcgcgtcgccatcacccgccggatcaccgacctcaccggtctgatcccggagatgcgcgccgagggcatcgccatggtcgaccccgacgacgccctcaccgacgtccgtatgcccgagcaaggcaccgacggacacgtcaccctgctgatcgccaccaagctcgccaccgatggcatggccccgaccgtccccgagctgatccgcttcgtgcaggcgcaggccaggctccacgtgtcgtattggcgcaagaccgcagccgagcccgcggccgccgccgacctggccgagcaggccgtcgccaagctggaggccctcaacctggtgatccgcgttcccgacgaccacggcgacgtccggatccacccgcgttcggcactgatgcgcttcaccatgaccgatccgacgatcaagaaggccggagcccgcgcgtga

SEQ ID NO: 49866 - DNA, 4221 bp, Catenulispora acidiphila DSM 44928
gtgacgacgatgacagccgacccgaccgatctcccgtgcccgtctcgtgaccggtggcagccgctgcgcgcgggtctggtcgacgtgttctactacgacgccgaggagtttcgtttctacgatgggcgcctgctgcttcgcggcaacaacggcaccgggaagtccaaagtcctcgcgctcacgctgccattcctgctggacggggagctgaccccgtcccgcgtcgaaccggacggcgaccgcgccaagcgcatggagtggaacctgctgctgggcggcaagcacccgaacgacgagcgcctgggctacacctggctggagttcggtcgcctggacgagaacggcgtgccgcagtaccggaccgtcggatgcgggctgaaagcggtcaaggggcgtggcatcgccgaccactggttcttcgtcaccgatgagcgcgtcggccccggtctcccgctgcgcaacgagcaccgcgtctcctactcccgcaaggcgttggaggagaagatcggcgcgcatgcggtgttcaccacggccaaggcttaccgccgggcggtggacgaggcgctgttcggcctaggcgccgaacgctacgaagcgctcgtcaacctgctgatccagctgcggcagccccagttgtcgaagaagcccgatgagaagctgttgtccaaggcgctcaccgaggcgttgccgccgctggccgacggcctcgtcggcgagatcgccgaggcgttccgtggcctgcaggacgaacgggacgcgctggccgccctcatcgaggcgcacggcgcggcgaacgcgttcctcgcccactaccgccgctacgcccaggtcgccgccaagcgcatcgccgccggtgtgcggcagtcgcacagccggtacgagcagctggggcgggacctcggcgcggcgaccgccgcccgcgaacaggcccacgccgccttcaccactgccgagggcgagttgaccgagctcgacgaacgccagacgctgcttaccgcgcagaaggacgcgtacaaccgtgacccggccatgggcaccgcccgcgagatcgaccgtctggcgaaagccgccgagaccctcgccgccgtcgcgcggacccgcgccgaggaccgccatcgggccgtccgcgacgcggacagttggatgcaccgctccgagcaggcacgacaacgcgcgcagtccgatgcggcggatgtcgacggccggcaccgcgaagccgacgccgcggggcaggccgccggcatcgatcacggcacgctgcgatcggtgatcgccgccgcgtcggcccaagcggatccgcccgccccaccgatcccgtcgcgcgaagcgtccgaggactccatcgccgccgtcgaggccgccgtcgccgtggcgcgccggtcgagcgacgcgctgatccgcgaccgacagcaggcgatcagtgggctgcggaacttgcaccaggcttctgagacggcggcacgcgcgctcgccgccgcacgtgccgccgccgagcgcgccgcgcagagggccacggcctcggccgagcacgccgccgcctcgtccggcgccgtcgccgcacgcggcgaatccctggtcgcggcctgggagtcctggaactcgcactgcgtcgagaccgtcctccccgaccgcgacgcggccgggtccgagctcgagctctgggtgaggacactcgatggtccgaaccccttcgcccggcgagccgaggaggccggccgcgtccacgcggcacacctgaaccgccgggtcgcggacgtcgatggccgtcgcacacgagccgaagcggagcgctcggcgctcgccgccgagatagcccgcctggagcagggcggccacaacgcgccgccggctccccggacccgcgccgcggacgcccggtcggatcggcccggcgcgccgctctggaaggtcgtcgattaccaggaccacgtcacggccgccgaccgcgccggtttggaggcggcgctggaggcatcgggcctgctggacgcgtggctcgccccggacggtcggctcctcgatgacgtcaccggcgacgtggtcctcgcgccgaccgccgccgccccggacgtcggcctggccgccgtcctgcgccccgcgatcgacaccgccgatccgcaggccgccgcgctggaggagaccgcggtcgcggcggtgctggcggcgatcggcggcgtcccggtgggcgccgcggaacccggtcaccacacctggatcagccctgacggccggttccgggtcggcgtgctgcgcggcgcctggcgcaaggaatcagcccactacatcggcgagcgcgcccgcgagaccgcccgccgggcccgcctcgccgaactcgccgggcagaccgcccggctggcggccgagatcgcggccctcaccggcgaggcccgcaccgtcaccgcccgactcgacgccctggcggccgagctgcgggagcagccgtccgacgcggcgctgcgcgaggcaaacactctcgcggccgcgcacgccgacgccgcgcgggaggccgtcgcggcgcgcgacgaggccctggccgccgtcgaaccggcggctgaggccgccgccgaagccgtggcggcgacgctgacgttcgccgaggacacccgcctgcccgccgaggcggcggcgctggaagccgtcgccgaagccctcgccgactaccggcacagtctgtcgggcctgtggcccgcggtgaccgccgccgcgcgggccgccgccgaggccgccatggcggagcacgagcgccgtgtggccaccgcccggctggccgaagccgacgaggccgggctcgcggctcgccacgacgccgaggccgccgccgaggagcaccgcgccttggtggcgacctccggggccgcggtcgaagagctctaccggcggttggaggcggtccgcgtcgagctggccgccgcatcggctgccgccaccgccgtccgcgcccgccgcgagcaggcgctcaaggaccgggaacgggccgagggccgccgcctccagctcgagtccgacatcgccgaggtcgcaggcctgcgcgacgaggccatcacggtcctgcggcgcttcaccgccaccggcctgctcgccgccgcgctgcccgatctcgaacaccccgacccggccgaagcatgggtcccggccccggcggtcacgctggcccgcgcgatcgacgcggccctggccgccgtcgacgaagccgacggcgcgtgggagcgcgtccaggcccgggtcgtccgcgaacagcaggagctgtccggcgccctggcccgccacggccaccaggtcggcatgaccctgcaggacggcctcatggtcgtcgacgtcctgttcgccgggcgcacccaggacatcccggctctgacttccgccttggacgccgaggtcgcgcagcgcacccgcctgctgtccgccaaggagcgcgagctgctggagaaccacctcgtcggcgaggtggccggggcgctccaggaactgatcaccgaggccgaagcgaccgtccaggccatgaacgacgacctggaggcccgacccacctccaccggcatggccctgcgcctggtctggcgcaccgccaagggcgcgccggaagggctggaagcgatccggacccggctgctgcgcaaggctgtcgacgcctggagcccggccgaccgcgccgccgtgggggacttcctggcccgccgcatcaccgacgaccgcgccgccaaccctgccgacacctggcacgaccagctcacccgcgcgttcgactaccgcgcctggcacgagttcggcatccagcgccgaaccgacggcgcctggacgtcggcctcgggccccgcgtccggtggcgagcgggttttggccgcgtccgtgccgctgttcgccgccgcgtcgtcgcactactcctccgggcacccgcacgccccgcggctgatcgccctggacgaggcgttcgcgggggtcgatgacgactcgcgtgccaagtgtctcggcctgctggccgcgttcgacctcgacgtcgtcatgacgtccgagcgggaatgggcgtgctacccgactgtgccgggcatcggcatcgcccagctggcgcgcgccgagggcgtcgacgcagttctcgtcacgccgtggcgttgggacggccgcgaccgcttgcgcctgacgcgacccgagccgtacctgccgccgcagcgcgcccgcgacacacctgtcccgacggactttgagccatcgctgttcgacgactga

SEQ ID NO: 49867 - DNA, 1311 bp, Catenulispora acidiphila DSM 44928
atggccggccccgatgtcccgaccgatcgcgtcgatcacaaccgcctgcgccgcctgctcggcgcgccggaactcgcctggctggtcgaccgggtcgtcgaacggctcgcggccgggaccaccgcagccgacggcgccgtcgccctgaccgacccaagtccggagcagcgccgggccgtcgagcgcctgctcggccgcccgcccggtcgcggcaggaccctgacgattcggctcggcgacgtagaggccgtgctgcgtgatgccgagatcagcccggatggtctggccgcagccgtcaccgccctgcgcggtccgatcccggtccgccacgagaccgcagccgccgaacggacggcctgggactccgctcacgaacctctggagcacctggtcgccgtccgtcccgatttggcgccatggcttcgtcatgtccgggcgaccggcctgctcaagcggcacgctccgacgtccgggacggccctcgacctcgccggtcaggccgcacgggtcctggccgcgctgccgcatccgggcacggtccgcccaatcctcgccgccggcgccgtcggcgacgcgcacgcattggatgacggccgcccgctgaccgccctcgtcctgtccgccatccgctccctgtcgggtctggccgccgccgacaccacacacgccgagggccgccgcgcggcctgggcgggcgtcggcgtcgccaccgaccacctgtcgtcccgcgtcctggtcctcaacgtcccgccaccgcccggcgacgacagcaccctgtcacgcctgctgcgcctgatggcgaccgacggcgaaccggtgacgctgaccctccgccagctgcgggcattgcccgccggccacgcggacctggccggacagacggtgagcgtctgtgagaacccggcggtgatctcggcggcggccgatgccctcggcgcagcgtgcccgccgctgctgtgcctggagggcaccccgtcggtagctgccatcagcctgctccgctggatcctgggcaggggagcccgggtccgctaccacggcgatttcgactcgggcggaatccgcatcgccgtccaggttttcgccctcgccgcccgcgctggcgtgcccgccgttccctggcggtatgacagcgccgcatacctcgacgccgtcgcgctgggtctcggcagcccgctgtcggcaccggtgtcgcccgacgcgccgtgggaccccgacctgcgccaccatctcgagaccaatgctgtccgcgtcgaggaggagcacgttgtggacatgctcctgggtgacctcgcttgcggagactgctga

SEQ ID NO: 49868 - DNA, 1590 bp, Catenulispora acidiphila DSM 44928
atgcccgaacccgacaactcggctcagtcgtctgtccaggccgccgcgttcggacttgacgcactggcggttggcgaccggttcaagctcttcaatttcactcgccggggcgatcactatctgtggatcttgcgggccatggaccgcctgcgggaagttcgagttccccaagcccatagcgatgacgtcgcccgtgcgcttgtcgaactttcggtcgactatcccgatgctccgcgaaccgtcgataacctccgggcctgtctcgaccagctcgcagacgagaacgaggaccgagtcttacaccggctggaggatgcggcccgtaccggttcgctcgccggctatcgaaaccggcagtcggtttaccagttctccgacctggggtactcggcatacctagcggtcgaggcggtcttgggcgcccggttcgaggacgcgaacctgtcccggctcattgtctcggacatcctgcgcgacctgaacgacctcgcgaaggccaaccgcgaaggcaacggtcccgaggtcgcacgccgtctgcgttctctcgacgccgcagtagaggacatggctcggcgctcggcgcgattccacctggcgctcggcgagatcatgcgttcctcggacgccagcccggagaagttcctggagttcaagagggcgcttcttgtccatatgaacgatttcatggcagagctggaccggtacttgccgcgcctgtcagaggcagtggcggctgtggaggccaccgggatcgcgacgctgttgaaccgagccgcggaggccgacgaccggccgttcatgcgtatcgacgccctgatcgaggactggcggcggcgctggttcgcggcacgagcgtggttcgcgccggacgaggccggcagggtgccgcgtactgaacagttgcgggaggtcaccggcacggcggtgtccagcgtgctggctctcttgcgtcagatcaccgagacgcagcgtcgaggggtgaaccgcggtaccgaactacgccatctggccgcatgggtgtttgattgccccgacgatcaggcagcgcatgccctgatggcggccgcgttcaatgtgcgttcggcgcggcacctcggcggcgtccatgaggacgaggagctgatcccagatgcctcgacatggtggcaggcacccggggtcgaagtctcggtgagcttgttccgcaagggtcgtgccccaaaggccagccctccacagaaggtcgccgagcggaacgctgtccgcgcggcccttcgcgagaagcaacgggccgatcgcgccgccgagcgtgcggcgacagaacgcctggtggctgaaggtccgcacgacattgcactcgatgaggagcaggtcggcgtcctcctcaagctgctgaccagggcgctggagtcccggacggtcgtcgccggacgcctggtcgggtccagctgcgccacggatgtcgctgtgctgcggctgtcgccgtcgccaactggcagcacagtgcgtacaccaaccgggaccctgtacttggcgggcttccaggtagagatcaagccggcccgcgatggccgaatcctcggcgcgaacgttacggaaggcagtgtctga

SEQ ID NO: 49869 - DNA, 1398 bp, Catenulispora acidiphila DSM 44928
atggccgagcaccttgccgcagcaggagtcattcccagcgaccttggatccttccagcatgccgtacgcctggtgctgaccaatgatctgatcactgccgatcggccgcggtccggaagtctggacgtggtgcttcggtgggccgaccggatctccgtcgatatgcaggagctgttcgcctataccctcatcgcgaccgcgcgccaagtacggctggttcgtcgaaacgacgtcctggacccgacccagcacttgatattcaccagcaggtccggccgtcagttcgaccggcggcgcctggcctatctgtgcctggtgctcgccggcttccagcggtcgcggatcgaggtgtcactcgtggacatcgtcaaagcagtcaccccattggcgaacgctcagcccagcctcgggttcgaaccgaccatcaccgaacatcgccgagccgtggtggacgtcctggactggttgaccgatcgaggggcactgcggctgtcggacggctcactggacgcgtgggcgggcggcgaccgcgaaggcgacgccctgtacgacatcgatcacgatgtatgcggtgccttgttccggcctcccgcggcactgcagcatgtggccagcgcggcgcagctcatggaaggtgccgacgggccgaacaagagcgcccggcgggaagccgccacacggcgcgcccgcagactcttgatcgaacaacctgtcgtttacttcgaacgatgcgaatcagctgtggccgccgcgctgcggtcaccagatctggcggagaacctggcacgcttgaccggtctggtggtcgagcgtcgagccgaaggcgtcatgctcgcagacccgtcaggacgcttcacggatcggatcttcccgctgaagggcggcgcggtgaatcggaccgccggccttattctgggcgcgatcgccaacctgctcgaagaccccaatgaggcccgaaggctgccacgtctgccggtcccgaccctcaccgaggagacggccgacctagtcacccgcatcgactccgcacgtccgctgcgcgacgacgaccgaccgggccggccgcaggcatcagttacggacgcggagccgaatcagctaggcctgaacgcgcctttcctgtcgaccgcgcaggtggccaccatcgtcgacgagctgtacgtcgagttcggcgcatcgtcgtttacagcgatctggcagggcgaccccaccggactcgctcgggctgccaccagattcctcgcagacctgggactcgtccacgaaatccccggtggactcctcgtactgcccgcagccgcccgctaccgaaacattcaaggagttctccctcagcccgcccctgacggattgttccccctggacttcaccgagaacaaggacggaaccgacggatga

SEQ ID NO: 49870 - DNA, 4278 bp, Catenulispora acidiphila DSM 44928
atgaccgccgctatcgcgaccgaaaccggccagaccgggccacgactcaaacccacccgcgcagggatcatcaacctctgggactacctcgacgaagagttcgtgttcgcagacggtcggctggtgctgcgcgggcataacggctcgggcaagaccaaggccttggaggtgctgttcccgttcgttctggacgggagcctggacgccaagcgactggacccattcagcggccagaaccggaccatgaagtccaacctgctgtaccggggacaggactccgagcacggatacgtctggatggagttcgcccgaaccctcggcggtgtggccgagaccgtcacactcgtgatcggcctggtgcagcacaaggacaaagaccgcccgcagacttccttctacgtcaccgacaagcggctcggcgtcgacttcggcttactcggcgcagacagccgtccactgacccgcaaacagctcaccggccgacttggccgcgcaaaccgtctggacagcaaggcggagtaccaggacgcggtcgacgcccaactcttcggcctgggccgtgagcggtacagccaactcctcgacctgctgatctcactgcgcagaccactattggccaaggatctggatccggcgaaggtctccgcgacactcagcgccggattgagcccggtcgacgaagcactggttgatcaggcggcgcgggatttcgacaatctcaaagcagtccaggacgaatacgccaaactcgcagcagcggacaaggcggtcggggagttcgtcggggagtaccgaacctaccttcgccgctacgtgcgtcggcaagtcgacctgacacgggaccgcatggccaaggcagctgccgccgtcgacacagtcagcgaggcgaccactgcggagctggctgctcggaacgcccaggacacggcgaaactcgcgtccgaagaggccaagaaccaggtcatcgtgctggaaggccgcctcggtgccctgaaggggaagttcgaaggctacaaggacctgattcgcgaggccgagcagttggcgaaggaggcaaagcggctcgacatcgacgagcagcggatcggtcgcgcgcaactggacttggagcagttgaggcaggaggccgaggacgtccaagaggctgtcgacgaggaacttgacgcagcagagcggttcggcgcggatctggccgccgccgcacgccgagcattccctgacactggcgacagcatcgacgacggcgatgacttggaactgtcagcaaaggcgctgatcgcagcgagaaccaccgaagtccgggaagtacgtaccctcatcgctggcgtcgagtcggccggaagagtgcgggagaccgcccaggagaacgccgagaccgcgcagacagaggttgagcaagcagaggcgcaactcgcggcagctggcgtggccgccgaggcggaacgagacgctgtgcgggccttgctgactacctgggctgcggactggtccggcgacgacgaacacgttgtcttcggcgccgacgacaacttggtgctcgctgaggcagtcgcagagctcgacatgaccgcgggcaatctgatcgccgaggcatacgaccggctcacgggagaccgtcgcacagccgccgtgacatcagtggtcattgcaagcaacgccgtcacggcaatcgagacgacgatcacgacggtcacggccgaacgcgacgcgatcgccgcccagcaagacgaagctccggccgccagcgacctccgcctcgctgagcgcgctggccgacccggagcaccgctatgggaactggtccgcttcgccgaccacgtcgacgacgacaccgcagccgggatcgaaggcgccttgtacggagccgggctcctcacggcctggatccaccccgacgccgcactgaccgcacaagcgttgctcgaccacgaggccgacggctacctcaccgaaggcacctaccccggaccgggcgtccggaccgcgctcgacgtcctcgtccccgaggatcatccggtagtcgccacagaccggatctcgtccatcctggcgggaatcgccctcgtggacgagatgaacggcagcgactcaccccgccacaccgccgtgacggcacgaggcggattcgcagtcggaacactgacagggtcacgtcccaaggccacccctgagttcatcggggctaccaaccgcacccgccgccgggaacagcgtctggcagagctcatcgagcagctgacgcagctcgacgagcaactcgccacggcgcgcagcaagctgactgcagcggaggagttcgttcgagacttcacacgagcccgtgacgcactacccaccaccaagcgactcacagacctgttctccaaggtccagaccgctgcgtcactggtcactgccgcgaagaaccagctcagcaaggccgaacaccagctgaacaaggcgatctcggcagtcgcgaccgccgagcgcgagctgaggcgagcggcggctcagcggtcgcttccgaccaccaccgaattgctcgacgccgtgtcccaggcagtcgaggatgtgagcggtgctgtgaccaaactcgtcagcgcccggacaaatgctcggactctcgaaggccagctcgctgaacgcactcagcgaaatatccgccgccagcaggaaatcgagggcgaactggaggaactccagatcgcgcgctccgagcatctgacccagaccggcgaatacgaagcacgcagggcagtcgaaggtgtcggattcgaacaggtccagtccgagctggcggacgtcggtcagcggctcacggaggcgaagtcgaggcggagagaagcggaggcatcggcgcagaccgcacatgacgagtgcatcactgcggcggcaacgcagcagcacgcccgttcgcaggccggcgaggctttttccgagctgatcgtgcggctatctgagttcgaggctgccgcgaacccggatttacgaccgttgctgggggtcgccgagaactccttgtggccggcttcgccgacggcggatgagctcagcaaggcactgctttccccacaggccggcggctcggaacctaccgcaggtctcgatcgacttcgcacagtccttcagaacgcctgcatcgctctcctggacgcctaccatttggcgctacccggcggccgagtcggcgaggccgcggtcgccactgcagcagagcgcgtctgggagtcgttccgtgatctcgaactcgccctgaaatccggcgaagacggctaccaagccgaaatcagcccccacgcaccattcgccgtccacatcgactccggcgacgggcgcgctcccgtcggctcggccgcgaagaagatcgccgaagatctggaagcacaggccgtgctcctggaagaccgcgagcgtgccgtgctcgaagacgcgctgctgaccggtatcgcccgccagatccacgaccgagtccgccgagcccgcgacctcgtccgggcgatggacgccgacaccaagtccaagccgatgtcctccggcacgaaaatcggaatcggctggttgcgttcggagaaggctgacgaacaccagatcgcggcctccgaaatcctcaaatcagacccgctcggccccgacgacaacgtgcagctgaggactctgatccgcacgatgctccgcaaccacctcgaccggcacccacgagacacctaccgggaagcgctggcggtcgtgctcgactaccggacctggtatagcttccaactcacactgttccggcccggcggaccgaaggacggagagaagctgaccagcaaaaagcactccgaaatgtccggaggcgagaagtcggccgcgatccatctgccgctgttcgccgcagccaacgcgttatacacctccagccacaggccgagcccccgcatgatcgccctggacgaggcattcagcggcatcgacggcaacttcacccccgaactgctcgaattgacggtgaagttcgacctcgacctgttcatgaccggacacgacctgtgggtcagcgacgcggccgtgccgatggcctcgcattacgacatgcaccacgacgaggcctcacacacagtctcctcgctcatgctgatctgggacggccaacagatcatcgacgccggcgccggcttcgccggcaaccacgagctcgaagccgagatcctcggcttccggcccacccggcatgtccagcccgattcaggcggggacggcctcgcgttcgacgacagcaccgacgcggacgatgacgaggacggagacgacgagtcgtga

SEQ ID NO: 49871 - DNA, 1227 bp, Catenulispora acidiphila DSM 44928
gtgacgggcctggaccgctaccacaatccggaatatcgacgcttgtggaaggcggcgcgaggctcactggagcggtccgggggagtgctcaccggctcagtgagcatcgtcagcccgagcgaggacgaacgagcagccgtgatcggactgaccaggagccatcggagcgcgaattcagcacgggtcacagtccgcatgaccgaactcgatgaggcggtgcgacgcactacgagattgagcctggccgaagcgctcaccatcttgggcgggccgcttcggaacaagcccgccgaacgcgacaccgacctcgcggcccgcgaggcagttctcgcgaagatgcgatccagcccgctacacgatcagcacgagtggttcagccaatgggcggcggaactggagtcagggggtgcactcgccaaagccatccgccaaaacggtacgcaccggattcttgacgcagtgcgcgtgctcgaacacatcgaggagcgcgctggcaccgcgacaatcgtgctgcttcccgaactggcggacaagattacgtcagacactaaggcgctgaaccgcggaacaccgaccgcgacgcttgtgctgaaggccttggccagacgagcccaactacccctacccacagacgccgagggcatcagagaactgtgggagtcggccgacgtcgtcgttgacgacctggccagtcgagtgctggtgctcaatctcccagcggccggacctggtctgggggagtggctgacgggagcggcagcatacggcactccatttcaggtgacgttgaaccagctgtctcggcacctggtccggaccgacgtcgtggaagtcttcgtgtgcgagaaccccgcagtgctccgccgagcgtctgaggcactaggcccaaagtcgaggccgctgatctgcaccgagggtcgaccgtccgccgcgttccaccgccttgcgcagattatccgcgatggcggtggacggcttcggtaccacggtgacttcgactggccaggtgtgtccatcgcacggcaagtgatcgaacgacatcaagcggcggcctggcatttcggtgcgtcggactaccgcatggctgtcgatggaggagaacggcttccgctgaagggcgcagcccaaccaacgccttgggacgaccggttgtccctggctatgcagagtctcggatgtgcggtgtacgaggagtcggtctctgacgtactgcttcgggatctctga

SEQ ID NO: 49872 - DNA, 1542 bp, Alicyclobacillus acidocaldarius subsp. acidocaldarius DSM 446
ttgaggcaagggtactcgacaggcgtccgtctctctgggggtgagctcttgcccaacatcggcccagaacacttgaaacccttatctgagttcaaatatctccacgccgagaacgtctcgcgctatcgccttatcatgcggatcttctatgagaaccacatgaagcttcgctattggctgcgccccttggacgttcacggcgccgtgttggaaaccggcctcatccaaggctacaccatcgagcagtgcgaacaggatcttcagatgttgcacgagtggggcaacctggagtgtcaacaagacaaggcgaaatcgacaagtattgaagagttcaagaagaagcgatttcggtatcagatgaccgcggtggcggtcgagatcgagcggttgttggatgcgctcgagcaggtgcagggctacggcggcgaactcgacgccgggccgctcgagatcatcgcgcgacttctgcgcgacatttaccatcgggcgggggagatgcgtcccgcggaggacttcgcgttgtggaaggaactgcaggatcggttccgaaggcttcacgaaaacgccgtggactactacgcgcagatctcgagcaccaaggcggaagccctcatgcagacggcggcctttctcacgttcaaggaggatttgcgcaggtatctccagcggttcgcgctgggattgcagcagttcggtgcgcagatcgaggggatgttgcgcgcgctttctcccgcggcggtggaaggctttctgtcgagcgtcacgcagggcgagatggaggttccgaacctggaggatcggcgcggattcgacgagcgcatggcggcacaccgagaggaatgggcgtccctcgcggcgtggttcatgggctccgatggcgacgagagcgaggtcgtgaagctggagcgggccacgaaagaggccatcggacgcgtcgtgcggcaggcgttggcgcttcaggagcaggctcgtgctggcgtcagccgtagacgggacttgtcctatctcgcgcggtggttcatgcgccttcagtccatcgaggaggcgcaccgcctgggtgccgccgtgtttggcctgtatgcgccgcgccactttcagggcgagccgccgcgatcgaccgattccgccgactgctccatgtgggaggaggcgcccatcctgcgagcgctctcgccgaagacgcgcgggccgcggcagcgcttggcggtttcccccgtcaaagatcgcgcaacccaaaaggcgaaggcgatggaggcgtggcgccaggcgcaggccagcgcgcgcgacatcgagcgccgatggctccgggaagggacgtttgccatcgccgacttcgacgagctcacggtggaggatcgcgggctcctgctgcagtgggtgagccgcgcgttgtcgaaagccgaccgtcggttccgagatccagagggttatcagattcgggtcgaggtcccacaaaacggcgaacgccaccgcatttcatttccagacggagtgatggagatgcccaactttcgcttccacatccggagggaagggcgatga

SEQ ID NO: 49873 - DNA, 1245 bp, Alicyclobacillus acidocaldarius subsp. acidocaldarius DSM 446
atgagacgggggcgcctgcgcgatgaacgcgcggaacttcaggaggcggcccgtatcctgctgtcgcgcccttggatcaccaaggagaaccatcccgacgagtaccggctcatccatcgtcaccaggacgcgttgcgaaactggtttcagcggatggcgggctgggccctcgttgtgacgagcgagatcgcaaaactcgagaagcaaccagcggtgcatcagccgtggatgcggatcgacgagtttctctacccgcgcgattacgcgctgtttgcctatgcgctctggttcctcgaaggactgcagcgcgaggaacagttcctgctgtcggatctcatcgacgccatcggcgaggaggctctgcgaaacggggatcatctcgactggacgagctatgatcaccgcctctccatggttcgggcgctcaaaaagttgcgcgatctcggcgtgctccaagccgtcgacggcgaagagatgggctgggcgcgcgacgacagtcagaacgtgctgtatgaggcgacgcgcgtgtcgaggtacgtcatgaatcggtttccgcgcgacttcgcctcctatcagaccatcgacgacctgtacgaggcggacaccttcatcggcatggacggatcggccgagttcgagtcctgggccacggcgcacaggcgccaccgcgtcattcggaggtttctcgtggagcccgtcgtgtacgacgcggatttctcggaggaggagcggcggtacgtgcagacgcagcggagcttcctcgtggatcgcatcgaacaggcgaccgggctcgtgggcaggcggttccgcgagggcctgctcttcgcgtggcccgagccgacgagcgacttcgagctattccccggcgactcgacgctgtcggacgtctgcctcttggtggccaacgcgctggtgcagcgcattcgcgccaaatacgcctccatcgcgccggctcatgacgggcggtaccacatgcctctcgcagaactggaggcggtcgtgttggagttgcgcgagctctacgccctccgctggtccaaggagcttcgcgagaaaggcgtcgccgccctcacgcgcgatgtattggccgtgatgagcgaatggcggctcgccgcgtgggagggcgcggacgtgtggctgcttcccgcgctgtcgcgttacatcggcgcgtacgacggcgatctcgatcaagaggagggatccaatggcggagcgataccggctgtcccgcgcggggctgtttaa

SEQ ID NO: 49874 - DNA, 4098 bp, Alicyclobacillus acidocaldarius subsp. acidocaldarius DSM 446
atggcggagcgataccggctgtcccgcgcggggctgtttaacttttggttgtacgacgaagagatcctcgagttcgatcacggccgcctgctcttgcgcggcccgaacggcgccgggaagtccgtcaccatgcagtcgctcctgccgctcgtgctggacggggacaagcggcccgttcgtctcgatccgtttgggtcgcgagatcgcaagatcgagttctacctgctcggcgacgatcagagcggcgtgcaggatcggatcggctacctgtggatggagtttgcgcgcggcgagggatctcaggcttcgcatgtgacggtcgggatcggcctgcgcgcaacccgcggccgctcgtcggtccagttctggggatttgccatcacggacggacggcgcgtgggcaaggacttggtgttgtacgacgaaaccctctacctgaaggaggggcagaaatatccgctggatcacgcgaagctggccgaggttttgggaccagggggccaggtggtccgctcgcaggaggagtaccaggcgctcgtcaatcgccttctgttcggctatcgggacatcggggcctacgaggatcttctgaacctcatgattcaggttcgttcacctaagttgtccaaggaattcaagccgtcgacgatgtacgagacgctgtacagcgcgcttcccccagtgggcgaggaggagctggcgtcgctcgccaacatgctcgaagatttggacgagcatgcggcgcacctggaagagacggtgcaacaccgcacccatgcggagcggcttcatcgggcgtacgaccggtacaaccgcgtggtcctgtttcagcgggcgcgcgccgcgcacgaggcgctgaaggccgaggacgaggctcaggacaacgtgcgcggggcggagaaggaattcgacgatctcgctcgcgggctcggcgagctcgaacgcgagatgtgcgaggtcaaggccgatgcagatcgcacggaggcggagctcgaggcgctcgaacattccgaggcgatgggtatccagagagagctcgatgggattcagcggcaggtggaattcctgtcgggcgaggaggctcgcgcgcgagaagcgctgcgggaggccgagcaggacatcgagcgccgggaggagggccttcgccaggtggaggaccgccgcgcggagtgcgagcggcggatggcgtcccgacgtgaagcgctggaacgcctcgcggacgcggcggaattcgcgggtcattccgtgtacgcgcggccggaagtcgacgcggtatacccggatgacgtgttcgagcgatggttcgccgatgtggatttgcatgcggagcgcctgcacaacgcgatctccctgggccaggaggagctgagggcccgcgagcgcatgtccgacgcggagcgggccatgggcgaggccgccaagcggcgggacgccgaagaggcgaatctgcgcacggcggagtcgcggctggaacaggaggtggaagcgcaagaggatgcaatattccgctggtaccaaggcctttccgccatcccagcgacggacgacatgtggcgagaggcgctgtacgcgctgcgggagtatccggccacaacctacgacgacgtgatgcgctccttccggaaggcgcacgaggaggcattgctcgaggcggtgcagcgtgagcatgagcttcgcgcggccgtggaacaccgcgccgaggagaagcgcgcgctcgaacaggagcttgcggagtggcgcgatcgcagggatcccgagccgcctcgaagcgaggcgcgggccgcttcgcgcaggcgccggcagagcgcgggcggcgtgggcgcgccgctctacatggcgtgcgagttccgagacggcgtcgatccgcggacgcaggcggcgctggagcgcgcgctcgaggcggccgggctcatcgacgcgtggatctcgccgtcgccgcccgccgtggagccgggggaggaggaggtgtggattgcaccgcggccagcgctttggggctacacgctcgccgattttctgcggccgacggttcccgaggggtcggggcttatggccgtcgacatcgaggatgcgctgcgcaccatcgtgatcggcgacgaggccgaggccgggcaggccgccgttgcgccggatgggcggtatcgcatcgggccgctcgctggccacacggacgagaagccacaagccgagtggatcggttacgaggccaggcggcgcacgaaactcgcgcgcatcgaggcgctcgaggcggccatcgcggccgcggaggccgagatcgcgcgcctcgcggcagacatcgaggagacgaggcgccatcgcacacagctcgacgaggagatgcgggcgtttccgccggaagatccgctgcgcagggcaagggacgacgtcgatcgcgccaggctccggctggaggaggccgttctgtccctcaggcggcagaccgaggcgtaccaggaggcgcgagccaactggcgcgatcgcgaggaggcctggttggctgagaggtcggcctgggcacggctctcgcgtctcgaggatttcgtcgaggcacgcgagcagctccaaaggtatcgggacggtctgcacgacctgcgccgcttccacgcggaatacacccacctcagccgcgaggcggcacagctcgcggaggacatcgagagggaccgggcgcgggcggacgcggagcggcggagaagcgtggaacttcggcaggagcgggatcgcctgcgcatgagcgcggaggcgctgcgcgagcagttgcgcgcgctcggcgtgatcgatctgtacgagcgccaaagggagcttcgggcgcgcagagaggcgcttcgcaagcgccgcgaggagctcgagaggaggcggcacgcgttcgacgagaagatcggcatggcgaaagagcggctggagcaggcgcagcgtgcgctccaagcgaaggaggcggaggccgagtgcgcccttgaggcgctcgcgcgggagtgggcgcttgggcttgtggacgggatggcggaggatttgcgccagccatcggggcggcaggcgctttcccggttggcgcacatcgtgcaccgcgagcttcggggcccgtatggctcggaacacgagggcagcgcgcggcaccgcctgatggaggagctgcaggtggtgcggaacgtgctcgtggactacgccatcgaggggacgtacgacgaggcgctggggcggacgatcgtgcgatccgtgcgggatcggaaccggcccttgacgccgttcgcgctgtggcaggagctcgttcgcatggaagaggagcagcgcctctacatcgaagagcgcgagcgggaactgtatgaggagatcttcatgcggagcgtcggtcgggccattcgcgacaagatcaaccgtgcggaggcgtgggtgcgccagatgaaccggttcatgtcgcagcgggacacgtccaacggctttgcgctatcgctcgagtggcggccgcgccctgcgcaggacgagggcgagatgagcgccgagcggctggtggcgcttttgcgcaagagcccggaactcatgttgccgcaggagatggacgacatgatccggcacttccgcacgcgcattgactacgcgcggcaggaggcagaaagcgggggatcgtttcgcgaatggatctatcagttgctcgactaccggcagtggtttgagttccgcctgtattatcgaaaggcagggatggcatcccggcgcgagctgacggattcgcagttcaacgtcctgagcggcggcgagaaggcgatggcgatgtacattccgctcttcgccgcggtggacgcgcgcctcagcgacgcccgcgaggacgcgccccggatcatctgcttggacgaggcgtttgccggcgtggacgacgacaacgtgcgcgacatgtttgcgctcatcgtgtcgctcgactacgacttcatcatgacgagccagcagctctggggctgttacgacacggtgccatctctgtcgatcgtggaggtgcatcgcccgcaggacgccgacgtggtgacgctcatccgcttccgatggaacggccaggtccgcatcctgatcgctcccgacgaggcgaaagaggcggtgcgtctcccatga

SEQ ID NO: 49875 - DNA, 1293 bp, Alicyclobacillus acidocaldarius subsp. acidocaldarius DSM 446
atgagcgatgtgaactcagcgattcgggctgcgctgatgaagccgggactcgcgcggctgtgggaagcggtgagggcgaaataccagtcgctcgggcgcgcgggcggcaccgtggtccttctcgacgcgacgcccgaggagcaggaggccatcggcgcgcttctcgggatcaacctgttcggcgagacgcgcatcaaggttccgctcgcgaggctggaggccgctcttcttcagtcgcgcttcgcgatcacgctcggcgacgctctcggcgcgctgtttggcagggtggccacccgggacgacgtgcgggctgagcgcgatcgcgccgagcgcgccttctgggcgtatcttgaagaggtggcgggcgacttccgaccttggctcgaggcgatgtgggaagggcgggcgccggggcgggggctcgtcgcggagtggcgcaggctgtttgccgagacggggcgtgtacctccgctcgaggccgccctcggcgtccttcgcgccctcgacccgccgcccgatccgcccgtccgcctgcccatcctggccgctcggcacctcggcgatccgcacgcgctcgatcgcacgagccctgcgggccgagcgctcttcgcctggctcgcctggcggtacggcggcttggatgcggacgagcctgattccgccgagatcgcggacggcgcggcccaggatgagggcacatccgaagctgcgcgcgcctggtacctgcgcgcgggcatccggatcgacgacgtgagccccgtggtccacgtcgccaactggcccgggatgagcacaagcccgatggccttcacgctcgcctcgctcgatggcgctcccgcacggcgccttccgccgcgtatcttggtcgtcgagaacccggccgtgttcgcggagctggctgaacgatcgcccgcgcctgtcgtctgttcttacggctggcccaacgcggccgtgcttcgcctcctcgatctcgtcacatccgcaggctccgacctgtggtacagcggtgatttcgacctcggcggtctgcgcatcggccggtccttgtggcggcgctacggtccgagatttgtcccgtggcgcttcgatcgtgccatgtacgactcgttcgcccaatttggccgcgtttcactttccgaggaagagcgaacccatctcacccgcctacaggaagccctttgggactcggatctggcggtcagcatgcaggcgttcggtgtgaaggtatttcaggagcagttcgtcgatacgctcgtggaagacgctatctgcatggagatggcgaggccttga

SEQ ID NO: 49876 - DNA, 1554 bp, Nakamurella multipartita DSM 44233
gtgagcgagcccgacgccatcccggcgacgttcaatcccgggttcaccgatagcgagcggttacggctgttcgcgttcacgacggcggagaagagcatttcctacctgtgggtgctgcgggccatggagcgcagccgggccaactacgtggtgctgcagcacgccgccgaagtgagcgcgtcgttggcctcgctggcccaggaccatccgagcggcgcggtcccggcgctcgccccggacgaggtcaatcccctgctcgaccagctgtacggctggcaggtcctggaccgcagctacgacggggcccgagccgccacgctggccgagtatcgcaaccggcactacgtctaccagttcaatcaggccggctatcgcgcctatcgagcggtggaggacgtgctgggcgcccggctggacgacgccaccttgtcccgcctggtgctgcccgagttgctcaccgacctgctcgacttggccgccgccaatcgggccggtgacgccgacctggtctatcgcaagctgaaccggctcgactcggtattgggcgagatggccgaacgagccgcccggttctacctgatgctctcggatctgtccaagagcacggacagcagcgccgagctgttcctgacccacaaggacgcgctcatcgcccacctgcgggagttctccaccgagctggctcgcttcgcgccgcggttgacggccgcggtgcaggcggtgcgggacagcggggtggaccggctggtcgagctggccgccgaagccgatgagcggatctttcgcagcccggccgatcgactccaggactggcggcagcgatgggacgggctggtgcactggttcgtcgccgtgcccggcgaaacgcaccgcagcgaggccgaccggttgcaagatgccacgatcagcgcggtcgccgccgtcctggccctgctccgccgggtgaccgaggcccggctgggcggggtcaaccgggagagccagctccgccacctggccgcctggttcgcggccacgaccgacctgccctccgcccatgcgctgttcgtcgccgcgttcgacctgagccggccacgccacgtcagcgtggtccaccccgatcccgagctgattccgacccgccgcacctggtgggaggccgacccggtcgagctctctcgcaccctggtggaatcgggcaagcagggcagcccagggccaccggcccggctcgaccgcaacgaggccgggcgccgacggttgcgggcaactcagctggcggaccggtcggcccgcaccggggccgcggggtctctgaccagctcaccgctggccggccggatcctctccgaacccgagactgcactgctgttctcactgctcgacgtcgccctgggtgccagggtgccagtctccgggcgggtgccggcgaccggttcgacgctcggggtccggctcacgcttgtcccgcaggagcagtcgaccgcggtcgagaccgtccgcggggtgttgcggctggatcgaatggccctgacggtcagcgcgtccggccctgatcgggtcggatcacgatga

SEQ ID NO: 49877 - DNA, 1401 bp, Nakamurella multipartita DSM 44233
atgaacagcccgctcgaccagccgagcggcgccgcggtcacattgctggaacgcgccgcctaccaacgggccgcccgggtcctgctgacctggccgttgatcacggcgagctacccgaatgcggaagcgttgccgttggttcggcgatgggcggtgccgctgcgcacggaactggccgacctgttcggctaccgcctggagctgacgtcgacgacggcccggctttcccgagtgcgggacgccttcgatgcgagccagccggcgctggccggcgcccagctcgaccgaccgttcgatcggcgccgatatgcctatctctgcctggcgctggccgtgctggggcgcgccggtacccagatcgcactatcggaacttgccgaacgggtcgcggccgaggctgaacggatcgacggcctggagctctcgttggatcggcaccctgaccggtccgggttcgtcgatgccgccgggtggctcgaagcccgtggggcgatccggctggccgacggcagtgctcgacgctgggtcgacgatccctcggtcggcgaggcgttgtacgacatcgaccgcgacgtgttgcgcgccctgtatcgtccctcgcccgtcctacagcacatcggcacggcgcgcgcattgctgcaccggccgcagggggtcagccgggacacccgccgccgagaatcggcccagcgcgtccggcgcgcgctggtcgagcaaccggtggtctactacgccgatctcgacgcggccgatcgaggcatgttgcgcgcccccggaccgaccgccgaagtagccgaaatgaccggcctttccatcgaacgacgcagcgagggcgttgccctgttggacgtctcaggcatgttctcggaccgccggttccctggttcgggcacccgagcgcagatggcgctgttactggccaaccgaatcgccgaccgcgtcgtggatccggaccaggccccgctgaccgagctgaccgccgatacggcccggagcgagcgatgggtgaactcccttgatgcggcgttgccccgggccaacctggtcgcccagctcgccgaggacggcgacgaccgggagccagacggtgtcgagagcgatgacaacgacgacgagaacgaccacgcggccccgacggcctaccccttcctggaggacggctggctgcgcgcggccgtgggcgacctgatcggcacctacggcacggcgctgtcggccgcatttgtggccgatccggatcgcctgctgcaaacggcgctggagctgctggccgagttggagatggtgatccgggtgccgggcggggtgctggcccggccgttgttggcccgctaccgcaatgccgtggtcacggtgcggcccaccgaccgcccggccgggctgttcgacctggaggactga

SEQ ID NO: 49878 - DNA, 4230 bp, Nakamurella multipartita DSM 44233
gtgacggactccggcgccaccgagcccaggacggaccgattccggcccacccggtgcggtgtggtgaatctgtgggactaccgcgacgacgagttcgtcttcgccgacggccggctggtgctgcgcggaccgaacggatcgggcaagaccaaggcccttgaggtgctgttcccgttcgttctggatggccgaatcgaaccgcgccgactcaacccgttcgccggtgacgagcgcaccatgaaggccaacctgctctaccgcggccaggaagcggcctacgggtacgtctggatggagttccgccgagcggggaatccggccggagaagtggtgaccatcggcgccggactgcgggcgcagcgtcaccacgaacgggtctcccgctggtacttcgtggtcgacggccaggtcggcgtcgacttctctttgatcggcgaggacgatcggccgctgacgaaacggcagctcgaggccgaggtggaccacctcccggccacgatggccgaacgcccgctcgctcatcggaccgcggtcgacgcccggctgttcggcctgggcatcggccggtacgagcagatgctgaccctgctgctcacgctgcgccgcccccaactggccaagaatctggaccccaaaggcctgtcccgggcgttggcggacggtctgcgcccgctggatgaacacctggtcgatgaggccgcccattccttcagcgacatggagaacgtccaacgcaccctgtccgggctggtccaggccgacgccgccgcggcggcttttctggtggggtacaccacctacctgcgcacgcacgcgcgcgccgaggcggaccggctgacggtacggctcgaggcgatcgacgccgctcgggtcagcctgaccgcggcgctcgccgcccgagaccgggccgccgccgcccgcgacgccgcgcagcagcacctctctgcgacccgggatcggctgcaagaagcaacgtcccggctggactcgctcaaggcttcatcggcctaccgcgaccgcgagcagctcaaccggctcgcggacgccacggccgacctgggccgggcggccaaccgggacgcccaggcccgcgatcaggccgaggccgactcggcgcagcgagaacggacccgagccggcacggcagccgcctacgaagacgcgctatccgcagtcagccggcgagccgcggagctgtccgaggccgcccgggacgccggcatcgactgggacaccaacgaccaggtcgatgacgagcacctggaccagcgggtggccgcgcgcatcacggcccgagaggacgacgtcgcggccgtccgggtcgcgatggccggcgtggccgaagcggctcgcgaacgcgacctggcccaacgccgccttgaccgggcccaggagcggctggaggccgtcgaatccgccctgatggcggcccaggccgccgtcgtcgccgagcgggatcgggtccagctggtgctggcggactggatcagctcgcgaggaccgctactggacagcctggcaggcgcgcccaggctggccgacacggtgcacgccgccctggtcgactcggtggacagggccggggagtccggcagcacaccgctgtccgccgtcctggatgcgcagatcgccgacgcccggcagacacgccgggatgaggtcaggcggctcggcgacaccttgaacctcctgggcgatcagctcgccgcgatccgggccgatcggacccgggtcgccgaagaacaggaccaggcacccccggccttcgcggcccgcaccgggcgaagggacggtcgggtcggcgccccgttgtgggcgttgatcgatttcgccccggggatcgatgacgacactgcggccgcggtcgaggccgcgttggaggccgccaacctgctcgatgcctggatcggtccggatgggtcggccgatcccggcgagtccgacgcggtgctgctgccgctgccggccgagcaacgccctcgcgtctccccgctcggcaccctgttggttgccgaaaccgatggcgcactagggatctcgaccatcgaggcggtgctcgcctcgatcgcggtcggcgagccctccggatcgggaccaggagcggcaccgaccatcgatcggctgggacgattccgacaggggctccagctgggcgcgcaccgcaaggcccacgccgagtacatcggtgcaacggcccggtctcgacgccgggcccagcgattggccgccctggatcggcagatcgccgacgtcctcgctcaggtcgacgccaccggggcggcgatcggagcgctgcaggcgatgctcgacgcggtcgaccaggcgcgctccgccctcccgacgaccggaccgctcaccacagccatccggcgggtcgagcgggaatcggccgcggcccgggcggtccacggcgaggtggacaacgcccgaagcgatctcgatcaggccatcgccgcccatcaccaccggcaccatgccctgctcgggctggccgccgctcgatcgatgccggccgaacccgacctggtcgacggcatcgccgccgcggtcgcccttttcggacgggcgggggcggagctgggcggggcccgaaccaccgccaccgagcgccgccgggcgcgggacaccgcggtcgaagagctgatccgggcgcgggatcggctggccgaggccgccgaacaggctgagctctcccgcaccggtcatcgggctcgagaggaggagctcagaaccctgcgggccgcggtcggcgtcgccgtcgacgaactcgacgggcagatcgatcgggccaccgccgagcaccgcgatgcccggaccgcggaacgcgtcgccgagcaggcccacggcgacgcccgggacgccgccggcgagcggcgcggcgccgcccaaggcgccgtcgattcgctggccaacgccgtcgtcgaggcccaacgggactgcctgcggctgcggccctactgccggcccgacgtcgccgacgtcctgcggttgagcaccacgcccgcctggccgaccgctcgcgagcaatggcccgatccaaccgcgttggtcgccaccgccaccgacgcgctcccggccgacgccgatcacatcatcgacgccctgcctgccgcggtgacgaccctgctccgggaggtcttggcggccaccggagacctgcgccccaacgagagttcgctcaagtccagccgtacccgggtggcggcgtcgctgaccctgctccaggaccagctcgcgagcgccggtcatgatttccggcccgactgggagccggtcgaggacgtcatcgtggtcaaggtctccgacgagcagggatacacctcgatcggtgacttcgcgcgccggatcgccgccgcccggcgagagcaggaggccctgctcagcgagtccgagcaacggatcctggaggacgccctgctgggccggctggcccaacagatacacgagaggaccaccgaggcacgcgatctggtcgccgagatgaaccgcgagatgcgcggccggcggatgtcctccggtgccaccgtcggcatctcctgggcgcaggcggacaatttggacccggcccagcgagaagtggcccgcctcctggaacgtgaggccagcgcgctgtccgtggacgaactggcgatcatgcgagcccacttcgccggacgcatcaaagatctgcgagcccagcgcgaggatcggccttatcccgacatcctggccgaggcgctggactaccgcggatggcgcaccttcgtgctcactctggtcgggccggacggtcaggaggaccggctcacccaggcccggcacagcacgctgtccggaggcgagcagtcggtgtcgctgcacctgccgttgttcgctgcggcccacgtcatgttgtcgtcggccgagccgcactgcccgcggctgctggccctggacgaggcgttcgccggcatcgacgacgccggacgcagcgagttgctcggtctgaccacccagttcgacctggacctgttcatgaccgggtacgacctgtgggcgacctacccgacggtgcccggctgcgcacaccacgatctggctcactccgcacttgaacatgccgtgagctcactgctgctggtctgggatggttcggagatcctctctgatgccgggatcaccgaagccggtgatgatctcgccgccgcgctggggtcaccaggttcccgacgtcggccttcggacgggtccggacttctcggcccggactga

SEQ ID NO: 49879 - DNA, 1260 bp, Nakamurella multipartita DSM 44233
atgagcgcaccctcgcccgaacccgtcgtggcgctgcgggagccgccctggccgcggatcctgcggctggcccgggcccgtctggagcgaactggaggcgcgctgaccgggtcgctgacggtcaaggacccgaccgaggccgagcgcaagctggtcatcggactcaccggttcgcatcggccgcccggggtcagatccgttcgcctgcccctggctgccctggacgccgccctgcatcgcgcgttcgcgctctccctgaccgatgcggtcatcgccgtcgacggccccttgcgagaccggccggccgaacgggaccaggatgcggccgcccggcaaaccgccgtccggcaggccagggaacgggccggtcggctcctcgaccagccctggttcgaaccctggttggacgacctcattgccgacggcaccgtcacccggctggtccaccggggcgacgcgggacatctggcgcaggccgtcgacgtgctcgcgctgctgcccgcaacgggcgtcgccctcccagttctggccgaacgggcgaccggccacaccaaggcgctctccggcagtccggtcgccgggctggtgctgcgcgcgctggcgcgggcccacggggtcgacgcaccgacgacggcggcccaacgacgggcccggtggcaggcggcgggcgtgatcgtcgacgacctggccagccaggtgctggtcctgggcgtccgtccgctggaacaccatgcggtggcgtcctggctgcacggggcggcggagctgggcatcccgttccggctcaccctgcaccagctgaccgccgcgccggtgacgctgaccgcgccacgggtgttcgtctgcgagaacccggccgtgctccgagcggccgtcggcgagtggagcccggcccacccaccgctgatctgcagtgaaggcgtaccgtccgccgcctgccaccgcctggtcgccggagccaccggcgtcgtccactggcgcggcgacttcgattggacggggctgcggacgaccgctgaagcaatcacccggtaccgggcccgcccgtggcggatgtcgagcgacgactaccaacggggcttggctgccaccggtttaccgaccgagccgctccgcggggcgccggccgcatcgccctgggaccccgcgctggagtcgctgatggcgaccaccggacgggcggtcatggaggagcggatggtcgacatcctgctcgccgatctcgccgaatgcggccgagaaaagccgctcagcggctga

SEQ ID NO: 49880 - DNA, 1518 bp, Thermomonospora curvata DSM 43183
atgaaggggcaggggccgcggccgtttgcgcatctggactccccgtccgctccgctctaccggcgggtgatgcgagccttcatggacaacaagcgcaggttcgttgtgcatctgcgacctgaagacgtcgttgaagcactgcgccaagacggcggccctccggtgagcgcggaggccattggtgacgcgttggcacggctggcggagtgggggaacctgcgggcagatccggacaccgggcgggtgaccacggtggaggacttctaccgggcccggtatctgtaccagctcagccgggaaggtgaggccgcggagcgggctctggaggtctacgagaaagagatcggcaggcgtggtgagctgcaggcggtggcgctggaggatctgcgggtgaggctgcggtcgctgcgtgagctggccgagcggtccgatccggatccggcgatcgtgcacagcctgctgttggagatctccggtcggctcgacagtctggcggccaacgcgagcgcgttcatggggagcctgcaacgcacgatcgacctgcaggacatcgacgaagaggcctttctggcctacaaggaccggctgatcacctacctggaacggttcgtctccgagttggtggtcaaggcgcacgacatcgccgccacgctgcgggagctcacggacgtgacggcgttgctgcggctggccgccgagcgggaggcggccgacgtggcgcccggcgccgacgatgacccatccgccgaccccgccgccgacaagctgcggcagtggcaggagcgctggacggggctgcgttcgtggttcctcggcgatcgcgcccatcccagccaggccgcgctgctgcggcagcggacccggcaggcgatcctcgatctgctggccgccgttggggtgctggtcgagcggcgcgccgggcgcagtgaccgttcggccgacttccgggagctggcccggtggttcgcccaggcgcccaccgaggaggacgcgcaccggctgtggcgggcggcgttcgggctgagcccggctcgccaccacaccgcgccaagcgacgccgagtcggtcccggccgccacccgctgggcggacgccccacccgtggagatcgcgccacggctgcgggccaccggccactaccagcggcgcggccgggcggccagggttcgggaccggtcgatcgagaaggcatacctggcccggcagctggccgccgaacgagcccaggccgaggcggcgcgccgccgcctggcgaccgggcgtccggtgctgctcagcgagctcggcgcgctggaccgggaggagttcgggctgtttttgcggttgctgggagaggcgctgtcggcgggtccacccggcgccgacggcgtcatccgcacccagaccgccgacggcgccctggagctggtgctccgcccggtcggcggcgggcgcaccgcggccatcgccaccgaggacggcaccatgtacgggcccgatcatgagttgaccatcatcaaccgggcggccgcgtcatga

SEQ ID NO: 49881 - DNA, 1197 bp, Thermomonospora curvata DSM 43183
atgaccgtgctcgccgatgtgctggactcccagcaggaggaggagcggcagcgggcggcgcgggcactgctgcggcatccactgctgaccccggcccgccccgacccggcgctcttcgcgctggtccgcaggcatgcggcgtggctggcggactggttcgcccgggaggccggctggtcgcttcagatggactcgggtgtggcgcggctccgtaagaccccggccggccacgacgacgggacccgcggcgcagccgtcaaaacccgcttcagccgccgccgctatgtgctcacctgcctggccttggcggtgctggaacgcgccgagtcccagatcacccttggccggctcgccgaacgcatcctgcgccttgccaccgacccgcagctcaccgaggcgggcgtcactttcaccctggagagcgcggaggaacggtccgacctggtcacggtcgcccggctgctgctggagatcggggtgctggcccaggtggccggggatgagcaggcattcgtcgccggcagtggcgacgcgctctatgacgtggaccggcgggtgctgtcggcgctgctgatcgcgcgccgcggcccgtccaccgtggcgggcgccggcttcgccgaccggctgcgggccatcaccgaggacgtgcaaccggacaccgaagacggccgtaaccgcgtcctccggcacgccgtcacccggcggctgctggacgacccggtggtgtactacgcggacctgaccgaggaggagcgcacctacctggaccgccagcgcggcccgctgctgcggcgcatccagcaggcgaccgggctggtccccgaggtgcgggccgagggcatcgctttggtggaccccacgggtgaggccaccgacctggccatgcccgaggagggcaccgacggccatgccacactgctggtcgccgagtacctggccgccgcgccggcggagggccgtcccgtcccgctggatgagctgcaccgacacctcgccgcgatggcgcagcgccatcggacgcactggcgcaagaccgccgccgagccgggcgccgagcgggagttgaccgcgcgggccctgcaccggctcaccgcgctcgggctggtccggatgtccggtgagcaggtgacggcgctgccggccatcgcccgctaccgctacgccgagcccaccatcgtcggaaagaaggacgcatga

SEQ ID NO: 49882 - DNA, 4101 bp, Thermomonospora curvata DSM 43183
atgacctccccgttgccggaggcggaacgtcggcgctggcagccgctgcgctgcgggctggtggacctgttctactacgactaccaggagttctggttccgcgacgggcggatgctgctgcgcggcaacaacggcaccggcaagtccaaggtgctggcgctcaccctgccgttcctgctggacggtgagctgaccgccagccgggtcgagcccgacggtgaccgcggcaagaagatggagtggaacctgctgctgggcggtcgctatgacgaacggctcgggtacacctggctggagttcggacgccgcaccgaagagggccggcgggagtacttcacgatcggctgcgggatgaaggccgtcaccggacgcggcatcgccgaccggtggttcttcaccacctctcagcggatcggccgggacctgttcctgatcggcccgaacgacaccacgctccccttcgaacgcctcgccgaggagatcggcacgcacgggcaggtcacccggaaggccgagcagtaccggcggaccatcgacgagcgcctcttccacctgggagcggaccggtatcaggcgctcatcagcctgctgctgcaactgcgccagccgcaactgtcgaagaaaccggacgaggagaagctgtcacaggccctgtcacaggcattgcctccggtggaccaggcggtgatcagcgatgtggccgccgccttccacgagctggagcagcagcgtgaggagctggcgggactgcgggacgcccggacgcacctctcccacttcctgaagccctatcgccgctacgccgcggcggcggcccgccgccaggcggggaaagtgcgccgggcggcgtccgagcacgaggaggtcggccgcggcctggccgccacccgcaccgaggcggagcaggccaggcggcgggaagaagagctgcagactcaggtggaggccgccaaacgtgagctggaggagcagaaggccgtccgcgacgagctgaccggcgacccgaggctgagggacctcaacgaggccgaacagcgagccgagcaggccgagcaggccgctgagcgcgcccgcaggcacgccgagacggccgcccgccagtacggcaaactccagcgcaggcaccagaccgccactcgggcggctgcgcagacccgcgtcgaagtgcaggaagcgggcgagctgctcaccgacgccgcccggagtgccgggctggaggccgacgacgcccaggtgcgagcagcgctcgcgctgccggacggcccaccggaggaggagatcgagccgctgctgcgccgggcccgtcgggccgcccagacggcggccgaacggcgggctcgagccgtcgctcacgtcaccgtgctggccgagcaggcagaaaagcagtacgaacggctggtggcggcccgcagcgccctgggcgagcgggagcacgaacacgacatcgccgccgatgaggtcgcccaggcccatgccgcggtctccgaggcggcgtccgcgctggtcgccgcgtggcggtcgtatgccgcccgggtcaccgagctgaccgtcccccacccggaggatgtggacctggcctggtgggccgagacgttggagggagacaacccggccgagggcgcgctgcggcaggccgccgcggcggcggagcgggagctggcccggcagcgggcggaggccggggccgcactgcaagcgagccgggaggaacttgagcgtctcaccgcggaacaggacgtactgcgccgcggggaggtgcagcggccgccggtcccgctcacccgcggggagggtgtgcgggatgaccggcccggtgcgccgctgtggcgggtcgtggacttccacgacgacctcgccgaggccgagcgcgccgggttggaggccgcgctgcaggcctctgggttgctcgacgcctggatcacccctgagggacggctgctcgaccccgccactcacgacaccgtcctggtggcggggaaacccgtggagaccggcgacctcaccggggtgttgcgcccggccatcgaccccgacgacccccaggccgccgccctgtcgtccgatgttgtggaggcggtgctgcgctcgatcggcttggccgggccgacgcacccggacgtgtgggtggccgccgacggaaggtggcggctggggccgctgcacggggcctggtccaagcccgccgccgagttcatcgggtacgccgcccgggaggaggcgcggcgacggcgcctggccgagctggacctcctcatcgatcgggagaagcagcggatcaccgcggccaccacggcgatcgaggccgtcaagcagcggcaagccaggctcaccgccgagctgcaggacaggccgtccgaccaagagctgcggaacgcccacagcgcatggcgagaggcgcgcagggctctgcggcgtgccgcagagaaggtggaaaagcagcggcaagtggttcgggccgccgagcacgcggctgcgcaggccgcgcagtcccgtgacgaagccgccgccgacgtgcgcgttcccacctcacttgaggagctgcgcaagctggccgaggcggtgaaggcctataccccggccgtggagcggctactgggcgcgctatgggtgcacgtcaagcaggtggcggagctggccaactgggcagaggatctggaggaggcccgccaagcccacacgaccgccctggaggaggtcgccagagccgaacgtgaggccgccgaggcggtcctccgccgcgacacgctgcgcagctccctgcaggtcaccgtggaggagctgaaccggcggctcacgcagacccgaacccgcatcaaggagctggaatcccacatcccaagggcagaggaagcgctgcgcgaggccgccaagcagcaggcccaagccgaggcccgcaaggcgctgctcgaagaaaacctgaaaaaggaggccgagcggcgggacgaggcggtgaccgagttccagcgtttcgcccgtaccggtctgctggaagtggctctgtccgacctgaaactgccggagcagccgtgggcgcccaccaccgccctccgcatcgcccggcagaccgagcaagcactgcaacgcgacgtcccgatcgacgacgagtcctggcggagcctccaagaccgcaccgccacaggccttcagaatctctccgccgccctcacccggcatggccaccgcgtccaggccgagcacggggactggctcgtcgtcaccgtccacttctctggacgcgaccgctcccccgttgagctgctgaacctcctggagggggcgatcgcctaccaggagcggatactgaccgcccgggaacgggagctcctggaagagcacctggtcaacgaggtggccagtcatctgcaggagctgatcggcgacgccgaggcccaggtcgagcggatgaacgccgagctggaggagcgtcccaccagcaccgggatgcggctgcgactgcgctgggagccgcgccgggacgggccgaccgggctggccgaggcccgccgccggctgctgcgccagagcggcgacctgtggtcggaggaggaccgcacggcggtcagcgaattcctgcaggcccagatcgaggcggtgcgctcccgcaacgagcagggcacctggcacgaccatctccgggaggcgctggactaccggtcctggcaccgtttcttcatcgaccgccgctccgatgaccgatggcgtccggcgtccgggccggcctccggcggggaacgggtgctggcggtgtcgctgccgctgttcgccgccgcctccgcccactaccgctccgcgcatccggacgcgccccggctggtcatgttggacgaggcgttcgcgggcgtggacgatgacgcgcgccgcaaatgcctgggcctgctggcggccttcgatctggacgtggtgatgaccagcgaacgggagtggggtttttactccaccgtccccggcatcgccacccaccacctggtccgccgtgacggcatcgacgccgtgcacgtcacgacctgggagtgggacggaagcagccgcaccatggtcgaacgcgactatgcggcccgtcccccggcctccgttccgtccgacgaacaggcgctgttttga

SEQ ID NO: 49883 - DNA, 1206 bp, Thermomonospora curvata DSM 43183
atggatgggcaaaggctgcggcgggtgctgggcgatcccgctctgaaacgcctggtcgaacggctcgtccagcggttggagcacggccgtcccctcaccgggccggtgcggctggagcgtccctccgaggccgagcggaccgccgtcgcccggctgctgggacgccgccccggccggggctcttcgctgtcggtgccgttggaggcgttggaggaggcgctgcgccgagccggactggccgacgacctgcgcagcgctgtcgaagcggtcgccggcccggtcgtcccccgcgccgaacggcaggccgccgagagcgcccgccgccgggccgcgctgacccgggcccggcggagccggcatgcaggtgagccgtggttccaggagtggctggagggcatcgccaccgacggcaccctcaccaggctgctcggccgcggcgaagacgatctgctcggccgggccgcggccgtattggacctgctgccggccgacactctgccactgccggtgctggccgaacgcgccaccggcgacaccaaggccctatcgcggggaccgctggccgggctggtgctgcgtgctctggccctgcggacggcgctccccgtcccccgtacccgcctggcggaacgcgagctgtgggagaccgccggggtggtcgtggacgacctggccagccaggtgctggtcctcggcctgaccgccactggttctcccctgggcgagtggttgaccggggccgccgcggcccgcgtccccttccgcatcaccctccaccagctcatcaccatgccgatcacggtgacgtcccccgcggtatgggtatgcgagaacccctccgtgctccgcgccacggtcaccgttcccaccgatgcggccctcatctgcaccgagggcatcccgtccgccgcttgtcaccgactgctgagccactgcgccgggcgccccgtccactggcgcggcgacttcgactggaccggtctgcgcaccaccgccatggctctcgaccgctacggcgccgtcccctggcggatgagcaccgccgattacaactccgccctggcagccggagactccgagccgctacgaggtaccccctcctccagcccgtgggacccgtccctggcgacccgcatgcacgaaaccggccgtgccgtcatggaggaacgcctcatccccgccctcctcaccgacttgacggcttga

SEQ ID NO: 49884 - DNA, 1491 bp, Geobacillus sp. Y412MC61
atggacgccacgtggctaaagcccattgtcgaaacaaaatatttatcgacggaaaacgcgcaccgctatcgggcgattttgcgctatttctacattcagcacgagcggatgcgccaatatttgtttcctgaagaagtgtacacctttttaaagcagcacgaggaatttgccgattacaccgaggaagagctgcaacaagacctcgaccagctcgtcaaatggaacaacttgatcgcccgtcaagagacggcgcatgtgcggacgattgaagagtttaagaaaaagcggtttcgctaccaatgcagtccgtacacagtggagatcgaacggatgatccgcacgcttgagcagcttggggattcatttggggggtcgctcgagaaaacgcggtttgaccgcttgtatgcctctctttctcgcatggaaacgatcatcgcttctgattttcaagagcagccggatgaaatgcatcaagtatgggaagagacgttcgattatttcaagaaaattatccaaaattccgccgactatatcgcctatttgcacggtgagaatttagaagagcggatgacatcggagtcgtttctcgtttataaagagcagtttactgcttatttgcgcgattttattgtcgccttgcaaaaaacgtcgatgcagattgaacaattgcttgaagacttgccggaagaaggggttcggcagttcatcgagcatgtcgtcgattatgagcggttgatcccgcgctttgccgatgcgctgccgccacgcgctgtacagattgaagaaaaatgggagacgtggcgcagcctgtgcgaatggtttttaggccgcgatgggcgcgagagcgagctttcgtttttgcaataccagacgaatgaggcgattcgccgtctgacgcgcgtcgtgcagcggcttggcgaacggcatcaccattttcgcagccgcaaaggcgactacttgcatttggcccgttggttttcccgccttgaatcgattgaagaggcgcactgcctgtcagcggtcgtgttcggttgcttccatacgaaacatctcgtcgccgatttcggggcgacagacaacatataccgcgacgtatgggacgagccgccagcggagtgggtgacgaagccgcgcgtccgccattacggggaaaagaaaaagccgcaggcgattgaagacaaagaacgggagaaagaagaagcgcgtcttcgctatttggaagaaaaagcgcgcgaggaagccgagctgaagcaacttgtgaccgacgggaaaatcgtgcttgccgaccttcctgaggtgaccccatacgtacggaaaacgctgctcggctggatcgccaaagcgatggggcgagagggacaagcaatgaagacagaaaacgggtgggttgtcaacgtggtgaacaaagaggggacgatttgccttcgcgcagaagatggggaactcgtgatgccgaactacgaaattcatgtgctttcgggaggtgagtga

SEQ ID NO: 49885 - DNA, 1197 bp, Geobacillus sp. Y412MC61
atggaaacgacgtttgacgacaaagcgaaagaggcgctcgccgcgctgttcgaacaattttggatcattcgcgacaaagagccggatttgtatcagctcgtccgtgagtgcgaacatgtgttgaaaaggtatgtggaggagaagtttggctatcggctcatcgttcaccgctattttgccaagctcgagaaaattcccgccgaaccggagccgtggatgggaattgagtcgtttcaagagccgcttgactatgcattgttttgttgtttgatggcgtatttggaaggaaaagcggtggaagaaaagtttttgctttctgacgtatgcgaagaaattcgcgccatgtacccgggagatctaccagtcgattggacgaactactcgcatcggcgcgccctcatccgcgtgttgaagacggcggaacaaatcggtcttgtccgccggatggatggggagattgaggcgttcgcccaacatgtggaggaagaggcgctgtacgaagtgccggtgttggcccgttattttatgcgcacgtatccgaaagatttgttgcaatatgaatcgatcgacgaattgctcgccgaggagtggaaagcctcgccgcaagattatcggcgccatcgcctgtatcgaaagctgtttttatccccggcggtgcatcggacggaaggggacgagcaagacttttactacttgcgcaacttccgccatcggctgcgtgacgatatcgaagcgcatacgccgtttcgctacgagctgtacaaaaatgccgccatgttgacgcttcccgaacggcaggcgccgtacaccgtatttcctgatcagaaaggaacgtcggagatcatccttcattttgccgccttggtgcgcgagcggcttggggaatatccgccggatgaatacggccgcatacgattgacgcctgaacaattttccgcctggcttgccgattgccggcgccgttacggggcgggatgggggaaaacgtaccgcgacatgtcggctgccgagcttgtccgcgaaatgcttgcggcgctcaacgaatggcgcatggccgatgtggagcacgacaccggaatgatcgtcctttacccgctgctcgggcggctttgcgggcggtatccggatgattttgacgcgaaagagggggaggaacatggcgaatccatgggtgcttcatcgcgcggggctgattaa

SEQ ID NO: 49886 - DNA, 4062 bp, Geobacillus sp. Y412MC61
atggcgaatccatgggtgcttcatcgcgcggggctgattaatttttggtattacgacgagcaatactttcacttcgctgacggcaagctgcttttgcggggaagcaacggggcgggcaagtcggtgacgatgcaaagcttgatcccggtgcttttagacggcaagaagacgcccgatcgcctcgatccgttcggttcacgggcgcggcgcatggaagactacttgcttggggaaaaagatgtcgtcaatcgcgatgagcggacggggtatttgtttttggaatataaacggaaagaatccgaccaatacgtcacaacgggcatcggcctgcgcgcaaagcggcaaaaaagcctcgacttttgggggtttgtcctctttgacaaccgccgcatcggctatgaccttcagttgtataaacaagaaaaaacaggtgaaaaaatcccgctgacgaaacgcgagctcgccgcattgctcggcccgggcgggacggtcgtcgagacgcaaaaagagtatatggagctcgtgaataaacatgtgtttcgctttgaatcgctcgaggcgtttcaagaattgatcgaattgctcattcaactgcgcagcccgaagctgtccaaagactttaagccgacggtgatttatgaaattttggaaagctcgctgcctccgttgaccgatgacgagctccgccatttatccgaaacgatcgaaaacatggaccaagccaagcagcagcttgagcagctcgaacgcgacgaacgggcgttgaagcgtctttgcgatcagtaccgcctttacaacgaatatatgatcgccgaaaaggcggcagaatacgtaaaagcggtcaaacaagcggaacagctcgctgctgaacaacaccgccttcacgatgaagaagagcaggcgcgaaaggcgcttgatgagcttgatgagtccatcatccgcctccgccgcgaagaagacgtgctgcgttcacgcgaaatcgacttggctggccacgaagtgttccagcaagcggagaagtatgaacagttgaaagctgagagggagcgtctgcaggagcggcgggagcggcacgagcagacgatcgcggaaaaagaacggcttgagcggcagcatcgccgccgcctcgatgaatcggaagcgcggttggatgaccttgaacggaagcttgaagacgagttggcgcagctgcgagcggatgcggaagaaggagccttttctttacatgaaacgaacgaagacgattttcaccgccatcgccaaaagcaacaagagttttcgtttgccgcttggaaacaggaagctgaccgccatatcgagcggctcgaggagttggcgcgcctttggcgcaggcatgacgatgtgaaacgacgctatgaagaagcgagcaacgaagcgggcgagcggcggcgggaaatggacgaatggcgtcatcagcagcggaaatgggaagagctgttcgagcaggagaaagagcggtttgaacaagccgtgcttgcctgggtcgagcagggaggaatcgacgtttccgaaacggacattcaggcgtttttgcaacaaatgggctccctctatgagcagtattcgctcgatgatctgaagcgcccgttcgttcaagcgtattacgatgccgtcggtaagaaaaaggatgagaaatggcggctcgaacatgacatccgtctgttggaagagaaacgggcagaacgtgaggccgaactgcgtcaatggcgggaacaacgcgaccctgaacccgaacgggatgaacaaacgacagccgcccgcttggcattggaacaggaagggattccgtttgtcccgttttatgccgcggtcgaatttgtcgacgatgtgcctgaagatgtgcgagagcgaatcgaatcggcgctttcgcacgctgggctgcttgacgccctcattgcggctcgcgatgtcgacgtcgactgcgaccgtgtgctcatcccgaaaccggttcatatggcgcatacgttggccgattatttgcgaccagatgcggatgcccctgtgtcggcggagcggattgacgaagtgctccgaagcatcgtgatcaccgatgcggaacaagaaggcggcatgacgatcgacgaaacaggacgctattcgctcggccttgtccgcggccatgcgccgcggagagcgcgggcgatgttcatcggccgtgcggcgcgggaacggtggcggcttgagaacatcgcggcgctggaagccgagatcgccgctttgggacaagagatcgaccgtctacgtcgtgagcatcaggcggtggaagcagccatccgagcgctcgccgactggtttgtgtccttcccatcggaccgcgatgtgcgcaccgcgtttgaggaagggcaagaagcccgccgtcaagccgaaagcaaagaacgggaatggaagcggcaagaagaaaaagccgccctcttggcgcgtgaatggaaacaaatcaaacaacagctccatgacgagtcggccgagcttgatttggcctttaccttggacggctgcgaacaagcccagctcgccatgaaatcgtacgtccgccatttgcacgaactcgaagtgctttaccgcgaaacgcgccataccgaggccatgatcgcccaacagcgcgagcggctcgcggcgctggaaacggagatcgacgaagcgaaaggcgaacgaaatcggcttcgtgatgacgaagagcggatctccttggagatcgctgagatggaacggacgctcgcccaaatgggagcggatgacattcgcgcggaaatcgcccgcatccaagaacgattggcgtttttgcgccaagaaattccgcgccttgtcaacgaacgggcgcggacggaacagcgcctcatgcgcttagtcgaagagcgggaaaaaggagcgcagcgggaagcgttcgcctgccagctggccgccatgtgggggcggtcgtttgccgatgaagcggcgcttgggctcgtggatcttgatcgttcacgttcccttttggagcaggccaaagaagcgaaacaacggtatgaagcagtgttaaaagagacgcgttcctcgcttttggcgcggctgaacaccgtcttcttccaagagtcgtccaacttgaccgaataccgggcgacgttcgagcggctggcggaacaaaaggagcccgaatggatcgccgccgccccagacgacgagatggcgatgaaagcggccgattggcgggagaaacaagaacggcacgtcatttatctcgactacaaaggccagcgcgccacgccgtttgccgtgctcgccgaggtggagcgcgacatcgccttgcagcacgagtatatgaaggagcaagaccgcgagctgtatgaggacgtcattttaaaatcagtcggccgcattttgcgcagccgcatccagcgcgccgagcggtgggtgagcgatatgaacaaactgatgggcggcctcgacacgtcatcagggctcgtgctgtccattcaatggaagccgaaaacggcggagacggaagcggagctggatacgaaagagttggtccgtctgttgcggatcgattcgcggctgcttagagaggaagatttgcaacgggtgacgaaccatttccgctcgaaaatcgcccgcgcccgcgaattgcttgaggagcgcggccaaggcaacacactccatcaaattattaaagaagtgctcgactaccggaaatggtttgccttcaccttgtactatgaaaaaacaaatgagccgaaacgcgagctgacgaaccaccgtttttaccaattcagcggcggggaaaaggcgatggcgatgtacattccacttttcgccgcggcgtattcgcgctaccaagaagcgggtgatgacgccccgtacatcatctcgctcgacgaggcgttcgccggcgttgacgaaaacaacatccgcaatctgttcggccttgtcgaacagctcggctttaactatatcatgaactcgcaggcgctttggggcgactacgacaccgtgcccgctttgtccatttgcgaactcgtccgcccgcgcaatgcgtcgtttgtcaccgtcattcattaccgttag

SEQ ID NO: 49887 - DNA, 1221 bp, Geobacillus sp. Y412MC61
gtgagcaccgtcaaagaagcggccgcctttttccgatccgaaccgggcttcaagcggctgtttgtcgaaatgaaacgcaagtacgaatcgctcggccgcgtcggcggcgcggtttcgctgcagtcgttctccaaggaggagcgggaggcggtcgccgcctttttcggcaaagacgtcgtccgtgtctccctttccgcttttgaaaaacagcttggacaaacaaagtttgcgggcgtcgggcttgttgctctgttggaacaatattttggcgaaccgctcgtgccgaaaaaggagcggcttcaggcggaagaggacgagcgggagcgttttttcgcgcgccttgcagaggaacatcattggttcgcggccgtccgcggccaacgcttcgtccaaacggcgtacgaagccgaccgcgacggtcttgaggccgccgtccgccttgtcggcgccgccctctgccgcctcccgctctcttcatatatgcgcctcccgctctttgcccagcaagtggccagcgacccgcacgcgttcgatttgtccactcttccagggagattgttgttgtccgccttgcaagcgacgactccaggccagtgggatgtgacgtccgtagagagtgtcaatgaactgttgcagtccgtcggcctgctccgcgaagatattttgaactttgtcacatgcgccaacatcctcgctgaaaccgagggcggcccgcatcccgtcttctctgccgcctcggagacgaacacggcgctgaacatgccgcttagggatgtgttgtcacttgtcagtgtccgccccgcccgcggcgggacggtgtacattgtggaaaacgccggtgttttttcgacattgcttgacacccgcgccccgcttgtcagcacgaacgggcaaatgaatttggcgacgatgaagctgctcgatttgctcgcggcctctggcgccaaattgtattattccggcgacttcgacccggaaggattggctatggcagagcggctgcttgaacggtatggacagtccgtcacactttggcgattttccttggacgattatgcggccgccaaccctgtcgtcgccctttcttccgagcgccttgccaagctcgcatccgtaacgtcggcgccgctgcagccgctgaaagaggagatgaagcgaaagaaaaaagccgggtatcaagaggcgatcattgggaggttgacaggggatatcaacgggtag

SEQ ID NO: 49888 - DNA, 1638 bp, Haliangium ochraceum DSM 14365
atgaatcgctatgacgagccgtccgaggcagacacgatgtcgcagcacaacgaggcctctcgcgagacaaccaaagcaacgcggctgctcgacgaggtcgcggtgtttcactacgtgaccgcgcccaatgcacccacctaccgggcgatcatgcagatcttccacgaggcgaaggagcattacaccgtcgacctgcggccggcgcaggtcctggccggactacagcagagcgtctaccacgccgagctgcccgacgaagacgcgctgaaccgagccctggaccagctcgtcgattgggggaaccttgcgcgcattcacgacaccgccgcggtcgcccgcatcggcgacttctaccgcaggcgccacctctaccacctcacggccatcggcgaggcagcgcaccgcgccgtgcgcgaggtcgaggccacgctcggcaagaccggttcgctccagaccgccatgctggtcaagatccgcgacaccctgcgcagcctggcagagctcgccgagtcagggcgtcgcgacgacgccgacgccctgtatgcgctgctccacgacctgcacggcgccttcgatacgctcacccaggaagccagccgattcctcggcgcgcttggacatcgcgattctgaacgcatggccgaagaacgcttcgaactctacaagcgcgcggttctgaactacgtctcgcgcttcgtcgaccaattgcgtcgcctcggcgccgagatcgccatccacgtacgcgcctgcgaggctgccggcatcgccgactcttttgaactcgcggtgcgcgccgccaacctgccgcccgcacccgacggccgcgatcctcaggccctgtgggtcgccgagtggcgcgccaaatgggagggcgtgcggacctggttcatcggcggcacgcagggggctgaatcgtcggtggagcgcttcgccaccaaggccgtgggcgcggtcgtggagctgatgcgctttttgtcgcggctcaacgaccgccgcacacggcccgtcgaccgagcggccgactaccggaccttggcgcgctggtttgccatctgcaccacggacgagcaagcacatggactgtggcaagcggcgactggcctgtacgcgggccgccattttcacatcgccgaggaggacgaagatctggttgctcccagcacgtcctggctggatgcggcgcccgtggcggtgcccatccggctgcgcacacacggctcgtcgtcggccgctgggcgggcggcgcccgcgcaggattacagcgccgataagcagtggatcgcgcagatgcgccggcgcgagcgcgagcaggtggccgcggcaacgcgccgcttcgcgggacatggctgcgtcgatttccgcgctatcgaacgactcgacgcggccgagttcgatctcttgttgtcgcttctcgatcaggcgctgggcgccccggccgactccggcggcgttcgccaggtgcgcacggctgatggccggctgctcgtcaccctgcatcctcccgccgccgacgcggacgctgccacggccacgatcgacaccccgcgcgggcgcttgcgatgccggaattaccggatcgaggtgcgcgacgcttttgccgcggcgcgatccgtccgcgcacaggagggcggcgcatga

SEQ ID NO: 49889 - DNA, 1218 bp, Haliangium ochraceum DSM 14365
atgagcgtgctagccaccaagctcgaggacatcgcgcgcgccgagcgcaccgcggcgctgcgctatttgcttcgccacccgctggtgtgcgccagcgacgccgccgatatgttcgccacgatcgtgcgccaccggaactggctcacgcgctggtttctcgaccagccgtcctggaaactggtggtggagcccaaagagggtttcgcccgtctgcacaaggtgtcggctcgcgtcgatggcacgcgaccagcccggagcgtgagcgcgggcaagctgcccttcgatcgccgccgttacgtgctgctgagtcttaccctggcggcgctggaggaggctggcagccagatcaccttggctcgcctggccgacatcgtcgcgggactgagcgctgacgagcccgatatcgaagatttcgacaccgaccgctacggtgatcgttgtgcgttcgtggatgcgctcaggtggctggtagcgcaccgggttctgcgcatgcgcgacggcgacgagagcggctatgcgcgcagcggcgcaggcgacgccctgtacgacgtcgacgaccggttgctcggccagcttttggcagcgccgcggccgccgtcgatgaccgagcgacccgacgacctgctggcggagcagtaccccgagaccgacgatggcatccggcaacgcgcccggcatctggtgtttcgtttgctgctcgacgagccggtggtctactacgacgagctgccgcccgacgcgctctcctggttgacacacagccgcggtatggtctacgcgcggttgcaagaagacgtagggatgcgcgtggagcggcgcagagagggcctcgcggccgtcgaccctgaaggggatgtgagcgatgtgctgtttccggacggcgggtcaaccgtaaaacacgcggccctgctcctggccgaatggctgacgcgcgccctgcgggcgggcgccgaggtggtgagcgacgacgccatcaacgcgcaggtagtcgccctcacggccgagcacggcaagcgcggtcgctggagcaagcagttcttggacgcgggtgacgacggcgctcttcggctcgcggccgaggcgatggcgctgctggctgggtttcgcctggtggcgcgcgttaccgatggatggcggccgctgccggccatcgcccgctttgccgccggttcctctggagacgatgcgccgaaacggcgcgcgaggagacgagcatga

SEQ ID NO: 49890 - DNA, 4215 bp, Haliangium ochraceum DSM 14365
atgacgacgtccgagccgatttcgacggagagtctccggctgccggaacccgagcgcgagcgctggcagctcttgcgtgccggtctgcaaaacatctgggagtacgacgatcagcgcttcgtctgtcatcgcggtcgcctgctcctgcgcggccgcaacgagtcgggcaagaccaaggccatcgaggtgctgttgccctttttgctcgacgccgacctgtcgccgcagcgcctcgacccgttcggctccatggcgcggcccatgtactggaacctcatcaacgaccaggtgcccgacgtacaggtgcggatcgggtatgtgtggatcgaattcggacgccgcgtcgatggacgagccgagttttgtaccatcggcgccgggctgcgcgccaagcgcagcaagccgggcgtgagctcgtggtattttctcaccgcgcagcgtatcgaccgcgagctggacgtgatgccgggcagggcgccgctcacgcgttcgcgtctggagcaggcgatcgcagagtctggctcggtgttcgacagccgcgctgactatcggcgcgcggtcaatcaacggattttcggactgccggacgaccagtatgcggcgctcatcgagaccctgctgcagctccgccgtccgcagctctccaagtcgctccaacccgaggcgctttcgcgcatcctcacggccagcctgccgccgctcgaggcacaggtcatcggcagcctggccgagggcttccagcgcctggatcagcatcgcgccgcgcgcgaacgctttgccgagacgcacaaggcggtgaaggacttcctcgcgacgtatcggcgctacattcgcacggtggccagagccgccgcgctggagatgacacggggagacagcgcgtaccagcgcgcgcgctccgagctgcgtcaggcccgggaagcgcatgcgcaggccaaggcagagcgggacgagctgacgagcgcgatcgcggcgctcgagcagcgcggagagaacgccgaggagcggctgcgaacgctgcgcagctcggaggcgtatcaggcggtggagaagctcgacgaggccgagcaacaggagcggtcgcgcgcagaggctgcctcgcgtgcgcagcgggctctggcggctgtggtcgagcaactgggcgaacggcagcgtgagctggaccgggccagcgctgcggtggacgcggcccgcagccgactcgccgacgcccgcgcgggtgcgcgtcaggccgcgtcggacgcggggctggggacgcagcacgaattcatcgacgagccgctcgccggtgcggagatggacgtggacgcggcccgcggggcggccaccagcgtgtgcgccgcgcgtgggcgggcggtagacgggctggccgagcagcttcgcggtgttcgcaaagccgcgcgcgcggccgaacgcgcgtacgagcggctcagcgacgcggcccaggccgagcgcgacgccgaggaggccgtgcgttcggccgagggagcagaaggcgccgctcgacagcagtttctggatgcggtgagcgagtggctggacgcgctcgaggtgctctcgcttgatgccgggttgagagacgcgttgttcgaccaaccgtccgaggatatggcgccgtggttgcggacgcgcttcgaggcggcacgcgcagcgctggacgagcgtatacacgcgatcgagaccgagcggcgcgcagggctgcggctgctcgaggaagcgcgcgccgagttcgacgcgctcgagcgggcgacgcatcctccgcccgagccgcccaattggcgcgcgccgcggcccgatgagcggcccggcgccccgctgtacatgctgtgcgactttcgcgagggggccgcagaggacaccgcagcgcgcgccaacatcgaggcggcgctcgaagcatccgggctcctcgacgcgtggatcacgccggacgggcaggcgctggcggccgacaccttcgacgtcgtactcacggcggtgccgcgcgaaggcgcgaccttgctcgacgtgctcgtgcccgtgtcggcaggcggcgtcgaggccgaggtgatcgagcgcgtgctgcgcaccatcgagctggtgcgcgcgggctccgccgaagatcaggaacagccgaatggacgagacggtgcgggatgcggcccgtgctgggtgagcatcgacggccgcttccgcgtcggtcccatgagcggagcctgggccaaagacgtgccgagctttatcggcgccacggcccgcgaacgcgagcgagcgcgccgcatgtccgcgctcgaacgtcgtattgctgagctcgacgagcaggtgcgcgtgctggagtcgcaacgcggagaggtggaggcgcggcgggcggtactgcgcgacgaagaggcgcgtttcccgtcgctcgagcccgtgctgcgggcgcggttcgaggtcgagcgcgcgagtgcgcagcttcagggggctcgcggtgagcgcgcgcggctgagggatgcgtacgaggccgcacagcgggccgtgcggagcgtggtggatgcctgcctggccgcggccgagttcgaggggatgagcccgtggatacggcgcttgtccgtgggccaggccgagggccagcaggcgggccaggccacgagactgatcgacgtcgacggcctggacgaagacctcgacgagctgcgccgggtcacgcgcgtgtacggcgaggcggttcgcgacctcgtccaggccgcgagtgagctggaggcgcgtcagagggagcacgcgctccgtgcgagcagcgccgagcaggcccgcgctcaggtcgaaggcgcgcaggagagcgcgtcggaggcggacggggaggcgcagcgcgcccgtgtccgtgccgccaccttgcgcgcggcggtaggcgcgacccgagacgaactgctggtcgagttgcgcgcgaccgagcaagagcagcgtgaggtgcacggcgagctgaagcgagcgcggcatcagaagagcgagcaagatcggcgggtgggtgcgaccggcgcggaggtggacacggctgcgcgacgcgagcaggagagtgaagcgcagcgcgaggctgccgagcgcggcttccgcgagctggccgaggacggatttctcagttatgtaggacggacggacgataacgacagcgctgctcgttcggatagcggcgaaggcgacgatgagagcaaggggcccgcgcgctggaccttgaccgacacgctccgtgaggctcggcgcatcgacgctgccacgacgcgtgtcgatgcgtccccggaggcgcgcgataaggaggagaaccgcgtgagcgccaagcagcaagacctgctgcgcagcgtgcccgccgatgtgcgcgtgttgccccagcggcggcgtggcgtcctcgactatcaggccacgatgaacggtcgcgagatgagcctgctcgccctggccgacgtgctggtcgaagacatcgcggcgcgtgaccggttgttgggcgagaatgagcaggcgctgttcgagtcgttcctctcgggcgagacccacgaacatctgcgcagtcggctgcgtcaggccaacgggctcgtcgaggatatgaaccagcagctcaccgcgtgccccacggcttcgggacggaccttgcggctgcgctgggcggttcgcgacgaggcgccgccgggcacgagtgaggcgatcgcgctcctgctgcgtgccgcgcatcttctgtccgacgccaatcgcagcgcgttgcggcagttcttgcagcagcggctcgacgaagcgcgggccgaggacggtatcggcagcctcctcgaacgaatgctcggcgtgctcgactatcggtcctggttcacctttgccatcgaataccgcgatcgcgaggcgaacagcgcatggcggcgcctcacccgcaaagtgcatggcgctggctctggtgggcagaaggccgtgatgttgcatctgcccctgttcgcggcggccgcagcattttactcggccgccgcgaacagcgcgccgcggccgatcctgctcgacgaggcgttcgccggtatcgacaccaagatccgagcgcagctcatgaagctgctggtcaccttcgatctggatttcatcatgacctcgtatgaggagtggggcttttacgaggagctcgacggcctgtccacttatcatctcagccgcgagccaggcttccgcggcgtgcatgctgcttggtttctctgggatggcgcccgcgcggtcgagatggagtcgagatga

SEQ ID NO: 49891 - DNA, 1314 bp, Haliangium ochraceum DSM 14365
atgagcgccgaagacgacatcggacgagcagacgataaagcgcgagtgcgcgagctgcgccagcatctgggaggtccggagtatcgcaagctgttcgccgcgatgcggcagcggctggaagaagcgggggagcgcgctcagcggaccaagctgcgcgacctcgatgagcgcgagcggcaggcgctcgccgatctcctcggcatggcacgtgtgccaggggaggcagtcgtggtcgatgtggcgcggctcgatagcgtgttgcggaacagccggctcgcggcctcgctcgtcgaggtggtcgaagcgctcggcggccccctcgtcgatcggcccgcacagcggcgcgcgcagagcgaggcacgtgctgccctgtggcatcaggcggctgcgcacacgagcgtgcagtcgcggcccgagctggccgactggctcaatgatctgcgcgggcagggattattggcccgcgcggcgcaacgcagcgcgctgtcgcagcaggagctgctagcgcaggcgctcgcggtcgtcgcgcgtctgcccgcggacgggatgttgttggcggtgctagccgctgagactacgggagacgcgcacgcactcgacctcggtcgaccgctgagcagcttggtcgtacgcgcggcccaatacctagctggctggcctgcgccgccgaaatcggccgctgcacggaggcgtttgtggtccgaggttggtgtgctctgcgatccgctctccgcccaagtattggtgctgggcttgcggccaggtggggattgtgcgctggctcgacatctgcgcgagtgggcggagcttggtgagccgcgacgacttacgctgcgtgagttgaacggatgtcgactgcgcttggaggtgagcgaggaggttttcgtgtgcgagaatccaggcgtggtagccgccgccgccgatgccctggggcagcgctgcgcgccgctcgtgtgcacggaggggctgccatcgacggcggctgtggcgttgctgcggcaactctgtgccggcggcgcccgcgttcggtttcacgccgacttcgactgggccggcatccgcatcggcaatctgctcgtcgaggggttccgcgctacgccctggcaattcgacgttgcctcgtaccgcgcagcctgcgatctgctcgcggacggaatccctttgcgcggacctaccgtcgagtcgctctgggatgccaggctcaccgtggaaatggatactcggaggcgagccatcttcgaagagcaggtactcgaaacactcatcaccgatttgcaagatgcgtctgtcgagccaggcgcatcagacgggtag

SEQ ID NO: 49892 - DNA, 1638 bp, Haliangium ochraceum DSM 14365
atgaatcgctatgacgagccgtccgaggcagacacgatgtcgcagcacaacgaggcctctcgcgagacaaccaaagcaacgcggctgctcgacgaggtcgcggtgtttcactacgtgaccgcgcccaatgcacccacctaccgggcgatcatgcagatcttccacgaggcgaaggagcattacaccgtcgacctgcggccggcgcaggtcctggccggactacagcagagcgtctaccacgccgagctgcccgacgaagacgcgctgaaccgagccctggaccagctcgtcgattgggggaaccttgcgcgcattcacgacaccgccgcggtcgcccgcatcggcgacttctaccgcaggcgccacctctaccacctcacggccatcggcgaggcagcgcaccgcgccgtgcgcgaggtcgaggccacgctcggcaagaccggttcgctccagaccgccatgctggtcaagatccgcgacaccctgcgcagcctggcagagctcgccgagtcagggcgtcgcgacgacgccgacgccctgtatgcgctgctccacgacctgcacggcgccttcgatacgctcacccaggaagccagccgattcctcggcgcgcttggacatcgcgattctgaacgcatggccgaagaacgcttcgaactctacaagcgcgcggttctgaactacgtctcgcgcttcgtcgaccaattgcgtcgcctcggcgccgagatcgccatccacgtacgcgcctgcgaggctgccggcatcgccgactcttttgaactcgcggtgcgcgccgccaacctgccgcccgcacccgacggccgcgatcctcaggccctgtgggtcgccgagtggcgcgccaaatgggagggcgtgcggacctggttcatcggcggcacgcagggggctgaatcgtcggtggagcgcttcgccaccaaggccgtgggcgcggtcgtggagctgatgcgctttttgtcgcggctcaacgaccgccgcacgcggcccgtcgaccgagcggccgactaccggaccttggcgcgctggtttgccacctgcaccacggacgagcaggcacacgatctatggcaagcagcgaccggcctgtacgcgggccgccactttcacatcgccgaggaggatgaggaactggtcgctcccagcacgtcctggctggatgcggcgcccgtggcggtgcccatccggctccgcacacacggctcgtcgtcggccgctgggcgggcggcgcccgcgcaggattatagcgccgataagcagtggatcgcgcaaatgcgccgccgtgaacgcgagcaagtggccacggcgacgcgccgcttcgcgggacagggctgcctcgacttccgcgccatcgaacgactcgacgcggccgagttcgatctcttgttgtcgcttctcgatcaggcgctgggcgccccggccgacccaggcggcgttcgccaggtgcgcacggccgacggtcggctgctcgtcaccctgcatccgcccgccaccgacgcggacgctgccacggccacgatcgacaccccgcgcgggcgcttgcgatgccggaattaccggatcgaggtccgcgacgcctttgccgcggcgcgatccgtccgcgcacaggagggcggcgcatga

SEQ ID NO: 49893 - DNA, 1218 bp, Haliangium ochraceum DSM 14365
atgagcgtgctggccaccaagctcgaggacatggagcgcgccgagcgcaccgcggcgctgcgctatttgcttcgccacccgctggtgtgcgccagcgacgccgccgatatgttcgccacgatcgtgcgccaccggaattggctcacgcgctggtttttggaccagccgtcctggaagctggtggtggagcccaaagatggtttcgcccgcctgcacaaggtgccggctcgcgtcgatggcacgcgaccagcccggagcgtgagcgcgggcaagctgcccttcgatcgccgccgctacgtgctgctgtgtcttaccctcgcggcgctggaggaggccggcagccagatcaccttggctcgcctggccgacatcgtcgcgggactgagcgctgacgagcccgatatcgaagatttcgacaccgaccgctacggtgatcgttgtgcgttcgtggatgcgctcaggtggctggtagcgcaccgggttctgcgcatgcgcgacggcgacgagagcggctatgcgcgcagcggcgcaggcgacgccctgtacgacgtcgacgaccggttgctcggccagcttttggcagcgccgcggccgccgtcgatgaccgagcgacccgacgacctgctggcggagcagtaccccgagaccgacgatggcatccggcaacgcgcccggcatctggtgtttcgtttgctgctcgacgagccggtggtctactacgacgagctgccgcccgacgcgctctcctggttgacacacagccgcggtatggtctacgcgcggttgcaagaagacgtagggatgcgcgtggagcggcgcagagagggcctcgcggccgtcgaccctgaaggggatgtgagcgatgtgctgtttccggacggcgggtcaaccgtaaaacacgcggccctgctcctggccgaatggctgacgcgcgccctgcgggcgggcgccgaggtggtgagcgacgacgccatcaacgcgcaggtagtcgccctcacggccgagcacggcaagcgcggtcgctggagcaagcagttcttggacgcgggtgacgacggcgctcttcggctcgcggccgaggcgatggcgctgctggctgggtttcgcctggtggcgcgcgttaccgatggatggcggccgctgccggccatcgcccgctttgccgccggttcctctggagacgatgcgccgaaacggcgcgcgaggagacgagcatga

SEQ ID NO: 49894 - DNA, 4215 bp, Haliangium ochraceum DSM 14365
atgacgacgtccgagccgatttcgacggagagtctccggctgccggaacccgagcgcgagcgctggcagctcttgcgtgccggtctgcaaaacatctgggagtacgacgatcagcgcttcgtctgtcatcgcggtcgcctgctcctgcgcggccgcaacgagtcgggcaagaccaaggccatcgaggtgctgttgccctttttgctcgacgccgacctgtcgccgcagcgcctcgacccgttcggctccatggcgcggcccatgtactggaacctcatcaacgaccaggtgcccgacgtacaggtgcggatcgggtatgtgtggatcgaattcggacgccgcgtcgatggacgagccgagttttgtaccatcggcgccgggctgcgcgccaagcgcagcaagccgggcgtgagctcgtggtattttctcaccgcgcagcgtatcgaccgcgagctggacgtgatgccgggcagggcgccgctcacgcgttcgcgtctggagcaggcgatcgcagagtctggctcggtgttcgacagccgcgctgactatcggcgcgcggtcaatcaacggattttcggactgccggacgaccagtatgcggcgctcatcgagaccctgctgcagctccgccgtccgcagctctccaagtcgctccaacccgaggcgctttcgcgcatcctcacggccagcctgccgccgctcgaggcacaggtcatcggcagcctggccgagggcttccagcgcctggatcagcatcgcgccgcgcgcgaacgctttgccgacacgcacaaggcggtgaaggacttcctcgcgacgtatcggcgctacattcgcacggtggccagagccgccgcgctggagatgacacggggagacagcgcgtaccagcgcgcgcgctccgagctgcgtcaggcccgggaagcgcatgcgcaggccaaggcagagcgggacgagctgacgagcgcgatcgcggcgctcgagcagcgcggagagaacgccgaggagcggctgcgaacgctgcgcagctcggaggcgtatcaggcggtggagaagctcgacgaggccgagcaacaggagcggtcgcgcgcagaggctgcctcgcgtgcgcagcgggctctggcggctgtggtcgagcaactgggcgaacggcagcgtgagctggaccgggccagcgctgcggtggacgcggcccgcagccgactcgccgacgcccgcgcgggtgcgcgtcaggccgcgtcggacgcggggctggggacgcagcacgaattcatcgacgagccgctcgccggtgcggagatggacgtggacgcggcccgcggggcggccaccagcgtgtgcgccgcgcgtgggcgggcggtagacgggctggccgagcagcttcgcggtgttcgcaaagccgcgcgcgcggccgaacgcgcgtacgagcggctcagcgacgcggcccaggccgagcgcgacgccgaggaggccgtgcgttcggccgagggagcagaaggcgccgctcgacagcagtttctggatgcggtgagcgagtggctggacgcgctcgaggtgctctcgcttgatgccgggttgagagacgcgttgttcgaccaaccgtccgaggatatggcgccgtggttgcggacgcgcttcgaggcggcacgcgcagcgctggacgagcgtatacacgcgatcgagaccgagcggcgcgcagggctgcggctgctcgaggaagcgcgcgccgagttcgacgcgctcgagcgggcgacgcatcctccgcccgagccgcccaattggcgcgcgccgcggcccgatgagcggcccggcgccccgctgtacatactgtgcgactttcgcgagggggccgcagaggacaccgcagcgcgcgccaacatcgaggcggcgctcgaagcatccgggctcctcgatgcgtggatcacgccggacgggcaggcgctggcggccgacaccttcgacgtcgtactcacggcggtgccgcgcgaaggcgcgaccttgctcgacgtgctcgtgcccgtgtcggcaggcggcgtcgaggccgaggtgatcgagcgcgtgctgcgcaccatcgagctggtgcgcgcgggctccgccgaagatcaggaacagccgaatggacgagacggtgcgggatgcggcccgtgctgggtgagcatcgacggccgcttccgcgtcggtcccatgagcggagcctgggccaaagacgtgccgagctttatcggcgccacggcccgcgaacgcgagcgagcgcgccgcatgtccgcgctcgaacgtcgtattgctgagctcgacgagcaggtgcgcgtgctggagtcgcaacgcggagaggtggaggcgcggcgggcggtactgcgcgacgaagaggcgcgtttcccgtcgctcgagcccgtgctgcgggcgcagttcgaggtcgagcgcgcgagtgcgcagcttcagggggctcgcggtgagcgcgcgcggctgagggatgcgtacgaggccgcacagcgggccgtgcggagcgtggtggatgcctgcctggccgcggccgagttcgaggggatgagcccgtggatacggcgcttgtccgtgggccaggccgagggccagcaggcgggccaggccacgagactgatcgacgtcgacggcctggacgaagacctcgacgagctgcgccgggtcacgcgcgtgtacggcgaggcggttcgcgacctcgtccaggccgcgagtgagctggaggcgcgtcagagggagcacgcgctccgtgcgagcagcgccgagcaggcccgcgctcaggtcgaaggcgcgcaggagagcgcgtcggaggcggacggggaggcgcagcgcgcccgtgtccgtgccgccaccttgcgcgcggcggtaggcgcgacccgagacgaactgctggtcgagttgcgcgcgaccgagcaagagcagcgtgaggtgcacggcgagctgaagcgagcgcggcatcagaagagcgagcaagatcggcgggtgggtgcgaccggcgcggaggtggacacggctgcgcgacgcgagcaggagagtgaagcgcagcgcgaggctgccgagcgcggcttccgcgagctggccgaggacggatttctcagttatgtaggacggacggacgataacgacagcgctgctcgttcggatagcggcgaaggcgacgatgagagcaaggggcccgcgcgctggaccttgaccgacacgctccgtgaggctcggcgcatcgacgctgccacgacgcgtgtcgatgcgtccccggaggcgcgcgataaggaggagaaccgcgtgagcgccaagcagcaagacctgctgcgcagcgtgcccgccgatgtgcgcgtgttgccccagcggcggcgtggcgtcctcgactatcaggccacgatgaacggtcgtgagatgagcctgctcgccctggccgacgtgctggtcgaagacatcgcggcgcgtgaccggttgttgggcgagaatgagcaggcgctgttcgagtcgttcctctcgggcgagacccacgaacatctgcgcagtcggctgcgtcaggccaacgggctcgtcgaggatatgaaccagcagctcaccgcgtgccccacggcttcgggacggaccttgcggctgcgctgggcggttcgcgacgaggcgccgccgggcacgagtgaggcgatcgcgctcctgctgcgtgccgcgcatcttctgtccgacgccaatcgcagcgcgttgcggcagttcttgcagcagcggctcgacgaagcgcgggccgaggacggtatcggcagcctcctcgaacgaatgctcggcgtgctcgactatcggtcctggttcacctttgccatcgaataccgcgatcgcgaggcgaacagcgcatggcggcgcctcacccgcaaagtgcatggcgctggctctggtgggcagaaggccgtgatgttgcatctgcccctgttcgcggcggccgcagcattttactcggccgccgcgaacagcgcgccgcggccgatcctgctcgacgaggcgttcgccggtatcgacaccaagatccgagcgcagctcatgaagctgctggtcaccttcgatctggatttcatcatgacctcgtatgaggagtggggcttttacgaggagctcgacggcctgtccacttatcatctcagccgcgagccaggcttccgcggcgtgcatgctgcttggtttctctgggatggcgcccgcgcggtcgagatggagtcgagatga

SEQ ID NO: 49895 - DNA, 1314 bp, Haliangium ochraceum DSM 14365
atgagcgccgaagacgacatcggacgagcagacgataaagcgcgagtgcgcgagctgcgccagcatctgggaggtccggagtatcgcaagctgttcgccgcgatgcggcagcggctggaagaagcgggggagcgcgctcagcggaccaagctgcgcgacctcgatgagcgcgagcggcaggcgctcgccgatctcctcggcatggcacgtgtgccaggggaatccgtcgtggtcgatctcgcgcggctcgatagcgtgttgcggaacagccggctcgcggcctcgctcgtcgaggtggtcgaggcgctcggtggccctctcgtcgatcggcccgcacagcggcgcgcgcacagcgaggcacgtgctgccctgtggcatcaggcggctgcgcacacgagcgtgcagtcgcggcccgagctggccgactggctcaatgatctgcgcgggcagggattattgacccgcgcggcgcaacgcagcgcgctgtcgcagcaggagctgctagcgcaggcgctcgcggtcgtcgcgcgtctgcccgcggacgggatgttgttggcggtgctagccgctgagactacgggagacgcgcacgcactcgacctcggtcgaccgctgagcagcttggtcgtacgcgcggcccaatacctagctggctggcctgcgccgccgaaatcggccgctgcacggaggcgtttgtggtccgaggttggtgtgctctgcgatccgctctccgcccaagtattggtgctgggcttgcggccaggtggggattgtgcgctggctcgacatctgcgcgagtgggcggagcttggtgagccgcgacgacttacgctgcgtgagttgaacggatgtcgactgcgcttggaggtgagcgaggaggttttcgtgtgcgagaatccaggcgtggtagccgccgccgccgatgccctggggcagcgctgcgcgccgctcgtgtgcacggaggggctgccatcgacggcggctgtggcgttgctgcggcaactctgtgccggcggcgcccgcgttcggtttcacgccgacttcgactgggccggcatccgcatcggcaatctgctcgtcgaggggttccgcgctacgccctggcaattcgacgttgcctcgtaccgcgcagcctgcgatctgctcgcggacggaatccctttgcgcggacctaccgtcgagtcgctctgggatgccaggctcaccgtggaaatggatactcggaggcgagccatcttcgaagagcaggtactcgaaacactcatcaccgatttgcaagatgcgtctgtcgagccaggcgcatcagacgggtag

SEQ ID NO: 49896 - DNA, 1488 bp, Thermoanaerobacter italicus Ab9
atggaagataaacttgatttgaatgtgataaaaccgattgaagaggtaaagtatttgtctgcggaaaatgcttcgcgatatcgccttatcatgaggtatttttatgagcagtaccagaaatttaaatattggctgtacaaagaggatatatatgaatatgtaagtcaatttgatatgtttgctgactatacaatggaaaaatgtgagcaggacttaaaagcacttactgaatggaaaaaccttattgcgacacaagataccagtaaagcttctacgattgacgaatttaaaaacaaaaaattcaggtatcagctgagtccatattctattgagatagaaagaatgaccataaggctggaaagtatcgtcggttatggtgggtcactacagccgtctttatttgaaaggatttaccgcaatttaataaggacaaatgaaatggcgaaaaaagaggatttacaggaaataaacagatggtgggaagacctcaataccgactttgaaaatatatatcacaatgcgacagattacattgcaagtcttcaaagctctaacgctgatgaacttatgaagtcagagcagtttataatttacaaagacaaacttatagaatatttaagagattttataaaagaccttcagagattttctgttgccatagagagctttttgaaaaaggtgagtccggaggttgtcaattccgttgtagataagttatgccaatatgaaatgagtatcccaagaattgacagggttttaaatgaagaggaagtaaaagaagatttgatggataagtggaataacatatctttttggtttacaggtcataattttgaagacagcgaggcagtaaggcttcttaatatatcaaatgaaataatcagaaaaataacaatgtatgcggcgagaatagcagaaaacaggatgaaagctgccagcagaaagaatgaatatattgctctttctaaaatgtttgcaaaagcaggtagtataaaagaagcacaccttttgtctgcggcggttttcggttgcttttacacaaggcatataaagggtgattttgaaagaaagacagaaagtgtaaaccagagtgtatgggaagaaccgccctttaaagtgattataaagccaaaaacaaggagctacagtaattctgttaagacaaatgcgattattgatagaagtgctgacaagacggagatgctgatggactatctcaatcagaaaaatatagaagatgaaataatagcaagttgcattgttggcaatagaataaggataaaggatttacctgttgtaaaaccttttgtgagggcaacgatacttaaatggataggaaaagcgatagcaagaaatggctttacaggaaaaacagaagatggaagaacatacaggcttcatatgccaaagaatggcgagagagcaatactaaaatgcacggatggtaatcttgatatgcctgatattgtaattgagtttgtggattga

SEQ ID NO: 49897 - DNA, 1152 bp, Thermoanaerobacter italicus Ab9
atggaagaacttcagatgcttcttgaaaatttttggatattgagagatgacagggaaaattttaacaaaatacgggatgcggagaataaaataaaaccttttgttgaagagaagttaggatatagattgattataaacccatatattattaagttagaaaaagtgccgtcagatgttgaagagtggatggggatagatgcatttcaaatgcctatggattatgcatttttgtgtttgctcttagcttttttggaggataaaggaccagaagaccagtttgtgttgtctaatataacggaatacatagaggcgcagtatgatggacctgataaagtagattggacgctttttcagcacagaaagtcacttgtgcgggtgctcaattttgctgtagatattggcataattaaaatagatgatggtgaccatgagaggttttcagaaagtgaagatactgaggttctttacgaaaacacaggtatttcaaggtattttttgaggtcttttaacagagaaattacagaagacatgaagatcgaggattttttgcaggaggacttaaatctttcaaactccaaagatgcggttatacagagaaggcacagggcgtaccgaaaacttattctttcacctgctgtgtatagtgaaggacctgatgaccaagacttcatgtatataaaaaattacagaaataccatagcgaaagatttagaggagtatcttggtgcaaaacttcacctccacaaaacttctgcttttgtcctctttaatgacaacaaatatttaaggtcttattttcccgacaaaaacaaaaacatatctgatataatgctgcaggcaagtaaaattataagacaaatgattgaagatggaaaactcgcctataatcctgacgatactatagatataactgaagcagaatttataaatattattttgaaagtaaaggaaagatttagtgatggttggtataagtcttacagggagatgagtgaaaagcagcttatagaagaggtcattgaaaacatggaaagctttaagatgataaaaagagttgaggaattgcattctattaaaatactgcctatggcggcaaagctaattggggaatatcctccagattttgaaaaaggagaaggtgcagatgagtga

SEQ ID NO: 49898 - DNA, 4167 bp, Thermoanaerobacter italicus Ab9
atgagtgaaaaattagccgaaagatggatgattaacaggattgggcttcttaatttttggtattatgatgatgaaatatttgagtttgcagatggaaggcttcttttaagaggtgctaatggttctggaaagtcagtgacaatgcagagtttcatacctttagtattagatggcaacaaaagtcctgaaagacttgatccctttggctcaaaggcgagaaagcttgaggactatcttcttggggaagaagaggtaagtgggcttgatgaaagaactggctatcttttcatggaatttaaaaaagagaaaaaagacagctacattacaataggcatgggactaaaggcgaaaaggcatcaaaatatggacttttggggctttgtaatacttgacggcaggcgtataggtatcgacttctttttatacaaaatggaagtaggcgatgacggcaaaagagtaaaagtcccacttaccaaaaaagaacttaagaatagaataggtgaaggtggagaagtagttgaaagccaaaaagagtacatggaaatggtcaataaatacatttttggctttagttctatcgaggaatacgacgagctcataaaactgctgatacagcttagaagtccaaagctttccaaagacttcaggcctactgtgatatatgaaattatgaaagcttcactgccttctctcacagatgatgatttgaggcctctttcagaaaccatagaaaacatggaccagattaagatgcaccttgatgttctttacaggaatatggctgcagtaaaaaagcttaaaaatgagtacgacaactataacaaatacattctttatgaaaaggctggggatttagtaaaggcatacagcgatttatacgcatcaaaaaaagaatacgataatttaactaaagatattgaaaattacagaagtacaatagcaaacttggggaatgacatcatttctcttgaaagtgaaagagaagctttaaagaaaaaggaagaacagctttcaagtggtgatgctaaaagaacccaaaaggagttattagaagaagaggatcgatataagcagtatttggaggataagtctaaaaaagaagaagaactccggaataaacaagataaatattatggtttagaaagaaagataaaaaacactgaggaacaaaaatacaaactggataaagaactacaggataaattagaggatatatcttcaattgcacaggatatagatttcatggaacatgagttttctgtaagtgaacttaaaaaagtgtatggaaaagaatttgattttacttattggaaaaatgaattaaaaaagcataaagataaaataaagcgtgccatcaatgcattgagagaagaaatagaagcaaataaaaggtatgatgccgcacttaaagagcaggaaaggcttaaaaaagaaagagaagacagggctaaaaagcttaatgaggcagaaaggctttttgacgaacaaaaaagagaatacgttgaaagagtttatagttggtcgcagggcaatgcagagcttaagcttttaagtagccaattggaaggtttaagccgtgtcatactggcgtatggagaggataaaggatttgacgatattttggcttttgtgagaaaaccctatgaggaaatactaaatggaattcagcaagaaattttaagattagaaaatcaaagagaggtaaaagaaaatcagcttcatgagaaagaaaagttattggaggaatggaaaaacaaaaaagatcctgagcctgaaagagatgaacaagtcataaacaacagaaaaaggcttaaagaagctggaattccttacattcctctttacatggcgattgattttaaagaggatgtagatgaagagacaagaggcaatatagaagctgcgatagaagacatggggcttttggatgctcttatcgtcccaaaagaatattttgaaaaagctcttcaactggacagcaatatggcggataaatatgttatgcctggaagctttaatatgatgttaaatgtatctcaatattttagagtagttgacaatgaagaaggggtttcaccagaagatatttcagacgctttaagcaatatatttgtatccgaagaaagcggaacaacctatatcgattcaaatggcacatatggaataggagtaataaaagggaaagcacgggatggagttaaatcaaagtacatcgggagtgagtctagaaagcgctacagagaagagcttattaaatctatacaagaagaaatacaggctataaaagctgaaatatctgcaatcgatgaggaaataaatgtaaaaaaattaagaatacagaggctggattacgaatattcggcatttcccgggaaagaagacattgaagaagcatatagatatttaaaaacggcaaaggctgattatgaatacacctctcataaactggatgaacagcttttcacagttaaaaactgttttgaggaccttcagaaaaagaaagctgttgtaagagaattgacatctggcataaacatacatccagatattgatacctattcttctgcgtatgaatatgcggaaggatacgcttcagggcttaatgaagtagaaatactatacaacaaatatgttttgcacatttcaaacgaagaaatgttattgcagcaaaaacaagatttagaatacgatattgataacttaaagtacgaaatagacgtactggaaaacaaaatacagagttctgttaagaaaattgagatgctaaaagagacattaaaagaacttggacttgaagaaattgaaaaagaactggagatttgcctaaaaaggctggaggaaatacctaaagagattacaaataaatcagccgaaaaagcaaaacttgaggagcggctacagagaagcttaaaagaccttttaaacattgaagaagagattcatcttaaagagaatatttacaatattgttgaagagggtttaaaaagggaattagcacttggctttgtcaagcaagacgttgaaatggaggatatgttaaaattaagtaaaagcattctttctgaatacaaaggcttttttgacaaggcgggctttgacagagaaaagtttacagagagacttcaaaatgtgtattttgaaactcgcaacgaacttttggaatatgggctttcaattggcaatatctttgacgaagcttgtgagggagacaatgaaagaataaaagaggcaaagaataagcagagaaggctcaatattacggcaaatataaatggtaaaattgtgtctttatatacgctttattctaatattgaagaagatataatggcgaatgaaagccttttaagagagactgataagattctttttgaagagattataatgcacaatgtgggaattaagataagagcaaagatttttaaagcagaagaatgggtaaagaaaatgaataaactcatgtctgaaagggatacttccagcggacttaagttctctattgagtggagaagcattcctgcttctaatgaagaagaacttgatacaaaagagcttgtggatattttaaaatctgatgctgatatgctgaaaaaggaagtctttgataaagttgtaaatcattttaggtcaaaagtagaaagagccaggagggcaatggaggaaaaaaacaatacagaaacttttcacaagattatgaaagaaatattagattacagagattggtttgagtttaagctttacttcaaaaaagaaggggaaagccgcaaggagcttactgataatgcttttaataaattgagcggcggagaaaaagcgatggccatgtatatacctttattttccgcggtttattcaagatatgagggagcatcgccgactgcacctcgcataatatctctagatgaagcatttgcaggagttgatgacacaaacataagggatatgtttaaactgattgaggatttaagatttaattatataatgaattcgcaggttttgtggggagattatgatactgttcccaagctttcaatttatgaacttgtaaggccaaaaaatgcaaaggctgtattggtcatgaagtatttgtgggatggaaaagtaaagcaccttatacttcctgagaaagatgaggttgctgctcttgaggtgggtgctataaatgaataa

SEQ ID NO: 49899 - DNA, 1323 bp, Thermoanaerobacter italicus Ab9
atgaataaagaagaacttagatattttaaagaaaaaaagggatacaagaggatttttgaaggtatacgggaaaagtacagaagtttaggacgtcttggaggcgttgtaaagcttgataatcttacggaagatgaaaaagaagtacttacaaaccattttaaaaaagactataggacaaaaaaatctgcatccattgatgtagcaaagtttgaagagtcgctaaaaaatacgcgatttgaggagtatacgctaaaagacatactggaatactattttggcgaaaaactcaccagcaaaaaagaggatatggaaatattggcaaaagaaagagaagagttctttaaagagctcttctctaaataccaggaatgtaagtgcattgattggctaaaaagtttgtatgaaggaaccgctgtaggggtaagggcagtaaatcagaggtatttaaatgataaggacggattaaaaaaagatataatgtacgtatgcgatgccataaacaatttgcctgtttataaaggagaaaagaaaagactgccggtgttttcttcccagattgcacgtaatcctcactattttgattcaaatacagaagcgggaagtatgtttataaacgctttatgcactttaatggggcttaatgaagtgaaaggaagtgaagaaatatcagaactttattacaacgttggtattttgatagatgaaatatccaattatgtcacactctcaggacttttggcatatgagggcgatacggaaaatcaagtatttaaggctgcttatgaaagcaatcaagtcttgcaagttcctcttttaaatttgagcaaaattgagagaatcgtaagcccttctaagaaagtgtatgttgtagagaatccttcagtttttacatctttaatagatgccacaagcaaagtatttcctgttgtatgcacatatggccagccaaaactttcttctctcctgcttttagatatgctttataaagaagggacagagatatattactcgggagattttgacccagaggggcttatgatagcagatagattatacaaaaggtataaagacaagtttcattttttaaggtacgatgtagaagattatttaaaatctctttcaaatgaggtcataaatgatgtaaggcttagtaagctaaataaaattgaatcacctttactttttgatgtggcaaatgagatgaaaataataaaaaaagcagggtatcaagagcttataatagatgatattataaatgatataagattgattgaagaaggtaaggggggtggtaaaattaaggtaataagtatgccttcttaa

SEQ ID NO: 49900 - DNA, 1518 bp, Aromatoleum aromaticum EbN1
atgccatttacggacacatcggccgacctgttccgacacgtcagcgcggacaaggccggcatctaccgcagcatcatggcgagcttcgccgcggcaaagcgccagttcagactccacatgcgtcccgacgaggtgctggccgaagcccggtggaccgatggcgtgccgaaactcgaggaggtccaggccgcgctcgcccaactggccgagtggggcaacctcgaggcgcaacccgacaccgcacgcgtcgccagcatcagcgacttctaccgcgctcgcttcctctaccggctttcgcatggcggcgaggcggtcgagacggcgctcgccgccttcgccgcggcgctcggccggcgggcggaactgcagacggtcgcgctcgaagacatcgccaaccggctcaagaccctgctcgcgctggccgacgcacccacgccggacgcggcgaaggtgcacgaaaccctgcgcgatctggtgcgcgtgttcgaaagcctcgccgacaacgcccaggccttcatggccggtatggcgcgcagcatcgagctgcagcaggccgatgccacggcggtgctggcctacaagcaacggctgatcgactacctcgaacgcttcatcggcgacctcgtcggacgctccggcgcgatcgcgcagcacatcgcctcgctgcatccgcgcatcgatccactgctgtgggcggccgcgcagcgcgaagcacgcgacgccgcgccgggcgatgaccaagcgcaggccgacgcgctcgcgcagcgccagcaggcttggcgtgaacgctggggaggcctgcgcggctggttcgtcagcacccatcatgaaccgccgcaggccgaggtgctgcgctcgaaggcacgggcggcgattccgcagctgctggccgcggtcgcggcgctcaatgagcggcgcagcgggcgcagcgatcgctcggccgacttccgcgtgctcgccggctggttcgcgacctgcgcaagcgacgacgacgcgcaccgcctggggcgagccgccttcgccctcaatccggcccgccatttctcgctgaacccaggcgccggccatgagctgccggccaccacgccgtgggccgaggcaccgcccctgcgcatccatccgcgcctgcgcgagtacggcgaagccgccccgcgggggccgctgccgaaggtgcgagagcgcaacgaggagcgcgccctgctcgcgcgccagttgcgtgaagaacatctgcaggtcgaagccgcgcgggcgcgcctggccaccggccggacgacgcgcctgtcggagatcggccacctcgatccacacgccttcgcgttgttcctgtcactgctcggcgaggcgctgaccgcacaatcgtcccccgaagacgtggttgaacgtcagaccggcgacggcctgctgcgcattcgcctcgagccgctggaaacgcacacgcgggccgaagtcgtcactgacgccggtatctttgccggccgcgaccacctcatcacgatcaccgacacgcaagcaccctga

SEQ ID NO: 49901 - DNA, 1323 bp, Aromatoleum aromaticum EbN1
atgacaaccgacagcaccgcgatcggccagcagcaggccctccatcaacgcgaggagttaaccgccgcgctgcgcgccctgttgatgaccccgctgatgacgccggcacacacggagttcgccgcggtgcgccgccacgccgatgcgttgcgcgaatggttcatccgcgagaccggctggccgctgcatatcgagcgcgatgcggcgcgcctgtacaagcgtccggccgatgtgaacgacgcgacgcgcgggctgcccggctacgagcgccgccgctacgtgttgctgtgcctggcctgcgcggtgctcgagcgcgccgacccgcagatcacgctgcgcgtgctcggcgaccggctgctcgccctcgccgcggacccggcgctggcggccctcggtttcagcttcacgctccaggcgcagcacgagcggcgcgagctggtcgcggtgtgccgcacgctgctcgaactcggtgtcctgcagcgcgtggccggtgatgaggcaggcttcatacacggcggcaacgaaggcccggacagcctccatgatgcgctctacgacgtgcagcggcggatcctcgccggagtgctcgcagcatcgcggggcccgtcgacgtggcctgcggacgaagccccggtcacgctcgaggcgcggctcaccgcgctggtggcggagcccgtgccggacagcgacgagggccggcgcacgacgctgcgccatcacttggcgcgccgcctgctcgacgatccggtgatctacctcgaccgcctcgacgccgatcagcgcgcctacttcatgaaccagcgcggcacgatggccacccggctgtgcgacgccaccgggctggtcgccgaacagcgcgccgagggtctggcgctggccgacgaggacggcgagctgaccgacgtggcgatgccggccgaaggcaccgaagcgcatgtcaccctgctcgtgaccgagttcctcacaagtcgatcgccgggccgtcccaagatcgacttggcccccgtggggggcggctcgggcgatctttccgagccgggggcactgctcactgcacgcgcgaacagccgcacaaacaccgacgaagtcgccgcattcatcgccagcgcacgcgggcgcttcggcaaattctggcgtaagtcggcacgtgaagcaggctcggagcacgagctggcggcgaccgcgctcgaccgcttgcagcgacttcaactgctcgaacacgatggcaccggcgtgcgacccttgccggcgctggcgcgtttcgccgtcggcgaggccgagctcaggcccgcggcgcccgttgccaccggcaccctattttga

SEQ ID NO: 49902 - DNA, 4227 bp, Aromatoleum aromaticum EbN1
ttgctcgacgccccatccgatctcccgacgaccgacgctcgccctgcactgccgcgcccgacgctggtccgctggcaacccttgcgcctcggccttgtcgagctgttccactacgacagcgaggaattctggttccgtgacggccacctgctgctgcgcggcaacaacggcacgggcaagtccaaggtgctgtcgctgaccctgcccttcctgttcgatgcccagctcaagccctcgcgtatcgaacccgatggcgacgccggcaagaagatggcgtggaacctgctgctcggcaagctcgaccgccgtatcggctatgcctggatcgagttcggccgcatcgccgacgatggcgaagcccactatctgactctcggctgcggcctctcggcggcagcggcaagggcacaggtcgatgcgtggttcttcgtcctcgaaaagcgacgcatcggcgaagacctgtggctcaccagcccggcgcgcaacgtgctcacgcgcgagcggctgaaagaagcattgcacgagcacggccagatgttcgataccgccaccgcataccgccgcgcggtcgacgagcgcctgttccagctcggcgccgtccgttatgcggccctgatggacaccctggtccagttgcgccagccgcaactgtccaagaaacccgacgaaggcaacctatccgacgcgctgaccgaggcgctgccaccgctgtcggccgaactgctgaccgacgtcgccgacgccctcaaccagctcgaggaataccgctgcgagctgcaggattacgaagcgctcgcgaaggccgtcggccagttcaaccagcgctaccagcgttacgccgcgatcaacgcgcggcgccaggcccgcggcctgcgcagcgcgcagagcggctatgacaccgccagccgcagcctcaacgaggcgcgcaccgacttgcaggccgcgcagcacgccgaggcgcaggcgcagagccgcctcgatgccgcggaggccgcactgctcgccggccgcacccgcctcgaccagctgcagtccgacccggcgatgaaggacgcgaatcgcctgaaccaggccgagcgcgacgccgtggcgcgaaccgccgacctcgccgatgcgacgcgcatgagcgccgaggcaacggcccgcctcgagcgcgaacagcgggcgctcgacgaacgcggcgcgcgccggacacaggccgaagagtccctcgccacggcacgcgagggcgtcgccgcggcggcgctggccagtggcataggcgagccgtggcgagtgaatccgctggcggcgctaccggcggccgaactggcgacgctcggcgacctccccctcgacaccgcgcgccaggatctgcgccaggtaacacaggttcgacgcgaacagctcgccttggtacagcgccgcgtcagcgaagtggcgcaggccgaggccacccacgcaggccggcagcaggcccgtgacgaacgcctggacgaagccgaagcggccgccgcccgccggagcgccgccgacgccgcgatcgagaccgaaggcagccgcgtcgtcgatgcctggcaggcgcacttcgcgaacctgcaggtgctgcaggtggctgagccgccgctgcccgccctggcctcatgggtcgccggcctgcaaggcgacaacccggcccgtgtcgccttgtcgtccgcccagcagcgcgccgccgaccatctggcccagcagcgcgccgggcacctcgtcgcgcagaaaatcctgcacgacgagcaagcggcgctgcacaccgagcacgagcggctcgcccagggcgaagacgccgctccgccgccgccgtatacccgcaccgccgaggcgcgaaagcaacgtgcgggcgcgccgctatggcagctggtcgattttcgcgagcacgtcgacgccgcccagcgcgccggcctcgaagctgcgctcgaagcggcaggactcctcgacgcctgggtcaccgctgatggacgactgcaggcagccgagggtgcgccgcccctgcacgacacccagtggacggaacgaccgcaccagggcgcctcgctcgccgcgtggctcgccccgtccgccgttgccgcagtgcccgtcgtcgacgccgcgctgctgacgcggctgctcgaaggcattgcctgctccgcgcacgacgacggccgggccgaaggctggcttgcccccgacggccgctttcgcctcggcgccttggcgggggcgtgggccaaaccgcaggccacctacatcggctacgctgcccgcaccgccgcacgtgcgcgacggctcgccgagatcgatcttcgcctgggcgagatcgccgacgcatcgcgccggaccgacgacgcgctggccgagctcgcccggcagcaggagcgggcggccgccgaatggcagggtgcaccgtccgacgagagcctgcgcgccgcccacgccgacgccgcagcccgcgagcgcgagttccagactgcgaagaaccggctcgacgaagccgatcgccagctgcgcgcagccagcgacgccttgcaaagccgccgcgatgcgctggcagccgacgcggccgacctgcgcctgcccaccgacgccgcggcactggaagccgtcggcgccgcactgctgcatttcggcgagaccctgcacgggctattccaggccgtgcaggaattgcgcctggcggcaaccgaactggcccgccagcaagagcggacacgcgaaaccgaagccgacgccctccggcgcgccgagcacctcaccgagcgccgccggcaggccgacgaggctcaggtgcggctggccaccttgcgcgaatcgatcggcgcgcaggtcgatgaattgcagaagcggctgcgcgaggcacgcgccgcagtgagcgacggcgatcgccatgtgaaggccgcaggcgaatccctgcgcaccgccggcgaggcacgcgcccgcggcgaacagaaggtgctcgacgccgacgccaccctgcaggaacgcgccgacgcccgccaacgtgccatcacacagctgcagagctttgctgccaccggcttgctgtctgcggcgctgcccgaggtcgaactgcccgacctgcgtgcgccatggacgatcgagccggcgctcacgctggcccgccgcaccgagcaggccctggcgcaagtggcggacgacgacgaggcctggacgcgcatccagaaccagatctcccacgactacggcgaactcgggcgcaccctcactgcgctcggccagcaggcccaggccgacaccagtgactacggcatggttgtcagcgtcatttaccagaaccgtcccgagcgccccgaccagctcaccgcccggctcgataccgagatcgcccagcgccgcgagctgttgacggcgcgcgagcgcactctgctcgaaaaccacctccaggcggagatcgccgccgaagtgcagcggctcctgcaggcggccgagcggcaggtcgatgcgatcaacaaggagctctccaagcgcccgacatccacgggagtcaagttccgcctcttgtggcagccgctgcccgaaggcggcgaaggcgcacccgtcggtctggaggccgcgcgcaaacgcctgctcaacaccagcaccgacctgtggtcggccgaggaccggcgggtggtcggcgagatgctgcaccagcgcatcgccgccgagcgcctgaaggccgacgcggtcggcggcagcctgctcgaccaactcgcccaggcgctcgactaccggcgctggcatcgctttcgcgtccagcgctggcaggacgggcagtggcgtccgctctccggcccggcctcgagcggcgaacgcgcgctcggcctgacggtgccgctcttcgccgccgtgtcgagcttctacagccaggcgagctacgtctttgcgccccgcctggtgctgctcgacgaagcctttgccggcatcgacgatgccgcccgcgcgcattgcatgggtctgatccgcgaattcgacctcgacttcgtcatcaccagcgagcgggaatgggcctgctacgccgagctgcccggcgtggcgatctgccagctgcagcggcgcgagggcatcgacgcggtccatgtgtcgcgttggacctgggatggccgggcgcgccggcgtgaagacgatccggatcgacgttttccgactgagagtgaactgcccccacgctcacttcgttcgctgccccccgagggggcgtcgacctcccttggggcggcccggcgagaggtctaa

SEQ ID NO: 49903 - DNA, 1185 bp, Aromatoleum aromaticum EbN1
atggattcccgccttcaacgactgctgggcggccacgccctcgcgggtctgcgcaagcggctgcgccaacgctatgagcgcggcgcatcgacgggtgttctgcgtctcggtgcactgaacgaagccgaacacgcggcgctcgccgcactcgccggccgccccgcgcgccacgtgcgatcgatgcagatcaatgtggcggaaatcgacacggcgctcgcgcgtgccggtctcgccgcctccttgcgcgatgcgctcgagcaactcgacgggccgatcatcgacttggcggcccaacgcctgcaactacgctcgcaatggcaacggctggtcgaagactgcgaacaccccggcctgcgttccgccctgctgactcccgtcggactcgggctgctgaagcgggtgtgtggcagccggcccgaggccggtacccgcctcatccacgacacggatcgggtgctgcggcggctgcccgcagcgggcatcccgcgcgcgcaactggccgttgccgcgctcggcgatgcccatgcgctcgatgccggcagcccggtcgctaccctggttctcacggcgctgcgtcatggcgccgcagccgagctcgaaggcgaacgcacgcgcgagctgtgggccgcagccggcgtgctggtcaacgaactcgcacggccggccctggccctcaacctccccgggccgacgggcgccgaaccgggcgaaccggcctatctctccctgcgccgcctgctgcgttcgccaccagactgggccgtcacgggccgcccggtcttcgtctgcgagaacccgaacctgctcgcgatcgccgccgaccagttggggccggactgcgcgccgttggtgtgcaccgacggcatgccggccgccgcccagcgcgtcctgctcacccaactgcgtgccgccggagcgatgctgcattaccacggcgacttcgactggccgggcctgcgcatcggcaaccagatgatccgcgagcacgacgcccggccgtggcgcttttcgaccgccgactatcgcgccgccgtcgtcggcgcgccacgccccggtcgccccctggacgacgacgccgtcagcgcgctgtgggatgacacactcgccggcgcgatgctcaccgaacggctggcgatcgacgaggaagggctcgccgacgtgctgcttgatgacctgcgacactga

SEQ ID NO: 49904 - DNA, 1488 bp, Saccharopolyspora erythraea NRRL 2338
atgttccgattcaccagcggagaccgagccgagctctacgtctcggtgctgcatgcctttggtgaggccaacgaacgtctcgaaaccgcgctgggactcgacgacgtccgcggtcgcctgcgttcggtcggctggctcgacgcgctggaggacagcgatctgaccagtgcgctggagcagctgcgggactggaacctggtcgacgtcatccagaaccactccgagaactaccggaccgcagccgagtacgagcgacgcaacctccagtattcccttacccgccaaggggaggcagcgctggccggggtcgtgcacgcgatgagcgtgctggcatcgagtggcgcgttgcagactgccgtgctcgatgcgatctcggaccggctgggtgatctgctggagcacggcgaaaccggctccgaccggcaggtgttcgccatcctcaccgagctggaaagtcacctggacgccctgcgcggcaacacaaagcagttcaacggcgagctccagcgtctgctgcgggccgatggcgccgacctggagaccttccacgaggtcaaggcgtcgacggtggcttacctccaggagttcgtgaccaaccttgagcatcggacgcacgccatcgccacccgcatcggccgactcgaggaccacggtgtcgagcaactgcatcagcgtgcgctggcaggcgcggagctaccgcagctttccggtaccgacccggcaccggcgtggctggaacaccggcgcgcccgttgggaaggtcttcgcgcgtggtttcttccctgtgacagcacgccgccgagggtcgagcaacttcaccgggtggcgcgccgggcgatcgtcacgttgcttcaggtgcttgaccggatcaccgagtctcgcaggcgggcgagcagcgcggtcctcgacttccgtgagctggcgcgatggttcaccgtggttcccgagcgggatctgcaccggctgtggtcgacggttttcgggctcagctccgcccggcacgcacatctcgcccatcacgacccggagctggtcagtccgtcggtttcctggtcggagtcgcctccggtcgaggtctcgccattgcttcgcacggctggcaggacggaacggttcgccaggaccgggcgggtgcgtgacgtcaaggcgctgcgggcacagcgtgccgaacgcgcgcgagccgaacgcgcgcagctcgaagcggcgtggaacctgctcgacaccggtggtgccgtccgggtttccgagttcggagaactcgatcacgggatcttcgaacgactcctcgaactgctggggcgggcgctctcgagcgcgcccgacgagtccgggacgcgacgcggcagcactgccgacggccggatcgagatcctgctccggccaccgtcggactcagccgtcgcccacctgaccacaccacgcggcgtgttcagcggcccggactatgagatcgagatcaactctcttggcgcccgagggcacgcatga

SEQ ID NO: 49905 - DNA, 1236 bp, Saccharopolyspora erythraea NRRL 2338
atgagcaacctcaccaaccagttggtcatcgccgagcgcgaggaggtcgcgcgcggaatccggacgctgctgggcagtccactgatcaccgaacgcggttcccccgagacgttcgatctggtccgtcgacggcacgagccgatcggcaagtggttcgactactactgcggctggaagctcgtcgtcgaaccacggctgggttatgcacgactggtcaaggtccgggccgccaccgacgcgagcagacccgccaggcggctgcgatccgggcgtgcgccgttcgaccgcagacggtatgtgctgttgtgcgtcgtggctgccgagctgctggcggctccggtgaccacgatcggtctgctcgccgaccgggtcagccgtgccaccgcgaccgatcaggtggtcgccgcgttcgacaccgccggccgaggtgagcggatggcgttcgtcgacgttctgcggctgcttgagtcctacggcgtgcttgaggtcgtcgacggacacacagagtcctttgtggattctgatgacgccaaggtcctctaccgggtcgatccgacgctgctcttgcatctgctggcggcgccaaccggaccgtcgcgactcgcggtgcccgccgaagaggtgccgctgcggttcgatgagctcgtgtccgagctttcccgcgagcgccgctacggcacggcggatcgggacggcggctcgtcggatgtgcagcgcaacctctggctccggcattcgatcttccgcaggctcgtggatgacccagtgctctacttcgatcaactcatcgacgacgagcgcgcctacctcggatctccgaccggcagacagctgttgcgccgtgccgctgagcagggcggtttcgtactcgaagaacgtgcagaaggaatcctgttcgtcgacccggacgggatggcgaccgacagccgctttcctgacgacaccagcaatgccaaggtcgccgcattgctggtgctggacgagatcgacggccctgtgaccagcgagcagctcgaactggtcgtagcggggatactcagcaggtttccacgctgggccaagacctatcgcggtgaggacggtcccaggcaactcgcggaggatgcggttgaggtgctggtgaacttcggtctcgcagaggtctccggcggtctcgtgcagttactgcccgccgcggcgaggtacgcgctcggcaccgcccgaacaagcgacaccgacgcaacggaggcgtcatga

SEQ ID NO: 49906 - DNA, 3993 bp, Saccharopolyspora erythraea NRRL 2338
gtgaacgcgtcgagatggataccgagccgggcgggcatcctcaatgtctggcgctactacgacgaggtgttcgagttccacgagggacgtctgctgctgcgcggccagaacggcagcggcaagtccaaggcactcgaactgctgctgccgttcctgttcgacgcgagcctgcgggcccaccggctgtcgaccttcggcaccagcgaacggacaatgcactggaacctcatgggcgacggtgcctccggcaccacccgcgtcggctacgtctggctggagttccgcctgcctggcggtccggatcggtggttcacctgcggtgcgaggctccaggccagcaagaataccaccactgcgcacgccgactacttcacaaccggacagcgcatcggcaccgatgtcacgctggtcaacgactccggtcaaccccttaccaaagcggtattggaggaacggctcggtgactccggtgttctgcacggcaacgcgggcgactaccgagccgcggtccgctccactctgttcccgacactcaacgagcagcgctacgacgcgctgatcaccgcgcttctccaactgcgcacaccgaagctgtcgcagcgactcgacccgcaactgctgtccagcctgttgtcccgcgcgttgcctccgctgggacaacaggagatcgccgatctcgcggaaggtttcgagaggctcgaccggcagcgtgaacgcctcgccaacctggacgaagaggtggctgccaccaagacacttgcgtcccgccagaagtcctacgcacagcgggtgctgcgcgccgcggcaggcaacctgatcacctcgaccaccgaactcgacaagctgacgcggaccgcccgggagtcggccgaggagtacgaaggggtcgccgaggcgaagacgagggccgagtggcgtgccgaaacgctggaactcgacatcgagagcaccgagtcgaggatcaccgggctcaccgaaagcgaaaggtacaagaagggcgaggagtacgaccggctccgccggcagacgaccgacgcggaactgcaagcgaccgcggtaggcgaggacgcggccgagaagcgctcgcaagccgacaaggaccggcaggccgcacacgacgccgcacgggagaccgacaggcgcgccgagacggcccgagcgcagcagaccgagacctcgcatgccgcgacgcgcgccgggatgacgagtctgcacgacgagatcgccgcgtcactcgacacggacgtgcagccgcgcagactgctccgcgccgcggtgcggagcaggcacgaacagctggacggggtccgtgccgcgatcggcacccacgaccgggccgtggagcgccgcacgcaggccgaggacgaactcgaccaggccaggaccgtgctttcgcaggcgagggagcgacgggaagccgcagccgcccagcacgaggccgccctcgctcggttgagtgcccgggttcgcgactgggcatcctgctgccgggaacttcacttccccgacccggatgcactgctggagttgatcgagtcggagaccggcctgctcacccacgtcgactccgtcgccgccgcggcgctcgaggcgatcacccgggacgagacgagcaccagcgcccggctggacgccgttcgcgcggaccggaaacagctgtcgaccgaagtcgaccggctcgcgggtgaacaggacctgccgccggatccgccgctgtcgcgcactgccgaccgcagcacgatgacgggcgcaccgctgtggcggctcgtcgacttcgccgacaccacgagtgaaaccgtgcacggtccgatcgaagcggcgctacaggcgtcgggactgctcgacgcctggatcggccacaacggagccgtggcgggccacgacgtcttcgccgatcccgcggtattggccgctgtgccgatgtcgctggctgacgtgctggttccggagcaggacgcggaagtgcctgccgatgtggtgcggaagttgctgtccaccgtcgcgttcggcgacgagcttccacccgagcatccagccgcgatcggtgccgacggcagttggcggctgggcaacgtaaccggaacctggagcaaggagcaccctgctcacatcggtgttctcgcacgccggcgggccaggcagcgccggatcgacgaactccgcgaacgcatcgacgaacacgaccggctgatcgcaaagcacgaagccgcgctggcggcactacgcactcggcgcgatgttctggacggcgaacgaaaagcccggcccgaccatcgtgagcttcacgcgtctgcgacggacctcaaccgtgccggggccgatgtggatgccgcggattcgcaggttcggcggtggattggggtggtgaccgaacgcgagaaggacgtcaagcaagccctgctcgctttgaccgccttggcggcgcagcacaacgtacccgccgatcgagcggcagtggcgaaactgtccgacgctgtcggcaacttccaagaccaggccgaaaactggctggacagctacgccgaactgctgtcggctcgacgtgaggcgagcgcgctcggcgaacaggctcgccgctccggatcgatcgcggaacagcgtgagagtgaggcgggcgaagccgacaagcagcatcgtcggctggtggcgaagctcgaagcgatcgagggcaccgtaggtgctgactttcggcaggttcagtccgagatcgaggccctacggcgacggctgggagacctgcgcggcgagcgcgcctccacccacaaggaactgaaccggctcgccggacgtctcggtgaacttggcgcacgccgcaccacagacgccgaacaccgggacgcggctgtcgagaagcgcgacaccatggcccaccggttccgccacctggccaccggagtctttcccgccgacagcggtatggatgatcttgagcggttcaaggcgactctgacctcctccgacggggtccgcgcgacactcgacgccgcacgcatggccgccgcggcctggccgacgctggcgcacgcaccgaacaacctcggcgacgccgtgcaccgcttgtccgagtcggtccacgagtgccggagcacgctgagttccagggcggatctcgacctggagaccgacgaggacgtccaagtcttcaccgccgtagtggacggggtccgggtcggcgcggcggagctgctcgccatcctgcgcgccgaggcggaacgcagccgccatgagatcaccgagcgggaacgcgagctgttcgacaagaccctcaccggcggcacccgtcgtcatctggccgaccggatccgccaggccaccgaactcgtcgacggcatgaacgcgcgactggaacgtgtgcgcacggcgtcgaacgtcgctgtccagctcgtctggcaggtggcgcccgatctgccggcaggcaccaaggccgcgcgggatctgctgctcaaggacccggtacggctgaccgaatccgaccgcgagtcgctgcaccagttcttccgggaccgcatcgaacaggccaaggccgacggcaccgctgccagctgggaacagcagctggcgcaagtcttcgactacacctcctggcaccggttcgtggtcaaggtcgaccgcgccaacggggcggggtggcagctgctgaccaagaagctgcacggcgcgctgtccggcggtgagaaggccatcgcactgcatctgcccctgttcgcggctgtcgccgcccactacgaagccgcgccggaggcaccccgtctcatcctgctcgacgaggtgttcgtcggcgtggacagcatcaaccgcggccaggtgttcgcgctgttgtccgcactcgacctcgacctcatgctcacctccgaccatgagtggtgcacatacgccgagctgagcggcatcgccatccaccagctcatcaccggcgatgacagcgacgcggtcaccactgcccgcttcacctggaacggccacgacctcgcgccggacggagacgaaccctaa

SEQ ID NO: 49907 - DNA, 897 bp, Saccharopolyspora erythraea NRRL 2338
ttgtggtcgtggctggaaggccatccggtggtcgccatgcagccagcgctgtccgactgggtcgcggcggtgcggcgggccggactcagcggcggttcggtcacacagaccagggaggatctcgaacgtgcgctgaaggttctcgcggtgctgcccgcatccggcatcccactgccggtgttggccgaacagacactgctcgacacacacgcacttgacgacggcaccaggtgttccggcctggtgttgcgcgcgctggccgcgatctacgaccgcccgtcccccgtcgacgcatccgagcggcgggcgttgtgggagcaggcgggcatcaccgacgacgagttgtcgtcggtggtcctcgccggtggcatgcgggttgatggcgacagcgtcgttggcagggtcctccgactctgcgcggacgccggccagccgagctcgctcaccctgcgccagatacgggcaagcgagttgaccagtgttccagagcgcgtctgggtcttcgagaacccgagcatgctcgccctcgcgctcaacaggttcggcgctgcctgcccacccatcgtggtcacctcgggttggcccagcagcgccggagtcctgttcctgcgcaaactcgcggcggcaggttgcgaactgcactaccacggcgacttcgacggcgaggggctgcgcatcgccgcgcacgtcatcgccaggaccggagcacggccatggcggatgagcagcggcgactacctggccgcggtcgccgacggcccgccggtgggccggaccaccccagtaccctgggacgatgaactcgccgaacacctgacccgcatgggtacgaccgtgtccgaagagcgggtggccactactctgctggacgagctcacccagcgacaccctgcctga

SEQ ID NO: 49908 - DNA, 1671 bp, Saccharopolyspora erythraea NRRL 2338
gtgactgtcccggaccacgaagccgacgtgctgcgcgcgggagtggcgaccgcgggccccctgcccgccgatgccgcctcgtccgacgcggctccggccgcgcagtcggccgaggaggccggcgggggcgagcagcggctccagctgttcgtctacctgcaggcgcccgagcaccgcacgtatctggcgatcatgcggttgttcacctcgacgctgctggccgacctgtcggcgggcgaggtcgcggccgcgctggccgccgccgagcgggagggccgggtggccgcgggcgagtccgacctggacaccgtgatcgaccggctcaagcagctggtcaagtggggcaacctcgtggtcgggcggcgcgagacgatcgcggccagcatcgccgagttccagcacggcagcgtccgctaccaggtcagcaagctcgcggtgcgcgtgcagcgcgatgtcgacgccctgctgcacgtgccggagggcgcccgcgaggtgtcccgcgagctgctgcccgcgatcgagcgcggactcggcgagatctcgtcgatgctctcggaggtgctggtcgccgaacgccgcgcgccggaggccaagagcacccgcaaggccaaggagcggctcgccgaacaggtgaccaccgtgttcctgcagcacgccgagctcgccgccacggtccgcgacttctacgcctacctggggcaggtggtgacccgtcaccacctcgcgcccgacgagatctcggggttccgcaacctgctcgtcgagtacatccagatggtcgtggaggacgtgctgcgccacaccggcacgatcgcggcgtcgctggcggggctggccggggtccgctccgagctgctgcggctgctcggccccgccgaccagctcggcaccgacgtcgagcgcgcccggggccgcaccgcgcccgactggcaggagctcaccgactggttcgtcgatgctcccggcaggccgagccaggtcgcggcgctgcgggaggcgaccgcgcgggccatcggttcgctgctggccagcgtcaagcgggcgacctccggtggcggcctggtgcccggccgccgcggcgagctgctgaagctcgcgcggtggttcgacgcggcggaggagaacgacgcgcaccgcatctacgcggcggccttcggcctgcactcctcgcgccacctgctgcccgcgcccgactacgacagcgacaaccacgacgtggcgtggcgcgacggtccggtgctggacgtgaccgtgagcgtgcgcagccggggcgaccgcggcgcgcgcggccgcacctcgcgcgtgctcgacgacccgatgaccgaggagaccctcctcgcccaggctcgcgaggccgaccagcgccgcagcgcggcggtgtcggagctggccggggccggtgccgagctggcggccacgacgctttccaccgacgcgctgggcgtgctgtgcgagctgctgacgctggcgatggcgcagcgcgagggctccgacgaccccggcaccgcgctcgacccggtgcaccggctgcgggtcaccgtccgcccggaaccgggccaccgcaccgagatccgcagcacctcgggcacgttgacgctgcaggacgcggtgctcgacgtccgcggtgacggcgcgatcccgggtaccgaggaggaggcgaccgcccgatga

SEQ ID NO: 49909 - DNA, 1212 bp, Saccharopolyspora erythraea NRRL 2338
atgaacgccgtgcgcaccttcgaggacctgcccgacatcgacgccgccaacgtcgtgcgctgcgcgcgggtgctgctgcgccgcccgctgctgcggccaggggcgcccgacggcgacctgctgccgatgatctaccggcagcgcgccgtcctccaggaggttttctcctcgctgctgggctaccggctggtcgtggagcgccggttcgcccggctctacaagtccgggcccggcgacgacgccacgcgcggcgagtcctcgctgtccccgcgcggttacgcctacctggcgctgacgctggccgcgctgaccggcatcggccgccaggtgctgctgtcgcgcctggtcagcgacgtgcgcgcggcggcgtcggaggccggcatcgcggtggtcgacgacccggccgaccgccgggcgctgaccgcggcgctgcgccacctggtcgccctcggcgtgatcaccgagaccgagggcacggtggcggccaccgacgccgcggccgaggcgctgatcaccatcgacaccgacctgctcggccagctcgtcgcgggtccgctcgccgaggccgacagcccgcgggcgctggtgtcgacggcggccgagccgggtccgcgcagcgtcgagcatgcggtgcggcgccggttggtcgaggatccggtggtgctctaccgcgacctgcccgacgcgcaggccgaatggctgctcaagcacctcgggaccgagtccaagctgctggagcggttcttcggcctggtcaccgagtcgcgcgcggaaggcctggtggtgaccgaccccgaggactacctcaccgacgtggtcttccccgggccgggcacggtcgcgcgcatcgcgctgctggcgctgccggagctgctggagcgcgccgagccgcgcgagtccgacggcaggcacccggtggcggaggccgacctcgccgaggtctgcgcggagctggtcgagtcctaccccgccgcgtggtcgcggcaggcgaccgaggaccaggacgacctggtccgctcggtgcgcgcgctgctggggcggctcggcctgctgcaccgcgaaggcgagcagtggctgctcagccccgccgcccaccgctggctgccgcaacccgacgccaccccggcaccgggccgggaacccgagccgcctgccgccgcacccgcgggctggtcgctgttcgacgacatggaagaggaaggtcaacggtga

SEQ ID NO: 49910 - DNA, 4083 bp, Saccharopolyspora erythraea NRRL 2338
atggagctgccgaacaggtggcggctgcaccgcggcggcatcgtcaacatctggcagtacgccgagcacaccttcgacctctccggcgggcgggcgatcttccagggcaccaacggctcgggcaagtcccgcaccctggagctgctgctgccgctgtgcctggacggcgacctgcgccagctcgggtcgaagggcttcgacacggtcagcatccgcaggctgatgctcgacgagtacccgggcgggcccaaccgcatcggctacgcctggatcgagctgcgccgcgacgcccccggcggcggtgaggagttcctgacctgcggcgtcggcgtcaaggcgtcgaagacctcgcaggccatcagcgactcgtggcggttcgtcaccggcaggcgggtcggggtcaacctgcagcttgtcgggtccgaccgggtgccggtcggaccggcccagcttcgcgagatgctcggtgccgactgcgtgctcgacgaccacgccttccgcgccaagatcgccgccaccgtctacggcatgcccgcagcccgctacggcgacctgctgcacctgcaacgcacgctgcgcaaccccgacgtcgggctcaaggtcctggaaggccagctcgagcagatcctctccgacgcgctgccgccgctggacccgtcgctgatcgagcggctggcgacctccttcgacgacctcgagtcgatccgggagaacatcgtccgcctcagcagcgcggacaaggcgctgagcgcgttcctgacgacctactccggctacgcgctgggctcgctgcgcgagcgggccgaggcgatgcgctcggcgcggacgcggctgcggtcgctgcgcgacgagctggcgaagctggagaagcaggtcgcggccaagcgcggcgaccgcgagtccgcacagcgcaccgtaaccgagctggagcagcgcgagggcgagctggagtccggcatcgacgcgctgcgctcgcacccggcctactcggagctgcagaacctgcgcgaccgcgagcggctggtcgaaagcgcccgctcggcggcggtgacggcgctggacaccgcgagcaagcaccgcgcgcaggaggagcggtcggtggagtcggtgctgggaatgctgcgccggctggcgggcgacgcggacgccgccgagcaggccgcgcagcgcgccacccagcagctcacgaccgccgggctcgacggcgggctcgtcccgcgcccgcccgcggtccccaccgcccaggcccgcacctcgccggaccaggtgcgtaccgcaccggactccgacgccgaacccgcgaccatcgaccgccacatcgcaccggaggtcgacgccgacgcgctggcggccgccatgcgcgaggccgcgtcccgcaccggcgacgccgcgagcgtcgccacggagcgttcggcactgacgctggcactgcaccagcaggccgtggagctggacgcccagcaggacaaggtcgccgagctccagcgcctggcgcgccaggcccagctcaccgcgaccgaggccgcgggccggcgcaaccaggcccagcagcagctctccgacgccgccgcggtctgggtcgagcaggcgcagcgctggggtgccgggtggccggtgcccaccgcggacgatccggtacccgcgccgccgcgcgaccgggagctggtggccgaccggtcggcgacccgcgacgcgcgcgagcggacgcggcgctgggcgcggccgaagctgcacgaggcgcgcggccaggtgaccgaggtcgagcaggagctcgccgagctgcgcgagcgcacgcgcgggtgggagcaggagctcgccgagctgcgcgccggccacgagcggacgccgccgcgcccggcctgggccgacgccgaacgcgacgagagcaaggggcggccgttctaccgactcgtggacttctcgccctcgctcaacgacgacgaccgggcgggcctggaggccgcgttgcaggccagcggcctgctcaacgcctgggtgtcgctggacggcagcgtcgtcggcctggccgaactgctcgccgcaccggaaaagccggccgggtccgccaccctggccgacctgctcaccccggccgccgagccggactgccccgtgccgggcgagcacgtcgccgacctgctggcctcggtcgcgaccgacggcagcgcgggcctgtcggtgtcggccgacggcacctggcgtgcgggtgtgctctccggggcgtggagcaaggacaccgccgagtacgtcggcgccggggcccgcgagtcggcccgcgcccgccgcatcgcggagctggaggacgagctctcccagctgcgcgggcggatcgccgacgccgagcgccgccaccgcgacgccggcgagcacacctcgcggctggagcagtacctggagtcctaccccgacgacagcgacctgctcaccgcgcacgccaagctcgccaccgccctggaaagcgcccaggacgccgagcaccgcgccgcgcagctgcgcgaacagcacgagcaggccgaccagcggtggcaggccgcgcacgccgagctcgtccgttcggcgggcgaggccgacctccccgccgacacccgggcgctcgacgccgcccaccgcgccgcgtcggaggcccgcaacggcatcgacgcgctgcgcgaggcgatcgaggcgcggtgcctgccgaccctggccgaccttcgcgaggtctcgctgcaccacgacgtggcggtcgccgaccggatggaggccgagtcgcaggccgagcgccgctgcgccgactacggcgagcaggccgccgggctcgccgagctgacctccgcggtcggcggggaggcgcagcagatcgccgacaaggtgggcgacctggagcgggagcgcgcggagctgcgcagcgaactgccgcaggcgcgggagcggatcagctccctgcgggagtcctcggctaggctggagacgcagctggagaacaagcagtcccagctcgcgggccgggagcaggaggaagcatccaccaccgaggctttcggcacggcgctgcggatcccggggctgtgggcggccgccgcggtgtccgacgagctcccgccggaactcgacgacgcagcggcgctgctggtggaaagcgaccgcaagggagcatcggaaaccacggtgctcaaccgcttccaggccctccagcagtcgctgagcggcaactacgacatcagcgccggggagcagaacgggctgctcacggtcaccgtcaccggtgaggagggcccgcagccggtcgccgacgcggcgcggcgggtcagcgagcgcctcggcgagcagcgcggctacctcaacgagcggtaccagtcgatcttcgccgactacctcatccgcgacctggccgaacggctgcgcgggcagatcaccgtcgccgaggacctgtgcaagcggatgaacgaggtgctcgacggcgcccgctccagccagggcgtgcacgtgcagctcgaatggcagccgtcggcggcgctgggcgacgacatccggcagacgatcgagctggtgcgcacgccgttcgccgaccgcagcgacgaccaggacgcgctgctgcgccgggtgttcaccgacctgatcgagtccgagcgcgacagcacctccggcggctacgccgagatcctgtcccgggcgctggactaccggtcgtggttcgccttcaccgtccgggtccgcgacaccggccccgagggcaagccccgggtgcggcgcctgcgccagctctcgtcgggtgagacgcggctgatctcctacgtgacgctgttcgccgccgcggcggccttctacgacgcggtcagcgtctcggccggtggcggcgggccgctgcggctggtcctgctggacgaggcgttcgagcggctcgacgacccgacgatcgcgcggatgctgggactgctggtcgacctggacatggactggctgatcacctggccgagcggctggggcgtctcgccgaagatcccgaagatgcacatctacgacgtgctgcgaccgcgcagcgggcacgggatcgcctgcacccacaccacgtgggacggccggggtctggagcgggcggatggctga

SEQ ID NO: 49911 - DNA, 1206 bp, Saccharopolyspora erythraea NRRL 2338
ttgcgcgggttgtgggagaaggcccgcgaggtcctggagtcgccggagcagccgtcgaccttccggctcgaactgcccgacgaggagacgcagaccgcggtcggcgaactgctcggccgcccgatgctgggctacggcacccggatcaaggtgtccactctggacgagcgggtccgcggggccggtctcggagtcgggctggcggaggtgctggaaatcctgcacggcaggccggtgtcccgcacgtcctcgatgtcctccacttcctcggtcgcggacgagccgcgtgccgcggtgcgcgcggcgctggccgagcactcgctgggcgacgcgccgtgggccgacgagtgggcccggtggctccaccagtacgggcgcgtgcccgaggacgaactcgacgtcgtcgtgcggcgtgccgccgccgtgctggctgagctggcgctcgaccgcgcccccgtcgcgtggacgtcccgcgcggacctggcagcccgcaccggtgacgcgcacgggctcgacagcggcacgacgctgagccgcgtcgtcctgcgggccgccgcgctcgcccacgacgtcgcggcacccggcaacgagcacgagcgccgcgcgctgtgggaacgctgcggcgtcgccctcgacggcgtctcggcgacggtgctgtgctggtcgctgccgctcaccggcgccgacgactggtcgcgttcggtgctccggcgcacggcggcgggtctgccgtcgcacctcacccacctcgacctccaggcggcgcccgcccggctcgtcgagcccggcacgaccctcacggtgtgcgagaacccccgcgtcctggaggccgcgctgcgggacgacatcgggcacccgctcgtctgcctgtccggccagccgacgacggccgggctcgaactgctgcgccgcctcgccgacgacggagcggtcctgcgctaccacggcgacttcgactggccgggcgtgggagttgcgggggccctgcggacccaactcggcgtcgagccgtggcgcatgacggcggccgactaccgccgggcactcgacgacgcggcccgcgaccgcatcgacctgccttccctcatcggggcgccggtggaaaccccgtgggacccggccctggcggacctcatggccacgtccgggcgcgcggtggaggaggaaaccctgcttccggccctcctggcggtccttcgccggtag

SEQ ID NO: 49912 - DNA, 1605 bp, Sorangium cellulosum So ce56
atggaagagtcgccggccaagcttccagccttctcttacctgacggccgagaacgcggcgctctaccgcgccatcatgcgctcgttcgtggaggcgcgggagcgcttcgtgctgcacctccggccagccgacgtcctccgcgccgtccgggagaccggcctcgacccggccgccgtggacgcggcgctccagaagctctgcgaatgggggaacctgcaatcccacctggacacggcggatgtcgcgaccgtcgaggagttctaccgaccgcgcttcctgtaccagctcaccccgcagggagaggcggtggagcgcgcggtggacgcctatttcgaggcgctcgcgcagcgcggcgagctccaggccgcggcgctcgacgacatccgcaccttgctggagagcgtcgcgcagatgctctcccggccggagctcgacgacagcgcggtccacctcgcgctctcggcgctgcgcgcgcgcttcggcgagctcaccacgcaggcgcaggcgttcatgggcagcctccagcgcagcatcgacctgcacgcggccggcgtggcgagcttcctcgcgtacaagcagcgcctcatcgactacctcgagcgcttcgtcggccagctcgtcatcgccacggcggacatcgcggagctcctcggccgggtcgacggcgcggcggcgcagcggctcgcggacagcgccggcaggcgcgaggtcgccgacgcgctcgacggcgaggaggccgaccagcgggccgcggccgcgcggtgggaggcgcggatcgaaggcgtccgcggctggttcatcggccggccgggcgcgccgtcgcaggcggaggagctcagggcccgcgcccgcgccgccatccccgccctgctctccgccgtcgcgagcctgcacgaccgccgcttcacccgcagcgaccgcgccgccgatctccgcaccctcgcccggtggttcgccgaggccccgagcgacgcggacgcccaccgcgtctggcgcgccgcgttcgccctctcctcgacccggcacctcttcgtcaacgaggaggcgatggccgagcgcgaggccgcgccggtccccgccggccgctcgtggctcgacgcgccgccgctccgcatctcgccgcgcctccgcgccaccggccggcacgcgcggcccgggcggccgagcgacgtgatcgaccgttcccgcgagaaggcgctcctgctcgcgcacgaggacgaggacgaacgcgccatcgccgacgcgcgcgcccggctcgccacaggccggccgacgcgcctctccgagctcggccggctcgatccgctggccttcgagatgctcctcgactggctgggcgaggcgctcgccgcgggcggcggcgagaccacctcggccgacggggcgatcgccatctccctggtccccacgaacgacggccaggtcgcgacggtggagacgccatcgggcaccttccgcggaccggatcacctcctgacgctccgctcgctcgccgcggatgaagcgcctgggtcccggcatcgcgcgcccgcccccgaggacgcggccccgtcctggcaccgcgcacccgccccgccgggaccttcgcccgcggagcgcccatga

SEQ ID NO: 49913 - DNA, 1302 bp, Sorangium cellulosum So ce56
atgacgcgcgccctcgaggcccaggagcgccacgagcagcagagggcgctgcgggccctcctgcgccaccccctcctgccggccgcaggcgcgcacgccgcgtcgttcctgctcgtgcggcggcacgcggccgcgctccgcgcctggctcgcccgctacccccgctggtcgctgctcgtcgagcccgagcaggcgcgcctgcgcaagacgccggccgatctcgccgacggcacgcggccggcgctcgacccgcaccacggcaccccgttcacgcgccgccgttacgtgctgctctgcctggccctgctcgcgctggagggcgaggaccgccagaccacgctcgggcggctcgccgagcgcatggtggggtatttcgccgacgacccggcgctcacccgcgccggcgccttcgagctcgacgtgcaggaccagcggcgcgatctcgtccacgtcgtccgcctcctcctcgatctgcgcgtgctcacgcgcgtcgccggcgaggagcagggcttcatcgccgatcagcgccgcgacgtgctctacagcgtgagccggcccgccgtcgccgccatgctgaacgtacgccgcgggccctcgacgctggaggcgaccggcgccgcggacctcgccgcgcggctcgccggcatcgtcgaggagctcgccccggagacggacgacgcccgcaatcaggcgctgcgggcccggctcttccggaggctcctcgacgatccggtcgtctactacgaggacctcggcccggaggagcgcgcgtacctcacgacccagcggcccttcatcgtcgacgagatcgagcgggcgacagggctcgtcgccgaggcgcggcgcgaggggctggcgatggtcgatcccgacgaggagctcagcgatctggcgatgccggaagagggcaccgaggggcacctgacgctgctcgtggcggagtggctcgcgggccgcgcgcgcgacggcaggctcgtcggccgggccgcggtcgagcagcgcgtggcggagctcgtcgacgagcaccgcgggcgctggaggaaggcggcgctcggcgcgggcgccgaggtcgagctcaccgacagggcgctcgatcggctctccgcgctccgcctgctgcgctggacgcccgcggggatcgcgccgctccccgccatcgcccggtacgccgtcgtcgcccctcccggcccctcgggaccggcgggcgcgccgcgctccggagcgccgctggccggactgagcgctccggccggccgggccgacggcgcgccgcgcgcgaggacgccaaggaagacgcgatga

SEQ ID NO: 49914 - DNA, 4131 bp, Sorangium cellulosum So ce56
atgaccctgccttcccccgtgacccgacgctggcagccgctccgcagcgggctgctcaacctctaccgctacgacagcgaggagttcgtcttcgagggcggccggctgctcctgcgcggcaacaacggcagcggcaagtcgcgcgtgctcgcgctgcagctgccgttcctgctcgacggcgaggtgagcccccaccgcctggagccggacgccgacccggcgaagcgcgtcgagtggaacctgctcctcggccgctacgacgagcggcgcggctacacctggatcgagctcggccggcgcgacgacgacggggccgagcactacctgacgctcggctgcgggctgcacgcggtcgagggccgcgggctcgcgggcaagtggctcttcgtcacctcgaagcgcgtcgggcgcgatctgttcctgcagagcgccggcgccgcgatcggaagggagcggctggaggcggagctcggcgggagcggcgaggtgttcacgagcgccgcggcctaccgcgccgccgtcgatcgccggctcttccagctcggcgaccggtacggcgcgctgctcgatctcctgatccagctgcggcagccgcagctgtcgcgcaagctcgacgaggcgcagctctccagggcgctctcgagcgcgctgccgcccgtgccgcccgcggtcgtggccgatctggccgagtccttcaggagcctcgaggccgatcgcgcggcgctcgacggcttcgccgcggcgagcgcggcgtcgtcggcgttcctcgacgagtaccggcgctacgtgagggtcgcggcgcggcggcgcgcggccgcggtgcggagcgcgcacgccgcgtacgaggccgtgatgcgggagctgcgggcggcggaggcgggcctcgacgaggccagggccgccggggagcaggcggccgcgcgcgaagaggaggccgagcgcgcggcgcgcggcgcggcgcgcgaggtcgagaccctgagccggcgccccgagatggaccaggcgcgcgccctcgacgaggcgcggggggcggcgcaggccgcggcgaacgacgcgagggaggcggagctcgagcaccgccgggccgtcgagcaggccgagcggcgcggcggcgagcgcgaggaggccgccgcgagcgcgcgcgccgagcgcgacgcgctcgcggcgacggtcgccgcggcggagggcgccggcgcggaggtcggcctgcccccgccggcgctgcccggcggctgggaggccgacccgggcggccgcgcgctcccgggcgcgcaggcgcgcttcgacgcggccgtggccgagcgccgccggggcgtcgcgcacctgcgcaagctcgacggcgagctcgcgtcggcgcgcgccgcgcgggagcgcgccgacgcggcgctggagggcgcggccgcgcggctcgagcgcgcgcgggagcgggcggccgcggcgctcgggcagcgggaggcggaggcggacgcgctcgtcgacgcgtggcgcgcgtgggcgcgcgggctctcggagctcccgatcggaggcgcggacgtcgaggacgtggccgacgcggtcgcggcgtggaccgagcacggcgacggcgagagccccgcggcgctttcggcgcagcgcgcgctcgccgacgccctggggcggctcgccgcggcgcgggccgaggccgatcgcgccctcgccgtggcggaggaggcgcggcgcgcgctcgaggaggagcgggccgccctcgagcgcggcgcgcaccgtggcccagagccgccgccgtcgcgcgcgccgggcgcccgcgaggggcgccctggagcgccgctgtggcagctgtgcgacttcgatcccgagctcgacgcggccggccgggcgggcctggaggccgcgctcgaggccgcggggctgctcgacgcctgggtgacgcccggaggcgagctcctggccgagggggtgctcgacacggcgctctcggccgccggggagcaggcgctcccgctcgagcagcagctcggccgctggctgcgcgcgtcgcctgcgctcgcggccgagggagcggccggcgcgccgccggtgccgccggacgtggtgcgggccgtgctgacgcgcatcggcgctggccgcggcgcgggccggatctgggccgacgtctcgggcggcttcgcgctcggcccgctgcacggggcctctgccaaggccgaggcggagcacatcggccacgcgtcgcgcgaggcggcgcggaagcggcggctcgcggcgatcgaggaggcgctccgcgaggcggcggcggcgcgctcggccgccctgaccgcgcgggccgagctcgatcgccgcgcgcgcgtcgcccgcgaggaggcggccagcgcgccgtcttccgcggcgctgcggcgcgcgctggccgcggagcaggcggcggaggcggccgtggtcgacgcccgcgccgcgctcacggaggaggaggagcgcgcgctctcgcggcggcagcgcgaggcgcaggcgctcgcggagcgggaccgcgccgcggcggacctcgggctcgcggcgtgggtcggggcgctcgaccggcacgacgccgcgctcgcggcgctggtccacgccgcggcggcgatgtggccgacggcgcgcggcgccgccgccgcgctccgccgcgcgcagaaggccgaggaggaggcgcggctcgccgaggggcgcgccgtctcccgcgccgaggcgcgccagcgggccgcctcccgcctccacgaagcggaggtgcaccgggacacgctggagcggacgacgggggcgctcgtcgacgagatcctgcgccagctcgccgaggcgcgggagcggcgcgaggcgcgcgacgcggagcaccgcgcggcgcagcgcgcgcacggcgacgcgcgggtggccgaggcgcgcgcgcaggcgaagatcgagccgcttcgcgatgggctcgagcgcgcggcgcgcgagcgggcggggcacgtcgaggcgctcgcggcgatggcgcgggcgcggctcctgtccgtgctggagatggcggacgtcgagcccgggagcgagggggccgccgggtggtcgccgacgcgtgcggtggacgtggcgcggcggatcgaggcgtcgagcggcgacgtcgagcacgacgacagggcgtgggagcggctgcagcggggcatcttccggcacgtcgaggcgctgcgggacgcgctcctgccgcacggctatgggccgcagacgacgagcgaggacggcctcgtcgcggtgacggtgccgttccaggaccggacgtgggccgtgcacgacctccaggcgatgctggccgacgaggtggcgcaccgccggacggtgctcgacgcgcgcgagcgcgaggtgctggagaaccacctcatcggcgaggtggcgagccacctgcacgatctcctgcaccggtgcgaggccatggtgcgcgacatgaaccaggagctcgccgcgcggccgacgagcaccgggatgaggctccgcttctcgtgggcgccgctcgtcgacggcccgcccgggctcctcgaggcccggcatcggctgctgcgggcgggcggcacctggtcgccgggcgaccgcgcgctgctcgcgcggttcctgaaggagcgcatcgaggaggtgcgctctcgcggcgaggcggcgagctggcaggagcagctctcgacggcgctcgattaccgggggtggcacgcgttcgcggtggagcgccaccaggacggcgcgtggaagcggctgacgaggcgcacctacgggacggggtctggcggcgagaaggcgctggcgctgacgatcccgcagttcgccgcggcggccgcgcactaccgcagcgcgcacccgcacgccccccggctcatcctgctggacgaggcgttcgtcggcatcgaccccgacatgcgggcgaagtgcatggggctcctcgccgcgttcgacctcgatttcgtgatgacgagcgagcgcgagtgggggtgttacgcgacgctgcccggcctgtcgatccaccagctcacggtgaggcccggcatcgacgcggtcggcgtgacccggtgggtgtggaacgggcgggagcgggtgcgctcggccgccgcggcggcgccgccggagccgccgcccgacggcgtgacggggccgctgttcggcggcgggccctcgtga

SEQ ID NO: 49915 - DNA, 1263 bp, Sorangium cellulosum So ce56
gtgaccggcgatcggcttgtcgtgagcggcgatcggctgcgggcggtgctcggcgcccgggagctcgggtggatcgtggacaaggcgcgccggcggctggagcgcggcgagcccgtgcggggcgccgtggtgcagcgccgcgacccgacggccgcggagcgcgctgcggtcgagcgtttgttcggccgggtgacccacggcggcgcgctgcgggtctcgctggacgagctggcgcagctcctccgggacgcggagctctgcgcgggcgtggaggcggcggtcgaggcgctgacggggccgttcgtggaccgtcgcgccgaggcggcgcggatcgaggcgggctggcaggcggtcttcgacgaggccgcggcgtcgggcgatggccggcccgaggtcggcgtgtggctcgatgatcttcgcgcgtccggcctcgtgcggcgactctcgtgcggcgacgtcgaggcggcgcggaatctgctccggcaggccgtctcggtggtgcgccgcctgccggccgagggcctgccgctcgcggagctcgcggcggcggtgaccggggacagccatgcgctcgacgcaggcgcgccgctcggcgcgctggtgatccggttcgcggcggcgctctccggggtgacccgctgggagcgcgcggcggagcggcgggaggcgtgggaccgcgcgggcgtgctgctggacgacctcagcgccccggtgctggtgctcaacctgggagcggcgccggacagcctcgccgggcgggtgctggcgatgcacgcggcggcgggggagccctgccggctctcggtccggcagctccggcgcgcgccgccgtgcttcgaggtggcggggcgagaggtgttcgtctgcgagaacccggcggtcctctcggcggcggccgaccgcctcgggccgcgcggggcgccgctcgtctgcgtggaggggcaggtccggaccgcggcgcggctgctcctggagcggctccgcggcgccggcgcgacgctgcggtaccacggcgacttcgactggggcggcatccgcatcgggaacgtggtgatcgggaggcacggcgccctgccctggcggtatggggccgcggactaccgcgcggcgcccaaggggtcggagctcgccggggtgcccgtggccgcggcctgggacgacgagctctgcgcggccatgtgcgacgagcggcgcgcggtgcacgaggagggggtggtggaggcgctgatcgaggatctgcggcagggagagggcgcgggctga

SEQ ID NO: 49916 - DNA, 1671 bp, Cupriavidus taiwanensis LMG 19424
atggcaagcgtggccggcgcgtctggggcgcaatcggacgtcgagcctccggccaccgcgggcccatctgaaaacggtgcatctccatttcgcttcgatgcgcacgggaccaggtccgcgttcgcggatgccagaagaggccaactctttagccatgtcagcgcggaccatgcgacgatctaccgcgcgattatggatgtgttcgcgaaggcgaaggcacagtatcgcctccaacttcgtcccgacgaggttctcaccgagatcgccctgccggccggtattgcccgtccggacatcgatcagctcacccagcacctagacgcgctggtgcgctggggaaacctcgaggcccagcaggacatggcgcgctggtcctccatcgcagatttcaagcgcaactacaagatctaccgcctctcaaagcccggcgaggccgtcgaggcggccttgcagcgctacgacgaagtccttcgacaacgcgcggagcttcagacggtggctctcgcggatatcgaacaacttttgcgcgcccttgtcgccctcactagtagcaaggagctggatgcagacaaagtacgatcgacattgcgagagttgacgggtgtgtttgccacgatgacggagaacgccgccgccttcatggctggcgtggatcggcaccttaacccgagcgacgtcgaggtcaacaacgtcgagcgttacaagaagcaactgatcgactacctcgagcggttcgtgagcgacctcgcgcgccgcggtgacaccatttccgatctcatccaggcacttgatagccatatagagagcatgctcttcgcggttgcagagcgcctggcgccagacgccgcacccgacgccgagcaagacgctgagcaagacgccgcccgtcgcacgtgggaatctactgacgcagtcctcgccatccggcggcaatggaaggaccgatggactggcctgcgtggatggtttgtcaattccaacaatgacccatcgactgccgacctgctccgccagaaggctcggtcagcgatccgtcagcttgccatcgcgatcaaggagattaatgatcgccgcaccgggcgcagcgaccgctccaccgacctgcgcacactagcagcatggtttctctcatgcgatagcgagacagacgcacatcgacttgcgcgggtggctttcggtttgaacccggcccgacacctaccgctggacacggcacaagaggaatatgtcccgcccagcaccccgtgggctgagggaccggcgctccggatctgcccccgtctgtatcagttgggcgacggcccacagcgcggtcagttgccaggtgtcaaggatcgttccgccgatcggcggcgcatccagcagttgatggaagacgagtcgaatcaggttgcggaagcgaggcgccgttttgccacggcgctaccaatgcggctgtctgagcttggcgccctgaataccaacgaattcgccctcttcctcgcactgctaggcgaggcgctcgaccaccaaatcggccccgacgctcccaccgacatcctgaccggcgatggatcactgctcgtgcggcttgaaccgctaggtgcggacactcacgctgagatttcaacaccaagcggtacgctcgccggccgagaccacctaatcaccataacacctgcctggtcatga

SEQ ID NO: 49917 - DNA, 1266 bp, Cupriavidus taiwanensis LMG 19424
atgaccgaggaagacaacgtgtctggcgccgacgcgcccgccccctctgaaatcgccgcgaagccacatgcctatgagcgcgaggaaatgcgactcgccatgcgcgctatcctgatgacgccgttgatgtccccggatcatgacgaattcgggctggtgcgacggcacgccaagagtttgcaggagttcttgcgccgcgaaacaggctgggatctgagggtgtcaccgaatggcgcgagactgcgcaagatacccgcagatttccaagacgggactcgagggattcccgactttgaccgccggcgctatgcgattttttgcttggtctgcgcgattttgaatgggtcgcaagcgcagatcatgcttcaacatctaggcgagaagctgaccctggcagcatccgacgaagcgcttaccgcccgcggattcgtcctgaaactaacctcccgttccgagcggcaggacctggtcacggttctcaggaccctgctgaccctaggcgtactccagcgtgtagacggcgacgaagacaaatacgtcgccgagcagtccaccgaggtgctgtacgacattaaccgttggctgctgaacgaagtcattaccgcggtgcgcggtccgtcgacgggcattcgggacgccatttcgaccgatgagcgtgtggagtggctcgcgaaggaaacagtcttcgacaacgaggacgcgcgtcgcacggcgatgcgccatcacctttcacggcggttgctcgacgacccggtgatctactttgctgaccttgacaaggaaacccacagttacctcgccacccaacgcggcctgatggcggcccgattgtgcgatgccatcgagatgtccgccgagcaacgcatggagggcgtcgcactcgtcgatgaacgctgtcagatgacagatctgaaaatgggcggtgacggcacgattggccatatcaccctgcttgttgccgagtacctttcccagaaacacattcgggcaaggcgcgacacgtacgaactggctgcttattcggcaataacggacatcgaagacttcgtacggagttgcatccccacacacggctcacattggcgcaaggaggcgcgtgagcccggcgctgaacgatggctcgccgaggaagccctcgaacggcttgagaaactgaagttggtggggaaagacggggagcgagtcttcccgcttccggccattgccagattcgcccttgggacacctaaagtcagcaaacccgccagaacgcgagcctatcgatga

SEQ ID NO: 49918 - DNA, 4146 bp, Cupriavidus taiwanensis LMG 19424
atgaaagataccgaccacactgatccccggcacgacgatgagatccctacgccgacgatgtcccgctggcaaccgatgcgaatcggtctcattgacatttacctatacgacaatgaagagttcgctttctatgatggcaagctgaaccttcgcggacgcaatggtgccggcaagtcgaaggtcttatcgctgaccatgccgttcctgttcgatggctttctgatgcccagccggatggagcctgacgcggaccccgggaaaaagatgctgtggaacctgctccaagggagcatcgaccgccgcattgggtatgtctggatggaattcgggaggttacgtgacggcgatgaacccgagtacgtcacgttgggagccggattgtctgcggacagtcgccggcccaatgtggaccattggttcttcatgatcgatgccggcgtcgctgggagggtcaacgatgacctctccctcattggcaacggcaatcgtgcactcaccaaagacgggctgcgagaggtgctggcttaccgggggcgcgtatttgatacgacgcaaagctaccgcgacgcggtcgatgagcgtctgttcggggtgggcacgacgcggtacgacgccttgatgaatacgctgattcagttgcgccaaccgcaactgagcaaacgccccgatgagcagttgctctccaatgccctcacccaatcccttacgcctctaccagccaacctcgtcaacgacgtatctgaggcactggtattgcttgatgagcaccacgacgaacttgagaaattcaatgagctgcggaggtccgtggcaaagttcgagcgccattatcgtacctacgccggcatgcagacccggcgcaaaggaagactccttcgtcaggcccatgtggacttccagacggcaagttctacccgccacgccgccactgaccgggtgagcgccgcgatcgcagcccaggcccgcgtggagattgaactcaccaccaccaattcagagaaggaacgacagcaaactcgcgtgaacgtcctacgagatgatccagccaacaaggattcctatcggatggcgatggctgcggaggatgcggcagagcgccggaaggcaaaggacgaagccgcaaccgaactcgacgaacgacgccgcaagctagacgcctcccacacggttgcaggcgagcgaaaagaccattttgacaagatggggcaccagattgccgacatccggcacgacgtcacacgcattgcgggtcttgccggcgtgagccgagcgattgcgaacaaccgactcatcagcagtgaagcgacggatctggtgggggccgatgacgccgcgatccttgctgcgaagaccgcgctctttgccgaaaccggcgtgcggcgcagccagatttcggagatgcgccgaatgcatggcgtcgtgaacaccgcgcagaacaaattcgagatgtttcgagatctccgccacgacaaggagagcgcgaagaaagccgcggaagagcgcctctcacaggccgacaatgaactggacgctgcctcggacgacctcctcgatgcgtggcaacgccattttgtagggctgcgtcggattaaggtggacgttgatggcaacatggaaagactggcggagtggattcagcggctagaggaaaagaatccctgcctgactgcgctcttgtcgggacagcaagaagctgtcgaacagattgccaaggaagaggcggaaatcaagctcaagtggctggcgaacgaacgcttggctgccgacttgcagggcgagcgagaaaagttggtcgccggcgttgatatccctcctcccccacaatacacccgtgactatgaggctcgctcaggccgacctggcgcacctttctggaagcttgttgatttcaagccgaaggtacggccggaacaacgcgccggaatcgaggcagcgctggagggctcaggactacttgacgcgtgggtcagccctaacggcgcgatcacggacgccgaaggcaaggttttgcctctggacgccaactggagtcaacggtcgtcggtcgcacaatcgccattgaagacccttctcgcaccgagcatcccgccggaatgcgacgtgccgacggccgtcgtcgagcggttactcgccggaatcgcctgttcagacaacgatcccggtggtgaggcgtggctctcgcccagcgggcggtaccgccttgcgtcgctggcgggcgcatggacgaaacccgcgcctgcctatatcggcacggcggcaagagcccaggcacgggcagcgcgtctttccctcatcgatgaggctgaaaaggagcttggtgccgaacgaacttcgctgcgcgaacagatcaatacggctgtccaggaacaggagcaagtcaggaaagagctcgaggacatccccagcgatgtcgggctacgccgcgcacatctggcggtgaagagcgccacggagagcctgaacagcgcaaaggcggagttttcacgtgcagataccgactgccaagaagccgaacgtaggttgcagcaagccgttaataggcggctggaagccgcgacggacatgggcctccccgtcgagccgtcgggtctcacggccgtcgaggattccttgaccgagttggatccgaaattccatgggcttgaccacctagtgtacgggatccgacaggcgtggcgggattatgaaactgcctcacgccatgaagacgattgtcgccaggaattcgccaaacaggaggcgatcctcgcgcaatgccagattgacgacacacgcgcggaagcccaacttgcggttctgcgggaaacgataggcatgcgtgttgatcaatacgaagagttgattaccgcggcgaggcatgctctcagcattgctactgacgcctataacgcggcaaatgccaaacaagttgcggcggcaaaagaggaaggtgctgcgaacgaggcgctcacatccgctgagacccaggtgaaggaggcggcagacaatcggtttcgggccatcgatgcattcaagcaagttgcggaggccggtctgattcctgcagcgctccctgccatcgacattcccgatctcacgcggccatgggcggtcgatgcagccttgggcctcgcgcgcaaggccgagcaggaattgagcaacctcgaagacaccgacgaggcgtggaggcgttcacaaagcgtcatcaataccgagtttcgcgaattggatcatgcgctcaatgcactcggtcatgaggcccacggcacccagtctgattcaggcatttcggtaaggattgtcttccaagggaaggaggaacagccgcacgctctgcttatccttctggatgaggagattgtgaggcgcgaaaacctgctgagtgtgcgcgagcaagagatccttgagcagcatctcaagcaggacatcgccatcgagattcatcggctgcttaggaccgccgaaaagcaggtgcatgagatcaacagggaactggacaagtatccgaccgcgacgggagtcaagttcaagcttcagtgggagccgaccaaggacaacgccggctcaacggcgaacttcgagcgcctgcgtacaatcctcctccaaaaaagcgcagaactcctaacagaagacgagcgcaaggagatcggggattggttcctccagcgcatcaaagcggagaacgagaacccggactcctatggccaaaaatcggcagaccggctcgcaagagcactggactatcgtctctggcaccgcttccgcgttcagcgctctcaaaacggcggatggaagtcgatttccgacccggcatccagtggagaacgggcactgggcctgactgtgccgatgattgcggccgtggccaatttctacaaccagagcgcgggccaactcgccccgcgattgatcttgctggatgaggcgttcgccggcattgacgaccacgcgcgtggggactgcgccaagctgatccagatgttcgatctggatttcatgatcaccagcgaacgtgaatgggcatgctatccagcgttcccaggcgtatcgatctgcgaactgcaacgggcgcccggcgtggatgcggtctttgtctcgcgttggaagtgggatggaaaacaacggcgacaggttaccgggcgtagcaatcccacgacgttgcaatga

SEQ ID NO: 49919 - DNA, 1311 bp, Cupriavidus taiwanensis LMG 19424
atgactgatgcgccctctcctcgccttcacaaccttctcggtggcgatgaccgggcgtcgctacgggcgcgcctgcgcagggtcttcgagcgcgagcgccccgaagcacccattgcaggcgtagtcaatctgaggggactcccccctgcccatatggagacgctccgcctgattctcgggcgcccgtaccggcatgccgactccatttccttttgcctcgaggacgtcgactgggcattacaccgagccgggctcgcgccaagcctgcggattgcgctcgaaatgttggatgggccaatcgtcaacaaggaaaaggcccgcaccgacgaaaggctcgcgtgggagggtgtggccgacagttgccaggacccgcccctgcaaagatttttggaatccagcctggggcgcggactgatcaagcgcttgtcaacgcgaagcccggaacgtgcgcgaatcctctgtcgccatgcggccgaggtcctccagaggctacccctgaagggcgtgccacttgcccagttggcggccgagacccacggtgatgcccacgcactggatcgcaacaggccaatcgcgtccctggtcctcgccgtgttacgccagtcgtccacaacacccgacgacgaaaatgacgacacgacccgcaccgccgacgaggtggcggaggagcgcgcgcgcgatacctgggcccgcgccggcgtactggtcaacgagctggcccggcccgcgctatgcctgaacctcccgatgcgtccctccgacaggagcagattcatgcgtggcgagcccggctatctgaccctacgccagctagtgcgtaatcccgaaacatgggaagtcgcggggatcgccgttttcgtttgcgagaacccagaggtcgttaccatcgcggccaacgcccttggtgcatcgtgtgccccgctcgtctgcaccgatggcatgccggctgcggcgcagcggcatcttctcaccagcctcaagcgtagcggcgccgacttgcactaccacggcgactacgattgggaaggcattcgtataggtaaccacgtcatgcgggcgtatggcacgaacgcctggagatttggtgccgcagaatacgagcgcgtggttgctgcgacccgcgacaaggacttccccgccaccggcgaacctgtcctagcaacctgggagccggaattgaccacgatgatgaagctccgtagtcagtctgcgccgaagagcgtgtcgtggaggatctattgggcgacctggcggcgggattccgcacctaggcggaaaaaggagttggtatatcttaacgtgccgccttag

SEQ ID NO: 49920 - DNA, 1569 bp, Streptomyces scabiei 87.22
gtgttcgagcgtgatgacgcgggagtgtccgagtcattcgatcttgattcgttgacggtgggcgaccgtctgcggctgttcaatttcacgcagcgcgatgatcccttggcatacctgtgggtgctgcgggcgatgaacgtgctgcgcgcggtacaccagttgcaggtccaccccgacgatgtggcgaatacgctgaacgagctcgcggcagcgcacgacgaggtaccagccgccgccgacttgaacctgcgcgggatgctcgacaacctctcctcggacaacgagcaggtcctctaccgggtggaggacccgttgcgttgcggcaatctggccgcgtaccggaaccggcagtcggtctaccagttcacggagatcggctaccgcgtctactgcgcggtggaagaggtcatcgggtcccgggtacaggacgcgaacctgtcgcggctggtgtttgccgacatcctggcggacttcaaggcgctggcgactgcgaaccgggagggcgaccaggacgaggtgtatcgcaagctcgcccggctggacaacgtgctggaggacatgacgcagcgggcggcacggttctatctgaccttgaacgacgttgcgcgtacgacggacgtctccccggagacgttcctgcggtacaagcacgcgctgctggcgcatatgagtgagttcacggcagagctggagcgctacgctccccggctcgccgaggccgtgaacgaggtggaagacagcggggtggagacgctgctggaacgggctgcggcggtggatgaacggccgatgatgcggccggccgcgcggcttgaggactggcggcggcggtggatgggcctgcgccagtggttcttggctgacagccctggggagaccaaggccgctcagctgcaaggcgctacccgcacggctatctcgggagtcattggactgctgcggcaggtgacggagtcgcgtcgaggcggggtgagccggaccacccagctaaggcatcttgccgcctgggcggctgctgcgccggatgagcaggcggcgaacgcgctggtgtccgccgctttcgacctgcgttcggtgcggcatctgtcgggtgcccacgacgacgatgaccagatttcaccgcgggcgacgtggtgggatgcacccggtgtggagatcagcgtcagcctgttccggcatggcaagcggcctgcgccgggcgggccgcagccagtccggacgcgtcgtggcgcgcacgcccggctgcgagagcagcagctggcggatcgggccgcggaacgggaggccgccacggatctcctggaccacggtccccacgaccgggtactgaacgaggcggagacccgagccgtgctcaagctgctgacccgagcactccaggcacgaacggtcgtcgcgggccggctgcgttcagggattggcagcagcgacgtgctgacgctacgtctggtcccgaacgagcgcggcagccggctgcggacggagaccggcacactgcgcctgcccggcttcgccctggagatcaagcctcacggtgcgatgcgccggcgccgaacggagaagccctga

SEQ ID NO: 49921 - DNA, 1419 bp, Streptomyces scabiei 87.22
atggctgcctatcgcgtcgccgcctcggtggagccggcggacctcggctcgtaccagcaagctgcccggctcatgctgctgcacggcgttgtcaccgagagctatccccgagccaaggcgcttgcgctggtgctgcagtggtcagacgaactggccaaggacttccgtgacttgttcggctactccttgcagacaagcgcccgtcacgcacggctgctgcggcggctggacgcgttcgatgccagccaggcgttcctcacggtgaagagcaagaggccgttcgaccggcggcgtctggcctacctgtgcctgatcctggcctgcttgcaccggtcacgcatcgagatcaacctcgccgatctcgtcaagctgctcacaccgtccgccaacgcgatcgagcacctgggcttcgatgcgacggcgccgggccacaaggacgcagtcgtggatgtgatggactggcttgtcgaccggggtgcactgcggatctccgatggttcgatggaggactgggcccgtgaccacgaccgcggcgacgcgctgttcgacatcgaccacgacacttgcgcggcgcttttcaggccgaacaagccgctgcagcatctggtcagcgctgccggtctgctggacaccccgaccgccggcaccggacgagacccccgtcggcgatttgctgcccagcgagctcgccgactgctgatcgagcacccggtggtctacttcagcgacaccgacgcggagacggcgatagcgctgcgccagcccaccctggcggaggacatcgcacggctgaccgggttgccggtcgagcgccgcgccgaggggatcatgctcgtcgacatcactgggcacttcactgacaagcgattccccggccgcggtggagcggtcaaccgcactgccggactgctgctcgcaaagatcgcggacttgcgggaagacccggaccgggccagcagtcttcagtacctcctgcccgccggaccaggggaggaccacgcggacctgctcagccgcatcgacatggccctgccgcaggccggcacgctcgaagccttggcgcacgacccgcatgcggacgctggttggcacgcgaacgaggccgatccggacgtcccagagcatgaagggcagacgggcctgcctttcgtggaacacggcacgttggagcagatgatcaccgagctctacgaagagttcgggccctcctccttcaccaacaagtggcaggccgaccccagcgggcttctggcagaggccgtcgctctcctagcggatctacgcctggtccatgtcgtccccggcggcattctgatccggcccgcggccggccgctaccgcaacatcaccgccgtcctgccgcgcccagcgcacggccagttcgctttcgacttccccactgaggacacctctcgatga

SEQ ID NO: 49922 - DNA, 4320 bp, Streptomyces scabiei 87.22
atgacgctcatcccccactctcgcaccgctgacgagtcggaggttcgcttcaagcccacccgcgccggagtgatcggcctgtgggactacaccgacgaagaatttgtcttcgccgatggccgactggtcctgcgcggacacaacggctccggcaagaccaaggccctcgaagtgctgttccccctcgtgctggacggtgtcctcgacgcaaggcgtctcgatccgttcagcggcgaggaacggaccatgaagtcgaacctgctctacaaagggcaggagtccgcctacggttatgtgtggatggaatttgcccgcaccgacccggacggggaggtcctcgaagccgtcaccgtggggatcggcatgcgggtgaccaaggcgatgtccactcccgcccgattcttcttcgttaccgacggccgagtcggcatcgacttcggcctgctggacggggcctcgcgcccgctgcgggagaaggccctggaggcgctgctgggcaagaaagccatcttcgatacggcggaggcgtatcgggagaagatcgatgaccggctgttcgggctgggccgtgagcgctacagccagctggtcagccttctgctccagctgcggcgcccgctgttggccaaggatcttgacccggtcaagctgtccgagacccttaccgccggcctgcgccccgtcgacgatgacctcatcctgcaggccgcccgcgacttcgagaacctcgccgagatccaagcgctcctcaacgccctgacgggggcggataccgcagtccgtaacttcctacgtgactacaccacttacctgcgcgcccatgcccgtgaccgcatcgaccacgtcaccggtcgcatccaggacacggccgcccagtgcgagaagatcatggaagcggcggaggaccgccgtgcctcggagcggcagctggcttccgcacagcaggagcgggatgccgctgagcgccagtgcaatgagctcggcgcccgcctggccgagtacaaggaccacgacgccatcaagcagcgggacggcctcaaggaactacgcgatcgcgtacacgcggaacgccagggcctcgccgagagcgaacgccacctcagccaggcccagaagagcttggctaccctcaaaggggaggcagagcgcgctgtccagcggcacggtgagctgcgcaaagcggcctcccggcacaccgacaacctgatggacgccgcgcgcagctgcggcatcctgcacgacgacgccacgctagatcttggtgccgagctcgacacagacgtggcaggtcgcgtagccgcgcggcgcagcgaactgaaggacgtacacgcccacctcggcgcatttgaggacgccaggaaagcccaggaacgcgagcaggatcactgcgacacggccagcggtgagctgaccgaggccgaacgacagtccaccgcagcagctgagcggctcgagatcgcccgcaccacggccagccaggagctggacgaattcatcagccgctggagcagcggcaacgacatcacggtcttggccgccagcgacggtgacgcgctacgcgcggccgtcgacgcagtgggggaacccgaagcggccccgctcttggaggtgtttcgttccctcaccgaccagcgccgtaccagggccgcggcccgcgtcgataccttggagcgggagcacagcggcgctgcggatgctctgcgcagcagacagggtgaacgcgacaccgtggccgccgaggctgatgacgcgcccccgcccagtgacctgcgtcctgccagccgcgacgagcggctcggcgcgccgctgtggcagctcgtacagttcgccgatcacgtcccggaggaccatgcagccgctgtggagggcgccctgtacggggccggcctgctcaccgcctggctgcaccccgaccccgtgctcaccgaccaggcactgcacgacaaggtcgccgacgcctatctgcgcccgctgcctcccgcacagcggcccaccggacccaccctggccgacctgctggtcgtcgaagatcagcagctcgtcgccgccgcgaccgtacaggctgtcctggcatccatcgccgtaacggacgacatccccgcaacggacgacgcactgcccgctcctgcggtcacgaccggctcgcatttcagcctcggcgtccaggtcggtgcgcatcccaaggagcagccggagtacatcggagccaccgcgcgagccgcccgtcggcgcgaacggctgcgcgtgctcgacgaatccatcgccgccctggaagctcagctcgccggcatcgaagagcagcagcggtacgcgcaagaggcattcgacgacttcgaccgcgccaggcgcgagctcccccgcacccggccgatcaccgaggcggtaggcgaggtggccgtggtggcggagaaggtcaccggtgcccgccgccgcctcgccgaagcccgcaagcggctcgacgggacgatcgcgcgcgcccatgagaagaaccggcagcttcggcatgcggccacggctgcacgactgcccaccgtccgtgaggaactggacaaggtagcccaggcgctcgacgacttcgccggcgccggcaaggcgctctccacctgccgtgagcaggccgatgccgccgagcgcgacatcgccggccgccgggacatcatcgcaacgcagaccgagtcgtgcacagaacaggctgaggcgctgcaggcgcgtaaggacgcgttcgccgttcaggaggaacgtctgcgcacccaggaagcaacgctcgaagcccctctgcaggagattctgcaacagatcgcggacgcggaagtgcagctcaccgcagcgcggaagacgtacggccgtgcgaggaaggaagcggaagatcagcgagaccggcttctgaaggctgaccatgccctggagttcggcagtacagcactggccacggccgtggctgagcaggtgcgcaccacgctcacgctggagccgtatgcccggcccgacctcctcggcctcctcgaagcgaacgccgagaccgtctggttgccgcaggacgtgtggccgagccccgagcaggcagtccagaccctcatggacagcctgacctcgcccggcacctccctcacgggcatccaggccgcccagaacgtcgtccccgcatccgtcgcctccttgatcaacgcgctcgacgaggcgacccggggccggccgatcaccgcgagcctcctgaagaccgtgacaaccaagatctctaccgctatcaccgcgctggaggcagccctgctggagtccgatcagggttacctcttcgagtgggagccggccggagacatcatcctggcccgggtcaccgacagcgaagggccagctcccgtagcggacttcgcccgccgcctggccgaacagctggctgatcagagcgtgctgctggaagacaaggaacggaccgttctggaggacggcctcctgaccgggctggccgagcagatccacgatcgcaccgtcgccgcccgcgacctggtcaggagcatggacgccgacacccgctccaagccgatgtcctccggtcagacggtgggcatcaactgggtgatctccgacgcgctcaccgactcccagcaggctgtcaacaaactgctcgacaagaacgcctccggtctcggcccagccggactggccgatctccgctcccacctgcgcagccagatccgcaccaaggccgctgccgacaagaagaggagctaccagcaagtgatcgcggaagtcctggactaccgcacctggcgcaagttcgagctccgtctgttccggccgggcatgagcgaggaggagcggaagaagggagaactgctcaccaaggccaagcacagcgtgatgtccggcggcgagaagtccgcctccatccacctgccgctcttcgcagccgcccacgcccagtacacctccgcgtacccgacctgcccgcggctgatcgcccttgacgaggctttcgctggcatcgacgagaagtaccgtcccgatctgcttgccctcacggccaagttcgacctcgacctgttcatgacgggctacgacctgtggatcacctaccccgacgtgcctcagatctcgcactacgacatgaagcacgacgaggcgtctcacaccgtctccgccatgctgctcgtctgggacggcgaacagatcctcgatgacctcgaataccccggatccgacgatctggccgccgaactcctcggcttcacgccccgtcggcacgttcccgcccaagcaggactgctcgcagacatccccgatgacgagccgacgaacgacgataccgaggaagcagaatga

SEQ ID NO: 49923 - DNA, 1332 bp, Streptomyces scabiei 87.22
atgaccggatcagcagcggcatacgagcgctaccgggcccccgagtttcgccggctcctggccgctgcccggcgctcgctcgagcgtcacggtggcgaggtcaaaggctccatcggcctggccaacccgaccactgcagaacgcaacgccatcatcggcatcaccggcacataccggccagccgacgtccgccgcatcaccatccctctttcagtgctggagcagagcgtccgcaacgtcacgggcatgtcgctcctcgatgtcctggaagagatcggccccgagcttcgctttcgcgccgatgagcggacagcggtcgatcaggcacggcaggcgatcctcgctgaaggcgaagccagcccgctgcacgccgcgcactcctggtaccggcagtggctggccagcctcgcatcatccgacggcacgatcacagcactgatcaataaagaggacacccacctcttcagccaggccgtccgcgtcctggaacacctctacaaccggcccagtgacgctccaccgatcatgctccctgccttggccgacgccaccactggagacaccaaagccctcaaccccggccgcggctcgctgccgactctggtcctgcgggccctggccatggcacgtggaaagccgctcgaatcaggagccgaggctcggcgcgagctgtgggacgccttcgacgtcatcgtcgacgacctcgccagccgtgtcctcgtcctcaacctccccgcgaccggccaggggctgggccagtggctcaccgacgccgcccgctacggcactcccttccacgtcaccctccaccagctcgtcaccctcccgatcgccgtggacctgccaacggtgtacgtctgcgaaaacccggctgtgctccgccgcgccgccggtgagctcggtgccggcagtccgccgctgatctgcgccgagggtcgtccctcgaccgcctttcaccggctggcgcgactgatcatcgaaactggcggcaccttgcgctatcacggggacttcgactggcccggcatcgacatgaccaaccagctccgcgcccgctaccaggccgaaccctggcggatgagcgccgcggactatctcagcgctgttcgcgccgacagcgatcacgtccccctgagcggcaaggcacaggacaccgcctgggagccggggctcgctgaggccatgaagcgggagaaccgcgcggtctacgaagaggccgtcgctgacgtcctcctggcggattggaagggaccggcaaggaaagagggcgatgggcaagcgcatgggccacggcactgcctcccgcaagagatggcggcgcgtgcccagtga

SEQ ID NO: 49924 - DNA, 1818 bp, Streptomyces scabiei 87.22
atgttccggttcacgacgggggagacacccgacctggacggagcggtcctggacgccttcggcgcggccgccgagcatctggagacggagctggggcccgacgcggtccgtgcgtggctgcgccgggcggaccgggcgacggcggccgaggacggtgaactgcacgagacgctggggagactcgtgcggtgggaactgctggacgtgctgcacgaccaccacgcggagcaccaccctgcggcggtggagcacgagccgcaccaccccacggtcgaggagcacaaggcgcaccaccgcactgccgaggagcaccagccgcaccaacccacggccgaggaacgcgagcgccacaccccgcggtacgcgctgaccctccggggcgaggccgccctcgcgggggtccggcgcacgctggaggttctcggctccgcgggggcgccgcggacggccgtgctggacgcgatcgccgaccggctcgacgagctgtgcctgctgtccggcgaacccgcctcggccgaccgccggatctccaccgccctgcgcgagctggagggccacatggagaccctggtggagaacgccacggcgttcaacggcgaactgcagcggctgttgcgcgacgggagcgccgaccctgaggcgttccgcgaggtcaaggccgccaccgtcgcccacctccaggagttcctggccgacctcgaccgacgcggacgggcggtcgccgccgccgtggcccgggtcgaggaacggggaagcgcgggcctgcgcgagcgggcgctgcgcggggccgaaccgttgccgtcggccggcccggaccgcacggcggcctggctggagaaccgccgcgcccgctgggccgtgctgcggtcgtggttccggccggaggacggggcgcggccccggatcgagcggctgcacgacatcgcccgccgggccgtcgtctcgctcctggaggccctggagcggatcgacgcctcgcgccgcccctcctccggcgccgcgcaggacttccgggaactggcgcgctggttcgccgcggccccggcggaggaggacctgcaccggctgtggtcggcggccttcgggctgggcccggcacggcacgcacacctcgcccaccccgacccggaactggtcccctcgtcccgctcctgggccgagaccccgccggtggaggtgtcggcgctgctgcggagcagcggacgcacggagcgcttcacccggacggcccgggtgcgcgacgtcacggcggtcagggcggagcgtgccgagcgggcccgcgcggaacgggccgaactcgccctggcctgccggatgctgcggacccgcggcccggtgcggctgtccgccttcggcgagctggaacccgcggtcttcgaccgcctgctggatctgctcggccgcgccctgtccacccggccggacacggccggcctgcggcgcgccaccacgggcgacggccgggtggagatcgtcctggccccgccttccgacgcccgtaccgccctgctgcgcacggcgaggggcacgctggccggaccggactacgtcgtccgcatcacggaggccggcggggcggcgacacccccggcgacacccccggccccgccgtcggcggagccggcacccgcccggcagccatgggcacagccctcggtgcggaccgggcagcccgccggaccgccgctgcgaggcacccaccccggacacctcccggcccccgccgcccggccgcccctgccaccgtcctccgacgtgcctgtggccgccttcccggccggccactcgtccgccctgcgccgggagacggccggatga

SEQ ID NO: 49925 - DNA, 1308 bp, Streptomyces scabiei 87.22
atgagcagcctcgccaaccaactggccgccaccgagcgggaggaggtctcccgcgccgtccgtatcctgctcgcccgccccctgctcaccgagacctccgacccggccggcttcgccctcgtacgccgccgccgcgagccggtggcccgctggttcgaccacacctgcggctggaccctgctggtggaaccccgccgcggctacgcgcgcctcgtcaaggtccgcgccgacccggacggctcccgcccggcccgcgccgcgcgagcgggccgggcccccttcgaccgccgccgctacgtactgctgtgcgtgaccgcggccgaactgctgacggcaccgatgacgaccgtcggcatgctcgccgaccgtgtcgtccgggccacggccgccgacccggccctgcccgcgttcgacccggcccgccgcgcggaacggacggccttcgtggacgtgctgggactgctggagtcgtacggcgtgctgcacgcggtggacgggtcgaccgaggcgtatgccgcgtccccgcacgccacggtgctctaccgcgtggacaccacgctgctgacgcgtctgcccgcggcgccggtcggcgccgcccgccccgccgtacccccggacgagatgcccgcccgcttcggcgacctcctcaccggactggtgcgcgaacgccgccacgacggcacggacaccggcgacggcacggccgacgacgagcacgccgggacggccgccccggacgcccggcacggtcggcggctgcggcactccgtgctgcgccgcctcttcgacgaccctgtcctgtaccggtcggacctcaccggcgaggaactggcctacgtcacctccccggccggacgccagaccctgcgccgctcggccgaacaggccggcttcctgctggaggaccgtgccgagggcttcctgctcgtcgacccggacgcgctggccaccgacgtccgcttccccgacgacacctccaccgcccgggtcgccgcgctgctcctcctggaacccctgtgcgccgagcccgccggactcctccccgagcagctcgccgaggccggcaccgacctgctgcgccgcttcccccgctgggccaggacctaccggcccgaggaggacggcggcgcccgtctgtccgacgacgccgtggacgtgctgtgcgacatgggcctggcccaccgcgccgccggccgcaccctcgcccgcccggccgcacaccgctaccgcctgacggggacgacgtgtccggccccgggcaccccggaaacagagaagtcagcgaagacagaggaagacgagcagtga

SEQ ID NO: 49926 - DNA, 4134 bp, Streptomyces scabiei 87.22
gtgagcctgacagagcttcccctgccccggcggcccgaggccaccgagcccgcgcgcccggcggcgcgagcggcggacacacccggcggccgctggcagccgcaccgtgcgggcatcctcaacgtctggcgctactacgacgagacgttcaccttccaccggggccgcctgctgctgcgcggccagaacggctcgggcaagtccaaggccctcgaactgctgctgcccttcctcttcgacgccagcctccgccccaaccgcctctccacgttcggcggttcggaacgcaccatgcactggaacctgctgggcgagggcgccaccggcaagacccgcgtcgggtacgtctggatggagttccgccgcgtcgacgacgacggcaccgagcgcttcttcggctgcggggcccggctgcaggcgagcgtgcacaccaccggggtgcacgccgactacttcaccaccggcgcccggatcgcccgtcccgacggcgtactcctcgtcaacgaggcgggacagccgctgacccgcgccgccctcgccgaagccctcggcgacaggggcgaggtgcacacctcggccaccggccaccgcaccgccgtacgccgtgcgctcttcgccgggatgggcgagcagcgctacgagtcactgctgtccgccctgctccagctgcgccagcccaaactctccgaacgcctcgacccgtcgctgctctccaccctgctgtcccgtgccctgccacccctgggcgagggcgagatcgccgaactcgccgcgggcttcgaacagttggaccgtcagcgcgaacacctccgccggctcgacgacgaggtggcggcggccgagaccctcgcccaggggcagcgggcgtacgcgcgacgggtcctgcgcgccggagcggccgcgctgatcgaggccaccgccgagacggacgacctcacccgcgccgcccggaagagcgccgaggagctcgcgcaggccctcgcccagcgcgagtcggcccgggccctgcgcgaggaacaggaacggcgggcccgcgccctggaggagaccgtcgagggcctgcggcagagcgaggcgtacgggcggggcgaggaaccggaccgcctccgccgccgcaccgaggacgcggcggccgccgccgcccgtcggcgcgccctcgcccgggccgctcgggcggcggcggagcaggaccgcgcgcacgccgacgggacggcgggccgggcccgcaccctcgacgagcacgcgcgcgccgccgccgaggaagcacgcggatcggcccggccggccgggctggagtccgtccacgacgaggccggcactctcctcggcgccaccgacgacccgcggcgggccgcggacgacccggcgggcgagagcggggcccggcaggcccgcctgctgctgcgccgcgcggtcaccgcccggcggcagcagctcaccgccgtcaccggggcgatggacgagcacgaccgcgcggtacgcgaccgggacgccgccgaggatctgctggacgaggcccgggcccggctcgcggaggcgagcgccctgctggacgaggccgccggcgcctgggacaccgccctggccgcccagggcgaacggctgctcgcctgggccgcgagctgtacggaactgcgtatcgccgaccccggggaactcgcggcgagcgcggcggccgagtccgaggtgacggccctggtcgaagcggccgcccgcccgtcggaacgggagatcgccaccgcggaggccaccgtacgggccgcccgtcccggcctgtgggacgagcggggcaggctcgtggaggaggtgcggcgcctcggcgacgagcccgatctgccgccaccggccccggcgacccgcaccaccgtccggtcggccaccgcgggagcacccctgtggcggctgatcgccttccgcgaaggcgtcccgatgcccgtccaggccgccgtggaagccgcgctggaggcgtccggtctcctggacgcctgggtcggcccctacggcgggatcacgctgcccgggcacgacacccgcgccgagtccgccctggccgtcgccgccccggggcacagcctgctggcggtgctgcggcccgaggagggcatcccggtccccgtcgacaccgtgaaccggatcctcgccggtgtcgcgttcggagcgggcctgcccgacggccacgcggcggccgtgtccgcccagggcgcctggcgtctggccctggccaccggctcctggagcaagccggaaccggtctacatcggcgccgccgcccggcagcgggcccggcagcgcgcgatcgccgcactcaccgacggcatcacccgcaccagcgcctccctcgccgcgctcgacgaccgctcgcgcgagatcgccgcccgccgggcgaggctggacgccgacctcgccgcccgccccggccaccgggaactcgacgcgccgcgccgcgaacgggaccgggccgaggaggcggtggccgcccacgacgacgccgtacgccacgccgccggccggctggcgcggtgcgaggacgcggtcgcgggcgccctgcgcgagctctcccgccgggccgcggagcacgagctgcccgccgaccgcggccggctgcgggcgctcgacgccgctctcggccggttccgggacaccgccgacggctgggtggacgcccgcctcgccgcgcacggcgcggccgacgcggcccggcaggcggccgcacacgcggccaggtcggggcaggtggccgacgaacaggccggggacgcggcggcggccgaggcggaggcggcggctctgcgggcgcgcctggaggcggcgctggccgggaccggcgcggaccaccggcagatcgtcgcgcggctcgccgaggcgcgtgaggaactgcgccgctgccgggaggcggtcgcccgggcggccgatctccagctccggctggagggccgtgccggcgggctgcgggccgtcagcggacaggacgccgcacgacacgaacaggccgtcctggcccgggaccgcgccgcgcaccggctcctgcatctgtgcctggccgggctggccgaggacgcgggcatcgcccccggaccggacgccggtgtcgcacccggaccggacgccggggacgaccccggggccgtgctggagacggcccgtgccatcgcggcgaagtggcccgcgctcccgtacgccccacgccacctgggtgaggccgcgacccgcctctcggaagcggtccacgaggcacgccggcacctgggtgcccgcgccgacctggacctggcggccgacgacgacgtcctggtcttcagcgccggcctggacggcgtacgcgtgggagcgacgggactgctccgcgcgctcgcccggcagcgcgacagcagccgcgacgacctcaccggcggcgagcggcatctgttcgaccagatcctcaccggggacgtccgccgccatctcgcggtcctcatccgccgggccggtgaactcgtcgaccggatgaacgagcacctggagcgggtccgtaccgcttcccgagtcgccgtccggctcgtctgggacgtccggccggacctgccggacagcacccgcaccgcccgggagctgctgctgaaggatcccggccgggtcaccgagtccgaccgggaggccctgcacgccttcctccgtgcccggatcggggaggccgggggcagcgacacggccgtgacctgggaggaacagctcggcgaggtgctcgactacaccgcctggcaccgcttcaccgtccacctcgaccgggccggtggcaccggctggcagccgttgacgaagaagctgcacggcgcgctctccggaggtgagaaggccatcgccctgcacctgccgctgttcgccgccgtcgccgcgcactacgaggcggtgcccctggcgccccggccgatcctgctggacgaggtcttcgtcggcgtcgacaccgtcaaccgcggccaggtcttcgccctgctcaccgcgctcgacctggacctgatgatcacctccgaccacgagtggtgcacctacggcgagctgcccggcatcgccgtccaccaactcctcaccgacgggcacgacgacgcggtcaccagcgcccgcttcgtctggaacggcgcggatctggagacgggatga

SEQ ID NO: 49927 - DNA, 1533 bp, Streptomyces bingchenggensis BCW-1
atgttccggttcaccacggtggagaggtccgatctgtacggggcggtgctggacgccttcggcgtggccggcgagcacctggagacggcgctggggctcgacgccgtgcgcgagcggctgcgcggggtgggctgggcggcggcagtcgaggacgacgagctgcatgaggtcttgcggaaactcgtgcagtgggagctcctggacgtggtgcacaaccacgcggagaactaccgcacggccgaggagtacgagcggcgcaaccttcagttctccctgacccgcaagggtgaggccgctctcgccggggtgcggcacgcgttggaggtgctggcctccacgggggcgctgcagacggccgtgctggaggcgatcgccgaccggctcgacgagctgtgcctgctgtccagtgagcccgcctcggtggatcggcggatcttcagcacgctgcgggagctggaggggcatctggaggccctggtggagaacaccaaggcgttcaacagcgaactgcagcggctgctgcgcgccgaggccgcggacctggaggtgttccgtgaggtgaaggccgccaccgtcgcgtatttgcaggagttcctggtcaacctcgaccggcgcggccaggcggtcgccgccgccgtcgcccgggtcgaggagcgggggatcgccgtgttgcgcgagcgggccctgcgcggtgccgagcttccgccggtgaccggcgagaatcccgcggccggctggctggagagccgacgggcgcgctgggcgggcctgcgggcgtggttcctgccggacgacggggcgcggccccggatcgagcagttgcacgacatcgcccggcgggccatcgtctcgctccttcaggtcctggagcggatcaacgaatcgcggcgccgctcctccagcgctgtgcaggatttccgggagctggcgcgctggttcgcggcggcccccgcggaagaggacctgcaccggctgtggtcggcggccttcggcctcggcccggcgcgccacgctcacctcgcccaccccgacccggagctgatcccctcgtcgctggcctggtccgaggccccgcctgtggaggtgtcggcactcctgcggaccagcgggcggacggagcggttcacgcgcacggccagagtccgggatgtcgcggcggtcagggcacagcgcgctgagcgggcctgcgcggagcgagcggagctcgcgcgtgcctggcgggcgctggagacggacgggcccgtgcggctgtcctccttcggcgcgctggatcctgctgtcttcgaccggctgctcgatctgctgggccgggccctgtccgcccggccggatgcgggcggcctgcggcgcgccacgacgggcgacggtcgggtggagatcgtgctgtctccaccgcccgacggccgcgtcgccctgctgtgcaccgcgaagggctcgctgaccgggccggactacgtcgtccacatcacggcggtgggcggagcgagcgcgttcccggcccttcgcgccacgcggcaggaggcggcgggatga

SEQ ID NO: 49928 - DNA, 1347 bp, Streptomyces bingchenggensis BCW-1
atgagcaccctcgccaaccaactggccaccgccgaacgggaggaggtcgcccgcgccatccggcttctcctggcccgccccctgctcaccgagggcgccgacccggccggctttgagctggtacggcgccgccgcgaaccactgacccggtggttcgactacacctgtggctggagcctggcggtggaaccccgtcgcgggtacgcccgcctcgcaaaggtccgcgcggatccggacgggtcccgcccggcccgcaggtcgcgttccggccgggccccgttcgaccgacggcgttacgtcctgctctgcgtgaccgcggccgagctgctgtcgatgccgatgacgaccatcggtatgctcgccgaccgcgtcgtgcaggccacggctgccgaccgggcgctgcccgcgttcgacccggtccaccggccggagcgcatggcgttcgtcgacgtcctgaagctgctggagtcgtacgaggtgctgcgagtggtggacgggacgaccgaggcgtacgtagcgtcggcggaggccaaggttctgtaccgggtggacaccaccctgttgatgcggcttcctgccgcacccgtcggcgcctcccggctcgccgtccccccggacgaggtgcccgcgcggttcgcggaactcctcacggggcttgtgcgggagcgccgatacggcggcgcggtcgtcgacgggacggcggacgagacgcacagagagaccgccgcgtcagacgcccagcgcaatctgaaactgcgccattcggtgctgcgccgtctcttcgacgaccccgtcctgtaccggtcggacctcactgaggacgagttggcgtacgtcacttccctgaccggacgccagatcctgcgccgctcggtcgagcaggccggcttcgtcctggaggaacgtgcggagggcttcctgctcgtggatccggacgcactggccaccgatgtccgcttccccgacgacacctccaccgcccgggtcgccgcactgctcctcctggagccgctctgtgccgcgcccgtcggattgctgcccgagcaactcgtcgaggccggagctgatctgctgcgccgctttccgcgctgggccaaggcgtatcagtccgaggacggcgcggcccggctggccgacgacgccgtgcgggtgctgcgtgatgtcggcctggtccaccggaccgggggccgtgtcgtcgcgtgcccggccgcgtaccgctaccgcctgacggagagggccagtacggatccggagaacaagcgcggaccggagcggggcacgagcccgcgtgagacggcaggtacctcggtttccggtggcgtcgccgtggaaggagacgagcagtga

SEQ ID NO: 49929 - DNA, 4158 bp, Streptomyces bingchenggensis BCW-1
gtgagcgtgatggagcttccccgcccgcgacggcaggagtccatcgagccggcggggacactgccgcaagcggcggaccccgcccgcggtcgctggcagccgcaccgcgcgggcatcctcaacgtctggcgctactacgacgagaccttcaccttccaccagggccgcctgctgttgcgcggccagaacggctcgggcaagtccaaggcgttggagctcctgctgcccttcctcttcgacgccagcctccgccccaaccgtctgtcgacgttcggcggttcggaacgcaccatgcactggaacctgctgggggagggcgcctccggcaagacccgcgtcgggtacgtgtggatggaattccgccgtgtcggcgacgacggcaccgagcggtggttcggctgcggggcgcgcttgcaggcgagcgtgcacaccagcggggtgcacgccgactacttcaccaccggcgccaggatcgcccacccgggcggtgtgctcctcgtcaacgaggcggggcagccgctgacccgcgccgccctcgccgaagccctgcgtgaccgcggcgacgtgcacgcctccgccaccgactaccgcgcggccgtacgacgcggactcttcgccggcatgggggagcagcgctacgagtcactgctgtccgccctgctccagctgcgtcagcccaaattgtccgaacggctcgatccgtccctgctctccaccctgctgtcccgcgctctgcccccgctgggtgaaggcgagatcgccgaactcgccgagggcttcgagcggctggatcgccagcgcgaacatctcaagcggctcgacgacgaggtgacggcggccgagaccgtcgcagcccggcaacgcgcctacgcgcgacgggtcctgcgttccggttctgccgcgctgatctcggcgaccaccgagatggacaacctcacccgcgtcgcccgccagagcgccgaggagctcgaacaggcgctggcggaacgtgagtcggcccaggcccggcgccaggaacaggagacgcgcgcgcacgccttggaggaggccgtcgagggcttgcgcgagagcgacgcgtacaagaggggcgaggaactcgccgggcttcgccgccgcactgaggacgcgtcagccgccgccgagcgactgcgcgccaccgcccaggccactcaggtcagggcggaggaggaccagcggcgcaccgatgaggtggcaggccaggcccgcacactcggcgagcacgcgcgcgaagccgccgaggaagcacgccgatcggcccggacagccggtctggagtccatttatcacgaggccaggacaatcctcgacgtagatctcgcagagcccctgaccgacggcgtggggggagcgacgggcggcagccgacccgagggctccggtgccacacccaccgcgggcgagaacggggcccgacaggcccgccggctgctgcggggcgcggccatggcccgacgccagcaggtcaccctcatcaacgaggcgatggacgagcacgatcgcgcggtacgtgaccggggcgcagccgaggacctgctggacgaggcccgtacccgactcgcggaggcgatcgcccggcggggcgaggcgtccgcggcctgggacgacgcccttgccgcgcaggcggaacggttgcttacctgggccgagggctgtacggaactgcgcatcgccgactccgaggccctgatggccggggcggcgaccgaggccgaggtgacggccctgaccgaagccgccgcgcgcccggtggagcaggagatcgccacggcggaggccaccgcccgagccgcacgtcagggcctgcgggacgagcggagccgacttgcggaagaggtacgacggctgagcggcgaaaccgacctgccgcccccacctccacccacccgcaccacaacccgcacggcgacggccggggcgccgctgtggcggctggtcgccttccgcgagggcgtcccgctcactgttcaggccgcggtggaggcggcactggaggcgtcgggcctgctcgatgcctgggtgagcccctacgacgggatcacgttgccgggtcacgacacccgggccgaggctgccctggccgtgaccgccccggggcccagcctgctggaggtactgaggcccgaggaagacatccccgtcccggccgacaccgtgacccgcatcctggccggtgtcgcgttcggcacacatctgcccggaggccacccggccgccgtgtccaccgacggcgcctggcgtctggcgctcgccaccgggacgtggaacaagacggaacccgcccacatcggcgccctcgcgcggcagcgggcccggcagcgccggatcggcgaactgaccgagcggatcggcgagacgaacgcctccctcgccgcgctcgacgaccggttgcacgacctcgacgctcgccgcgcccggctggacgccgaccgcgcggcccgccccgaccaccgggaactcgacgcccggcggcgtggccgggatcgtgccgaggaaagggtggccgctcgggacgacgccgtacgcgacgccgccgcgcgcctcgcgcgatgtgagaccgaggtggcgggcgcgctgcgcgcgctcagccgccgggccgcggaacacggactgcccaccgaccgtggccggttgcgtgcactctccgtcgacatcgacaggttccgggacaccgccgacagctgggtggacgcccgcctcaccgcgacagctgccgcagacagggctcatcagctggccgcgcaggcagaccgctcgcgtcgggtcgccgaggagcaggccgagggcgcggctgcggcagaagcggaggcagcgggtctgaaggcacgcctggaggcggtggaggccaccgtcggggaggactatcgacagatcgtcgcacgtgtcgccgaggcgcgcgccgaattgcgtcgctgccgcgaggaggccgcccgggcggccgatctcctgctcctcctggaaggccgtatcggaggtctgcgggccaccagcggacaggacgccgaacggcgggagcgggccgtcacggtccgggacggcgcggcgcaccgattccggcacctgtgcctggccgggctggccgaggacgccggcagcacaccggaactcgacgccggggacggcaccaaggccaccctggaggccgcccgtgccatggcggcgaagtggcccggtatcccgcacgccccacgcaacctgggcgatgccgcgacccgcctctccgaagcggtccacgaggcccgccggcgtctcggcgcccgtgccgacctggacctggagcccgacgacgacatccaactcttcaccgccaccctggacggcgtacgcgtcggggcgacagggctgctcaccacgctcacccaggagcgtgaccgcagccgtgacgacatcaccactgccgagcggcgcctcttcgaccagatcctcaccggtgacatccgccgccacctcgcggcccgcatccgccaggccggtgaactcgtcgatcgcatgaacgggcacttggagcgggtccgtacggcctccaacgtcgccgttcaactcgtctgggacgtccgtccggatcttccggacagcacccgcaccgcacgccagctgctcctcaaagacccgggccgggtcaccgagagcgacagggaggccctgcatgccttcttccgagtccgcatcgaggaggccaagggcagcgacaccgccgcaagctgggaggagcaactcggcgaggtgctggactacacagcctggcaccgcttcacagtccgcctggaccgggcgaacggaaccggctggcagccgttgaccaagaagctgcacggtgcactctccgggggagagaaggccatcgcactgcatctgccgctgttcgccgccgtcgccgcccactacgaggccgtgcccctggcaccccggccgatcctgctggacgaggtcttcgtcggagtcgacaccgtcaaccgcggacaagtcttcgccttgctcagcgcactcgacctggaccttgtgatcacctccgaccacgagtggtgcacctacggcgagctgcccggcatcgccgtacaccagctcatcactgacggggatgacgacgctgtcaccagcgcccgctttgtctggaacggcaccgacctggaggcgggatga

SEQ ID NO: 49930 - DNA, 1353 bp, Streptomyces bingchenggensis BCW-1
atgacgcgcccggaaccggcccccggcgaacgcaccctgcgccgccccgaactccgcccgctctggcacgcggtccatgaccgcctctcctccggcctccccgtcgcacgggtacgcctcggaccgctcgacgacgcccagcgcgaagccctcgccgacctcctcggcctggacaggctgccggacgcccggccctccgtcgccctggcccggctggaagaagcggtcaccgagctgtgcgggcacacggtgcgcgaaaccgtcaccgaactcgtcggacccctcgacgaccgcgcgagcaaacgacgccggcaagatggcgagcgcgccgaattgtggacatggctggacggccatggcaccgtgcgagctcagccggcgctcgccgagtgggccgcctcctgccgagccgccggcctggtcggcggctcaccggaacgcacccgatccctactgaccgacgcgctgaccgtgctcgcagagctccccgcccaagcagagccactgcccgtattcgctgcccgggtcctgaagggcgactcccacgcacttgacgacggcacccgcctgtccaccctcgtcctgcgcgccctggcgactctccacgacacagccccgccgcagtccgcggcggggcggcgcgccctgtggacccgcgcgggtgtcgccgacgacgacctgtccgccactgttctcgtcggtggactgcgtccgtccggtggcggcccgctcgcccgcgtggccaacgtctgcgccgaggccggacaggcagccagcctgaccctcgcccaactgcgggcccccggcgagttcaccctcgccgcagcccccgcgcccgtcgtccacgccgtggagaaccccagcattctgtccctcgccgtacgccgcttcggcccgcgctgtcccccgctcgtgtgcacgtccggctggcccaacagcgcggcgatccacctcctgcgtctcctcgcggaccacggcgccaccctccgctaccacggcgacttcgacggcgaaggcatccgcatcgccgcgtacgtcctggacaagacaccggcccggccctggcgtatgagcgcggcggactaccgtgctgcggtcgcccgcacaccacagggcccgcgacccggccgtctcaccgaagcaccttgggaccccgagctgacccatgccatgaccgagcatggcagcgcagtggtcgaggaacttgtggccgacgtcctgttgaacgacttggccgtagctggacttccagtcgtgtccccaacctcacagggtcatacagccagggccgccactcgtcgcggtagtgggggtggtcggcatacggcagggcgagcagacggagcgccgtga

SEQ ID NO: 49931 - DNA, 1491 bp, Geobacillus sp. C56-T3
atggacgccacatggctcaagccgattgtcgaaacaaaatatttatcaacggaaaacgcgcaccgctaccgggcgattttgcgctatttctacatccagcacgagcggatgcgccaatatttgtttccggaagaagtgtacgcctttttaaagcagcacgaggagtttgcggattacacggaagatgacttgcagcaagacctcgaccagctcgtcaaatggaacaacttgatcgcccgccaagagacggcgcatgtgcggacgattgaagagtttaagaaaaagcggtttcgctaccaatgcagcccgtacacggtggagatcgagcggatgatccgcacccttgagcagctcggagattcgttcggaggatccctcgagaaaacacggttcgaccgtttgtatgcatctctttcccgcatggaggcgatcatcgcttctgattttcaagaacaagcggatgaaatgcatcaagtatgggaagagacgttcgattatttcaagaaaatcatccaaaattccgctgactatatcgcttatttgcacagtgaaaacttggaagagcggatgacgtccgagtcgtttctcgtctataaagagcagtttacggcgtacttgcgcgattttatcgtcgccttgcaaaaaacgtcgatgcagattgaacaattgcttgaagatctgccggaagaaggggttcggcagttcatcgagcatgtcgtcgactatgagcggtcgatcccgcgctttgccgatgcgctgccgccgcgcgctgtgcagattgaagaaaaatgggagacgtggcgcagcctgtgcgaatggtttttaggccgcgatgggcgcgagagcgagctgtcgtttttgcaataccagacgaacgaggcgattcgtcgtttgacgcgcgttgtgcagcggcttggcgagcggcatcaccattttcgcagccgcaaaggcgactacttgcatttggcccgttggttttcccgccttgaatcgattgaagaggcgcactgcctgtcagcggtcgtattcggctgcttccatacgaaacatctcgtggccgatttcggggcgacagacaacatataccgcgacgtatgggacgagccgccagccgagtgggtgacgaagccgcgcgtccgccattacggggaaaagaaaaaaccgcaggcaatagaagacaaagaacgggagaaagaagaagcccgccttcgctatttggaagaaaaagagcgcgaggaagcggcgctcaggcagcttgtgaccgacgggaaaatcgtgcttgccgaccttccagaggtgaccccatacgtacggaaaacgctgctcggctggatcgccaaagcgatggggcgcgaggggcaagcaatgaagacggaaaacgggtgggtggtcaaagtggtgaacaaagacgggacgatttgccttcgcgcagaagatggggaactcgtgatgccgaactacgaaattcatgtgctttcgggaggtgagtga

SEQ ID NO: 49932 - DNA, 1197 bp, Geobacillus sp. C56-T3
atggaaacggcgtttgacgacaaggcgaaagaagcgctcgccgcgctgtttgagcagttttggatcattcgcgacaaagagccggatttgtaccagctcgtccgtgagcgcgaacatgtgttgaaacggtatgtggaggagaagtttggctatcggctcatcgttcaccgctattttgccaagctcgagaaaattcccgccgaaccggagccgtggatgggaatcgagtcgtttcaagagccgcttgactatgcgttgttttgttgtttgatggcgtatttggaaggaaaagcggtggaagaaaagtttttgctttctgacgtatgtgaagaaatccgcgccatgtacccgggggatctaccggtcgattggacgaactactcgcatcggcgcgcgctcatccgcgtgttgaaaacggcggaacaaatcggactcgtccgccggatggatggggagattgaggcgttcgcccagcatgtggaggaagaggcgctgtacgaagtgccggtgttggcccgttattttatgcgcacgtatccgaaagatttgttgcaatatgaatcgatcgacgaattgctcgccgaggagtggaaagcatcaccgcaagattatcggcgccatcgcctgtatcgaaagctgtttttatccccggcggtgcatcggacggaaggggacgagcaagatttttactacttgcgcaacttccgccatcggctgcgtgatgatatcgaagcgcatacgccgtttcggtatgaattgtacaaaaatgccgccatgttgacgcttcccgaacggcaggcgccgtacaccgtatttcctgatcagaaaggaacgtcggagatcatccttcattttgccgccttggtgcgcgagcggcttagggaatatccgccggatgaatacggccgcatacgattgacgcctgaacaattttccgcctggcttgccgattgccggcgccgctatggggcgggatgggggaaaacgtaccgcgacatgtcggctgccgagcttgtccgcgaaatgcttgcggcgctcaacgaatggcgcatggccgatgtggagcacgacaccggaatgatcgtcctttacccgctactcgggcggctttgcgggcggtatccggatgattttgacgcgaaagagggggaagaacatggcgaatccatgggttcttcatcgcgccggattgattaa

SEQ ID NO: 49933 - DNA, 4122 bp, Geobacillus sp. C56-T3
atggcgaatccatgggttcttcatcgcgccggattgattaatttttggtattacgatgagcaatattttcatttcgctgacggcaagctgcttttgcggggaagcaacggggcgggcaagtcggtgacgatgcaaagcttgatcccggtgcttttagacggcaagaagacgcccgatcgcctcgatccgttcggctcacgggcgcggcgcatggaagactacttgcttggggaaaaagatgtcgtcaatcgcgatgagcggaccggatatttgtttttagaatataaacggaaagaatccgaccaatacgtcacaacaggcatcggcctgcgcgcgaagcggcaaaaaagcctcgacttttgggggtttgtcctctttgacaaccgccgcatcggctatgaccttcagttgtataaacaagaaaaaacaggtgaaaaaatcccgctgacgaaacgcgagctcgccgcattgctcggcgcgggcgggacggtcgtggagacgcaaaaagagtatatggagctcgtgaataaacatgtgtttcgctttgaatcgctcgaggcgtttcaagaattgatcgaactgctcattcaactgcgcagcccgaagctgtccaaagactttaagccgacggtgatttatgaaattttggaaagttcgctgcctccgttgaccgatgacgagctccgccatttatccgaaacgatcgaaaacatggaccaagccaagcagcagcttgagcagctcgaacgcgacgaacgggcgttgaagcgtctttgcgatcagtaccgcctttacaacgaatatatgatcgccgaaaaggcggcagaatacgtaaaagcggtcaaacaagcggaacagctcgctgctgaacaacaccgccttcacgatgaagaagagcaggcgcgaaagacgctcggtgagcttgatgagtccatcatccgcctccgccgcgaagaagacgtgttgcgttcacgcgaaatcgacttggctggccacgaagtgttccagcaagcggagaagtatgaacagttgaaagctgagagggagcgtctgcaggagcggcgggagcggcacgagcagacgatcgcggaaaaagaacggcttgagcggcagcatcgccgccgcctcgatgaatcggaagcgcggttgaatgaccttgaacggaagcttgaagacgagttggcgcaactgcgagcggatgcggaagaaggagccttttctttacatgaaacgaacgaagacgattttcaccgccatcgccaaaagcaacaagagttttcgtttgccgcttggaaacaggaagctgaccgccatatcgagcggctcgaggagttggcgcgcctttggcgcaggcatgacgatgtgaaacgacgctatgaagaagcgagcaacgaagcgagcgaacggcggcgggaaatggaggaatggcgtcatcagcaacggaaatgggaagagctgttcgagcaggagaaagagcggtttgaacaagccgtgcttgcctgggtcgagcagggaggaatcgacgtttccgaaacggacattcaggcgtttttgcaacaaatgggctccctctatgagcagtattcgctcgatgatctgaagcgcccgttcgttcaagcgtattacgatgccgtcggtaagaaaaaggatgagaaatggcggctcgaacatgacatccgtctgttggaagagaaacaggcagaacgtgaggccgaactgcgtcaatggcgggaacaacgcgaccctgaacccgaacgggatgaacaaacgacagccgcccgcttggcattggaacaggaagggattccgtttgtcccgttttatgccgcggtcgaatttgtcgacgatgtgcctgacgatgtgcgagagcgaatcgaatcggcgctttcgcacgctgggctgcttgacgccctcattgcggctcgcgatgtcgacgtcgactgcgaccgtgtgctcatcccgaaaccggttcatatggcgcatacgttggccgattatttgcgaccagatgcggatgcccctgtgtcggcggagcggattgacgaagtgctccgaagcatcgtgatcaccgatgcggaacaagaaggcggcatgacgatcgacgaaacaggacgctattcgctcggccttgtccgcggccatgcgccgcggagagcgcgggcgatgttcatcggccgtgcggcgcgggaacggtggcggcttgagaacatcgcggcgctggaagccgagatcgccgctttgggacaagagatcgaccgtctaagcggtgagcatcaggcggtggaagcagccatccgagcgctcgccgactggtttgtgtccttcccatcggaccgcgatgtgcgcaccgcgtttgaggaagggcaagaagcccgccgccaagccgaaagcaaagaacgggaatggaagcggcaagaagaaaaagccgccctcttggcgcgtgaatggaaacaaatcaaacaacagctccatgacgagtcggccgagcttgatttggcctttaccttggacggctgcgaacaagcccagctcgccatgaaatcgtacgtccgccatttgcacgaactcgaagtgctttaccgcgaaacgcgccataccgaggccatgatcgcccaacagcgcgagcggctcgcggcgctggaaacggagatcgacgaagcgaaaggcgaacgaaatcggcttcgtgatgacgaagagcggatctccttggagatcgctgagatggaacggacgctcgcccaaatgggagcggatgacattcgcgcggaaatcgcccgcatccaagaacgattggcgtttttgcgccaagaaattccgcgccttgtcaacgaacgggcgcggacggaacagcgcctcatgcgcttagtcgaagagcgggaaaaaggagcgcagcgggaagcgttcgcctgccagctggccgccatgtgggagcggtcgtttgccgatgaagcggcgcttgggctcgtggatcttgatcgttcacgttcccttttggagcaggccaaagaagcgaaacaacggtatgaagcagtgttaaaagagacgcgttcctcgcttttggcgcggctgaacaccgtcttcttccaagagtcgtccaacttgaccgaataccgggcgacgttcgagcggctggcggaacaaaaggagcccgaatggatcgccgccgccccagacgacgagatggcgatgaaagcggccgattggcgggagaaacaagaacggcacgtcatttatctcgactacaaaggcgagcgcgccacgccgtttgccgtgctcgccgaggtggagcgcgacatcgccttgcagcacgagtatatgaaggagcaagaccgcgagctgtatgaggacgtcattttaaaatcagtcggccgcattttgcgcagccgcatccagcgcgccgagcggtgggtgagcgatatgaacaaactgatgggcggcctcgacacgtcatcagggctcgtgctgtccattcaatggaagccgaaaacggcggagacggaagcggagcttgacacgaaagagttggtccgtctgttgcggatcgattcgcggctgcttagagaggaagatttgcagcgggtgacgaaccatttccgctcgaaaatcgcccgcgctcgcgaactgcttgaggagcgcggccaaggcaacacgctccatcaaatcattaaagaagtgctcgactatcggaaatggtttgcgttcactctttactacgaaaaagcgaacgagccaaagcgcgagctgacgaaccaccgtttttaccaattcagcggcggggaaaaggccatggcgatgtacatcccgctctttgccgcggcgtactcgcgctaccaagaagcgggagatgacgcgccgtacatcatctcgctcgatgaagcgttcgccggtgttgacgaaaacaacatccgcaacatgttcggtcttgtcgaacaactcggctttaactacattatgaactcgcaagcgctttggggcgactacgatacggtgtccgccctgtccatttgcgaactcgtccgcccgcgcaatgcgtcgtttgtcaccgtcattcattatcgttggaacgggcgcatcaaacagcttgtcatcgatgacaaggaatgggagttgatggaaacatga

SEQ ID NO: 49934 - DNA, 1221 bp, Geobacillus sp. C56-T3
atgagcgcggtcaaggaagcggccgcctttttccgctccgaaccggggtttcatcgcctgtttatagagatgaagcgcaagtacgagtcgctcggccgcgttggcggcgtcgtttctttagcggcgttcagcgaggaagagcgcgcggccgtcgccgcctttttcggcaaagacgtctcccgcgtctccctctccgactttgaaaaacagctcgaacagacaaggtttgcgggtgttggactcgtcgaactgctcgaacattatttcggcgtcccgcttatgtcgaacaaagaacggcgccaggcagaggcggaagagcgggagcgttttttcgcgcgccttgcagaggaacatcattggttcgcggcagtccgcggccaacgcttcgtccaaggcgcatatgaaaccgaccgcgacggtcttgaggccgccgtccgcctgatcagcgccgccctctgccgcctcccgctctcttcgtacatgcgcctcccgctctttgcccagcaagtggccagcgacccgcacgcgttcgatttatccactcttccagggagattgttgttgtccgccttgcaagcgacgactccaggccagtgggatgtgacgtccgtagagagtgtcaatgaactgttgcagtccgtcggcctgctccgcgaagatattttgaactttgtcacatgcgccaacattctcgccgaaaccgagggcggcccgcatcccgtcttctctgccgcctcggagacgaacacggcgctgaacatgccgcttagggatgtgttgtcacttgtcagtgtccgccccgcccgcggcgggacggtgtacattgtggaaaacgccggtgttttttcgacattgcttgacacccgcgccccgcttgtcagcacgaacgggcaaatgaatttggcgacgatgaagctgctcgatttgctcgcggcctctggcgccaagttgtattattccggcgacttcgacccggaaggattggctatggcagagcggctgcttgaacggtatggacagtccgtcacactttggcgattttccttggacgattatgcggccgccaaccctgtcgtcgaccttccttccgagcgcctcgccaagctcgcatccgtaacgtcggcgccgctgcagccgctgaaagaggagatgaagcgaaagaaaaaagccgggtatcaagaggcgatcattgggaggttgacagaggatatcaatgggtag

SEQ ID NO: 49935 - DNA, 1488 bp, Thermoanaerobacter mathranii subsp. mathranii str. A3
atggaagataaacttgatttgaatgtgataaaaccgattgaagaggtaaagtatttgtctgcggaaaatgcttcgcgatatcgcctcatcatgaggtatttttatgagcagtaccagaaatttaaatattggctgtacaaagaggatgtatatgagtatgtaagtcaatttgatgtgttttccgactatacaatggaaaaatgtgagcaggatttaaaagcacttactgaatggaaaaaccttattgcgacacaagataccagtaaagcttctacgattgacgaatttaaaaacaaaaaattcaggtatcaattaagtccatattctattgagatagagagaatgactataaggctggaaagcatcgtcggttatggtgggtcactacagccgtctttatttgaaaggatttaccgcaatttaataaagataaatgaaatggcgaaaaaagaggatttacaggaaataaacagatggtgggaagacctcaataccgactttgaaaatatatatcacaatgcgacagattacattgcaagtcttcaaagctctaacgctgatgaacttatgaagtcagagcagtttataatttacaaagacaaacttatagaatatttaagagattttataaaagaccttcagagattttctgttgccatagagagctttttgaaaaaggtgagtccggaggttgtcaattccgttgtagataagttatgccaatatgaaatgagtatcccaagaattgacatggttttaaatgaagaggaagtaaaagaagatttgatggataagtggaataacatatctttttggtttacaggtcataattttgaagacagcgaggcagtaaggcttcttaatatatcaaacgaaataatcagaaaaataacaatgtatgcggcgagaatagcagaaaacagaatgaaagctgccagcagaaagaatgaatatattgctctttctaaaatgtttgcaaaagcaggtagtattaaagaagcacaccttttgtctgcggcggttttcggttgcttttacacaaggcacataaagggtgattttgaaagaaagacagaaagtgtaaaccagagtgtatgggaagaaccgccctttaaagtgattataaagccaaaaacaaggagctacggtaattatgttaagacaaatgcgattattgatagaagtgctgacaagacggagatgctgatggagtatctcaatcagaaaaatatagaagatgaaataatagcaagttgcattgttggcaatagaataaggataaaggatttacctgttgtaaaaccttttgtgagggcaacgatacttaaatggataggaaaagcgatggcaagaaatggctttacaggaaaaacagaagatggaagaacatacaggcttcatataccaaagaatggagagagagcaatactaaaatgcacggatggtaatcttgatatgcctgatattgtaattgaatttgtggattga

SEQ ID NO: 49936 - DNA, 1152 bp, Thermoanaerobacter mathranii subsp. mathranii str. A3
atggaagaacttcagatgcttcttgaaaatttttggatattgagagatgatagggaaaatttcaacaaaataagagatgctgagaataaaataaaaccttttgttgaagagaagttaggatatagattgattataaacccatatattattaagttagaaaaagtgccgtcagatgttgaagagtggatggggatagatgcatttcaaatgcctatggattatgcatttttgtgtttgctcttagcttttttggaggataaaggacctgaagaccagtttgtgctgtctaatataacggaatacatagaggcgcagtatgatggacctgataaagtagattggacgctttttcagcacagaaagtcacttgtgcgggtgctcaattttgctgtagatattggcataattaaaatagatgatggtgaccacgagaggttttcagaaagtgaagatacggaggttctttacgaaaacacaggtatttcaaggtattttttgaggtcttttaacagagaaattactgaagacatgaagattgaggattttttgcaggaggatttaaatctttcaaactccaaagatgcggttatacagagaagacacagggtgtaccgaaaacttattctttcacctgctgtgtatagtgaaggacctgatgaccaagactttatgtatataaaaaattacagaaacaccatagcgaaagatttagaggagtatcttgatgcaaaacttcacctccacaaaacttctgcttttgtcctctttaatgacaacaaatatttaaagtcctattttcccgacaaaaacaaaaacatatctgatataatgctgcaggtaagtaaaattataagggaaatgattgaagagggaaaactcgcctataatcctgatgatactatagatataactgaagcagaatttataaatattattttgaaagtaaaagaaagatttagtgatggttggtataagtcttacagagagatgagtgaaaagcagcttatagaagaggtcattgaaaacatggaaagctttaagatgataaaaagagttgaggaattgcattctattaaaatattgcctatggcggcaaagttaattggggaatatcctccagattttgaaaaaggagaagatgtagatgagtga

SEQ ID NO: 49937 - DNA, 4167 bp, Thermoanaerobacter mathranii subsp. mathranii str. A3
atgagtgaaaaattagccgaaagatggatgattaacaggattgggcttcttaatttttggtattatgatgatgaaatatttgagtttgcagacggaaggcttcttttaagaggtgctaatggttctggaaagtcagtgacaatgcagagtttcatacctttagtattagatggcaacaaaagtcctgaaagacttgatccctttggctcaaaggcgaggaagcttgaggactatcttcttggggaagaagaggtaagtgggcttgatgaaagaactggctatcttttcatggaatttaaaaaagaaaaaaaagacagttacattacaataggcattggactaaaggcgaaaaggcatcaaaatatggacttttggggctttgtaatacttgacggcaggcgtataggtatcgacttctttttatacaaaatggaaataggcgatgacggcaaaagagtaaaagtcccacttaccaaaaaagaacttaaaaatagaataggtgaaggcggagaagtagttgaaagccaaaaagagtacatggaaatggtcaataaatacatttttggctttagttctatcgaggaatacgacgagctcataaaactgctgatacagcttagaagtccaaagctttccaaagacttcaggcctactgtgatatatgaaattatgaaggcttcactgccttcactcacagatgatgatttgaggcctctctcagaaaccatagaaaacatggaccagattaagatgcaccttgatgttctttacaggaatatggctgcagtaaaaaagcttaaaaacgagtacgacaactacaacaaatacattctttatgaaaaggctggggatttagtaaaggcatacagcgatttatacgcatcaaaaaaagaatacgataatttaactaaagatattgaaaattacagaagtacaatagcaaacttaggaaatgacatcatttctcttgaaagtgaaagagaagctttaaagaaaaaggaagaacagctttcaagtggtgatgctaaaagaacccaaaaagaattattagaagaagaggatcgatataagcagtatttggaggataagtctaaaaaagaagaagaactccgtaataaacaagataaatattatggtttagaaagaaagataaaaaacattgaggtacaaaaatacaaactggagaaagaactacaggataaattagaggatatatcttcaattgcacaggatatagatttcatggaacatgagttttctgtaagtgaacttaaaaaagtgtatggaaaagaatttgattttacttattggaaaaatgaattaaaaaagcataaagataaaataaagcgtgcaatgagtgcattgagagaagaaatagaagcaaataaaaggtatgatgccgcacttaaagagcaggaaaggcttaaaaaagaaagagaagaaagggctaaaaagcttaatgaggcagaaaggctttttgacgaacaaaaaagagaatatgttgaaagagtttatagttggtcacagggcaatgcagagcttaagcttttaagtagccaattggaaggcttaagccgtgtcatactggcgtatggagaggataaaggatttgacgatattttggcttttgtgagaaaaccctatgaggaaatactaaatggaattcagcaagaaattttaagattagaaaatcaaagagaggtaaaagaagatcagcttcatgagaaagaaaagttattggaggaatggaaaaacaaaaaagaccctgagcctgaaagagatgaacaagtcataaacaacagaaaaaggcttaaagaagctggaattccttacattcctctttacatggcgattgattttaaagaggatgtggatgaagagacaagaggcaatatagaagctgcgatagaagacatggggcttttggatgctcttatcgtgccaaaagaatattttgaaaaagctcttcaaatggacagcaatatggcggataaatatgttatgcctggaagctttaatatgatgctaaatgtatctcaatattttagagtagttgacaatgaagaaggagtttcaccagaagatatttcaaatgctttaagcaatatatttgtatcagaagaaggcgggacaacctatatcgattcaaatggcgcatatggaataggagtaataaaagggaaagcacgggataaagttaaatcaaagtacatcgggagtgagtctagaaagcgctacagagaagagcttattaaatctatacaagaagaaatacaggctataaaagctgaaatatctgcaatcgatgaggaaataaatgcaaaaaaattaaggatacagaggctggattacgaatattcggcatttcccgggaaagaagatattgaagaagcatatagatatttaaaaacggcaaaggctgattacgaatacacctctcataaactcgatgaacagcttttcacagttaaaaactgttttgaggaccttcagaaaaagaaagctgttgtaagagaattgacatctggcataaacatacatccagatattgatacctattcttctgcctatgaatatgcggaagaatacgcttcagggcttaatgaagtagaaatactatacaataaatatgttttgcaaatttcaaacgaagaaatgttattgcagcaaaaacaagatttagaatacgatattgataacttaaagtacgaaatagacgtactggaaaacaaaatacagagttctgttaagaaaattgagatgctaaaagagacattaaaagaacttggacttgaagaaattgaaaaagaactggagatttgcctaaaaaggctggaggagatacctaaagagattacaaataaatcagccgaaaaagcaaaacttgaggagaggctacagagaagcttaaaagaccttttaaacattgaagaagagattaatcttaaagagaaaatttacaatattgttgaagagggtttaaaaaaggaattagcacttggctttgtcaagcaagacgttgaaatggaggatatgttaaaattaagcaaaagcattctttctgaatacaaaggcttttttgacaaagcgggctttgacagagaaaagtttacagagagacttcaaaatgtgtattttgaaactcgcaacgaacttctagaatatgggctttcaattggcaatatctttgacgaagcttgtgagggagacaatgaaagaataaaagaggcaaagaataagcagagaaggctcaatattacggcaaatataaatggtaaaattgtgtctttatatacgctttattctaatattgaagaagatataatggcgaatgaaagccttttaagagagactgataagattctttttgaagagattataatgcacaatgtgggaattaagataagagcaaagatttttaaagcagaagaatgggtaaagaaaatgaataaactcatgtctgaaagggatacttccagcggacttaaattctctattgagtggagaagcattcctgcttctaatgaagaagaacttgacacaaaagagcttgtggatattttaaaatctgatgctgatatgctgaaaaaggaagtcttcgataaagttgtaaatcattttaggtcaaaagtagaaagagccaggagggcaatggaggaaaaaaacaatacagaaacttttcacaagattatgaaagaaatattagattacagagattggtttgaatttaagctttactacagaaaagaaggggaaagccgcaaggagcttactgataatgcttttaataagttgagcggcggagaaaaagcgatggccatgtatatacctttgttttccgcggtttattcaagatatgagggagcatcgccgactgcacctcgcataatatctctagatgaagcatttgcaggagttgatgacacaaacataagggatatgtttaaactgattgaagatctgaggtttaattatataatgaattcgcaggttttgtggggagattatgatactgttcccaagctttcaatttatgaacttgtaaggccaaaaaatgcaaaggctgtattggtcatgaagtatttgtgggatggaaaagtaaagcaccttatacttcctgaaaaagaggaggttgctgctcttgaggtgggtgctataaatgaataa

SEQ ID NO: 49938 - DNA, 1323 bp, Thermoanaerobacter mathranii subsp. mathranii str. A3
atgaataaagaagaacttaaatattttaaagaaaaaaagggatacaagaggatttttgaaggtatacgggaaaagtacagaagtttaggacggcttggaggcgttgtaaagcttgataatcttacggaagatgaaaaagaagtacttacaaaccattttaaaaaagactataggacaaaaaaatctgcatccattgatgtagcaaagtttgaagagtcgctaaaaaatacgcgatttgaggagtatacgctaaaagacatactggaatactattttggcgaaaaactcaccagcaaaaaagaggatatggaaatattggcaaaagaaagagaagagttctttaaagagctcttctctaaatacaaggaatgtaagtgcattgattggctaaaaagtttgtatgaaggaaccgctgtaggggtaagggcagtaaatcagaggtatttaaatgataaggacggattaaaaaaagatataatgtacgtatgcgatgccataaacaatttgcctgtttacaaaggggaaaagaaaagactgccggtgttttcttcccagattgcacgtaatcctcactattttgattcaaatacagaagcgggaagtatgtttataaacgctttatgcactttaatggggcttaatgaagtgaaaggaagtgaagaaatatcagaactttattacaacgttggtattttgatagatgaaatatccaattatgtcacactctcaggacttttggcatatgagggcgatacggaaaatcaagtatttaaggctgcttatgaaagcaatcaagtcttgcaagttcctcttttaaatttgagcaaaattgagagaatcgtaagcccttctaagaaagtgtatgttgtagagaatccttcagtttttacatctttaatagatgccacaagcaaagtatttcctgttgtatgcacatatggccagccaaaactttcttctctcctgcttttagatatgctttataaagaagggacagagatatattactcgggagattttgacccagaggggcttatgatagcagatagattatacaaaaggtataaagacaagtttcattttttaaggtacgatgtagaagattatttaaaatctctttcaaatgaggtcataaatgatgtaaggcttagtaagctaaataaaattgaatcacctttactttttgatgtggcaaatgagatgaaaataataaaaaaagcagggtatcaagagcttataatagatgatattataaatgatataaaattgattgaagaaggtaaggggggtggtaaaattaaggtaataagtatgccttcttaa

SEQ ID NO: 49939 - DNA, 1530 bp, Nocardiopsis dassonvillei subsp. dassonvillei DSM 43111
gtggtcgaacgcagagccctcgacatggacccgctcgcggtcagcgaccggttccgtctgttcaacttcacccgtcgcgacgaccacgtcacctacctgtggatcctgcgggccatggaccgcctgcgcgaggtccaccaggtccaggtggcccccgacgacgtcgccgaggccctgcgcgagctggcccggtcccacgacggggtgcccgtgcccgaccggagcctgcgcgaccgcctggacgagctgcacgccgaccgcgtcgtgcaccgcttcgacgacgcctcgcgggcgggcaacctggcgcgctaccgcaaccgccagtcggtctaccagttcagcgaactcggctaccgcgcctaccagtcggtggagaacctgctcggcgcccgcatcgaggacgtcaacctgtcccggctggtcttctccgaggtcctggacgacctgcgcgccctggccgaggccaaccgcaccggccgggccgaacaggtctaccgcaggctcgcgcgcctggacgcggtcatggaggacatggggcgccgctccgcccagttccacgtcaccctcggtgagatcctgcgctccaccgacacctccccggacatcttcctgcgccacaagaacgccctgctggtgcacatgagcgacttcatggccgaactcgaccgctacctgccccgcctggaccgcgccgtgcgcgaggtggaggagacggggctggccacgctgctctcccgcgccgccgactccgacgagcgcctgttcatggagcgcgacgagcgcctggccgactggcgccgccgctggcgtgccctgcgcgcctggttcgcctccgacgacgccatccccgcgcgggccgccgaactccacgcggccacccggtcggccgtctcgggcgtcatcgccctgctgcgccagatcaccgaggcccagcgcggcggggtcaaccgctccacccagctgcgccacctcgccgagtgggtgttccacacccccgacgacggcgccgcgcacgccctcatgggcgccgccttcaacgtccgctccgcccgccacctgggcgcggcccacgacgacgaggaacagatcccgcccaacacgacctggtgggacgcccccggcatggaggtgtcggtcaccctgttccgcagcggcaacgcccccaacgcgggcgtgcccaagccggtgcggcgcaaccccggcgcccaggcgcgccttcgcggacagcaggccgcgggccgggccgccgaacgcgaggccgcggcccgcctggtcgacctgggcgcccacggccgggtcctggacgagaccgacacccgcgtcctgctgcgcctggtcacccgcgccctggagtcgcgcagcgtcgtcgccggacgcctgtcctcggccggcggcgagggcgacggcaccatggtccgcctggtccccgacccggcgggcagcaccgtccacaccagccagggccgcatccacctgccgggcctgcgcctggaggccaccggccaccggccccgaacgaagaacacctga

SEQ ID NO: 49940 - DNA, 1443 bp, Nocardiopsis dassonvillei subsp. dassonvillei DSM 43111
atgccccgactcttcgcccgcacggtcgcacccgccgacctgggctcctaccaacaggccatgcgccgcgtcctgacctgcgacctcatcaccgccgcgcgcccgcgccccggcgtcctggaccaggtgctgcgctgggccgacgaactcgccgccgacctggagcggctcttcggctacaccctggtcgccaccaccgaccacgtgcgcctggtccgcgaactcgacgccctggaccccacccagcgccagaccttctcgcgccggggcaagcccttcgaccggcgcagactcgcctacctgtgcctggtcctggccgccttccagcgctcccagatcgagatcagcctcgccgacctggtcgcccggttcacccccggggccaacgccgtcgccgggctgggctacgaccccaccgacggcgcccacaaggccgcgctggtcgacgtcgcccactggctggtggaccgcggggcgctccacctgtccgacgggtccctggaggcgtgggcggcgggcggcgagcagggcgacgccctgttcgacatcgaccacgaggtgtgcgagctgctgttccgtccggcgcgcccggtccagcacctgggcagcgtcgccgggctgctcgccgacccgctcaccgaggcctcgccgcgcgagcaggcggcccggcgggcgcggcggctcctggtggaacggccggtcgtgtactacgccgacgtcgaaccggccgtggccgcggtcctgcgcggccggggcgtggccgaggacctggcccgcgccaccgggctcagcgtcgagcgccgcgccgagggcgtcctgctggccgacccggcgggcaccttcaccgaccggcccttcccgggccggggcggggcggtcaaccgcaccgccgggctgctgctggccaaggtggccgacctgctggagacctccctagccgcgctggtccggctccaggtgcccccgcacgccgacgaccaggccgaactcgtccggctcgtggacgccggtctgccccgcgacggcgtcgtggccgacctggcctggaccgtggagcccgccggggagcgggaggaggccgcggcgctgctggaggtccccctggtcgagcgcggccggtgggagaccatgatccacgagctctacgcggagttcggcgccgcctccttcggcggagcctggcagcaggacccctacggcctgctggacgccgccctgaccctgctcgccgaactctccctcatcagaccggtccccggcggcgccctggtgctccccgccgcctcccgctaccgcaacatccagggcgcgctgcccgagcgcgccgacgggggacagctgcccctggggctgaccgaacccccgccgggagggcccgtctcctccggcccctcgcccgacaccgcccccgcagccgcctccacctccgcggaaggaaagtaa

SEQ ID NO: 49941 - DNA, 4284 bp, Nocardiopsis dassonvillei subsp. dassonvillei DSM 43111
atgtcccccaggagcgaccgattccggcccagccgcgccggcgtgatcaacgtctgggactacgtcgacgaggagttcgtgttcgccgacggacgcctcgtcctgcgcggacacaacggctcgggcaagaccaaggcgttggaagtgctcttcccgttcatcctggacgggtacaccgacgcccgccgtctggaccccttcagcggccagaaccgcaccatgaagtccaacctgctctaccgaggccaggactccgagtacgggtacgtgtggatggagttcgcccgcaccggaccgggggaggggaccgagacggtcaccctggtcatcggcctgcgcgcgcaccgccaccgcgacggcgtgaccccctccttcttcgtcaccgaccagcgcctgggcgtggacttcggcctgctcgccaccgacggccgcccgctcaccgagcggcagctcaagggggtgctcggcgaggacgccttccgctccaccgcggccgactaccgccgcgccgtggacgcgcgcctgttcggcctgggcgagcgctacgtccagctgctcgacctgctcctggcgctgcgccgcccgctgctggccaaggacctggaccccgagaaggtctccgagaccctcaccagcggcctgagccccctggacgaggaactcctcgaccaggccgcccgcgacttcaccaacctggccgccgtccagcgccgcttcgaccaggccagcacggcgcacgccgcgaccacggccttcgtcggggagtacgccgcctacctcaccgcccacgcccgccaccgcctggcccgcgtgcacaccgccgccgggcagaccgccgagcaggcccgcgccatcgccgaggcccgcgacacccgcgagcgggccacgctcgcgcacgccgccgccaccggccgggccgaggagcacgacgcccggatccgtcggctcgccgcgcgcaggggcggtctggaggcgcacgaggccttccgcagccacgccgccctggagatcgaacgcgcgcacagcgccgagaccgcccgcgccctggccgaacagcgggccagactggacgaccaggccggggaggtcaccgccctccagcgtgaggccgaccgggtcgccgccgacctcgaacacgggcgggcgcgcaccggtgaactggccgcggagctggccgagaacgccgcacaggccgggctcgaccacgacggggagggccccgccgacaccggcgacgacctgtccgccgccgcgcgggcgcgcgcgaccgcccgccgcgccgacgtggccgcggtccgcgagcgcctcgccgaactcgcccgcgccgagaccgcgcgcggcgccgccgaacgggccgccgcccaggccgaggacaggctcggacgcggcgaggcggagtgcgcccgcgcggccgacgacctggccgcggcccgcgccggtgccgccgacgcgctcaccgcctgggccgagcactgggccgaggggcccgccccggtcaccgacgccgcctgcgtcgcggccctgagcggggcactggagagcgtcggacgccccggcacccccacggtgtcggaggtctacggcgagcacaccgaccagcagcgcctggacgccgccgcgcacacgcgcacgctggagaccgaccgggaccggctcggcgccgagatcgaccgcctcacccgcgagcgcgcggacatcgccgccgaacgcgacgacgccccgcccgccgacgcgctgcgcaccgcctcccgcgaggggagccccggcgccccgcgtggcagatggtccgcttcgccgacgcggtcggcgaacgacgaggccgccgccgtcgagggcgccctgcacggtgcgggcctgctcaccgcctgggtgcaccccgacgccgacgccacccgcgcggcgctcgcctcgggcggggccgacgcctacctgctgcccgccgagggcgcggccgcgcccgaggggcccaccctggccgacgtgctggtgcccgagcgccaggaccgggtccccgagcacgtcatcgcccgcgtcctggcgtcggtgcgcctggtccgcgacagcgagggctcggccggggccacggacaccgtccagtccctcggggcggctgacgccacgggcgccgggggagcggcggcgcacaccgtcggcaccggcgcgcggttcgcccagggggtgctggtgggcgtcagccccaaggccgcccccgagttcatcggcgccaccaaccgcgcccaccgccgccgcgaacgcctggccgagtgcgacgcccgcatcgccgaactcgacgagcggcgcgcacgggtcgccgaacagctcgaccgggcgggcgaactcctcaaggccttcacccgggcccgcgccgccctgcccgagaccgccccgatcgaccgggccgtgcgccgggtcgaccagcagtccaccctcctggcctcggcgagggccgagagcgaggagcgccgccgcgacctcgacgccgcggtcgccgaggtcgacgcccaccgccaccaggtgcgcgcggtggcctccgaacgcgccatgcccgcccagcccgaggcggtggacgccgtcgcccgcgccgtggacgacttcctggagaccgcgcgccgcctgcacaccgcccgcgcagaagtcgaccggcacaccgtcgacctggacggccggaaggagaccctggaccgcctgcgcgcacggctggaggaggaccgcgaacgccacgaggagcgcacccgcgagcacgagcgcgccgcggccgagctggccgccaagcaggagggcatcgacgccccggtccgcgagctcatggccgagctcgaacaggtcaaggaggagctgcaccgggcccgtgaggagcaccagggcgcccagaaggaggccgcggccgcccacgaggccatgatccgggccgacgagaagctggagggcgggcagcgggccctcaccgactccctctccgcgctgttcgagcaggccgacgccttcgccgccctcacccaccccgacctgcgcgccaccctgggcgtggacaccgcgcacgcctggccggaccggcgctcctggcccgcccccgaggaggccgccgaacaggtcctggccgaggccccggacgacccggaggccgccgtgcgcgcggtcctgcccggccgcgccgcggagctgctcgacgcgttcaccgccgccgtcggctccgggtccgcggtcaccgacggcgacctcaagaccgtctccacacgcatctccaacgccctgcgcgccttccaggacaccctgggcggcgacgccgagggctaccgggtcgaccacgaactcggggtcagcggcgtcatcacggtgttcgtcaacgacgagaccggccgcaaccccgtctccgccttcgcccgcgtcatcgccgaacgcgtcgaggagcagggagcgctgctgcgcgaggaggagcgcggggttctggaggacgaactgctcaccgggatcgcccagcagatccacgagcgggtgcgggtggcccgcgacctggtcgtcagcatggaccgcgacacccgttcgcggcccatgtcctcgggcacccggatcggcatccgctggagccgctccgaccgcgtgagcgagcaccaggccaccgccgcccgcctggtccggcgcgacaccgacgagctgggcgcctcggggctgacccggttgcgcgaggtcctgcgggagatgatccgcgagcaccacgccgcccacccgcgcgccacctacaagcaggtcctgtcggcggtgctggactaccgcacctggtaccggttcgagctgcgcctggccgtgccgggccaggaggaggtcaagctcaccaggaacaagcacgagcagatgtcgggcggcgagaagtccgccgcgatccacctgccgctgttcgccgccgccaacgccctgtacacctcggccgcgcccacctgcccccggatggtggccctggacgaggccttcgccgggatcgacgaccgctacaagcccgagctcatggggctgacggtcaccttcgacctggacatgttcatgaccgggcacgacctgtgggtgcactacgacagcgtgcccatggccgcccactacgacatgcaccacgacaagggggcgcacaccgtctcggcgatgctcatgctctgggacggcacccagaccatcgacgccgacgcggggttctccggcaacgaggagctggccgcgcagctgctgggcatcacccccagccggttcgccccgctgtcctcggccggaaccctgttggaggacgccgacgcctga

SEQ ID NO: 49942 - DNA, 1614 bp, Nocardiopsis dassonvillei subsp. dassonvillei DSM 43111
gtgggactcaaccagtggacggacaaccacgcggacgacggacgcggcgccgacgggcggccgacgccacggcacggccgcgcctcgctgctgcgcctggccgcctggttcgaggaggccgacccggaccgcgccgacgccctcgccgccgcctcgtacgccctccatccggcgctccacctggaggggagggtggacgagggtgtcgccgcgaccaccagctggtggcaggccgacgccgaccgcagcaccgtcaccgagcacccgggcgcccgaccgcccgagccggtgagcgaccaccgcgcccagcaggcgcgcctgcgcgacgccgccgagtcctccgcccactggcgccgcgccggtgccgcgcagatccgctccctgctgaccgagcccacgggccgccgtgcccgcctggacctgtccggcgccgggatggaggtcctgatggaactcctcaccgcggccctgggatccggcgacgccagcaggcgccccacctccgccggggacctggagttcgcgctgcgcctgcacgtcgtcgccgcgccgggcgccgacgtcaccatccggggcgagggcggggagctgaccctggaggggctgcgcctgctggtgaccccctacgagcagcacagccccggtgtcctcgacccgctcccggaggagccggaggaggacggggcggaccccctcgcggccggtgccccggagggaggggacgctgccccggagggggaggaggcctccgccgattcccggacccccgtggacccgctcggccccgggaccgacgaggacctctccgacccgtccgaagagccgtccgaggacccgccggcccccgccgcccccgccgcctccgtaagcccggacgcccccgctgaccccgaggcatcggtgctcgcctccgttccgacggctcccgaggaccctgaggctccggcaggcacgtccgtgcccggcggctccttgcccccgttcgatccgcgggtccctggcgcacctgagagtgcgcagaccccagacgatccgctggcccccgccgactctccgcactctgccgtcgcggaccgttcgacgggcccgcaagcccctgctggcactgaggctccaacggcttcctccgccccgacagacacgaagaaccccgagaccccagcggcccctttcgaccctcggctcccgactgcctcgggccgctcggccagcccgggcaccccgtccgcgccgttcgctccccgcaaccccttcgccccggccgcctccgaggacccggaggccgcaccgtccccggccgcaccccgtaccccccagaccccggccgcgtcgacggaacccctcttcccccagcccccgacggtcccgccgtactccgcgcactccgacgccccgcccgccccggagatccccgggacgcccgccgccccgtcctacgcggacatcctggggatcccggtcccctccgcgaccccggaaccctccccggcccccgacgcggcgccccgccccgaggacaccgaacccacgggtaacctccctggaccggacccgcgagcccccggtccggacgacctgtccgcgaacccgcccgagaagccatcgtgggagtga

SEQ ID NO: 49943 - DNA, 1395 bp, Nocardiopsis dassonvillei subsp. dassonvillei DSM 43111
atggagacggacacctacagcgaggacgccgcgctcatcggcgaacgccaggccgcggcccgcgccctcctggcccatcccctgctcaccgagcgcacccaccccgccgagttcgccctcgtgcgctcccacaccgagtggctcgtccagcgcttccaacgcgtgctcggctaccgcctgaccgtcgccgaggaccacgcccggctggtcaaacgcggtctcgtcaccgaggtcgcgcgccccctcgcgcgcgggaccggcgcccccttcaccccgcgcacgcacacctacctggcgctgtccctggccgtcctggtcgaggagcaaggccccaccaccgtccgcggcctggccgcgcgggtccgctccgccgcgcacgaggccggggtcgacgccgaccccgagcgcggcctcgccgagcgccgcgccttctgcgccgccctgctccacctggtctcgctcggcgccctcaccgaggacttcggcaccatcgccgaccaccgtgaggacccctccgccgacgcggagctgatcccgcacacgcaggtcctgcgctcggtcgccgtccacctgccccgcgcctccgacgaccccgactccttcctcgccgccgcacgcgacaccgaccccgacggcgaccaccagggcgagaccgccctgcgcaggctcctcgcagagaccgccgtcgtctaccgcgaggagctccccgaccgccagcgcgaccgcctcgccgcgcaccagtggcgggccgcagcggcgctcggcaacctcctgggctgcgacaccgaggtccgcgccgagggcgtcgccctcgtgatgcccgacgaggcgggcgcccgccccgccttcccctccgacgaccccgtcggacaggtcgccctggccctggtccgccacctctccggccgcctgcaccccggccgccccgccacctccgccccggtcccggaggaggagatgaacaccgcgctggaggccctctgcggcgcggacgcgcccgcgcgggccgagtgggcccgcaccgcgggacccgagatccccgaccccggacggctccgcgagcgggtcctggtcctgctggccgacctcggactgctgcggggcgcccccggacggtggcggctcaccgccgcggccgcccgctacggggccgaaacggacatccgtgtccccccgatccaggacaatgacgaagacagccggacacatcccgacccggtgcgtgcccccggcgacgacgagggcgaacccgacgctcccgccgacccccgcggcgacctgagccgggtggcgtccgtgctgcaagcggtggcgaacgagaaggtgagcgcgaccagtggtgactcaggagaccagccaggccccggaagcggcggcggcgacgggtccggctga

SEQ ID NO: 49944 - DNA, 4755 bp, Nocardiopsis dassonvillei subsp. dassonvillei DSM 43111
gtggtgactcaggagaccagccaggccccggaagcggcggcggcgacgggtccggctgattccgccggtaccggcgcctccggcggcgtcccccgctaccggctcgaacgtgcgggcatccgcaacgtctggcagtacgacgaccacgtcctggacttcgccgaggggcggctgctgctgcgcggccgcaacggcgcgggcaagtccaaggcgctggagatgctgctcccgttcctgctcgacggcgacgtgcgccgcctggacaccacgggcaccaaccgcaccagcctgcgctggctcatggccgaggacacgcggcccggccgcctccacggtgccgaggatgacggtcccgacctgctcggcggccccggcgcggaggacgcgtccgaggacgccccgcacggcgccgacgcctccggcgaccccgcggaggaggagtccggccccgccacccggctcggttacctgtgggtggagttcaccaccgagcgcggcgaccgcggactcgacgccgccgcccgctccggcaacggccggggggcctccgcgctgctcgccggtaccggtgcgagcagcgcctccgccctcctcgccgccagcgcggcggccagcgccgccgccgggtccgacgcggcggcgcgggaacccgagccccgagaccccgacgccccgcccagccacctgaccctgggcgccgccgtcatggcggtcggcgactccgacccgcggtgcgtgttcttcgtcaccgaccgccgggtcggccacgacctcgaactcgtcaccgacggccgccccaagcccgtcgaccgcctccgctcggagatcggcgccgacaactgcttcaccagccccgtcccctaccgggcccgcgtgatgcacgacctgttcggcatcgacgactccgtccgctaccgcaacctcatccacctgctctaccggctgcgccgccccaccatcggcgaccgcctggaggccggggaactcgtcggcgtcctgtccgaggcgctgccgcccatggacgagaccgtcctggacgaggtcgcccgcaacatcgccgacctggagcgggcccgctcggacaaggacgccctcaccgaggccggggcgggcgtcaccgcgttcctggaggactaccggggctacctcgtccacaccctgcgcgcccgggccgccgaggtgcgcgagcagatcgacgccgccgcggaccgcaccgaggagaccgagcggctgcgcgccgaactcgacgacctcatcacggcggagagccaggtctccgaggaacgcgaccaggctcgccgcacccgcgacaccgcccggtccgacgacatgaccctcgccgcggcccagggcggcgccgccacggccacggacggcgagcgccgcgcctacgacgccgccgtgggcgcctacatccgcgcggccgaggccgcctgggtggccgccgagcacgccgaacgggtcgaacgccacaccgtcgagcgcatcggcgaggacaccgccacgatcgagcgcgcgctcgacgtcctgcgccagacccacgccgaggccgcgcgcgccgcctccgcggcgggcatcgaccccggcgtcctcggcaccgtccccgacccggtcgccaccgtccacgccccccgcgagagcaccacccgggtcgacctgcggggactggaacaggccgtcgagcgcgaacccgtcgagggcgtggacctggacgccctgcgcgaacgcctgggccgcctccacgaccgcctcaccggagccgccgaccgcgccgccgaccgcgccgacctggccgcccgcctgaccgggctcaccgccgccgaggccgccgccgaccgccgcctcgtcgcgctgaccagcgaggccgagtccgccgacgccgtgctcgaacgcgcccaccagcgcgagcaggacgccatcgccctcgtacggcgccagagcgccgcctacgccgagggcgtccgcgcctggtccgcccggctgcgcgactccagccacgcgcacgccctgggcggggccatccacgagctggagggcagcgtcgaactgcccatcgacgacgccctgcgcgtcctggaccccgcggtccccggcagggtggcccgcctggcgcacgccgccgtggaccccctcctggaggaactgcgcgcacgccgtgacgtggccgtcggggaggagggccagctctccggcgaactcgccgaactggcggaccggcgcaccaagaacgccgagcacgcccccgagcgccccggatgggccacctacccgcgccccgagggggacggcgtcccgctctacctggccgtcgacttcgcggacgggctcagcacgcgcgagcaggccggtctggaggccgccctggaggccagcggactgctggcgggctgggtccgcgccgacggcgccctgcacgacccgaccacgcgcgacctcatggtctccccggtgccggtccccgcgctctcgcgccccgtccgcggccggacgctgctcgacgtgctcgtcccggccgccggtcccaccaccggccgcggcgtcgaccccgacaccctgcgcgccctgctctcctccatcgccctggactccgaggcggagcgggtccgcgaccccgaggacgccgaggccgaaccccgccaccgcaaggacagcccaggagccgtcgccctctccagcgccatgtccctgtccggcggctggcgcctgggcgtggcctccggcgcccactacaagagcgaacccgagtacatcggcgaggccgcccgcaaacgcgcccgcgaccgcaccaccgccaacaccgacaggcgcatggcgatcgccgaggcgctgctcgccgaggcgggcgagcgccgctgggccgtcgagcactcctacgccgaactcctggaggtctcccgagacctgcccgacgccgcccccctgatccgcgcctgggccgtcctggagaccgcccgggacgacgtggccgccgcgcgccgcgcccacgacgtggcccgcgacgcggccgaggactgccgggccgaactgctcgacatccgcgaggggctgcgccgctcctccgtggtggagggcaccggggagggcggacccgcggagggggagaaggacctgcccaccgcgcgcgccgacctggacagcgccctgcgcgccctggaccacctgcgcgtactcatcgcctccgcgctgcgcgacctggacgtcctggcctgggagctcgccgaccacgagcaccacgtcgccgcctggcgggccgtccgggccgaccgggtgctggccgaggacgcccgcgccgcggcgatcgacgacatgatcaccgtccgccgccagatcgagctcggcgaccgggcgcggggcgtggccgaagaacagctcgacgccgcccgcgagcaggtcggggccagggccgaggaggccgcccagcggctgcccgaactcgaacgcgacgcccagcgcgcccgggacgaacgggtcagcgccgaggcgcgcctggccgcggccacgcgcgagcgcgccgagcaggtgagccgcgcgctcgcggccggggacggcctggtctcctcgctcacctggaccgacgcgtccggagccgaggcccccgacgccgtgctgctgcgcgccgcgggactgggcgcgtgcgccgaggacgacgcgcccctggccgcctacctggccgcacgcgccgagaccgctccccccgggcccgacgcacgcctcgccctgctggaggccttcgtcatcgggatggaggagggcctggccgccccggagggcgacgacgcggcggacgtaccccgggtcgacgacagcacggtcctggccagccgcgaggacctggaccgggtgctcgcctcggcgggctggacgcaggtccgcaccgagatgagcgaaccccggggcgtcaagcgcctcacggtccacgacgaggacggcgcgcacgacgtcaccgcctacgccgaacggatcgccgcagcggtcgccggggccgaggagagcgtcgcgatcgcggaggaggaggccttcgagcggcacctgctcggggagctggccggccacctggcgcgtcaggtcgaggaggccagggccctcatcgccaccatgaacgacgtcctcaaggacgtcaccacctcggccggtctgggcgtgcgcctggactggcggctcgcccccgacgcgggcgcggacatcgaggcggtcgtgccgctcctggccaccccggcccgggagcggacccgcgtgcagacgacccggctgcgcgacgcgctccggcgctgcatcgaggccatccgccgcctggaccccaccgccacggggggcgcgcagctgcgcgcggccctggactaccggtcctggttcaccttcaccgtgtacgtgaccgacggcgcgggcgacgaacggcgcctggggcaccgcacggcgctcagccagggcgagcagcgcgtggtggcctacctggtgctgttcgcggccgccgccgcgcacttcgacgccctggcggcccgggcgccgtgggcgccgaggctgatcctgctcgacgacgccttcgccaaggtcgacgagcccacgcacggacgcctgctgggcctgctggtcgaactggaccttgacttcgtcctgacctcggaacgggtgtggggctgcttcgccagcgtccccagcctcaacatctacgagtgcctgcgggacccgaacgtgcccgggatcgccaccctgcacttcacgtgggacgggagcaggaggcgcctggtgggggtgtga

SEQ ID NO: 49945 - DNA, 1461 bp, Caldicellulosiruptor obsidiansis OB47
atgataaacttccaagctccgcttttgggaaaactcaaatattttgagtacctcacagcgcctaactcagaaagatacagaacaatcatgagatactgttttttgtgccatttagagtacaaaaacagacttacaaaagaggaaattttcacgtttttaaaaagttttccacagtttgcagactacactgaacagatgtgcgaacaggatttgaaaaaccttgttgagtggggtaatttaaattcaatccaggatacgtcaaagaccaggactgttgaagagttcaggaacaaaagatttttgtatgaacttacacctataggactcaggattgaaaggtttttgtttgaacttgaaactcaagaagacacaaaagcagagctaaatcccaaacacgttgaaaagatttattttttgcttcagcatgtggacagtatattgcaagacccgcaaaaaagagcagttgactggtgggacgagctaacaagatcatttgaagagattgaaaagagctattcagagtatatttcaatgttaaagtcgtacgaagctgaaaatctcatgctcaaggaaaagtttttggactacaagtcaaagcttgtacagtacctgtacaacttctatgtcatcttccagaactatcttccacggataagatctacctttttgtcattggaagagtctaaaatagaaaagctcttgaattacataatcgcccaggaaaaagagcatcccaaaaacatattcagagatccagagagcatagaaagaaatataaaagcaagattcgacaacataaaactctggtttgtcgcgtcacacggtcaggcagaaaaactttctgaccagatccaggggcttataagaagggtgtctgaccttgcagcaaggctttcggagctgtcaagtgtcaaagtaaacaggcaggaggagttcaagcacttggcaaaaatcttctcaagccttgatttggcgacatgtcacaagctttctgcagttgtgtttggtgtgcttttgccacgatacattgcagccgaggaaaagagacagagcgagcttgcaagccttagcattcttgacgtgccaccgatgaaaagcttgcttaggtcaagaggaaggcttgtgagggaaaaaagcagggttttaccggcatctgaattttctgaagacaagaagaaaaggtttgaggagtataaaaagaagattgaagaggaagaaaagcttgttgctgagcttataaaagatggaaggattgagtttgaaagccttcctgttttgactccacatgtgaggaaaaaacttcttgtatggctctcacgaggactttcgtcaggttttgggaatacagattcagggaaaagatttaaagttgtaagaccgaaagatgataggcgctgtgttttaaggtcaacagatggtgagcttgagatgccggcgtatgtaattgagtttgttgagtaa

SEQ ID NO: 49946 - DNA, 1224 bp, Caldicellulosiruptor obsidiansis OB47
atgaaaagtactcttttgaagctacttagcaacttttggattttgaaagaaaatgacgtggaaagctattatgagtgcaaaaacattgacaaagagttaaaagactttatagtttccaagctgggactgaaattttatgccacatctgacatggtcagacttgaaaaggtaccgcttgtcccaagagagtacatgggaattttggactttgaagagccgaaagactatgtattcttctgtcttgttcttgcgtttttagaggacaagggcaaagacactcaatttttgcttgaggatatcacgcagtatatacggtcgaattttcctggtgaggaaattgactggactatgtattctgacagaaggtcacttattagagtgcttaaattttgcgaaaagatgggacttatcaagatagatgatggcaatcaagagttgtttgtggaaagagctgatgtagatgtactttatgaatcaacagggctatcaaagtactttatgaggatatttcccaaaagccttgttgagtattcgtcagtcgaagagattttaaatagcgagtttgagtttacaaatggactttctgaccaaatcactgatataaagagaataaaagcctacagagggcttttgatagatggcattgtagattttgagagtgaagcaccactttattacattaaaaagcaaaagacaactattttacaggaccttgaaaagtttgtaccagagcttgagcttcacctgttcaagtcgtttgcctaccttagcgttgaaggtaactacaagtatacctatcctgacgattcgaacctgtgcgatgtgttgcttttgtgctcaagagaacttcttgaaagggttgaaaaaggagagctaagatttttgtctgcacatgagatgcttgaaatttcgcttgaccattttaagctaattgtggaggatgtcaagaaaaaatacggacatttttggaacaaggagtggagggaaaaatcaacagagaaaatatttgaagaacttttagagtttttgcagcttcacaattttgcaaagacaaatgacgatggatatcttgtcatatctcctattttttttaggattgttggtgaatatcaggattatgagacgaatagtcagctttccgaaaaagataatagtaatgagaaagtttttgaggatataaatgtagatggaggttttcattttgaagatgagcaaggaaaatag

SEQ ID NO: 49947 - DNA, 4053 bp, Caldicellulosiruptor obsidiansis OB47
atgagcaaggaaaatagatgggtgctcagcagagccggagttttcaactactggtactatgacgaggagtattttgatttttacgatggcaggatgcttattcgtggtcctaatgcttcaggcaagtctgtcacaatgcaaagttttattactctgcttttagatggcaactatcatccgtcacgacttgactctttcgggtcaaatgcgcgaaaacttgaagattatgtccttggcgagcagggaccaggtcagaaaaacgaggcaatagcctatctttttcttgagtttaaaagacaaaatgtatttgtatccgtaggcatgggaataagggcaaaaagaggcacaagcactgatacgtggtattttgttctaacagacggaagaaggtttgggattgacatcttcttttatgaaaaaataggcgaccaaaaaattccacttaccaagaagaagtttgaaaacctcataggagacggcggcaaggtattttcaagcagaaaggattatatggaagaagtcaacaaaattttgttcggttttgagaacatagaagactttgagaatttgatagacttgattgttcgaataagaaccccaaaactttcgagggatataaaacctgacactgtttgcaggatgctgcaagagtcgcttcctgccctgtctgagtcagacttgcgtagcctttctgactccatagaaaacatggacaagattcaaacagagctgaaaaatcttgaaattataaaagatgtgctggaaaagttaaaaaaggtttatgatgagtacaaccagctgttgcttgcacagagtatatttagagtggttgagagcagcaaagagtactatagcctcaaaaaagagcttgaaaatactcaaactgaacttgaaaaaaatagtaagttgaaagctcaaatagaagaaaaaatagaagatcttaaaaaagagcaagagtctttaagttttaggcttgaaaacataaaagaaagtgatgtgttcaagcttcagacagagctttcaaccattgaagaagagctcaaaaacatcgaaagccagaaaaccaaaaagatttcgcagctaaatgcagcttctcagaagcttgaaaaggaaagacaggaattaaaagctttagaagaggatttggaaaagtgcagaaagagaataaaggattatatagatgaagggaagttacttgttgagttcataggttttcagagattcttggaaacgctggatatgtatcttcttcaaaacggcagtcttgatattttaaaagaggagctttcctctttcttatctcaagttgagattgttttaaaaaactatgaaaagctgagtgaaattaagaaagatttagatgatctttatagaaatcttgaccgcaacaggacagaagcacaaaaagtagaagaagaaattcaaaatcttctttttcagcttgaggatgtaaaaaatagcttaaagaacgccatttccatctactttgagcaaaatgaggtgtttaaggctcaggatgaacaaaaaacagtgatattccaggcgataaatagttgtgagaaaaaaggagattatggcagaatatactcaatcttagatgatatttataactttcattaccttgctatctcagacacaataagaaggcttgaatttgagatagaaacgttaaatagccaaattaaagctaaaaaagaagagattgaaaaaattaaaagccagaaggatgacgagattatactctcgcctcagcagaagaaggtaagagataggctattgcaaaaaggggttccatttattccgttttatatggctgtggatttcaaagatggtgtggatgagagaaagaaagccatcattgaagatgcgctgagttcccttgggattttaaacgccttgattgtcccagaaaaatacaaagatgttctttcagatcttatggatgatgaaaaagaaatgattctaatttcaaaacctgcgtatttttcgcatctactgaaccagtttttagaagttgccaactttgatggacctattgagctaaaacaggaagtggcagctgtgattgacagtatctttgccaccgaaaaagacgatggcatttacatctgcgaggatggaaggtttggcagcggaattttaaaaggtagaacaaccacgtgcgaaaatgcaaggtttattggtattgaaaatagaagaaggtacaggcagatgctcatatcacagcttgaagacgaaatacaaaagatttcacttgaattagagggcaaaaagcaggagaaaaatgtacagaaaactttgcttgaaaagctaaaagaggagagaaacagttttccttcaatggttgaccttgacactgcatttgagatgattgaggagagagaaaaccacaaatcaaaacttcaaaaagagatagagtttttagaaaagaagataagagaacttttgggaagagaaaatagtttaaagcatgagatttctgtcattgcaacaaagctttctgtcacggcgacaagagacaactttttgaagctcaggcaagaggcacaaaaacttgaaaggttgctctttgttctggaaaaagagactgagatggagaaagtggtttcaaactctgcaaccacaaagaaaaagctgattttacagatagaagaaagcctgcagagcttaagtttagaccttcaaaacttgaaggcaagatgggaaaacctagatgtaagaagaactgaaattgtaagaagactttcaagcgacgatgcacaaaaactttttgaagaggaaaaaagagctatacagcgtcttaatagtattccgaaagagatagaagatttcaacaaaagtctgcaggaaacaattgcaaaaatatcacagcttgagactttgattgagataaaaggcttacaccttgaaaaggctaaagaagaatattcaaatagccttgagatactaaagattgaacttggttttggttttgtattccgagaagaaaaccttgaagatgagaaaaggcttttagagtttgcaaaggaaaaaagtagctttgccagtgagtttaaatctaaggatttgaaccaggttttgcaaaggctcatatcggcacactatgcggcacaggtgcagcttgcagagtttggagcaaatctttatcttaaagaggatgataaaactggttatgcaagatatttatggacagcaaagaaggatgggcgactgctttcgttttatgagtttttggagaaaatagaatctgaaataatcgagaagaaaaatcttatcacccagcaggaaagagagctttttgaagaggttttgataaaagacatagggcgaagaatctcaagtaagataatgcttgctcaggactgggtaaagagaatgaatgcgctgatggacggcatggacttgtcaggtgctcttaagttcagactttcgtgggagcagaaaaagcaggaacttgaagatgagctttcaactgcggagttgataggactcatgagcaaagacttgtctattgcaactgatgaagacaaacaaaaggttgtgagacacttcagggcacgtattgaaagagcaaaaagacttcaggactcacccgacagttttcgaagtctttatgagataatgaaagagattttggattacaggcagtggtttgagttcaggctctattatcaaagaggtatggaaaacaaaagagagcttacaaacaacgcatacgacaagttttctggtggcgaaaaagcactttccatttatgttccacttttagcagctctttgtgcaaagtaccagagcgctgcaagttttgcaccgcgcataattgcgcttgatgaggcgtttgctggcgttgatgagaacaacattgaaaagatgtttgaacttattgaaaatcttgaatttgactatattatgaactctcagattctgtggggagattacaaaacagtgccaggtctttgcatttatgaacttatttcagaccgaagcaaaggctgtgttctcaaagtaaaatacatctggaacgggtacaagaaggtgttggtggagatatga

SEQ ID NO: 49948 - DNA, 1263 bp, Caldicellulosiruptor obsidiansis OB47
atgagcgataaaaagcttttacaagagtgcatagaatacttttcgcacaagggtttttcgcgtgtgctggagctcatatatgataaatacagatcacttggcaggttttcaggcagggttgtgcttgaaaagccagatccagttgaaaaagagatgctttcgcgatatcttggaagaattataagcggtgataaagtagttatcaatgtaaaagagtttgcgcaaaagagatttgagcagaccaaattttcttcgcttgattttaaagatgtgctatcacacgtattgaaaaaagatgttttgacaaaaaaagaagaaaaagaaagcagacaaaagcaactttcaagttttcttgaaaagttagaaaaacagttggcaaacggcacagatagtgagtgtgtatttcaagctgtaaaagaaaatttcaaatggtttgaagggtattttaagaaatattctgaagaaaagcttttaagtattttaagccatagcataaaagctgccgcaacaaagccagaaaaaattgaaagtcttgcagtgtttgcaaccagaatagcacatgacccccacttttttgacgaagaccgcgacagtggcaagatatttttgaagattttaagcctgctgaaaaatgttgaatatccaaagtcttcagaagaaaaagcagagcttttgtacatgcacaacattgtcatagatgagctttcaaactggtgtttagtgtatggtataggtgcaattacagaaaacgaaaaagaggacgaagcgctcaaaatctttgctttgcaaaaaaagccggtgattctgcctctttataccattaaggattacaagcagttttttggatattcaaataaaattgtggttgtagaaaaccctgctgtgttttcaatgctgatgcaagcttgcagtgatatttctctcatttgtacaaacgggcagctaagactttctacaaagattttgcttgaaagtctttgtaaaggaggctttactatattttattcaggtgactttgaccctgaaggactcttgatagcggataggattgttcaaaactatggtgctattcccctttgcctagatgaagaaagttatcttttgtctttgtctaataatagaatttcacaaaagagacttgtgatgctccgaaacgtaaagagcccagagctttttgatgtatgcagtaaaatgaaagaattaaagctttcggggtatcaggaaaggatagttgatagaattgttgaaaagttaaaaagttaa

SEQ ID NO: 49949 - DNA, 1281 bp, Micromonospora aurantiaca ATCC 27029
atgcgtcgcttggaggagtggagggtcgtcgaggtctggcaggaccgggcccgccgggacgaggacttcctgcggaacttggaccggtaccaactcaccgaagtcgctgccgatctgcatcgcgcggtcagcagtatgggccaggacgtcgcagccgatgccgcggcgacacttgccccgtcagtgctgaccggccatctcgggcgtctgcgaggtgcgattgcgggtgacccgtcggcggcggccgaggcatgggctgtcatcaacccgaccctgacgacgatggcgaacgcggcggcgggctggcagggccgccttgccggtgcactcgccggcacgccggatgcgggcaagctggctcagatccaggacaccctgcgacggtatgtggacatgtggggtgctgggatcgacacccactctgatcaaatcgccagcaccgtccgggtactactcgagacgccggagcagacgtggcggcaggtagctgtccacggtctgggtgccactgcggacggcgcctcgctcgaccggcttgccgcctcctacgtgcaaacgctcgagacactggggcgctggttcgacggctcgaacagccaggcccgccggttgcgtcggcagatgcgcgacacgatcagtccgctggtgcgcggccagcggaccttggctgcggtcggcggacacgtatcccggcgtgccgaactgctcgccctcgctggccgacttgaagccgccgaggacgacgccaccggctgggagatctggtgccgagcaaccgggctgttctctgctcgccaccttcccggagccgggccaacgccggccggaaatccgggagcggtctctttctgggatgccgaaccggcaccggtggcggcacggctccgcaagcaagggccacgcggaacgaccggaagcgcggcccggatcccggaccgcagtcaagcccgagcggcggctcgggctgccgccgctcaggaacaggcggcacgcgcgcgtacggaagaggctgtgctcgcccggtctgggctgcggctgtcgcaatggcgagacttgaccgagccggagctggagatgctgctggagttgctcgccacgctcgctgcggcccggctggacgagtcgcaggtgtcatcggcgatgaccggagacggccggtggatgctgcgagccgatcctgccccggttgcccatccgacggccgtggttgctactccgacaggccgactggtgcacccggatattcggctgcacatcacgctagcggggcgggcggtctga

SEQ ID NO: 49950 - DNA, 1161 bp, Micromonospora aurantiaca ATCC 27029
atggggaccacctcgggtgagacccgcaacgtacaacgcgcgttcgtcggcctgctggccaagccgctggtcacgccggacaccgatgccgagctgtaccgactggtggcacggcggctgcaaccagtgaaggagtcagcgcagcggctgggctaccgggtgcagcgtgtcggccgggcggtgcggcttgtccgtgttccggtagcgggtacggtgacgttcccgccggtaccggccgacgtggtatcgcggcgggtccgctcgctggcgtgctgtctggctgcctgctgcgaggagaccagcggcaccgtcacgctgcagaagctgtcggacatggtccgggacctgatcgctgccccgggggtgcaggtcgcaccgtacgacccggaggaacgtccgcagcggaagctactgcgtgacgccgcccggctacttgaggagttcggagtgctgtgccggcgcaccagcgacgagtcactgctagacgaatggaccgagtccgggcagggcgtcggtgctggctacgccgtcgatcgcgacgctctgctgttgctgaccagcccggacgtcctcgagttggcgtttgcaacagagccggcgggtgaggagcaatgggtggccacccgcacgatccggcagctgcgggcgctgatcgagacgccggtggtgttgtacgcggatctgtccgacgatgacgccatcgcgttgcgggcccgccgcggcccgcgcagccacgatgtcgccgccatgaccggcgggcacatcgaggcccggtccgaaggcctgctggtcgtgctgaccgacgacgaacgtcccgcgacggtcgtcgactggccccgcgcccgggccgccgactgggtggcgctgctgatggccgacatcgccggccggcacggcgcccggcagagcgatgggacggtcaccctgaccagcatccaggtcgatgaagtcgtcgacgatctggtcacctggcgcggcgagtacatgaacagcgcccagaagcaggcgcccggcacgatccgccatgacgcgcagaagcagctcgtcgaactcggcctgctccgcgtcgcccatgacggctcatggaccctcttgccggtcgccgcccgctaccgcgaccccgacatcacgatcaccacccccgcggagaccccccgatga

SEQ ID NO: 49951 - DNA, 4335 bp, Micromonospora aurantiaca ATCC 27029
atgagcacgacatttcccgacgacgtaaccacgatgacgacgcccggaccggccgcgaccgacgaccaactggccgagtggcgcgacgcggtcaccacaggtggcctgcctcagcccggatcgtcacgctggcaggggctgcgagccggcgtcgtcaacctgtgggagttcgacatcgccgagtactggttcgctgatgggcgcggccagttcgtcggtgccaaccaatccggcaagtcgacgctgatggcgttgaccacactgatcatgctcgccggtgatctcggccggcagtacgtcgacacgttcggcgagtccgacaagtcattccggtactacgttgagccgaccgatgacgcccgcgaccggcgcgacagctcagccagcaccaaccgcggctgggcctgggccgagtacggccgcatcgccgacgacggccaacccgagttcttcacgaccctgctgtacgcccaggccaaacgcggtgtgaaggccatgccaccgacctggatcgtgtgccggggcaccgcccgagtccgggacgggctgaccctgtgcgaaggacaggcagtcgcggtcccggcacagctcggcgccccggacgggcttgtcgtgtgcgagaacggcaaacagtacgccgcccggctggcccgggacctgttcgggttcaccgactccgaccggtacgacaccgtgctggaaatgctcaaggtgctgcggaccccgcacctgggccaacggctgaacccggactggttcaccgagcagatgcgcgccgcactaccgccgatcgcccgcgcagaggttgaggaactcgccgacggctggcagcaggtggagcagttgggcaccgaccgggacaccgcggtcgaggcgcgcgaagcggtcgcccactacctcgccaaggggtggcggccgtgggccgacgcggtcctgcggctacgcggcgacgacctgatcgccgcacacaccgccgctgaggatgccgaaaaggctgtgcgcgccgcgaccggcgcactcgacaccgcccgcgacaacctcacggccgagcagaaagtcaccgacaacctcctccgctcgttcaagcaggcccaagccgactacgagcaggcactacagacgcaggcctacaagggtgccgcacagcggacactgaacgcgcagcgcctacggggcgaggcggacggggccgcggaacgtgcccgtggccttttggccgatgccggccgggctcgcgaagaccgagaccgtgccgtcgcagcacggggccgtctggagaagacggcagccgacgcgcgcgaacgcgccggggcggtgggcgaacagacggcggccaaggtgacgtccgccggtctggggaaccaggcatccgagtgggtcgcggcgggcgaaatcacccgcctcaacaaggcgatcaagacccgaaaggagaccatcccgaacctgcggcggctgatccgggcggctggcgaagcaaacgccaagctggggactgccgacgagcgggccaaggacgcgcaggccgagttcgaccgccgtaagcgcactgccacgcaggccgccgagacggcggagaaggcgttgcaggcgctgtccgacggtatcgagcggtgggcgctgcccctggctgccgaggccccggcaacggtgatccgggagcagtggatcgccgcggtcaccgagcaggcccggtcgccgcagccgaccgctgtgctggcatccctgatccgtagtacgtggctcgatccggtcacgttgccgctgactcggcaagcagtcaccatcaccacccgcgccgagcagctgcgcagcgacgcgaacacgtatgacgcggacgccgacaccctcgaagccgcgggtgacccagcgcccacccctccggaacgctggacccgccggccgcggccagcgttcccgggcccgcacggcgccccgctgtggcggctgatcgacccggcccccggcacggctcaggacacaatcgattacgtcgaggccgccctggacgctgccgggcttctcgacgcctgggtcagcccggaccgcctgtggctcgccgaccgcgacggtgacgagaccgtcatgacgcttaccgccccagtggcgacgggcggatcgttgggggcggtcttgcagccggcggaggacgccggcgaactgtgggcggccaccgagcaaatcctcgccgcgatcggcttcaccctagacaacactccgttgcaggcttcagtagccgtcgccgcggacggccgctggcagaccaccaccgccgctggacgtgctgcccgcagcagccacggtgccgaactgctcggcgtcgccgcccgggccgctgctcgccgccgcaccgtcgccgaactacgggagaaggccgcccgagcacgtgcggaagccgacatccttcaggaacgcgcagaacaactgcaggcccgcgtcgacgagctcaccgccgccggcaccgttccggaagatgccgacgtcgtccgggccgcgatcgcctccgcgaccgcgtacaaagagctcgaaaccgccgagcagcgtctgatccgccgccaagacgaacgtgccgtagctgacgaaaaggtcaacctcgccaacaccgaaatgctccgatacgccaacgagcatctgctgccctccagtgaagagcttctcgatcagatcaccgccagcctggacaaagcagcggaatccgtcgcggaactcgccggtgcactcgagaagcagcacggcgccgagcgggaacatcgcaccgccgacggtcaggcgacttccgccgaggaccggctcaaggaggcggagcggaagcacctgcaagctgccgaggacgccgcaacggcggatctgctcgccacccaggcagagcaatccgtcgatgacgacgaccaggagcagctcgcccgggtgaaacaactcgttgccgatcgcgacagtctcaacagccgggtcgaggccagccgcaagaagggcgtcgcgctctccgaggccgccgtcctcgccggccagaatctgtcccgggccgatgacgaactgaccgcggcgcagcaccggctcaacagcgctttggacaactggtggattcccgtggaggccgggcttgccgccgcacgcggaatcaccatcgagccggaacgcaccctggcggccgcgctcgaacaggccacaaccgccgcgcagaaactgcgtccggcgcagtggcccgtcacgagcgaggagaagggccgccgcgtcgaggcagcgctgcagaaggccctcggcactgagctcaccacgctacggacagtgctcgaatccaagggcggtcgcggggtcagcaccatcgaccccgacgccgctggcggcctgaccgctgtcgcgatcgtggttgacgcctcaggcactcagctcagccccaccgacgccatcgactacctcgacggccttgtcgtgcggcttacccgtagccacgacgagaagatgaactccatcctgaccgaactactgtcctcgaccttcgttgaccacctccgcgatcgcctcaaatccgtcatccggctgcttggcctggtcaacgacgtacttggccgccaccccaccggggcgaacaagacaacgatgcggctgcgtcgtacgcccgccgaagggcagcgggccgcattcgagatcctgaagaccctgcagaccggctccgtcgaatcggagacagtgcaggaacagatccgcgtcttcctcaccgaacgcatccgtgaagcgcaggacgccggcaacgccggcccggaggaactgaccgaccggctcgcggaacttctggactaccgcaactggttcgacgtcgtcgccgacttccgcgtcggagagggcaagttcgagccgttcaccaaacaggtccacggcgtcgactccggcggcggcaaggtcgtcaccctgctccaaccgctactggctaccttggtcgccctctacgaggagtcaccgatcgccccgcgaccgctatggctcgacgaagcgttcgtcggtgtcgacccggacaaccgcgccgccatgctcgaactactggtcgacttccgcctcgacttcctgctggccgggcccagcccgctcgtggcaaccgtccaggtaccagctgccgccctctggttcgtctcccgcgcaccggcccccgccgccggcgtcgacctgtccctgatgctgtgggccggcaacaccctcgaacgggtaccgatcgcagacatggccgccaagaccttcaccgcgaaaccggtcccggccgacatgccaccggacctgttcactgccctcggcgacgacagtgacagcccggagaacgaatccgacgatgatgaggaggtgcggtga

SEQ ID NO: 49952 - DNA, 1143 bp, Micromonospora aurantiaca ATCC 27029
gtgagcgcgtccgcggaccggtgggtggccaccggcaccggcccgaccaaggtccttgccgcagcgcgtgaacggctgcagaacggtcacggcggcgaccgggtccgcctgaccgtcgaactcgacgaacgcgaacgcgctcaggtcggccggctcctgggcgtcgcctgggaagcctccgccaaagcgataaccctcggcagcctccgtgccggcctcgccgccctcgacgacgacctcgtcgcggtcctcactcggcacggcggagcacccgacaacctgcgagccaaacgcgccgccaacctcgccgcccgcactgccacgatcaacgccgcctatgaggcattgatcgcagccggctggcccgcccatgccgtcgaccacgcccgggcgaaacggtggctcgaacgcgccaacgccgatcacgtccctcaacgggcggacgaactctgccggttgtggcaggcgctgcccagcgacaaccggccgctgccgcaactggccgacgcgctcttcgacgacacgcactgcctcgaccgcggccaggcactgggccggctcgccgcccgcctcctcgccgcagccggtgctgcaccaaccgaggcggcagaagccgtcgaccaggcgctcacggccacctcctggcggcgcacctgggcctcgttcggcgtcctctgcgacgaggtctcttccaccgtcctcgtcctcggactcccgctcgtcggcgactcccccgccgcagacctgagcagcacggcggcccggcgtggcgaaccgctatggctgacctcccggtcgctgaggggggcgtggcgtccccacgacgacgtgcacacggtcagagtgtgcgaaaacccgtcaatcatggaggccgcggccgacgagcccggcaccgcgactctgccgctagtctgcgtctacgggcgcccctcctcggccgcgtgggcgttgctcgaaggccttgccggagctggcgtacggctcctgatcagcgcggaccgagacaccgccggtcggagattcgccgccgagatgctgcgcctacgcggcgccgaaccctggctccccgaaatcgacggcatcttcgaggagtcacggctcccagagttgctggctgacctgcgatctgcggttcaccgctga

SEQ ID NO: 49953 - DNA, 1485 bp, Thermoanaerobacterium thermosaccharolyticum DSM 571
atgtctgataaaataaattttaatgttataaagcctatcgatgaggcaagatatcttactgctgaaaatgcatcaaggtatcgcctcatcatgcgatatttttaccagaactatgagcggcttagatactggttgtctaaggaagatgtgtataactatgtaaagaattttgatttgttttatgattatacgctggaaaagtgtgagcaggatttaaagtcgctgactgagtggaaaaacttaatagctgagcaggacactggaagagcccaatctgcagaagaatttaaaaacaagaaatttagatacatgcttagcgagtattctatagagatagaaagaatgacaattaatctagaaaaaataaaaggctatggtggttctctagagccatctttatttcagagattgtatgaaaacttaaagaaaattgatgatatatctaaaagcgataacttggaagctgtataccggtggtggaaagatttcacttctgattttgaaaatatttatcatagtgccatagactacattgctagtttgcaaagttcaaatgcagatgaactcatgaaaactgatgctttcttaatatataaagacaaacttactgagtatttaagaggatatataaaagatctacagaggttttctcaggttatcgtatcgcttttaaataagattgacaaaaagtcattagatggtatcgtagagaaattgctgctttatgaggagaatataccaaggctggatagggattttgatattaatgacgtcaaagaaaatatattaagcaagtgggagaacatagtattttggtttagaggaaatggcgatgaagatagtgaagcatataggcttcttgaaatatcaaatgagataataagaaagattacaatgtatgcagctagaatttctgaaaacaggttaaggactgccagcagaaaaaatgaatatataaagctttcaaagatatttgcagacatcgatgacataggctatgctcataagctttcatcagtcgtgtttggagtttttcacacgagacatttatacggtgattttgacaaaaggactgaaagcataaatgaaagcgtgtgggatgatgtgccgtgtaaatttatgataaggccaaagacgagaagttatacacaatccacaaagacaaatgctataatagatagggtagaagaaaaagagatgtgcttaaaacagtaccttgaagaaagacacagtgagattgaggaaatatcaaagtatataattgacggcaagatcgtgctgagagagttgccaataattaagccttttataaggacaacccttttaagctggataagcaaatccttaagtcagcctaaaaatatagctaaatcagaagatggcaggacatacaaagtcagtatttcaagaaacaaggtaataactttaaattgtacagacggtgtccttgaaatgcctgatgtaacgatagagtttttagattga

SEQ ID NO: 49954 - DNA, 1137 bp, Thermoanaerobacterium thermosaccharolyticum DSM 571
ttggaggaacttaagatacttttagagaacttttgggttacaaaagatgatacggaaatgtttaatagaatacgtgacaatgaaaagaaattaagatcatttgtagaggataagttaggatatcggcttattgtgaatccacttcttataaagctggagaagataccgggtgatgctgaagagtggatggggatcgaagaatttcaaagtcctatggactacgcatttttatgcctacttcttgcatttttagaagatatggggataggtgaccaatttatactttcaaatataacggagtatatcgagatgcagtatgatggcatagaaagtgttgactggaccctttttaagcatagaaaatctcttgtcagggtacttaattttgcagaaaaactgaaaatgataaaagtggatgatggagagcaggaaagatttgctgagaatcgtgatatagaggtcttatatgaaaatacagggctttctaggtattttatgagaattatgaacagcgaaataagcgaagaaatgacgatgaaagattttatgaaggacgacaggtatgaggacaacaaggttcttgagagaaggcatagggtgtacagaaaacttcttttatctccggctgtttactatgaaggacctgacgaccaagattttatctacataaaaaattatagaaatacgatagaaaaagactttgacgattatctcgattcgaaactgcacattcataaaacatctgcatacataattttcgatgagaataaatatgcatcatcttatttcccagacaataaaaatatatctgatatagttcttcaaatcgcatatgttttaagagagatgatagattccggtgatttaaatgtaggagtaaatgaccgcattgaaattacagaaggacaatttatgaatatcatatctaatgtaaagaataggtttaaaagtggatggagcaaggtatacgctgatatgaatgatgataaattgtttagtgagattacagagtttatggaaagttggaaaatggtaatatacaatgatgatacccactcgtatactttgatgccgatcttaggcaagtttattggtgaatatcgaagtgattttaaaggagcaattcaaaatggatga

SEQ ID NO: 49955 - DNA, 4173 bp, Thermoanaerobacterium thermosaccharolyticum DSM 571
atggatgatagatggataattaatagagctggtcttcttaacttttggtattatgatgatgaagtattcgaattttctggaggaaggcttcttctaagaggttccaatggttcaggaaaatctgtaactatgcagagcttcatacctcttcttttagatggcaataaaagccctgaaaggttagatccatttggctcaagggctagaagacttgaagactatctcctaggtgaagaagatgtaaatggaattgacgagagaactggttacctttatatggaatttaagaaagaaaataaagataattatatctctataggcataggccttaaggcaaagagacatcaaagcatggacttttggggatttatcattaaagatggaagacgaataggtattgatatattgctttataagatggagacaggtatcgatggcaagagagtcaaaatacctttgtcaaaaaaagagcttaaaaattgcattggaagcggcggagaagtagttgattcacaaagagaatacatggaattagtaaataaaaatatatttggcttttcaagcattgatgactatgatgaacttattaagcttttaatacagcttaggagtccaaagctttctaaggattttagaccaacggttatatacgatatattgagagcatctctttcacctttgacagatgacgatttaaggccaatgtctgagacaatagaaaacatggatcaaataaagctgcacctggactcgctgaataaaaacatgaaatccttaaagaagttgaaaaatgaatacgacaggtataataagtttatgctttattataaggcagagaaacttttaatgcagaaaaatgagcttactaaagtacgaaaacaaagcgaggaaatcagacaaagcattgaaaaaaacaatcaggatgttcttaatggagaaaataaaatatcggatcttttaagcgagcttcaggcattgaaaaataaagaaattcaattaaggaaaaacgatgcctttaatacacaaagagaacttgttgaagaagaaaatattttaaaacaattcagtaaggacaaggatttaaaagaggttcagcttaaaaagaaaaaagatcgatattttgaaatagaagaagaattaaaggaccttgaaggcagagaatattcaattgataaaaatataaaggacaatcttgaatgtatggcttccatatctgaagaagtcaatttcgatgagcacaacttctcagaagaagaattgaagaaatcgtatggtaaagattttgactttgatttttggaacaattcattaaaggaatatacagggaaagtgaagaaggcattagatgccctcaatgacgaggcagaggcaaaccaaaagtacaatgatgcattgcttgaagaagataggttgagaaaggcaaatgaggacttgaagcgaaaagtcaatgaaattgagattttgtttgatgaagaaaagaacaggttcattgacaaaatatatgattggtctgatacgaataaacttttgaagcttaatagagaggacatcgaaaaacttgccaggatcgtactgtcatacggtgagacgagcgtgtacgaagatctgatatcatctataaggaagccatatgatgatatcagaggaatacttcagatggatatgcttaaagttaaaaatgagttggacttaaaaagttctcagcttgatgaaaaagaagaggaattaagaaaatggaaagagacggaggatcctgagccagagcgcaatgaacaagttttagaaaacagaaaaagactggataaagcgggaattgcatatgtaccactttataaagcaattgattttaaaaatgatatagatgatgatacaaaaggaaatattgaatcagctcttatagatatgggaatcttggatgcacttattgtgtcaagaagcgatttagacagagcaataaaaatggataaggacatggcagataagtatatcgttccggggacttttaacatgaagcttaatgtattgcagtattttaatgttgtcgattcaaatagcggtgtcagcccggaggaaatttcagatgccttaagcaatgtatttatctacgaggaagagaatgcaacatatataaatgatgatggcacgtatggaatagggattttaaaggggaaagcagcaggaaatgtaaagtcaaggtatataggttttgaatcgagacggcgctttagagatgaaatgatgtcatccatagctaaggagataagcatcataaaagatgagataagagaacttaacgatagacaattgtcaataaagtcccaattaagtgacttagacgtagaatataaaaattttccagaaaaagatgatttggaagaagcgctgaaagaattgaaagaagcacaatcaaatcaaaaatttactgaggataaattgaatgatgcaacccttgctgccaagaagttttttgatgtgcttcaagaaaagagagcagttgtgaggaaattgacatccgaaatcggcatacatgcagatgtgaaagcttacagagatgctttaggtgaattggatgagtacaaaaatctcctacagaaattacagataaattacaatagttatattactattttaagaagcatagagactagaaaaatgcagaaacaggatatcgagtatgacattgataattacaagtttgagattgatgctttagatacaaagataaaaaacagcatagaaaagatcaatgtgttaaaagaaaccattgagaaacttggtatagaggaccttcaaaatgaactttcacagtgcatgaagaggattgacgatataccaaaggaaataaatgatttaactgctaaaactgctgctcttaaagagagaatagtcctgcaagaaaaagaatatgaaagattgagagaagaaataagaaaaaacgaggatattctaaacatatacgatataggattaaaagatgaaataacattgggatttattgatgagtttacaaatctagatgatatgtataagctagcaaagactgttcaatcgcagtacaaagagatgtttaccaagtttgataaagatagtgcgacagaaaagattagaaatgcattttatgtctgtataaatgaacttgtggaatttgggctttcattagatgtagtagaaaatgaacaaagtgatgtgggtatgggcacttatcaggaaatatataaagatttaaggagatatcagataacagcgaaagtaaatgacaaaaagatatccctttatgggctgtacaacatgatcgatgaagatataaagataaacgaaaaccttatgaaggaaaaggatagacagctttttgaggacataatcatgcacaatgtaggacgtaagatcagaagcagaatctttaaagcagaagaatgggttaaaaagatgaatgacttaatgtctcaacgcgatacgtcaagcggccttaagtttcaattagaatggaagccaaaggctgctacaaatgagcaagaacttaatacgagagagcttgtagagctattgaaacttgatgcagacatgatgaaagaagaagattttaatttagtagtaaatcactttagatcaaaggttgaaagtgcaaagaaaatatatgaagaaaacagcaacactgatacattccaccagattatgaagagcattctcgactatagagactggtttgagtttaagctgtatttcaaaaaagaaggagaaaatcgcaaagagcttactaacaatgccttttacaagttcagcggtggagagaaagccatggctatgtatatacctcttttttcagccgtgtactcaatgtatcaatcagcatcatcacaagcaccaaagattatatcgcttgatgaggcttttgcaggagtggacgataacaatatacgggatatgttcaagcttatagaagatttgggattaaatttcatcatgaactctcaagttttgtggggagattatgatacggtgccagagctgtctatatacgagcttataagacctaaaaatgcaagctatgtgtctttgataaagtacaagtgggatggaaagatcaggcatttagttaccggcattgaagaaagtgttgaagcaacagatgatttctcatacgatgaggttgcatatacaagagtaggtgagtag

SEQ ID NO: 49956 - DNA, 1278 bp, Thermoanaerobacterium thermosaccharolyticum DSM 571
atgaaagctgaagatatagacttctttaaaagaaacaaaggatatgaaaggatatttaaagccatacgtgataagtataaaagcataggaaggataggcggtgtaatcaaacttgatgatttgacggattcggagaaagaaattttgtctaaccattttaaaaaagactttagcaagcgaaaatcagcaaatatcgatgtcaataaatttgcagcgacatttttaaataccagatttgaagaatacagcttgatcgacatattagaatcgtattttgatgaaaagctgaccagcaaaaaagatgatatgtaccagtatgcaaatgaaaaagaaaagttctttaatagatttttatctgattatgaagggacaaagtgctggcagtggttgaaatctatttatgataataaagctgtaggcgtaagaacgataaaccagagatatgatagtgatcgcactttgctcgaaagagatataaaatacgtttgtgatgcattgaatagactcccggtttatgagggaaagaagttaaggctgccggtcttttcatcccatattactagagatccgcatggatttgacgtaaatactgactgcggcaaaatgtttataaatgcgttgtctacgatttttggagtatcggatgtaaaaaattctgaagagattgctgagcttttttatagggctggcatcgtgattgatgagatatcgaattttgtgacgcttaaagggcttttggcttatagcgcagataagtgcaacaaggtatttaaagctgcatatgagtgcaatgaagttttgcaagtaccgctttacaatcttagtgagatggacagggttgagagtccatcaaaaaaggtatttgttttagaaaatccaggtgtttttttgtctgtatgcgactttataaagaaacctgttccaattgtctgcgcatatggccagccgaggttgtcattgcttgtccttttagatatgctatataaaaatggtacagacatatattattcaggtgattttgaccccgaaggaatacaaatagcgcatagacttttcaaaaaatatcctgaaagattccattttttgaggtatgatgttgaagattatataaaagctttatcagataagacattgactgaatcaaggcttaaaatgctagataagatcgatatagctcaactgaagcctttggcggacaagatgaagatattgaaaagggccggatatcaagagcttattcttgatgatattattaaagatgtattgtcgatgaattaa

SEQ ID NO: 49957 - DNA, 1488 bp, Thermoanaerobacter wiegelii Rt8.B1
atggaagataaacttgatttgaatgtgataaaaccgattgaagaggtaaagtatttgtctgcggaaaatgcttcgcgatatcgcctcatcatgaggtatttttatgaacagtaccagaaatttaaatattggctgtacaaagaggatgtatatgaatatgtaagtcaatttgatatgtttgctgactatacaatggaaaaatgtgagcaggacttaaaagcacttactgaatggaaaaaccttattgcgacacaagataccagtaaagcttctacgattgacgaatttaaaaacaaaaaattcaggtatcagctgagtccatattctattgagatagaaagaatgaccataaggctggaaagcatcgtcggttatggtgggtcactacagccgtctttatttgaaaggatttaccgcaatttaataaagataaatgaaatggcgaaaaaagaggatttacaggaaataaacagatggtgggaagacctcaataccgactttgaaaatatatatcacaatgcgacagattacattgcaagtcttcaaagctctaacgctgatgaacttatgaagtcagagcagtttataatttacaaagacaagcttatagaatatttaagagattttataaaagaccttcagagattttctgttgccatagagagctttttgaaaaaggtgagtccggaggttgtcaattccgttgtagataagttatgccaatatgaaatgagtatcccaagaattgacagggttttaaatgaagaggaagtaaaagaagatttgatggataagtggaataacatatctttttggtttacaggtcataattttgaagacagcgaggcagtaaggcttcttaatatatcaaatgaaataatcagaaaaataacaatgtatgcggcgagaatagcagaaaacaggatgaaagctgccagcagaaagaatgaatatattgctctttctaaaatgtttgcaaaagcaagcaatataaaagaagcacaccttttgtctgcggcggttttcggttgcttttacacaaggcacataaaaggtgattttgaaagaaagacagaaagtgtaaaccagagcgtgtgggaagaaccgccctttaaagtgattataaagccaaaaacaaggagctacagtaattatgttaagacaaatgcgattattgataaaagtgctgacaagacggagatgctgatggactatctcaatcagaaaaatatagaagatgaaataatagcaagttgcattgttggcaatagaataaggataaaggatttacctgttgtaaaaccttttgtgagggcaacgatacttaaatggataggaaaagcgatggcaagaaatagctttacaggaaagacagaagatggaagaacatacaggcttcatatgccaaagaatggtgagagggcaatactaaaatgcacagatggtaatcttgatatgcctgatattgtaattgagtttgttgattga

SEQ ID NO: 49958 - DNA, 1152 bp, Thermoanaerobacter wiegelii Rt8.B1
atggaagaacttcagatgcttcttgaaaatttttggatactgagagaggatagagaaaatttcaacaaaataagagatgctgagaataaaataaaaccttttgttgaagaaaaattaggatatagattgattataaacccatatattgttaagttagaaaaagtgccgtcagatgttgaagagtggatggggatagatgcatttcaaacgcctatggattatgcatttttgtgtttgctcttagcttttttggaggataaaggaccagaagaccagtttgtgttgtctaatataacggaatacatagaggcacagtatgatggacctgataaagtagattggacgctttttcagcacagaaagtcacttgtgcgggtgctcaattttgctgtagatattggcataattaaaatagatgatggtgaccatgagaggttttcagaaagtgaagatactgaagttctttacgaaaacacaggtatttcaaggtattttttgaggtcttttaacagagaaattacagaagacatgaagattgaggattttttgcaggaggatttaaatctttcaaaccccaaagatgcggttatacagagaagacacagggtgtaccgaaaacttattctttcaccttctgtgtatagtgaaggacctgatgaccaagacttcatgtatataaaaaattacagaaatactatagcgaaagatttagaggagtatcttgatgcaaaacttcacctccacaaaacttctgcttttgttctctttaatgacaacaaatatttaaagtcctattttcccgacaaaaacaaaaacatatctgatataatgctgcaggtaaataaaattataagacaaatgattgaagatggaaaactcgcctataatcctgatgatactatagatataactgaagcagaatttataaatattattttgaaagtaaaggaaagatttagtgatggttggtataagtcttacagggaaatgagtgaaaagcagcttatagaagaggtcattgaaaacatggaaagctttaagatgataaaaagagttgaggaattgcattctattaaaatattgcctatggcggcaaagttaattggggaatatcctccagattttgaaaaaggagaaggtgcagatgagtga

SEQ ID NO: 49959 - DNA, 4167 bp, Thermoanaerobacter wiegelii Rt8.B1
atgagtgaaaaattagctgaaagatggatgattaacaggattgggcttcttaatttttggtattatgatgatgaaatatttgagtttgcagatggaaggcttcttttaagaggtgctaatggttctggaaagtcagtgacaatgcagagtttcatacctttagtattagatggcaacaaaagtcctgaaagacttgatccctttggctcaaaggcgagaaagcttgaggactatcttcttggggaagaagaggtaagtgggcttgatgaaagaactggctatcttttcatggaatttaaaaaagagaaaaaagacagctacattacaataggcatgggactaaaggcgaaaaggcatcaaaatatggacttttggggctttgtaatacttgacggcaggcgtataggtatcgacttctttttatacaaaatggaaataggcgatgacggcaaaagagtaaaagtcccacttaccaaaaaagaacttaagaatagaataggtgaaggcggagaagtagttgaaagccaaaaagagtacatggaaatggtcaataaatacatttttggctttagttctatcgaggaatacgacgagctcataaaactgctgatacagcttagaagtccaaagctttccaaagacttcaggcctactgtgatatatgaaattatgaaagcttcactgccttcactcacagatgatgatttgaggcctctttcagaaaccatagaaaacatggaccagattaagatgcaccttgatgttctttacaggaatatggctgcagtaaaaaagcttaaaaatgagtacgacaactataacagatacattctttatgaaaaggctggggatttagtaaaggcatacagcgatttatacgcatcaaaaaaagaatacgataatttaactaaagatattgaaaattacagaagtacaatagcaaacttaggaaatgacatcatttctcttgaaagtgaaagagaagccttaaagaaaaaggaagaacagctttcaagtggtgatgctaaaagaacccaaaaggagttattagaagaagaggatcgatataagcagtatttggaggataagtctaaaaaagaagaagaactccggaataaacaagataaatattatggtttagaaagaaagataaaaaacactgaggaacaaaaatacaaactggataaagaactacaggataaattagaggatatatcttcaattgcacaggatgtagatttcatggaacatgagttttctgtaagtgaacttaaaaaagtgtatggaaaagaatttgattttacttattggaaaaatgaattaaaaaagcataaagataaaataaagcgtgccatcaatgcattgagagaagaaatagaagcaaataaaaggtatgatgccgcacttaaagagcaggaaaggcttaaaaaagaaagagaagacagggctaaaaagcttaatgaggcagaaaggctttttgacgaacaaaaaagagaatacgttgaaagagtttatagttggtcgcagggcaatgcagagcttaagcttttaagtagccaactggaaggcttaagccgtgtcatactggcgtatggagaggataaaggatttgacgatattttggcttttgtgagaaaaccctatgaggaaatactaaatggaattcagcaagaaattttaagattagaaaatcaaagagaggtaaaagaaaatcagcttcatgagaaagaaaagttattggaggaatggaaaaacaaaaaagatcctgagcctgaaagagatgaacaagtcataaacaacagaaaaaggcttaaagaagctggaattccttacattcctctttacatggcgattgattttaaagaggatgtggatgaagagacaagaggcaatatagaagctgcgatagaagacatggggcttttggatgctcttatcgtccccaaagaatattttgaaaaagctcttcaaatggacagcaatatggcggataaatatgttatgcctggaagctttaatatgatgttaaatgtatctcaatattttagagtagttgacaatgaagaaggggtttcaccagaagatatttcagacgctttaagcaatatatttgtatccgaagaaagcggaacaacctatattgattcaaatggcacatatggaataggagtaataaaagggaaagcacgggataaagttaaatcaaagtacatcgggagtgagtctagaaagcgctacagagaagagcttattaaatctatacaagaagaaatacaggctataaaagctgaaatatctgcaatcgatgaggaaataaatgcaaaaaaattaaggatacagaggctggattacgaatattcggcatttcccgggaaagaagacattgaagaagcatatagatatttaaaaacggcaaaggctgattatgaatacacctctcataaactggatgaacagctttttacagttaaaaactgttttgaggaccttcagaaaaagaaagctgttgtaagagaattgacatctggcataaacatacatccagatattgatacctattcttctgcgtatgaatatgcggaagaatacgcttcagggcttaatgaagtagaaatactatacaacaaatatgttttgcacatttcaaacgaagaaatgttattgcagcaaaaacaagatttagaatacgatattgataacttaaagtacgaaatagacgtactggaaaacaaaatacagagttctgttaagaaaattgagatgctaaaagagacattaaaagaacttggacttgaagaaattgaaaaagaactggagatttgcctaaaaaggctggaggaaatacctaaagagattacaaataaatcagccgaaaaagcaaaacttgaggagcggctacagagaagcttaaaagaccttttaaacattgaagaagagattaatcttaaagagaaaatttacaatattgttgaagagggtttaaaaagggaattagcacttggctttgtcaagcaagaggttgaaatggaggatatgttaaaattaagtaaaagcattctttctgaatacaaaggcttttttgacaaagcgggctttgacagagaaaagtttacagagagacttcaaaatgtgtattttgaaactcgcaacgaacttttggaatatgggctttcaattggcaatatctttgacgaagcttgtgagggagacaatgaaagaataaaagaagcaaaaagtaagcagagaagacttagtattactgcaaatattaatggtaaagtcgtttcattatatacactttattctaatattgaagaggatataatggcgaatgaaagccttttaagagagactgataagattctttttgaagagattataatgcacaatgtgggaattaagataagagcaaagatttttaaagcagaagaatgggtaaagaaaatgaacaaactcatgtctgaaagggatacttccagcggacttaagttctctattgagtggagaagcattcctgcttctaatgaagaagaacttgatacaaaggaacttgtggatattttaaaatccgatgctgatatgctgaaaaaggaagtcttcgataaagttgtaaatcattttaggtcaaaagtagaaagagccaggagggcaatggaggaaaaaaacaatacagaaacttttcacaagattatgaaagaaatattagattacagagattggtttgagtttaagctttactaccgaaaagaaggggaaagccgcaaggagcttactgataatgcctttaataagttgagcggtggagaaaaagcgatggccatgtatatacctttgttttccgcggtttactcaagatatgagggagcatcgccgactgcacctcgcataatatctctagatgaagcatttgcaggagttgatgacacaaacataagggatatgtttaaactgattgaggatttaagatttaattatataatgaattcgcaggttttatggggagattatgacactgtccccaagctttcaatttatgaacttgtaaggccaaaaaatgcaaaggctgtattggtcatgaagtatttgtgggatggaaaagtaaagcatcttatacttcctgaaaaagaggaggttgccgctacagaagtgggtgctgtaaatgaataa

SEQ ID NO: 49960 - DNA, 1295 bp, Thermoanaerobacter wiegelii Rt8.B1
atgaataaagaagaacttaaatattttaaagaaaaaaaggatacaagaggatttttgaaggtatacgggaaaagtacagaagtttaggacgtcttggaggcgttgtaaagcttgataatcttacggaagatgaaaaagaagtacttacaaaccattttaaaaaagactataggacaaaaaaatctgcatccattgatgtggcaaagtttgaagagtcgctaaaaaatacgcgatttgaggagtatacgctaaaagacatactggaatactattttggcgaaaaactcaccagcaaaaaagaggatatggaaatattggcaaaagaaagagaagagttctttaaagagctcttctctaaataccaggaatgtaagtgcattgattggctaaaaagtttgtatgagggaaccgctgtaggggtaaggacagtaaatcagaggtatttaaatgataaggccggattaaaaaaagatataatatacgtatgcgatgccataaacaatttgcctgtttataaaggggaaaagaaaagactgccggtgttttcttcccagattgcacgtaatcctcactattttgattcaaatacagaagctggaagtatgtttataaacgctttatgcactttaatggggctgaatgaagtaaaaggaagtgaagaaatatcagaactttattacaacgttggcattttgatagatgaaatatccaattatgtcacactctcaggacttttggcatatgagggcgatacggaaaatcaagtatttaaggctgcttatgaaagcaatcaagtcttgcaagttcctcttttaaatttgagtaaaattgagagggtcataagcccttctaagaaagtgtatgttgtagagaatccttcagtttttacatctttaatagatgctacaaataaagtatttcctcttgtatgcacatatggccagccaaaactttcttctctcctgctcttggacatgctttataaagaagggacagagatatattactcgggagattttgacccagaggggcttatgatagcagatagattgtacagaaggtataaagacaagtttcactttttaaggtacggtgtagaagattatttaaaatctctttcaaatgaagtcataaatgatgtgaggcttagtaagctaaataagattgaatcacctttactctttgatgtggcaaaggagatgaaaataataaaaaaagcagggtatcaggagcttataatagatgatattataaatgatataaaattgattgaagaaggtaagggggagtggtaa

SEQ ID NO: 49961 - DNA, 1737 bp, Streptomyces violaceusniger Tu 4113
gtggtctgcgagcgaccggtcgctctgcgcatgcggggtgtgacgtgtcagcggcagggcgtcccgtcaatccccgcggctcatcctgtcaatccccgcggcggggatttccgccccggtgtacgtgtcgggaagaatgccgggacgatgacgtcaccagcttccggtccgcgcggcagcgagcacgcgccgttcatccatctgaccgtgccgaacgcggccttgtaccgtcaggtgatgtgcgcgttcctcgcggcgaaggagcggttcgcggtgcatctgcggcccgaggacgtgcatgccgcgctgccgccggagcaccggccgacggatccggacgcggtggtgaaggctctggacagcctcgtggagtggggcaatctgcgggcggatccggacacctcccgggtcaccgcggtcgaggacttctaccgcaagcggttcatctaccagctcacgcaggccggggaggccgccgagcaggcgttgtcggtgtacgacgaggcgctggggcggcgcggtgcgctgcaggcggtggcactgcacgacatcgtcacgcagctgcgggcccttctggtgatcgcggccgagcgggaggagggcgggccggacgcggcgaaggcgcatctggcgctgtcggcgctgacgggccggttcaaggcgctggcggagaacgcgcgggcgttcatggggtcgctgcagcgcaccatggatctgcacggtgtggaggtcgaggtgttcctcgcctacaaggaccggctgatccagtacctggagcggttcatccaggacctgatcacgctgggcgggcggatcgcggtgctcatcggcgagctggagcaggacgggcgggccggtgtgctgctgcggctggcggcggcccgtgaggcggccgacgccgcgcccgaggacaccgaaagcgccgaggagcaggcgtatgagcggtgggcggcgaagtggtcggggctcaccgcctggttcatctccgcggacggccgtgagtcgcaggcccggctgctgcgcgggcgggccctcggggcgatcccgcaactcctcgcggttgtcaggcagttgaacgagcggcgggccgggcgttcggaccggtccgcggacttccgtaccctggcccgctggttcgccgaggccccggacgacgaggcgcggcaccggctgtggcgcgccgccttcggtctgtactccgcgcgtcatctgaccgtggacgccgataccctggccgagcgcacggcccgcccggtgcccgcgtccatgtcgtgggccgaggccgagccgctgcggatcagcccgcaactgcgccgtaccggcagctacgaacgccgcgggcgggcccgccgggtgcaggaccgctccgagcagcgacaccggctcgccgagatcgccgccaggcaggcggaggagatcgccgccgcccgtgcccggctcgcgacggacgacaccatacggttgtccgcgctgggagaactcgacccggcggccttcgggctgttcttgcagttgctcggcgatgccctggccacgtggcgacccggtatgacgaacacggtggcgaccagcaacgacggctcgttggagatccggctgacggctctcgccgacgggacgacggccgaaatccgtacgccgggcgggaccttccgcggccccgaccacctgatcgagatcaccgacctcacccgacccggccgcgcgggacggccacgcaccggccgagacgattga

SEQ ID NO: 49962 - DNA, 1266 bp, Streptomyces violaceusniger Tu 4113
atgaccacgcccctgggcgaggtgctggacggccggcgaacggccgaggtacacaaggcggcccggacgctgttgaaggagccgctgttgctggcgcggggcccgcacgcggacgagttccggctggtgcggcagcacgcctcggagctgcgcgactggttcgaccgcaacaccggctggtcgctgcgggtggatgcggaggccgcccggctggcccggacgcccggcaccttggccgatcccacccatccggcgcgcgaggcgtcccgtggccgcgtcgcgttcacgcgccgccggtatgtgctgctgtgtctggcgctggccgcgctggagcggggtgaggcgcagatcgccctgggccgcctggccgagcaggtggtgctggacgccgccgatccccacctggccgccgccggggtggagttcaccatggagcgccgcgacgaacgcctggatctggcggcggtggtgcggctgctgctgcgctatggagtgttgcggcgggtggccggtgaggaggaggcatacgtcagcggtagcggcgacgtgctctacgacgtgcagcggcgcgtcctggccgggctgctggccgcccgccggggtccgtcgacgatcatcaccgaggacttcgaggaccggctggccgagctgaccgccgagagcgcgctggacagcgacgagctccggttccgcgcgatccgccagcggctgacccggaggctgctggacgacccggtgctgtactacgaggagctgaccgacgaggaactcgtctacctgacccgccaacgcgccttcctcaccgcccgcatcacggaactgaccggcctggttcccgaggtgcgggccgagggcgtcgccatggtcgatccgcacgacgatctgaccgacgtacgaatgccggagcagggcacgcacgggcacgtcaccctgctggtcgccgaacacctggcggccatggacggcggggtgagccgcgccgacctcgagcgcaaggttcaggagctggccgccgaacacggtgcgttctggtcgaagagcgccaaacagcccggcgcggaggcggagctggtcggccaggcgctggagaggctcaccgcgctcggcctggtcgccgccaccccgaagggcatcgtcccgctgcccgcgctcgcgcggtacgcggtcggcgagaccgtcgtgacggaaccgggacaggcttcctcccgcacaccccgtgttcctcgcacgccccacacactcaagcgaaaggcaccgcagtcgtga

SEQ ID NO: 49963 - DNA, 4146 bp, Streptomyces violaceusniger Tu 4113
gtgaccgccctgcccgacccgacacccggccggtggcagccgctgcgcatcggcctggtcgacctcttccattacgacacggaggagttctggttccgtgacggccgcctgctgctgcgcggcaacaacggcaccggcaagtccaaggtgctcgccctgaccctgcctttcctcctggacggcgacctgtccgcccgccgggtggaacccgacgccgacccgggcaagcgcatggagtggaacctgctgctcggcggccggcacccgcacccggagcggctcggctacacctggatcgaattcggccgccgcgaccaggactcgggccaggcgcacttccgcacgctgctgtgcgggctgaaagcggtagcgggccgcggcatcgcccgccactggtacgcggtcaccgaccagcgcgtcggtgaggagctgaccttgctcgacgccaccggcaccgcgctgtcgcgggatcgcctggccgaggccgtcgccgcacgcggcatggtctacgaccaggcgaaggcgtaccgccgggcggtcgacgaggcgctgttcgggctcggcgagcggcgctacgccgccctggtcgacctgctcatccagctgcgccagccccagctgtccaagcgccccaatgagacggcgctgtcccgcgcgctgaccgaggcgctgccgcccatggaccaggcggtgatcgccgatgtggccgaggcgttccgctccctggacgaggagaaggaggaactgcgagcggccggtgaggccgaacgggccgcttccgccttcctcgaccactaccgccgctacgcccgcgtggccacccgtcggcgggcccggctgccgcgcagcgaacacgcccgctacgaacagctgcaccgtgacctgtcccaggcgcggaccgatcgggaggaggccgagcggcaacgggcggaggccgcggagcggatcgcccagctggaggagacgtccgtgcggctgacggcccaggacgccgcgctgcgcgcgggtccggagatgcgcagcgcccggaagctggagcaggcggcggccgatgcgcggcgcaccgccggcgagcgggcccgagcggagacggaccgggaccaggccgcccaggcgaactcccgcgccctcggccgcctgacgggcgccgaagggcggctggcagcggccgagcagcaggtcgggaacacgctgcgccaggcaggggagacggcccgggcggcccggctcgacgacgtgctggggccccacgacgcggtcccggaggcggaactgcgccacgcggccgaggagtcggtggcacgccggaggcggaccctcgaccacgtggaggagctggccgcgggggccgaacaggccgcccgcgaacggcgggccgccgcccgccgcctggacgaggcccagaccgaggccgcccacaccgccgaacgccaggcccaggcggaggcgtccgccacacaggcgggccaagacctggtgggtgccgtacgcgaacacctcgaccggtgcacggaactggaccttcccgacccgacggggctcctggacgctctgcacgactggggcacgcatctgcacggccccagccccgcccgggagcagcccgcggcagcccaccgcgggcaggccgcggacctggccgaccaggccgccgcactcggccaccggctggccgaactggccgagcggtgcaccgcggccgaaagggagctggcggagctggaggccggtggccagcacgggccggaggcaccccgcacccgcaccccgggcctgcgcgaccggactcccggagcgcctctgtggaagctgatcgacttccacgaccacgtcactccggacgaacgggcggggctggaggccgcgttggaggcgtccgggctcctggacgcgtgggtgtgcccggacggcaccatgctggaggcgagcgggcacgacgtgctgctgtccccgctgccttcgcatgcgtcgccggccggctccgtgctcgccgacgcgctgcggcccgccgtcgaccacggcgatccccgggccacgcaggtcggtgaaccggccgtgtccgctctcctggcggccgtcggtctcggggataccggtgcacccggcacgtgggtggcggcggacggtcacttccgcatcggcgcgctgaccggcagctggtcgaaggaggcggccgtgtacgtgggtgaaggcgcccgcgaggaagcacgccgcgcccggatcggcaccctgcgcggcgaactggacgccctggccgccagcacggcacgccgtgaagccgaacgcgccacggtggccgcgcgccggcgcaccctggacgccgaactggccgccgtccccgacgacgcccccctgcgccacgcccacgcggtggccgccgcagcggcggacgccgcccaccgggcccgcacccgccaggaggaacgcgcggccgaactcaccgaggcggcccgccgcgaggccgaagcggccaccgcactcaccgagacggccgacgccgtgaacctgcccgccgaccgaccggccctcacggccgtccgccaggccctggccgaccacacggccgccctcgccgccctgtggccggccctgcgcgaccgggccgaggcgcgacgcgctgtcgccgacgagcaggcggaagccggccggaccggggaacgggtggccgaactggaccagcgtatggccgaggcggcccggctcgccgccgccgcggacgaacaccacaccactctccgctcgaccgtcggcgcggctgtcgccgagctggagcgccgtctggccgaaaccgcgggtgccctcgccacatgcgagcgggaccagaagcaggcccgtcacgagtactccgccgcggatcgccgcgccggccgcgccgagggccgtatcgagcagctggacaaggacgtccatgaagcggcggccacgcgcgccgaggccatcgccgcgctccagcggttcgcggccaccggcctgctgaccgtcgctctgcccgaggctcccgtaccgccgctggacggcggatcctgggccgccaccccggcgatcgggctcgcccgggcgatcgaggcggcactgtcgggtacggacgactccgagggcgcctgggaacgcgtgcagaagcggctcagcgaggagtacaagaagctccaggacgtcctctcccggggcggccacagcgccacggcgcgcatgaccgaggacgggatgatcgtcgacctcgtctaccagggccacgggcgggccgtgcccgaactggccggggccctggccaccgaggtccaggagctgacccgcatactgtcggcgcacgaacgcgaaatcctggaaacccacctgctgaccgaggtcgccggcaccctgcaggagctgatcgacactgccgagcgccaggtacacgccatgaacaccgaacttgagcagcggcccacctccaccggcatgaagctgcgcctgatctggcggccctcccgcaaggcaccggccggactggcacaggcgcgggcacggctgcgccagtccgccgacgcctgggcggccgaggaccgggcggcggtcggcgagtttctgcaagtccagattgcccgcgcgcaggccgaaaacgccacaggcagctggctggaagtgctcaccaccgcgctcgactaccgcgcctggcacgaattcggcatcgaacgccaccagcacggcacatgggtgcccgccaccgggcccgcctccggcggcgaacgcgtcctggccgtctccgtacccctgttcgccgccgcctccgctcactacgccaccgccgctccacacgccccgcgcctggtcaccctggacgaagccttcgccggcgtcgacgacgactcccgcgccaagtgcctgggcctgctccacgccttcgacctggacgtggtgatgaccagcgagcgtgaatgggcctgctacccgcaagtgcccggcatcgccatcgcgcagctctcccgcgtcgacgacatcgccgcggtcctggtgacccgctggcagtgggacggcgccgagcgggcacgggcccccgaacccgaccgccgcctggcgacggtcctcgcaccggcacactcccccggagagcccgagcccacccccaccgagaaccccgcacccggccaggacgccctgtgggcctga

SEQ ID NO: 49964 - DNA, 1248 bp, Streptomyces violaceusniger Tu 4113
atgagcgcacccgacgcccccgccgggcacgtcgaccacgagcgcctcacccgtctcctcggcgatccgggctgtgcctggctgctggaccggatacgccgccgcatggaacgcgccgagccactcaccggctcggtcatcctggccgcgcccaccgacggcgagcgggccgccgtcgagcgcctgctgggccgagcccccggcggcgggcgctcgctgagcatccggctcgacgccgtcgacaccatcctgcgccgctccggcatcagccccgatggcctcgccaccgccgtcatcgccctcaccggacccgtcaccctccgcagcgacgcacgccggcgggaggcggacgcctggcacgacgcgtacaccccgctcaccggtttgtgctccgagcggcccgaattgaccgactggggcgagcacatacgcgtgagcggcctcgtccgccgcctcgcacgcggcccggagaccgcccgggccctgctcacttccaccgcgacggcgctgcggagcctgcccacggatccggccgtctccctcccggccttcgccgcccgcaccctcggcgatgcccacgccctcgatgacggcaccccgctcgccaccctcgtccactccggcatccgcgccctgaccggcttccccgacggcaccggagccgagtggcgccgcgaagcatgggcctccgcgggcctcctcaaggacgccctgtcctccaccgtcctgaccctgggcctacgcggcacacccgcgctcgactgggccaccggcaccggggaacccgccgtgctcaccctgcgccagctcacccgcacccctccccgcacaacgcccccggtggtgcacatctgcgagaacccgaccgtgctcgccaccgcggccgacacctacggccctgcctgcccacccctgatctgtctccagggccagccctcggccgccgccctcaccctcctgcgccacctgcactcccaccgggcaaggctgctctaccacggcgacttcgactggggcggcatacgcatcgccgccgccttgctgcagcgcgtgccctggcgcccctggcgctacaccaccgtcgactaccgcgccgccgccagcagaagccccatggcaccatccctgacgggcacacctgccaccgctccctgggacccgaacctgcgggccgccctcagcgaactcggcgtacgcatcgaggaggaaaccgtcctcgacgatctcctgaccgacctcgcaccctga

SEQ ID NO: 49965 - DNA, 1488 bp, Thermoanaerobacter sp. X513; identical to SEQ ID NO: 49829

SEQ ID NO: 49966 - DNA, 1152 bp, Thermoanaerobacter sp. X513; identical to SEQ ID NO: 49830

SEQ ID NO: 49967 - DNA, 4167 bp, Thermoanaerobacter sp. X513; identical to SEQ ID NO: 49831

SEQ ID NO: 49968 - DNA, 1296 bp, Thermoanaerobacter sp. X513; identical to SEQ ID NO: 49832

SEQ ID NO: 49969 - DNA, 1485 bp, Ruminococcus torques ATCC 27756
atgagaatacaggagacggtgaggaagccgatgacggaagcaaaatatctgaatgtggataatacagacaggtatcgtccgatcatccggcttttttatttgaaatatgaaaagctgaagtattggctgtatcaggaagaggtatatgaagaattaaaggaagatgcatactttagagaatatacgcctgagcagtgtcagcaggacttggcggctttgactgcatgggggaatctggtaacaattcaggatacgagaaaggttgcgactatcgaggagtttaagaataaaaagttccggtatcagttgtctgaagctacggtagaaattgagcgaatggttatccgggtagagaatctgtttattgaaagttcttcgttggaacctacattattggagagacttcgcatcaatctgcgcaagatttctgagattacagaagcagatcaggagcatatctatgcatggtggaatgatttgaataatgattttatacgattgaatcagaattatcaggattatatgcgggagttgaacagtgtaaaagcggaagaaatgatgaaaacgacagagtttcttgtgttcaaagaccgtttgatcgagtatttgagaagtttcgtgaggagtctgcaggtcaatgccgcatttatagaacaatgtctgaagaatacggacaggcaggttttgaggtgtttgctggaaaaaattatacagtatgaattgttgattccgagaatcaatgtggaagtgaaggaagatttgattgcagataaagtatatggccgttggcagagtctggaggaatggtttaccggaacagacggaaaggattctgaggcggcaaaggtatttgacacaacgaatgagatcatacgaaagattacaaggtatgcggcaagaatcagtgaaatgagcaatgcgggggcgaatcggcgggaagagtatcataaggttgcggtgatgttttcaaaatgtaagaatatttttgaggcgcacagattggccgctgttgtatttggcattgaaaagccgctgcatttaaaagggcttccgtggcgtcagaccgagagtatcaacagcggcgtgttcgaggaagaaccgtatatcgtgactgtgacgccgaggattcgtacatataaagaaaaagcaaaacgaagcgggattgttgatcgctcgaaagaaaaagaagaaatgcggcttgctacgattcagcgattagaggaagaacgcaggctcttgaaaagttatattcaggataatcgtctggagtttgcaaagcttcccgagatagagccgcatgtaagagatgtatttctgacatggctttccaaagcattggagaataaaagtcttcaggggaaaacagaggatgggcaggtttatcgtgtggaaaagtcggatacagaggaaatctgcattttgaaatcatcggacggtaatctgcaaatgccggcatatgtgattgtattcgagaaaaatgagtga

SEQ ID NO: 49970 - DNA, 3711 bp, Ruminococcus torques ATCC 27756
atgagagcattggaaattctgctggaacggcgttggattttgaagagtcgggaaaaagaattatattatcagataaaggatgaattaggaacggttaagaaattcttgatggaaaagctggggtatcaggtaatcgtgaatccttatcttgtaaaagtggaaaagatgccggcgacaccggagaactggatgggaattcaagaatttacccggaaaatagaatatgtttttttctgtatgattttaatgtttctggaagaaaaagaagccgaagagcaatttgtactttcagagctgacagaatatatacaggggcagtacagggaggagcagattgactggacagtatatcagtatcgaagacatttgatcaaggtgatcaagtattgtgtgaactgtggaatcctgaatttgaatgatggaagtgaagagaattttgcgagggatgatacgagtgaagtactctatgaaaatacaggtgtctccagatattttatgaaaaatttcacacaggatattatgggatatacgacgccggaagatcaggcggaaaaggaatcattgtctgacagcgatacggtcaaattaaagcagagggaagttgaaattaaaagtcaactagaaggattaaaaaagaatattacaggaaaacagaggcaggaagaggagaaaaaagaaaaatatcaggaaacagagcagaaaatacaacttcaatttcagaaaaatgaaatgctttgggaagaaattgaaaacagtctggagtatatggaagaagagatggcgggggttcctttcgatgaatttgcatttatgaagaaagagctgacagagcagaaaggagagcagtattcttttcaggctcattcagaattattaaaggattatatgacaaaggtccgtcttggaaaaacgacgctggaagaagaaaagggttgtcaggaaagatacagtagatttttgcaggaattggattcctatcaggaagaaaagaacaaagcggaacgagaagtccttcaatatgaaaatcagtttcatgaagtaaaacaggagacaatagaatcggtatatcgttgggaaaaggagaatgcggagctgcatctgcagtcagatctattgcaggaaatggcaagggaaattgagaagtatacaacggaaaccgattattggaatatccgcggattggcaaatggtgaatttgagcggaaaagtcaggaactttcgggaaaagtattacagcagagcagagaattgtccgacagacgattggagaaagacggaatttgcgaagaactggaacagtggaagaatcaaaaggagccggagccggaacgcagtgaagtagtggaaaagaatcgacggcttttgaaagaaaaaggaattccatatttgcagttatataaagtaattgattttgacggcaaattggatgaaacacagcgggcatatctggaagaagcgctattgcatatgggcatactggatgcgctgattgtgcctgaagaatatagagaacaggcgctggcgttggatgcgggggtatgtgaccgttatattttcagtgatgccgcatatgtaagaaataacattatggattttctggatgtagacaacgaagagggagatattcttctgtaccagaatgtttcccgtatattaacagcaatcggctggaaggaacaggacgaagagacgataagtgagtctatagaaaaaaacaggacatggatcgataaaagaggaaattatggaatcggaatcatagaaggaacggttacgaaaaattatacgccatgttttataggagcttatgcaagagagcagtatcgcataaagaagatacaggaactagaagcagagtgtcggaggctggaagataccattcaaatagcggaagacgaaattacacaattaaagcaaaggaaaagctgtctggaaacagagtggaaatcatttccgaaagaacaggatctgaaagtggcagcaaaagaattagaaaagaaaacgaatattctggaagaaatagagtgtaaagtacagatccagaaaggtattgtagaaaaagaacgaaaaagtctggatgcagttcggctgcgggtgcaggaagtatgtcagaagtgttatctgcctccgcgtctggatgtgtttacggaagcagaagaatccttgaccgagtataaagaagagttgatgaaagtacagatttcctatggaaattatataaatggaatcagttatgccaaggtgcagaaggaatatctggaaggaatagacggtgatttggatgatattcgctatgatttgaatcatatgatacgaaatgaacgggaaaagcggggaagtctgaattcagtgatggaacagcttgctttgacggattatgaggaaatcagggagcgattggaacattgcatagagcgattggagaaactgccgtcagagattgaggctagtgttacacaaagctctcatttggaaacaaaagaaaaacaatttatagaaaaactgggagatatagaagtttcagttggaaagtacagacagcagaaagacagattttgcactgcttttgaaatggaatatcagcttggatatgtagagtgtccgtttgcggtaagcgacgatgcggaagaacgggcggagaagatatgcaggatgtttatggggagattcggaaataaaaggcacagtgagattttggagaatctgcaaaatgtatatcatatgaataggggatatctgttggaatatcaggttacgctgcagtcattatttgaagaactggatgaggagagcggagttttcgacacaagtatgagacgaatcgatatttctgctaagtatagaggaatcacgatcaagtttaaagaactgattgccagaatgaaggaagatgcagaggtacagcgccggcttttgagtgataaggacagagagttatttgaagatattcttgccaatacgatcagtaagaaaattcgcggaaaaatccaggccagtaagcgatgggttgagaagatgaacacattgatggagtctatgaagacttccagcggacttacgctgagtctgcgttggaaaaataagcgggcggagaaagaagaacagctggatacgagggaacttgtagaacttctgcaaaaagatgccgaaattatgcgtccggaagaggcgcagcagttatccggacattttcgctctaagatcgaagaggcaagaaaatctgcaaatgatctggaaaatgtgcagtcttttcatgcgattatgagaaatgtgctggattatcgtcaatggtttgagtttcaattggaatgtcaaaaaacaggagaaaagaaaagggagctgacagatcgcgtattctttacttttagcggcggagaaaaggcgatgtcgatgtacgtgccgctattttcggcagtagtagcaaaatatgcaggggcaagacaggatgctccgtatttgatttccttggacgaggcattcgcgggagtagatgaaatgaatattcgggacatgttccggctgatggtggagtttgactttaattttatgatcaactcacagattctctggggagattatgatacggttccggctttggcaatctatcagcttgttcgcccggagaatgcgaaatatgttacggttattcggtatatctggaatggaaatataaaaagtatggtaacagaaaaggacttgagtcatggataa

SEQ ID NO: 49971 - DNA, 1296 bp, Ruminococcus torques ATCC 27756
atggataaaacagaaacaaacgatctgttagaagaatgcatgctgtatttcaaggcgcgtccggtatataaaaaactatttctgaaaatgcgggataaatatgccggtcttggccactttgggggaacggcgatgcttacgtcgctgagcagagaagagaaaagtcaattaggaggattttttcaaagggattatacaagtaataagacaataacaatttctgcggatttaatgaaaaaatgtttggaatccagtaaatttgcgggattaacctgggaattgattctggaaacttattttggagagccgctgcaggtaaaaaaggaaatcgaactggcagagtcgaaaaggcgagaagattattttgcggagatactggaaagtatttcggatgaaagcggacgagaatggctgcgcagcatattggaggaaaagaaagagggatatttgcttattacgcagttatacaaagaaagcccggaggaattgaggagcattctaacgtatgtaacgacagggattgcaaaattgaaagtgtttcaagataaaaagcagaaagaattgttagctgtgttttcggcaaatgtcacaggaaatccccattattttgatgaagggaagacaggggaaaaactactctttaattatcttggagaaaggaatttcgatttaaaacaagaaggactttccagagcagagtataaaaacagaatctattatgaggcagggattttgaaagatgaagtatcgaatgatgcgctggcatatgggattcacggatggaaaccggacggcggtttacatgaaggcattgaaggttttcttgagaatagagagcctgtaaaattgacgttacagacgattggaagattagagaaggtctgtggacagagtagtcaggtatacgttgtggaaaatccggcagtattttctgtattgataagggagtatccgcagcggactgtgatctgcgggaatgggcaattacgtctggcggtacttattcttatggataaattttcgtgcgacactgttttttggtatgcgggggattttgatccggaggggcttttgatcgcacagaaattaaaggtccgatatggagagcggctgaaactttggaagtatgaggcggatttgtatgaaacatatttatcggaagtagaactaagcgacaggcggatgaaaaagctggagcaggtgtctgttcaagaactgcaggaaataagggaagcgatgtataagaaacgaagatcggcatatcaggaaagcatgatggaagcgctgaggaagtaa

SEQ ID NO: 49972 - DNA, 1491 bp, Clostridium spiroforme DSM 1552
atggaaatatcaaacaagttgactaaagcaattaaagaagtcaattatttaagagtagaaaatgcagcacgttatcgtgttatcatgcgatatttcttcttagaatatgaaaaaatacattattggcttcataaagaagatatttatgaaatgatgacaggtcttgatgagtttcaaaattatacgatggatttatgtcaacaagacttgcaaagtttagtagagtggggcaatttaactgctattcaagatagtcaaaaagttaaaactgttgaggattttaaaaatcgtaaatatcgttatcagttgacagaatatagtgtagaaattgaacgattaactattcgtctagaaaatttagaaattgaaggcgcttcattagaaccaacattattagaacgaatttatcaaaatttatgtcagattaatgaagtgaaaaataaaaaagatagtgaaattcatgcttggttgcaatatttaattaatgattttattactttaaatcaaaactatcaggattatattaaaactttaaatagcgctaaagctgaagaattaatgaaaactgaagcgtttttagtttataaagataaattaattagttatttaaggtcatttgttaaaacaatgcaagaaacaggtaatttaattgctttgcaattagaaagtatcgatcaaaatcttttagagaaattaattaatcaagcagttaaatatgaattatcaattccaagaattgatgttgaattagatgaaaaaaacatatatgacaattattgtggaaaatgggacagtttttatcgctggtttgttggaaaagaaggccaaaatgaaattgatcgtttaaatgatattactaacgaaatcattcgtaaaataactcgatatgccactcagattgttgaattaaataatcgtggttctaatcgtaaagaacaatatgaacatttagcgaaaatttttttaaaatgtcgtgatataaatgaagctcattgtctaagtgcttatgtttttggagttagtgattgtttacatttaaaaaaccttagtccaagagagactgataatataaatagtggcgtttatgatgaaaaaccagatactctaaaatttgatagtcactctagaattgtgcgtaaaaaaacaataagaaaaccatcaacagattatacattagaaaaaagaatgcagcagttagaaattgaagaaaatatcgccaaacaaaaagaaaagataaataaattaatcatcaataatcaaattgctttcaataatttaccagtgattgatgaacaaacgcgtaaaacattattatcatggttatcaaaagggttagctcagacaaatcgaaaagctaaaactgatgatggtaaagaattttacattgacgagcaagaaattgatgaagaatgtgttgtaaaatgttatgatggtaattttataatgccatcatataaaattgttttcttggaggaaactaatgaatactaa

SEQ ID NO: 49973 - DNA, 1116 bp, Clostridium spiroforme DSM 1552
atgaatactaaagaaatactattatctaaaagatgggttttaaaaaaagatgatcgggatatgtattatcggattaaagatgatgctaaaaatctaaaaagaatttttcaagataattttggatatcccctaattagccatcaaaattttataaaaattgataaagttcctggaaaagctgaaccttggatgggaataactgaatttaaaagtgtcgaagaataccggattttatgttatattttaatctatttagaagataaagatgctgatgaacagtttatcttgtcgtatttgacggaatttattcaaatgcaattaaatgttagtgaagattattggttaaagtttactaatcgtaaaatgtttgtaaatgttttaaaattttgtttaaaagaacagcttttcattcaagatgatggagaaatggaacattttattcaagatgaaaatgttgaagttttatttgaaaacactgggttatccagatattttatgcgtaattttgtttatgatatttttgaaaatcaaactcctcaggattttatgaaagaagattggattgggttgcaacaagatcgtggaattgttagaaagcaaagaatttatcgaagacttatgctatcgtgtggaatttataaagaaaatgaaaataatgatgattttgcttttatacgtcattatcgtaaaagaatccaaagcgattttcaagaaatttgtccatgtgaattgcaggtttataaatctagtgcctatttgatattagatgaagaagttagaattggaaaaatgtttcccaaaaacaataccttagatgaaatgatcattattattatggcttatttaagaaaaagaattaaaaactctgatttaaaaaaagataataatgaaatggtcgttatttctataagtcgattaaaaaatacaattgaaagaatgatcaaggaaaatgaaagctttttaccagcaacatatcgaaaaaaaagtcgatcactatttattgaagaattatatcaatatttaatcgaattagggtttgtacaagtaatagacgataataatatagtattatatccagtaattggaaagttagctgggaattatcaggagggatag

SEQ ID NO: 49974 - DNA, 3996 bp, Clostridium spiroforme DSM 1552
atgagtgtaagtcgatggaaaatgaatcgtttaggattagttgatttctggtgttatgaagatgatgagtttgattttgaaaacggtcatatgttacttagaggtagtaatgggagcggtaaatcggttacaatgcaaagtatgattcctttattgttagatggaaaccgtagtagtgaacgactagatccatttggtacccgctctagaaaaatggacacttatctaatcgatgaaaattctgaccgtgatgaaagaattggttatttatatttagaatttaaaagattggccagtgatgtttataaaaccattggaatgggtataagagctcgtaaaaataagccactagaaacctggtattttgtaattgaagataatcgacgggttaatattgattttaaattaatggaaaaccattttactttaacaaaaaaacaattggaaaatgtacttggtaatcaagttatttctagtcaaaaagaatatatgcaaaaagtaaatgatagtttatttggatttgaaaatattgatgattataaagatgccattgatttattattacaattacgatctcctaaattatctaattctttaagcccatcaaaaattaatgaaatattagctcaatcattgcaaccactaagtgaagatgatttacgaccaatgagtgaagcgataaccagtatggataatctgcaagatgatttacaaaatttaaataccagttatgatgcagctaaacgcataaatcaggcttatgatgtttataataaagttattttagttgataagtggcaaaaatttaatcgtgaaaacgagcaacaaaatcgtattataaaagaaatcaaagataaagaggtaaatttaaataaaatcgatattgaatatcatcaattacaagaagaattgcaaaaaaataaaattaatttagaaattaaacaaagcgaaaagaaagatttgataaatccaaacattgaaaacatgcatagtgaattagtaaatttaaaagatcaaaataaaacaatttctatccaaattactcaaaaagaagaccagcatgaaaataaatctaataaagtaattgatttacaaaatcagattgaaaaataccaaaatgaaatgtatcagttagaaaaagaattcaatcaaattaccaatacattaaatcgtattattgaagattttccttttagcgaacatagtgttcttaaagaagtcttagataataatgaaaaaatagactttgagtacactaaaaaatgtttaaaacaagaaaaaaataacacccaaaatattattaatttatttaatcaatacgattcgattcaagaacaaataaaagatattgatgatgaaataacaatatataattctaaattagctaaatgggatcaaaaatatcaaaatgcaatgaatcaatattcaaattgcgttaatcaatatcaagaatatttttatcaattcagtcaaacaaaccacattttaaaacttagcagtttagatatcgaaacaatgactagctacttgattgattatgaatacaatcaagaatatatgtcaatatataacattgttcataataattatctaaagcatttggaacaattcacaaatgagttggcttcattaaaaacaacgttaaaatcgcattatgaacaatatcaaacattagaaaatgaatatcaaaactggcttaataaaactgatattgaacctgttcgtgatgaattaacaacattataccgtcataatttatctaaaaaacaaatcgaatatatgccactatttaaattattggaatttgatcagaatttagaccaagatgaaaaaaataaaatagaagaattcttaacacagatgcatttattagatgcaattattattgaagaaaagtggcaggaattattgctcaataatggtgacttaggacatgattattatttatggactaaaaatagtcttagtgatttaaaaccagtacttttaaaagtaccatttgataaaaatagtttattacaatcattagaacaattaggaattcaattatcaggaaatttagatatcaatgaaagatattttaaaaatggtgttctcgaaggttctattgatggaaacattaattctagttatattggttttcaaagccgcgaacaatttcgtcaaaagaaattagaacaattaaagcaagaattagaagatgaaaagcatcaaattgaaataattgataataaaattaacactttaaacggctcagttattttactaaaacaagaaatgcaatcttttaaagatgaaaaagaacttaaaattacatatctacaaatagaaagaacccaaaaagaaattgattttattcaagataaaatcaatcaactaactaagcataaaaatgaaaaagaaaaaaatcttgaaaatatctatcaacaaataaaacaaggctgtaatgtactattgatcaatgtttctaaaggtgcattaataaatcgacttgaaaacattgaagaatatgataatagtttagatgagttgaaaaataatcttgatcatattaataacataaactcactattaacaatcaatcaggataatttattagaatttcaagtggacgttgattttttaaatgcagaaataattaagttaaaacataactatcaaataaattcaggtaagattaataatattgaacaacaactaaaggaagcaggttataccgatttacaacaaaaattagaacagcttgatcaagaaatagtcactttgcaacaagcaatcgaagataatgtttctttatcttcaacaaaaaaagctgaacaatcttataataaagatgaattaattaacttaaaggaacaattaacattacaagaaaaatatactaaaaaatatcatgacattttaatgcaggaagttcaatatggctttatttttaaagaagatgataatttgtttaaaaatttaaaacaattaactagtaaaataaaaataaataaacctgttaatgaatatgcaactagtttgcagggagttttttttgaacaagcttcatatttatcacagtatcatttgactcatgaagttgatgaattatgtcatgaagctgatgatgtaactggtcattttattattaaagctacttatttgggaaagaaaattccttttattgaattactaaatattctgcaagaacgaattgaatcacaaaaaatgttaattcaagaagaggatcgacatatttttgaagagattctagtaaatacgattggtaaaaaaataagggaccgtattcaggctagtcgacgctggatcgataaaatggaacgttacattaaagatatgaatactagtagcggattgcaattgactttaaaatggcaaagtaaaaaatctatagatgatgatgaattagatattcaaaatttagttaaattattagaaaaagattatcgtattttaaaagatagtgatcgtcaaaaaatttctcagcattttagaaccaaaattgaaaacgctcgccggttaagccttgatgaaaatatctctgcttcatttcatcaattaattagagaggtaatggattatcgccaatggttcgaatttgtattatacgcaaaaaaacctaatgaaaatcgtaaagaactgactaatcgaatcttttttgcttatagtggtggtgaaaaagcaatttcgatgtatgtcccattgttctctgctgttgctgctaaatttgaaagtgctagattcgatgcgccacatttaattgctttagatgaagcttttgctggagttgacgaaaataatattgataatctatttgcattaattactaaatttgattttgattatattatgaattcacaggttttatggggagattatccatcttgtccatcactagctatttatgaactatttagacctaataatgctccatttgttactaaaatcgcttataaatggaatggtcatgaacgacgggttgttattaaatga

SEQ ID NO: 49975 - DNA, 1251 bp, Clostridium spiroforme DSM 1552
atgatgttaaaagaatgtattgaatattttaaacatcctggctttaaaagattcaatcaagcttggattaaaaaatatcaaagtttgggacatttaggtggtcaaattactttatttaatttatcatctttagaaaaagaaacaattggtgcttttcttggaactgatttatctaatggaacattaaaaataagttatagaaaatttaatcaattattacaagaaacaaaatttgaaggaatagattatcttgatgttttaaatcatttagataataaaccaattattaccaataaagaaataaaatctaaaaaaatactattaattgaaaactttaaagagtattttttgaccaagtatagtcaagatcactgttatccgtggttattagcatatttaaataatgatgctcaagtaaatcggtatatttataaaaataaaaatgagtttttaaaagaattagataagattgctacagcattaaataacttaccagtttatcaaaatcaatatcttttattaccagtttttagtcagagaatcactggagatccacatttttttgatcaggattttcataaaaaactattaatagatggaatcacagtattattaaaaactgataaacaaaaactcacattacataatataaacgatatattatttcaagcaggattactaaaagacgatttgtcaaataactgttatatttgccatcttaagccggacactgcttcaaattgggaagggttttatcaaaactatgagccatggaatatgaatctctataatttgatgcaagtaaaacaaaagtttaaagcaatgaatgtttatattgttgaaaatccatcagtttttcgggtcttagtaaattatattaaagataagcagctagatgtaggattgatttgtagtaatggacaaattaatctatgtacgtatatgttattagattatttaagccaaagtggatgtatcctatattatgcaggtgattttgatccagagggattactaattagtgataaattgaaacaaagatatttagatacacttaatttgtggggatatagtaaagaaaatttttatcaaattttatctaagcaacaacatctttttagtaaaagaatgaaaaagctttataatcttcaaactcctgtattaaaagatattgctgatttaataattaaaaatgctgcttttggctatcaggaaggtctaatttctttctataaaaaaacaattaggtaa

SEQ ID NO: 49976 - DNA, 1605 bp, Streptomyces clavuligerus ATCC 27064
gtgggtggcgaagtaccgcaggggtggcggaggaggggacgtaccagcatgtgcagggttccgccggagatgttccggttcattacgggggagacggccgacttgaacggggccgtgcttgaggccttcggggtggccggcgagcatttggagaccgagctcgggctcgacggcgtacgggagcggctgcgtgcggtgggctgggtctcggacctccaagacgaggaactgcacgaggcgctgaaacggctggtgaagtgggaactcctcgacgtggttcacaaccacgcccagaactaccgcacggctgaggagtacgagcggcgcaacctgcactactcgctgacccgccggggggaggccgcgctcgccggggtgcgacacgccctggaggtgctggcttccacaggggcgctgcagaccgcggtgctggaggcgatcgccgaccggctcgacgagctgaccgtgctgtccggcgaacattccgcggccgaccggcggatcttcagcaccctgcgggagctggagggccatctggagagcctggtggagaacaccaaggccttcaacggccagttgcagaggctccttcgcgccgaaggagtggatctggacgtgttccgtgaggtgaaggccgccaccgtcgcgtatatccaggagttcctggtcaatctcgaccggcgcggcgagacggtggccgccgctgtggcccgcgtggaggagcggggcatcgcggtgctgcgtgagcgggccttgcgcggtgccgagctgcctccgaccccgggagaggacccggcagccggctggctggagagccgacgggcgcgctgggcggggctgagggcctggttcctgccggacggcggggcgcgcccccggatcgagcagctgcacgacatcgcccggcgcgccatcgtctccctcctgcaggtgctcgagaggatcaatgagtcccggcgccgcccctccagcgtcgtacaggacttccgggagctcgcgcgctggttcgctgcggctcccgacgaggaggacctgcaccggctgtggtcagccgccttcggcctcggcccggcccgccatgcccacctcgcccacccggacccggagctgatcccctcgtcccactcctggtccgacgcgccgcccgtaaaggtgtcggccctgctgaggaccagcggacggaccgaacgcttcactcgtacggccaaggtgcgggacgtcacggaggtcagggcggaacgcgccgagcgggccagggctgaacgggcggagctggcacgcgcctggcaggcgctggagacggacggccccgtgcggctctcctccttcagagccctcgatcccatggtcttcgaccgtctcctcgacctgctggggcgggcgctggccgcccgacgggacgcggacggccgacgacgggccacgaccggggacggccgggcggaggtggtgctgtcgccgccccccgacgggcgcaccgcagtactacgtaccgcgcaggggacgatgacaggaccggactacgtcatccacatcacggccgtgggcggggctatctccttcccggcagtccgctccgccacgggacaggaagccgcaggatga

SEQ ID NO: 49977 - DNA, 1233 bp, Streptomyces clavuligerus ATCC 27064
ctgctcaccgaggcagccgacccgaccggtttcgatttggtgcgccgccgccgtgacccgctggctcgttggttcgactacacctgcggctggagtctggttgtggaaccccgccgaggctacgcccgcctcaccaaggtccgcgtcagccccgacggctcccgccccgctcgccgcgcgcgttccggccgggccccgttcgaccgccgacggtacgtcctgctgtgcgtgaccgccgcggagctgctgtcgatgccgatgacgaccatcggcatgctcgccgaccgtgtcgtccaggccatggcggccgaccgcgcgctggcggggttcgacccggtccgccggccggagcgcatggcgttcgtcgacgtcctgaagctgctggagtcgtacgacgtactgcgtgtggtggatggcacgaccgagacgtacgtcgactccgcggaggcgaaggtcctctatcgcgtggacaacacactgctcatgcggctgcccgccgcaccggtcggcgcctcccggctcgccgtgccccaggaagaggtgcccgcgcggttcgaggacctccttgccggcctggtaacggagcgccgctacggaggcgcttctgccgacgggacggccgacgacacgcatgccgagaccgccgcgaccacggatgcccagcgcaatctgcagttgcggcactcggtgctgcgccgcctcttcgacgaccccgtgctctaccgagccgacctcgccaatgacgagctcgcttacgtcacctctttgaccggacgccagatcctgcgccgctctgtcgaacaggccggtttcctcctagaggaacgggcggagggctttctactcgtcgacccggacgctatcgctaccgacgtccgttttcccgatgacacctccaccgcccgagtcgccgcgctactccttctctcaccgctctgcgccacgcccgtgggcctgttgcccgagcagctggccgaggccggagcggagttgctgcgccgctttccgggttgggccaaggcgtaccagtcggaggaaggcccggcccgccttgccgacgacgccgtacggatcctgctcgacgtcggcttggcctgcagggcccgagaccgtgtcatcgcgcgaccggccgcgcaccgctaccgcctgacggagaccaccggcccagctccgaagaacgatccgccagccgtggccgccaccggcagcgccggagaaggagacaagcagtga

SEQ ID NO: 49978 - DNA, 4128 bp, Streptomyces clavuligerus ATCC 27064
gtgacggaactccccctccagcgacggcccgaagagaccatcgatccgtcacccgttcatgacgcggacaccggtcgcggacgatggcggccccatcgtgcgggcatcctcaacgtctggcgctactacgacgagaccttcaccttccaccagggtcgcctgctgctgcgcggtcagaacggcaccggcaagtccaaggccctggaactgctgcttcccttcctcttcgacgccagcctccgccccaaccgtctctccacgttcggcggttcggagcgcacgatgcactggaacctgctcggccagggagcatccggcaagacccgtgtggggtacgtgtggatggagttccgccgcgtcggagacgacggcgctgagcactggttcggctgcggagcccgcttgcacgcgagcgggcacaccaccacggcgcacgccgactacttcaccaccatcgcccggatcgcccaccccgacggggtccacctcgtcaacgacaccggacagcccctgaccaaggcggccctcaccgaagccctgcgcgaccgcggcgaggtgcatccgtcagccaccgactaccgcaccaccgtgcggcgcgaacttttcgcgggcatgggtgagcagcggtacgagtccctgctctccgccttgctccagcttcgccagcccaagctgtccgagcggctcgacccctccctcctgtccaccctgctgtcccgggcgctgcccccgctcggcgaaggagagatcaccgagctcgctgagggcttcgagcgcctggaccggcagcgggaccacctcgaccggctcgacgccgaggtgacggccgccgagaacgtcgcctcccgccagcgcgcctacgcccgccgggtcctgcgggccggtgcggcagcactgatctctgcgaccaccgagatggacgacctcacccgggacgcccgcgtcagcgcccaggaatacgagaaggcgtgcgaggagcgcggctccaccctcgccctgcgagaggagctggatctacgggcgcacgccttggacgagatcatcgaggggcttagggagagcgacgcctaccagaagggggaagaactcgaccggctccgccgcggtaccgaggaacaggtcgccgccgccgccgagctgcgtaccgccgcccggtccgccgagtccgacgcggaggaggaccggaagcacgccgacgacgtcgcgggacacgcccgctcgtgcgtcgagcacgcccgcgcgacagcggacgagaccaaccgctcggcccgggccgcaggcatggagtccattcaccacgaggtgaagacgattctggacgcggaaggggaggtgaagtccctcggcaatgggacggcgagcaccccggtcaggacagggagcaggcggtccgatgctcctggcgccgccgcccgtcggctgctccggggcgcggtcaccgcccgacgggagcaggtcgccgacatcaccgacgcgatcgacgcccacgaccgggcggtacgcgaccggggaaccgccgagggcctgctggacgaggcccgcacccggctcgcggacgcgatcgcccaccgcgacacggccgccaccgccggagacaacgcccttgccgcccaggcggaacggctgcttgcctgggcccggaactggacggagatgcgcatcgccgacctcgatgaactggccgccagggcggccgtcgaggcagacgtgcgtgagctggtcgaaacggtcgcacgaccgctggaggaggagatcaccactgaacgggccgcattccgcaccgcgcaacaggggttggagcaggaacgggacctgctcgatgcgcggaggagcaagctcagtggcgagaccgatctccagcccgtcgctccacccacccgcaccaccgtccgcacggctgcggcgggcgcgccactgtggcggctgatcgccttccacgagaacgtcccgctccccgtacaggccggagtggaagcggcactggaggcgtcgggcctcctggacgcatgggtgagcgcatccgaggggttcacccttcctgggcacgacacccgtgtcgaggtcggcctcgccacgaccgcccccggctccagcctgctggacgtgctgaggcccgaggagcacatccccgtactggccggcacggtgacccgcatcctcgccggtatcgcgtatggcacccccctgcccggcgggcaccctgtggcagtctcctccgacggcacctggcgcctcgcgccggccacgggttcctggagcaagccggagcccgcccatatcggagccctcgcccggcagcgggccaagcagcgtgagagcaccgaactggctgagctgatcgccgagaaggacgcctccctggccactctcgccgaccggctgcgggaactcggcgcccgcgccgcccggctggcggacgaccggtccgcccggcccgaccaccgcgaactcgacgcctgccgacgggactgggaccaggcagaggagaaggtggccgcccgggacgacgccgtgcgctacgcgaccgagcatctggccgcacgcgagggtgacgtggccggcgcgctgcgcacactgagccgcagggcggccgaaaacggactgcccacggaccgcgaccggctgcgcgaactcggccgcgacatggagaggttccgcgacctcgccgatacctggacggacgcccgtatcgacgcgatcgcggccgctgaaagggctgaggagacggccgcacgggcggaccggtcacgccttctcgccgagaagcaggccgccgacgcggccgctgcggaagcgaaggcggctgggatgacggcacgtctgaaggcggtggaggagacggtcggcgcggactaccggcagatcgtcgcgcgcgttgcggagacccgtgccgaacgggtccgctgcggcaaggaagcccgccaggcagccgagctcctcttgggcctggaaggccgcatcggagagctgagggccaccagtggccaggacgccgaccggcaggagaaggcagtcgaggcccgcgacggcgcggcgcggcggttccggcacctgtgcctggtgggtctggccgaggacgcgggcgtcgtacccgaactcgacgccggggacggtaccaaggccactctggaggtggcgcgcgccatggcggcacggtggccccaggtcccgcatgccccgcgccacctcggcgacgccgccacccgcctctccgaagccgtccacgaggcccgccgccacctcggcgtccgagccgacctggagctggagcccgacgacgacatccagctcttcactgccaccctggagggcgtccgcgtgggggcgaccggtctgctcgccgtgcttacccaggagcgcgaccgcagcggcgacgacatcagcaccgccgaacggcgcctcttcgaccagatcctcaccggtgacatccgccgccacctcgccgcccgcatccgccgggccggcgaactcgtcgcgcacatgaacgggcacctggagcgggtccgtaccgcctccaacgttgccgtccagctagtctgggacgtccgccccgacctccccgacagcacccgcaccgcccgccaactgctcctgaaggacccaggccgggtcaccgagtccgaccgggaggccctgcacgccttcttccgtgcccgcatcgaggagaccaagggcagcgacacggccgcgagctgggaggagcacctcggcgaggtgctcgactacaccgcctggcacaccttcaccgtccgcctcgaccgggccgacgggagcggctggcagcccctgacaaagcggctgcacggcgcgctctccggcggggagaaagccatcgcactgcacctgcccctgttcgccgccgtggccgcccactacgaggacgtgcccctggcaccccgcccgatcctcctcgacgaggtcttcgtcggcgtcgacaccgtcaaccgcggacaggtcttcgcgctgctcaccgcactcgacctggacctcatgatcacctccgaccacgagtggggaaactacagggagctgcccggcatcgccgtccaccaactcctgaccgacggagacgacgccgtcaccagcgcgcgcttcgtctggaacggcacgggaatggaggaaggatga

SEQ ID NO: 49979 - DNA, 1302 bp, Streptomyces clavuligerus ATCC 27064
ttgcaagaccaccccgtgtccggcgggctgacctctcgggagcatcttgccttgggcgacgcgccccttcgccgccccgaactccttgccgtctggcagacggtccacgaccgtctctcctccggccgccccgtcacacgcgtacgcctcggacctctggacgagacccagcgcgaagccctcgcagacctcctgggcctggaccgcctgccggacccccggccctccgttgccctggcgtgcctggaggaggccgtcaccgagctctccggccgcaccgtacgagaagtcgtcgccgaactcatcggcccactcggcgacagagccggtgaacgccgtcgccaggaggacgaacgcgccggtctgtgggcctggctggctggtcacgacacggtacgggcgcagccggtgctcaccgactgggctgcgtcatgtcgagccgcaggactggtcggtggttcgacggagcgcacccgtacgctgctcatcgacgcgctcaaggtgctcgccgagctacccggccaggccgaacctctaccagtcttcgccgcccgagtcctgaacggtcacgcgcacgctctcgacgacggcacacccgtctccaccctcgtcctgcgtgccctggcgactctgtacgacattgcaccgccgcagtccgcggcggaacggcgcgccctgtggtcccgcgccggtgtcgccgacgacgagctgtccgccaccgtcatcgccggcggactgcgccctgtcggcgacggccttctcgcccgtgtggcccgcctgtgtaccgaggccggccaggccgccagcctgactctcgcccacgtcaggaacccgggcgagctcaccctgcccgccacccctgcctcactcgtcgtccacgtagtggagaaccccagcatcttggctctggccctccgtcgcttcggctccaactgcccaccgcttgtctgcacgtccggctggcccaacagcgcagctatccagctcctgcgcctactcgcggaccaaggcgctgctctccgttaccacggtgacttcgacggcgaaggcatccgcattgccgcatacgtcatggagaaagcaggggcgcacccctggcgcatgacggcggcagactaccgatccgcgatcgtccgcaacgcgcacggtcctcgacctgggcgcatcaccggagcaccgtgggatcccgagttggccgaagccatggcggggcacgacatcgccgtggtcgaggagctggtagccgatgtgctgttggaagatctcactgctacgactcgtcagcgacacccctccggctga

SEQ ID NO: 49980 - DNA, 1596 bp, Roseburia intestinalis L1-82
ttggagagtaactggaatcaggcggttgaagctgattcagacataccacaaatatcagaatcaggcagttggttctggcgtatcatgaataaaggagaacatgtcgcgttgcaggtatcagataaattattaaaaccactcacagaggcaaaatatttaaatgcggataatgtcagcaggtatcgttgcattatgcgcattttttttgagaattatgaaaagttaaaatactggctgtatttagaagaagtttatgaggaaatgttaaaagatccgttctggtcagagtataaaatcgagcagtgccagcaggatctgacgatgcttacggaatggaaaaatttaaacacgatacaggacacaagaagagtgtcctccatagaagaatttaaaaataagaagtaccgttatcagatgtcggaatacagtgtcgagatcgagagacttgtgatccgtcttgaaaatctttttattgaaggggcatcgttagaacctacgctgcttgagcggatacggagaaatatggaacgttttccagagatggcagggaaagataagaatgaagtttatacatggtggacggatttaaacaatgattttatgaggctgaatcagaattatcaggattatatcagggacttaaacagcgtaaaggcagaggaaatgatgcgcacaaaggaatttctggtgtttaaagacagactgattgagtatctgcgcagttttatcaaaggtctgcagcgcaatgtcggtgtgattgaggagtgtctgaaaacgcaggaaagtgatatgcgcgaggcggtatttgataagatcgtcgaatatgagcttttgattccgcgtatggaagtggaagtgtctgaaaaaatgatccggcagaaggcagagggacgttttaaaagtatttatgactggtttgtgggcagtgaaggacaggaaaatgaggcagcaaaactttttgacgtgacaaatgagatcatacgaagaatcacgcggtatgcagcacaattgagtgaaaaaaatgcactcggtgcaaaccggaaagaggaatacagaaaagtcgctgaaatgtttatgagatgtgaaaatcttgaggaagcacacaaaatgtctgccatggtttttgggatggaaaaaacatttcatatcgcaggggatcaggtaagagagacggacagcatgaaccggggagtgtatgaagaaaagccgattcagatagaactgaaaccgagagtgcgcacataccgggaaaagacaaaaagaagttccatcatagaatcaaccgaaaaaaaattagaaacacgcaggaaaatgttagagcagcaaaaggaagaggaaaagaaaataaagatgttagaaaaagatggagccattgacttttctgcattgcccattttagagccgagaatccgggaaatacttttaaaatggatttcagatgcaatggagtcggttgatttttctgcaaggacggatgatggcagaagatatcgtttagacaaaagtaatatggcagaaaaatgtgtggtgcattgtgaggatggcaattttaccatgccaaagatgaggatcgtatttcaggaggagagcgtatga

SEQ ID NO: 49981 - DNA, 1146 bp, Roseburia intestinalis L1-82
atgaaagagcttgaaattttgttaaacagacgctggatactgaaatcagaagataaagaactgtattacagggtcagggatgcagtcggggagatccggaaatatgtgacagataaattaggctgtcagatcatagataattctttgctgataaaactggaaaagataccggtcatcccggagcagtttatgggaattggccagttctcttcgaaagaagaatatgtgtatctgtgtattttattgatgttcctggaagataaagatgcacaggagcagtttatactgtcacagctgacggaatatatgacggcggtgatgcccggtgagatcacagactggacattgtacaacaaccggagaaaactcatccgggtactccgctatactgtggaacagggaatggtccgtgtgacggatggaacagatgatgtgtttatggatgatgccgggggcgaggtcttatatgaaaatacaggggcatccaaatattttatgagaaatttttcccgggatatcatggagtatacaaaaccggaagatttccgggaaagtgaatggtttgaagtggacgaggaccgcggattagccagaaggcacagagtgtataagagactgttgtttgcaccggcagtgtacagggaagatggatccggggaggatttcgagtatttaaaatattacggatacaggctttctgaagaattagaacagctttttgaatgtcatgtacagatccatcggggaagtgcattccttttatccgggcaggactgccggatgggagctgcttttccggagaacaattccatggcagatattttaatgcttgcctttggaaagatcagagaaaaaatagaaggtaaggtgtggaaaataacgccggaagaaatgagtcttgttgataagattgagtttgaatctctgatcctggatgtgaaaaaagaatatggatctggttttgcgaaactttaccgggatatgccggaaggggagtttataaaaaacgtaacagatgaaatggaacgctggatgtttataaaaaaagtggatgatatgcatcagataaaaatctgtccgcttgtcggaaaaatacagggaagttatccgcaggattacacaggaggaaatgaaaatgaacagtag

SEQ ID NO: 49982 - DNA, 4116 bp, Roseburia intestinalis L1-82
atgaaaatgaacagtagatggcaggcaaataaaattgggctgatcaatttctggtattatgatgaacaggaatttccttttgtaaaggggcggatgcttctccgtggttcaaacggttccggaaaatcggtaacgatgcagagtgttgtgccgttactattagacggaaatatgagtccggagagacttgatccgtttggttcaagggatcgtaaaatgagcagttatcttctcgaggaaaatgatggaagggaagagagaacgggttatctttatcttgagttcaaaagaaaagacagtgaaacatatctgacgatcggaatggggatccgcgcaaagcgaaataaaccgctcgataaatggtatttcagtctgacagatggaagacgcatcggcaaagactttttcttatacaaagatatgggtgagaaagtgaccctttccaaaaaagaactggaaaacagggtggcagaaggcggaagagtatttgatcgtcaggcagattacatggattatgtcaacagacagatatttggatttgagactgcagatgaatataaggaaatggtagatctgctgatccagcttcgaaccccaaagctgtcaaaggatttcaaaccgtctgtgatcaatgatatattgagtgattctctccagccgctttcggatgaggatctgcgtccgatgtcagaagccattgaaaatatggacatgatgaatatgaatttaaaggggcgcagggaggcgagaggggctgctgaaaagatcaatgcggttttccagaaatataataaacttctgctctgtgaaaaagcggacagatatgagcgtacaaagcagagattacaaaaagcggcagcagaacaaaaggcatatgaggataaatatgcagaatgtaaccggaagattgaggaacttgaaacagagattctgcagatgaatcagaagaaggaaactttagaaaaagaaaaggagtccctcaataaaagtgatgcagttgcgctaaagggcagagaggcacagctcaccaaagaacttgaggctcatgataaaatccttgcggataaaaagtcatttctggctgcaaaggaagcacagtacagagatgtcacaaaccagatcaaagaggaagaaaacagaaagtatgaaaaagaaaaagaagtagagactctgttagaagatatgcgtgaggaagcagaccagatggcattccaggaatttgcatttatgagtgaggaactgtgtgctgatctggaaaatgattataaatttgatcttcacaggcagcagtttgaacatacacgtcaatatatcaatgatggagaaaaattgctcgcagaacttaaaagtcttgaccggcagaaggatgaaatgatccagaaaagggagaagcagatccgggaattagacgcactccagcgaaaaatatcggaatttgaaaacatgctgatccaggtagaaaatgagtggaaagaagcactttatcaatggaatgaaaacaatgtggaactgaaattggaaaaggaactattgagggagctcagtacattcgcagatacgtatgaggaaaattctgactacgcggtggtacgccagaaggctgcagatcaatggattaaaaagcagtctaaaatagaaacgcagatcaattccattcttctggagcaggaaacagcaaaaacagaactcgatgaagcaaaaacagagctgagtgagtgggaaaatcagaaagaaccacagccacagagatcagaagctgtgataagaaaccgccagagactggatgaagcagggattccatatcaggaattttataaagtgatagaatttggatcggagctggatgaagatgcctgtaaccatttagaagaagccctgctaaaaatgggaatactcgatgcaattgtggtggatgagcaatacagggaacaggttcttacaccggtaaaagggtgcgaagaccattatctttttgcaggaaaaacgcaggcagaaaagagtctgttggacgtactggaactaaacgaggaagtcaatgatattttttcaaaccagagactgacaaaaatcctttcaagtatcgcttatggcggtgagaatgaagtgtcagtttctgaggatggttcctatcatatgggtgttctggctggaacagttaccggggaatatgaagcagggtatctgggcagtaaagcgagggaaagacacaggcttgcaaaaatagaagaatgtaaaaatctgatattggtgttagaggaaaagattgcaggtttagagagagaacgaaacaatttatcagaacggaaggaccggctgaaatcagaatatggtgcgcttccgggcgatacggatctgagggaggcaatgaagctgctcttagcggaagaacaaaagtatgaattgctgcggagtgaaaatgaaaagacgggggagcagctgacagcctttctggaagaaataaaggaaaagaaaaagggtgcgattgagatcgctgaaaaattgtatctcaactgtacttatgagacgttccagagtgcaaaaagtgcagcggaggaatatgacaaaaatctggtagagttaaagtcggcacatgaaatgattttaagaagcgcggcatacttaagggagcgcaaagttcatttagaagatttagatcttgatatggatcagatcagatatgacataagggagaccgaaaagcagatcagttcaaaacaggaagaaagaacatccattctggaacagcttgccctgacagattatgaagcggtcaaagacaggttagatgcctgcatttcgtggctgaatgcatttccgaaagagtttcagaaacgtgtgaccgaaaagacacaaaagacggatgaagcaaagctgatcgaagcgaatcgtatcagcaatgcggatacgataaaggtatatgaaaagaaagtggaattttaccggaaatgttatgaacaggagcggggacttttttatgtggctgtaccagaagagattacggatgatgcagggcatatttatgattatctgctgacagatatcaaagatatggaaaaaaacagtattatcgctgacctcaacagggtatattttgaaaacagaggttttctgaccgattatcagcttacgcagaatgaattatttgcagaatcagatgagagtgaaaaaatagatgattataccccaaagcggcttgatatcacagcaagatatcaggggacgaaggtaacgtttgcaagtctgctgacacatcttgatgaagacatcagtgagcttgaaaacctgatcaaagacggagaccgggaattattcgaagatattctggccaatactgtgagccgcaagatccggggaaagatcaatgcgtcgaatctgtgggtgcagaaaatgaatacgctgatgaatggcatggatacgtcaagcggtctgaaactgagtctcagatggaggagtaagacagccgaaaaagaggatcagcttgacaccagggaactggtagaactgttaaagaaagattaccgtctgatgagtgaagaagaggcggcaagactttctgcacatttcaggtcaaaggtcgacgaggcgagacgcaatgcgcgtgacagtgccggaatgatctccttttatcagatcatgaaagaaacacttgattatagaaaatggtttgaatttcagttgttctcccaaaaaagcggagagcgccagaaggaactgaccaatagtgtatttggtacgttcagtggaggagaaaaagcaatgtccatgtatgtaccgctcttttctgctgtcgttgcaaaatatcagggcggcagggcggatgcgccgagactgatctcgttagatgaggcatttgccggtgtcgacaaccggaatatcagagacatgttccgcctgatgacacagtttgaatttgattttattatcaattcacaggtattgtggggagactgtgatacgctggatgcgctggcaatttatcagctgatccgcccggaaaacgcgaaatttgttaccgtaatgccttatttatggaacggacacagtaaagaactgttagatgatgaagaaaaagtagaacaaagagggatagagattgaacaatttgacagggcatga

SEQ ID NO: 49983 - DNA, 1281 bp, Roseburia intestinalis L1-82
ttgaacaatttgacagggcatgaaaagttaaaacgtgactgcgtggcatatttcaggcaaaatgagatctggcagcgcatctttacaggttttcgtgagaaatacagttcctacggcagattttcgggtaaagtgactgtaaagaatatatccggggacggacttgacacgttagaaggattcttctgccagaattttcatggcaaaaaaagtattacggtttctgctgaaaaattccgaaaagcactttcctgcagcaaatatgggacggtcacaccggaagaagtgctggcagagtattttggaaaagcgctgattggaaaggcagaggaaaaggcatttaaagaaaatcagatacgggagataaaaaaggagttccttgaaaatttcaaagggactcctgcctttttggagtttgatacattcgaaaatattttaaaaagcagcgacaaagagaacttaaaagagtggaaacgccttctctggctgtgtgcgaacctatataacgctttgccgtaccgcacacaaaagagcgtgtacctcgcggtatttgccgctgctgtaaccggaaatccgcatgcatttgaccagggcacggcagagggaaagatcctttatcaggtcatacaaatggatttaggacagaggggcatacaggtggaaactttagaaatgtttcctgcatataagagacagaaaagctatcttcttgccgggatattaatcgatgatatttccaattatgcattgctttataacgtgcatgcgatcaaaaagaacggagaattacacagagggatggacggattctgtcaggaaaaaaatatggtgcaggtgccgcttacagtactttctgaatgggagcgtatcgagtgtgtggatcatgagatctttatcgtggaaaacccgtctgtttttgccctgatctgtggagaaaagtcgtgcatgtgcatgaatgggcagccaagactggcagggcttttggtgttagaactgcttgcaaagtcaggaactaaggtatattattccggcgatctcgatccggaggggatactgatcgcacaaaaattatcgcagtactatcggggaacattctgctattggcatatgacgcctttcgattatgagcagtgcagatcgaaagaaataatttctgaaaagagaaagaaaatgctgcaaaagattacagatgaaaggctgctccctgtcgtggatgcggtaacaaaatatgggatggcgggctatcaggaaagtatcggattgaatcagatttccatttga

SEQ ID NO: 49984 - DNA, 1503 bp, Subdoligranulum variabile DSM 15176
atgcaatttcacgccattacactgaacagtgtgccggaagccagttatctcacggcggagaacgcctggcggtaccgggccatcatgcgcaccttctacctggaatcccaaaaggcccatatccggctgaacaagacggaactgctggcgctgctgcgggcggatgcccattttggggagtacacggcggaacaactggagcaggacctgaacgcgctgtgcggctggcggaatctggtgccaatccaggacccccaccggcccaccagcatcgccgaatacaagaacaagcagttcagctattccatgtcccagacggccaccgagatcgagcggatgaccatttctctggaaaatctcgatctgcgcacggcgatcctctcctcccagctgttcgagcggattctggacacgctggaacggatgacggagcgggccggggcggatgcccgcgcgctgaaccagctgtgggatcagctgcaaagggacttccgccagctgaccaaccggtatcaggactatctgcgggatttctattcctcccatgccaggcatattttgcagaccacggagtttttgccctataaggacaaggtggtgcgctatctgcaggagttcgtgctggaactgcagcgctatgccgagaagatccgccggatgctgctgagcctgccgccggagcaggtggagacgatgctgcaggaggtatatgcgacgcagctgcaggaaggggagggccggctgattcagcggtccgaggactatccccggcagctgcgggaggagatttacggtttctggcaggggttttaccgctggtttgtgcccggcgagagcggacagagcgacagtgagcatgtgctggaactggccaacgacatcatccagcggatcctgatgaatgcggaactgattttgcaggcgcacagcggcggtgccaaccggaaggtggaatacaaaaaattcctggagctgtttgccgcctgtcccaccctggccgatgcccggcggctttccggcatggtgttcggcgcccagcgggcggtgcatctcaccggcatcgagccggaagatctctacgagacgggcagctgctatgacggacaaccctttctctaccagctgcgcaaccgccggcggcccggccgtcccccgcgggagaaaagcttttttgaggacaaaagcctggagaaggctgcccagaagcaggcttacctgcaacagaaggcggccctgcaggcccggctggagcggctgatccggaaaggccggctggatttttcggcgctggaggaagtggtcacgccggaaatccggatgagccttctgaattgggtggtgaaagccaacgccaacgtcagcaaatccgcccgcaccgaatttggccaggcctatcgcctgacctgctcgccggggcagacctgtgtgctgcactgcaccgacggggacctgaccatgcccgcctactgtctggaatttgaggaggtgcccgcccatggatga

SEQ ID NO: 49985 - DNA, 1122 bp, Subdoligranulum variabile DSM 15176
atggatgaatttcgcgcgctgctggaccggttctggatccgtcgggaggaggaccgggaactcttttatcaggtgcgccgcaaactgcctgccctgcgccgggcgctgcgggagcaattcggctgggaagtgatctgtaccgagcaggtgatccgcctggtgaaggaaccggcccgggcgcaggaagccttcgggatcccggaattcaccgaggtgcaggattactgtcttttgtgcggggtcctgcttttgctggaggacaaggacgacggccagcgctttctgctctcggaactgacccaggccgtgctggcctacacaaagccctggctgcccgacctttcctgggagcggtactcctgccgtacctcgctggtgcgggtgctgcaatacgccgagcgcctgggcctgctgcgcagtttcgagggggaaagcgacggcttcgccgcccaccaggaccaggaagtgctctatgagaataccgggctgtgccggtatttcagcgtgcattttcatcgggacatcaccggatatacctcggtgcgggattttgaaaatccgcccgaggacggccccgatcaggagcggggtaccttccgcacctggcgcgtctaccggcagctggcgctggccccggcggtctactgggaggaccccgccgactccctctatgcctatatcaagaatcagcggggcatcctgcagcggaatctggacgaaaccatcggcggcaaactgcagatctatcacaacggcgccttcttcctgccggaggatggcgagccctgcggcaactgctttccccgggaccagatgcgcagcgatattgtactgctgctctccgagcggctcaccgaaaaaatccagtgcggggcgtttccccgggacccggatgaccgggtgcatctgacgcgggaggccttttcccgggaattggaagacttgcggcaggaatacaaggaccaatggggcaaaacggtggccgaaaaggacctggcggcgctgacccaggaaatactggaggaactgtgctactgggactttgccgccgtggagggagaagtggtgaccctgcagtcgggctttgccctgtggcaggggatctatccccaaaagcgataa

SEQ ID NO: 49986 - DNA, 4032 bp, Subdoligranulum variabile DSM 15176
atgcaggaacgctggcggatgaacaaactgggatttgtaaacttctggctctatgactgggaggagttccccttcagcgagggacgccttttgctgcggggtgagaacggcgcgggcaaatccgtcaccacccagagcttcatccccttcatgctggacggcgatctgcgtccctaccggctggattccttcggcagcaaggaccgcaaaatggcctattacctgttgggggaggagaaggaggaaagcaccggctatctctatctggaattcatcaagccggaacacaggctctaccgcaccctggtggtggggctgcgggcccggcgcagcagcagcaccgtggaattctggggattctgcctgagtgacggccggcgcatcggcaccgggccggaggactttgccctgtttgagaccaagggctcccagcacatctcccttaccaggcaggaagtccacaaccggttcggcgacggcgaaaactgggtggaacggggcagcgactacaaacagatggtcaaccgcatgctcttcggctgtgccgagatggaacagtatgaccggctgctccgccttttgatccagctgcgcaaacccaaattgagcaaggacttttccccgcggctggtgcaggagatcctcaacgcctcgctgcagccgttgagcgaggaggacatcgcccccatggtcaattccatggaaaagatggacaccatccagcaccggctggaagcgctggggcagagtctgcaggacgcccgcctgctgcgcaacgagtatacccgctacaatcagtatgtgttgggcaaaaaaggacagtactatctggcggcccgtcagtttacccagcagcgtcagaccgaagtaaagagcctggaagacaaggtcgccctgacgcaacaggcgctggaggaggcccgggcgggccgccgggaggcggaacagcagatgggggagatttcccgtcagctggaagtgctgcgggagggcagcgacctggacaacgcagtgcgccgcagggaagaatgccgccgccaggtggcgcagcagcaggaagccatcgaccgggagcagcaggaagaacgcagaaagcagacagcgctggatagcaaggagcgggaccgccgccaggcagtgcgccgctgtgacgacgagcaggacggagtggaggaggcgttccgggaactgggggagcagaatgaggaactgcgttaccccggccaccctgccaccctgcaggcggtggatttccaacaggaacagccggagatcgcccgttttgccgcccggctgcgcaaggcggaggaaggactgcgccgccaggaggaagccctgggacggctggaccggtaccagcaggagcgggatgcggcggcccaggccctgcgccatgcccaaagccagtgggaagcggcccagggaacggtgaacgccatgcgggacgagctgagcgaagccttcgcagcgctggaagaaccgacgcaagtcttttgcctgcggcatgaggaggtgatggcgctctttgcccaggtcaccgcctacgaagggctggcccaggaacaggagatgcagaagattctcagcggggcgctgcagcggctttcgatgccgttgttgcaggaacataccctctgggaacagcaacaaaaggacagccagcagcagctcaacgagctggccgcccgccgcagggagctggaaaaccagaaggacctgccgccccggcgcagcgaagcagtgcaggccacccgtgcctacctgcaagagcgcggcataccccatgcctccttttacgagctggtggattttgcgccggatctgccgccggaacgccgtgccctgctggaagcacagctggcggatgcagggattctcgacgcgctggtggtgccgccggaaacactggcaaagatgccggaactgctggccgaacatcccgatcacttcctttgcctgaaggacctgtccccggcggcagcgccgctgcccctgcggccggaacgggagctgcccccgtgggccgatatggccggggtcctggcctgcctttcggaacagccggcgggccatgcctggtttgccgccgacggccggtaccgccagggggtgctgcaggggcggagcgtggccctgcagccggccggatatatcggcgcttcggcccggcgggccaaccgggaacggcagatggaggcccttgcccggcagatggaagaaaagcagcgggaactggaagaaatccgggcgcgcctgcagcagaccgagggggcgcagcggcagcttcagcaggcctatgaagcccgccccaccaccgccgatctggcgatggcactggaccttgccgccagacagcgagacgagacggaacgtcgggaacggaccctggatgactgcacccagcagctgcagcggcagcagaaacagcttgccgatctgcgcgccgagatcctgccgctgacccggggccttccctacgagcaggacgcccaaacctatgagcagatggtggatctctgcgaggaataccgggaacagtaccggaccatttcggagggcaaggaaaaactggaacggtgtcagagccgggtgcaggaactggaacagcagatgaatgacctgaacgaggacctgctggcctgcaccgaccgggtccgccgccagcaggccgaacagcgcaagacaaaagccgccctggaggagctggagcgctatctggctcagccggaaatccaggccctggcccagaagctggaagcgctgaacgaggcgctggagcgggcacagaaacaataccatgataccgataaacaggtcctgctgcggcagaacgatctggatcatcagggccccgaactgacccggaaaaaacaggacctgcaaaaggccatcggggaggaggaagcgctgcgccagatctttgaggaagaactttgccgcggccccggtcagccggggcggggggagacacctctgtggaagcaggcggaagccgcccgggaccacatccgccagaaggaccgcaacctggggccggaggacttgcgtacatccttagaaaaaaatatgcgtaacaccagtacgctgaatacctaccgcataggcatccagtcactgtttgccagtgaggaagggcggctgcgcagccgcgtctgtatcgaactctacctggacggccagcggctggatctgctggacttcatccggcggctggaaagccagcgggaagtggaagaacagctcctctcccgggaggaccgccgcctgttcgagacgatcctcaaccagacgatcatcaccaagctgagccaccgcatcaacagcagccaggaatggacccagcggatgagcgggatcatggaacagctgaacacttccatgggattgcggttcagccttgtgtggaagggaaagcccgccgaccagcagaaggagctggacacgggggaactgctcaagctgctgcgcaaggacccggccttgatgggggatgcggaccggcagaagatcaccgaccatttccgcgccaagatcaaccgggcgcgggagcgctcccagatggaggccaccccggccacctactcggagttgatgcgggaggcgctggatttccggaactggttcaccttccgccttttctaccagaagggcggggcggagaagcagaccaaaaaggagctgaccgattccgccttcaacagcttcagtggcggcgaaaaggccatggccatgtatgtgccgctgtttgcggcgctggcggcccagtacatagcagcgggcaaagaggctccgcggctgatggcgctggacgaggcctttgccggtgtggacgagaccaacatcgagagtatgtttgccctggtgcatgagcttgggtttgactatatcatgaactcccaggcactgtggggatgctaccccgcggtatcctcgctgaacattgcagagctgtggcgcccccagaatgcccaaatcgtcacggtactgcgctatcactgggacggtcatgtccgaagactggaggaatcatga

SEQ ID NO: 49987 - DNA, 1275 bp, Subdoligranulum variabile DSM 15176
atgaaagaatcatccctgcgggactattttgtttccgcacccggttggcagcgacagctggcccagctgcgaaaaaaatgcctggccggctatgccgacggtgtgatccggctgcaggatgccaccccggaggaatgccgtgccgccgaaggacttctgggccgccattttgtgccgcccctactgcgctacaagatgtcggattttgaaaaggccttgcgggacagccgttttgcggtgactgacctggcagaattctggcagcagctggacggggtgccgctgcgctcccacacccaacagaaagccgaccgccggcaggaagtacaccactttttcgccgcagaggcggctttgccccacggtgcggcggcccgcagctggctgcaggctatggaagaagacaaaagccatggcttcggggttctgcaggaccgtatcgggcagcccgaggccgcccggtggctgcactgggtctgctgcacactggaccgtcggcagcaacacgccgagccggaggaactggccctctgcagttatgccgtttccaccgatccccacgccttggacggcaaaaatccggcgggcagtctgctgctccacgcgctggcattctggcagggggtgccgctgcccacccgcgcccgccagcgtctggcgctgctgcgccgctgcggactgatgcaggacgatatctcggattttacggtgcagcgcggcttgatcctgacaggggccgacggccgggagcatctggtctgggcacaattgcggcaggcgggaaaattctgcctgctcacttcctcccagctggcggaggtaaagggggcatccagccccaccagccgggtgtatctcctggaaaatcagatgctgttctcctccctgtgccggcaaagccggctgcagcacccgctggtctgcacctccggccagctgaaagaggcttcctggcagctgctggacctgctggcacaaaccgattgcctgttttattacgccggggactttgacccggaaggcctttccatcgccgaccggctgtggcaggaatacggggaacgggtgcgtttctggcacatggaaccgcaggactaccggcgggccatctcggaaaagaaaatcgagggggaaggccgcatgcgccagctggaacagatcgcctgcccggccttgcgtcccaccgcccaggctgtcctggcggaaagacgcgccggataccaggaggcgctggcggagcaatatctgggcgatttgcaaaatccgggagaatga

SEQ ID NO: 49988 - DNA, 1416 bp, Blautia hydrogenotrophica DSM 10507
atgagaattttttatcgtgaatatgagaaaatgcattttcagctctatgaaagagaggtgctgagcctgctgcgtgcctgtccggggtttgaagaatatcctgcacagaagctgaaacaggatttgagaatgctggtggagtggaagaatctgattgccgtccaggagctgaagcatgtacgcacgatcgcagagtataagaacaggcaatttcgctattccatgacggagaacgctgtggagattgagagactgacagtgaaattggaaaacaggtatcgggaaagtgggaatctctcatcttgttatctgatgagaatcgaggaggcgcttatggatatggaaaggataaagagtgcttcaacgagagagaccggccaatggtggaggaatcttcaggaagactttcagcgtctgaatcagaactaccaggattatctgagtgaattttattcggaaaattcagataaaatcttaaaatctgtggagtttattttgcataaagaccggcttgtcacttatctgaaggagtttgttcaggagcttcgggtaaatgcgtcgaggattgaagctgtgctcaaggaaatatccggggaacaggcagctgaaatcttagaacgggtggtattgtgtgagagggatatcctatttccaggttcaaaggacaaagaggccgtcaaagaatctgtgagggaaaatgtatttggaggatgggcagctttgcggcaatggtttttgagtgagacagagccaagtgagtgtagccgcgttctggagattacagatgagatcatcagaaaaatcatacagaacgcggctctcattgttcaggcccagagttggagtgtcagccgaaaaaatgattatcagaaatttatccggctgtttagggagtgtgaggatttggaagaggcacactgcctggctgctcacctctttggaattcaacaagtcagacattttagagtttgcaaagataggtcgacagaaagcatctatagcagtacttatgaggaagaggctatggagttttggctgaggccgcgcaggagaaggcacggttctagattggagagaactggctttgaggataaaggagagagaaagaaaagtcaaaggagagagtatcttaaaagaagcgaggaagaattgtatacagtaacacagtatatccagggaggttgtctagagctgtccaagatcgagggaaaaatctcaaaagagacgagagcattgttgctgcggtggattgagacggcgatgctgtccggttctggtagaggagtgacggagagcgggaagttctatcagctacaacgtacggacagcaggtgtactttgcactgtgaggatggcgatttcagtatgccgaactatattctgatgtttggggcaagagaagatggagacatttag

SEQ ID NO: 49989 - DNA, 1137 bp, Blautia hydrogenotrophica DSM 10507
atggagacatttagagcgttgatagaaagattttggattgaaaagaaaaaagacagagaactgtacagaaaaattcaaagggaagcagaaaaaatccgcggatttgtcacagaacagctaggatggaagctgattgccaatgagaagatcataaagctggaaaaaatacctacccatgcgaaaggctttatgggagttactcagtttactcgaattcaagattatattattttttgtgcactgctgatttatttggaggagcgggaggaaggagagcaatttcttctgtcagagatgctggaagtactggaaacacagcttcaggaatatatggaagtggattggacgatgtatgctcagcgcagatcgctggtgagggttttgcaggttgcagaaaacaggggcctgttgaaagtgaacgatgggaacagtgagcgggtggccgatgggacggagcgagaagtgctctatgagaatacgggtttatcccgatattttgcagtgaattttgggcgcagtatcgaaacattttcgtcgtgtcgggattttgaggctgctgcttgtttcgagacggatacggaacagagcaagacccagagggtatatagacaattggtgactgcaccggcgttttactggatatctacagaaaacaaggatgcgtcgtatttgaaggcggagagaatgcggatacaaagagtgttgggagaaaagttgggaggtagccttcatctccatcgaaatgcggccttttacgtgtatgaagaagagcgtatgggagagctgcaccctgaggagagtatgctcagtgaggtcgtcctgactgtctgtaaagaaatacgcaaagaggtggagaatcggcatctggaaagagacgccggagactgtgtcagtatttttagaagagagtttcaagggctggtacgaaggtgtcaggaaagagaaaaagcggtctggaacaaagagtttggggagatggaaatctcaaaattggagcgaggcattttggaatatatgaaatcctggatgttggcggaacttcaaggggagagagtgattttctatccggcctgcggaaaatttataggctcctatctcaccgatttcgttggagaggaggataaaacggatgagtaa

SEQ ID NO: 49990 - DNA, 3004 bp, Blautia hydrogenotrophica DSM 10507
atgagtaaccgctggcatatgcaccgaatgggattcataaatttttggttgtatgatgaggagacttttttatttgcagatggaaggctgctgctgcgtggtcagaatggatcgggaaaatctgtcacaactcagagcttgattccctttattttagatggagaccgttctccaggtcgtctggacccttttggctcaaattcgcgaaagatggagtactatcttttaggggatggtgagaaagaagaagccacaggctatctatttttggaatttaagagggaaaataggcagcagtaccggaccatcggaattgggcagaaagcgcaaagaggaaagcccatggctttttgggggttccttctgttggatggacgcagagtgggttatgagataaagctgtgtcgggatgtgggcggaagaaagattccctgcacgaagagggaactgaggcagaagctggaaggaatcaatttttttacggagacacagagggagtatatggagctggtgaatcgctatctttttggattcccttgcgtggagcagtatcagcagatgatacgcttgttggtcaaagtacgtgctcctaagttgtctaaggaattgagtccatcgaaggtgtatgaggttttggaagaatctctttggcctttgtccaatgaagatctgcgcccaatggctgagactatggagaatatggatgatattcaagaccggctgatgagtctaaaaagagcttttgaggacttgacggcacttcgaaaggagtatcttcgctataatctctatatgctagggaaaaaagcgaaggcctatgaggaggcgaaagaaaaggcatgtcaggcggccgggctcttggaacaaaaggagcgagagttaaaggagaaaaaagaaaaccaaagagccaaggaacgaaaaagcagaaagctagaagagaaaattcagcttttggagcgagaaaagagtacgttttatctggatgaggtcgaggcttccatagacagactgaatggcatccgagagcagaaaaagcaggaggaaaaagaacgagaccggttactggaacagatagaatggggaaagaaaagacagttatctcttagcagagaatttcagtttagccggctgaaaaaggaagagtaccggtcaaatgccgaaagactgtttcgtgatctagagcagagaaacggtatcattgagattccctgccatgaaaagttaaaagaatctgggcctacaggtggtgagagtgccaaagtgcaggaggtataccgggaactcacagagttgaagtgtcaggtggaaggcgtacagcaggtcttgggagagtcaagaggcgcgcaaaaaaaatggagtgaacaagaggaacggtatcagaaaattctagcagaagtgcaagaggctcaaaaaagttggcgagaggctgaccggcaggtggaggcgtgtagggaatggctggcagaacgacttctgatggcggctgaagacaatcaggagctggaaatcggaaagaaggatttgaaaaagatactgggaaaaatagagcagtatcaggggcctggtgactatgaagacatacgaagcgtgctgagggcaatctggtggaaaaagaaagaagtcttggaacgggaacgacgaagcctcaaagaacagcagatagagggccgcataaagattcaaggtttgaaagaagagcgagacaggagggtctctgacagacaagaacaggctagggagtttttggagaagaaggggatttcctgtctgtttttttatgagacagtggagtttgcggaaaatttggactcggagacgagaaagagggtggagggacaactggcggcgtcaggactgctggatgcattggtgatagctgaggaagattataaaagggcagtccgggagcttcggggaattgctgttgtattgttaaatccaggaggattcaaagaagaaagctctctaaaagaagagagattcccctatttgattcccgctgatgtgggaagccagacgctaagacaggcggtaggacgcctgttaagctgtctgtcccggcagaaggtaaaattggatgagaaaggcttcgacggtcgtctggttctgtatgacaatggctattttgaacaggggattttggagggctatggtacctgggagaaggcgcggtatataggagagaagaccagagaagaggaaaagcaaaaaattctgagagagagaaaatgcgagctggccgaggcagaaaaagagctggagaattgggatacccggttaaaatacgtggaacaaagactttttaggctggatgaagaatataaagcggttccgacatttgcagaattggagaaggcgattggaagggcacaggtgcgtcgagaagctttggaatggtgggaggcagaggcacagccccaggagagggcagccgctcaggcaaaaagaatctatgatgagtgcgaaaaggtagcgacaaagctgtgcagacttctgccttatgggagaaagctggaagattatattagagtcaaagaagaaatttccttgtatattgcgcagttaggcgaatgggagcgcgcgaagctccggcaggagatggaagaaaatcggtgttttcatgttcaggagcttttggagcgagaggaacaggagataaggaaaaattctgattgtctaagaagaagcgagtgtatacttcaagagctggacgttttggccttgggaatggaagaacatttgaaaaaaactggggctcgagaaaaagttaggcgattgaaacagatcaaggaggagctgttcgaccaggaggagcagaggcaggatactttgatcagtctggcggttctcgaaagtgagggggcagctttggaaaaagaaaaggggcagctttggctggaagctaaggagtgggcagagacggaaaagagagagaaggaatgttttgaggcagagctggctttggggctggtaaaggagatggatgaggttccaaagtgtgaga

SEQ ID NO: 49991 - DNA, 1482 bp, Holdemania filiformis DSM 12042
atgcagatctcggaagcactgactaaaaaaataatggagactagttatctgacggcgatcaatgcggatcgatatcgggtgattatgcgctatttttatgaggaatatgaaaaaatccattattggctgaataaagaagatgtctttgacatgatgctgaaaaccggcttgtttccggattatacattaaatcaatgtcagctggatctgcaggcattgctcgaatggggaaatctgacggcgacgcaggacagcgcaaaagcgacgacctatcaggagttcaagaataagaaattccgttatcagttaagcgaatataccgtggaaatcgaacggttgactttgcgtttggaaagtctggaagtcgaaggtgcttctttgcagcccagcttgattgaacggattcaccggcagatcctcgcgctgccttcgctgattgaaaaaagtgatgaggaagccgcggaatcctggaccgctttgaatcaagattttatccgcctcaaccgcaattatcaggattatatccggacgctcaacagcgcccatgcggaagaaatgatgaagacggagcaatttcttatgtttaaagaccagctgctgatgtatctgcgcacctttgtcaaaacgctgcaggaacatgccttggggttggaggaaacgatgcagaatctgcctgaaaccacgatggaaagcctttttgcgaaagtggtccggtatgagcagtccattccgcggattgagaaaaaaacgacggatgaccagattcttgaaaactgccggggccggtggcgcagcttgaagctgtggtttgtaggggaaaatggcgacagcgagattacccggttatatgactcgactaacgaaattatccgtcggatgacacggtacgcccagcagatcagcgaacgctatacccaaggcgccagccgcgtggaggattaccggcatttagcgcaggtatttctgcaatgcacaacgttgaacgaagcgcataatttaagcgcgatggtcttcggcccggaaaaaatgctgcacttgaaaggcttgccggaccgggcgacagattcgattgacagcggagtctatgacgaagtcccgtgttattttgatttggacagccgaagccgtaaagcacgcccgaaatccagccggctcccgcatccggactatcagctggaacggcagctgcagcggatggccgtggaagaacaacagcggcagcggcgtgaaagtctgcgggttctgattcaggaaagaagtattgattttgcggcgctgccggtgatttccgcggcggtgcgcaagatcttgttaagctggctgagccggggactcaacagcagttcccatcgcggccggacggaggaaggcgtttattttcacgtcaatctggaaaatgccagtcagtcctgcgtccttcgctgtgaggacggatgctttgttatgccgcattttatcctggaaatggagggcgattattga

SEQ ID NO: 49992 - DNA, 1137 bp, Holdemania filiformis DSM 12042
atgaacgctgtggaaacgctgctcagtcagcgctgggtgctgcggtcttcccaaccggagctttattatcagatcaaggatgaaatcggacgttaccgccggattctgttggaaaagtttgggtacagcgtgctgattacgccggcgttagtcaaactggataaaatccccggtcagcctgaaccgtggatgggcatccagagttttgaagaaccgggcgattacgcgatgctctgccaggtattgatgtatctggaaacccgggagaaagaagaacaatttgatttttccatgctgacggaatatcttcagggacagggcgtggaagaaaaactggattggacgcagtatgcccgccgccgtcagttggtgcgcgtgttgcgctattgtcaggaacaagggctgatgaagctgcttgacggcagcgacgaacagtttctgcgcagcggaaatcaggaagttctgtttgaaaacaccgggaattcccgttttttcctgcggaatttcgcacgggatctgatggactatacttgtcctgaggattttattgaaagcgattggatcgatatggatcaggaccgcgggattgtccggcggcagcgggtttaccgccggttgttattaagcccgggcctctaccggcagccggaacaagacgaggactttaattatctgagaaatcagcggggacaggttcagcgtgattttcaaagtttgtttgcctgcgatctgcatttgcagcgctccagcgcctatcttgttctcgatgaagcctgcgcggccggcgcagtcgttcccggaaataacgcggcgcatgatttgattttgattttagctcagcagctgcagcagcgggtgaaaatccatcaggcgcaatattcgctgcaggcgatggaagtcctggtcctgccggtggattctgttgtccggttgttaaaaagaataattcagcagcgcctggattatttgccgaagtatattcagggagaaattcccgcggcgatccaacagacgctggaaaccttggagaatctgggctgggtccggattgaagacgaacaagtttatttcatgccgatttttggcaaactagccggcgattacgctgtagtcaaggaggattctcatgctgaatga

SEQ ID NO: 49993 - DNA, 4011 bp, Holdemania filiformis DSM 12042
atgctgaatgaacgatggcaccccgcacggattggattgatcgatttctggtattatgaaaaccaggagtttgaattggatcacggccatttgcttttgcgcggcagtaacggcagcggaaaatctgtcacgatgcagagcttcattccgctcttgctggacggaaataagaacagcgaacggctggacgcgtttggtacgcgttcgcggaagattgaaaattatctgttggaagaagacagcgagcggaccgaccgaatcggttatttgtggatggaattcaagcgggaaaacgaggaagtgtacaagacgatcggcatgggtctgcatgcccggctgaataagaaaaccgatgcctggtattttgtgctggaagacaaccggcggattaatcaggatttaagtcttgtccgcaatcatctggcactgacgcagcaggagctgaaaaacgtcgttggcgttcagaatgtgatgacttcgcggacggattatatgcagcgggtgaatcaggcgctgtatggttttgaaaatctcgaacagtacgatgaattgatcaaactgctggtgcagctgcgttcgccgaagttgagcaattctttgaaaccgacgtctttgaacgaacttctgcagaattcgctgcagcccttaagcgaagaggaattgcggccgatgagcgaagcgatcgccagtatggaccggcagaaggatgaattggatcatctgatccaggctcagcggtcggccacgcaggttaaccaaatctatcagcaatataaccgcgcggttttggcggataaattgcaaaaggccttaaaccagcagcaacagctgcaggggatgacgaagcagcagcaggcggaggaagcgcagcggcagcgggttcagacagaaattcaacaatccctgcggcagattcaggaaaaacaatctctccagcggaatctgacggaagaaaaaaatcaaattcaggattcgcagctgatccggctgatcgatcagcagcagagttataaagaacagctcaaacagctggaaaaagatttgcggcataagcaggaagctttctcgcgaaaacaggatcgactgcaggatgtccggtcggaccagcagcgtttcagcgaccgctatgacggcagtttgcgtgatcagcagcgctgtctggcggaaatggacgtgcttcaggataaccttcagtttgaagatcatcttttgcttgtgcagcagctgaaggatgaaccggcggcgcaactggatttcaaagacgccgaaaagttgatcgagcagcggctggtgcttttgaagcagggactggtcacgtgggatcaacggcggcaggccgccgcgatggcccagcagcagcaaaatgaatggctgcggctgaaagatgaaaaagccggattacagaaacaggcggatgaaattgcagagcagtatcgcggcattgtagaagaaatgaaaagccgtttcttccgcttcagcgaagaaaatacatggctgaaattaaatgccggccagtttgcggcggtggtggagctgcttttggattatgcggaacagagccagttctataaaattacgcagttaatcaccgatctttatcacggccattggtcgtcactgcagagccggctgacgcagcagaaagctagtcaaagcgaacatctggagcagcagcgtcagattgcgcaggaactgcatcaatggcaaaccgtgagcgaaccagcgccgttgtgggatgaagcgacggaaaaccatcaccgctggctgaaggaacagggagttcctttctgcccgctttatgaaaaactggaattcagttcggaatgttcggaagaacagcgtcaaatgattgaggaaagcttgcgccgggcgggcattctggacagcatactggtagcgaagtccgattgggatgcgttgcccaagacgccgcgcgggcaggctgaaaaggtattgttaacaaccctgccgcctgtccagcttccagccttggaattggacgcttccttgttggaggaaaacgggattcaacagcttgaacagcattttcaatgctcgctggcatcgctgcagctcaaggagaacggctatcgctggggttctctgcagggacttaacagtatggaacagccgcaggtcatgatcggccaggcggctcgggaacgctaccgccagcagcaaatcgaacgctgtcagcaggcactgaataagattgaagaacaattatctcaggatcaggcggaactgaataaaataacccaggctatgcagcagctggaaagtgaactcaaacagattccaaaggaagatgatctgagcgaagcgctgcggcaggttcaggcttccgaacaggcggttgcggaaaaacagaagcagctggatcagactcagcagcgatgggatcagatccgttcacggatgtcggagattgatcagcggatccggcagactgccgaacaattggcgatcgcggccgatgaacaggtatttctgagccggaaggaagggtatgaggaataccgggataaaatgaaagacttgcggcggattaccctgcagctgcaaaccgcgaaagagcaatgcgagagcagccgcgctcagcttgaggagctgcagtgggatcttgatgatatgcaggccgatgcaagccagctgcaatcccagatcagcgcccgccggcagcagcttgcgttaatcgaggaacagctgcgggaaagccatgccgatcagctgcgcgagcgtctgacgcagatccagtggcagttagaacggctgcccgaagaaatcgtactgctgaaccggacgctcggttctttgcagaatgaattaaaacagtcaagcgagaatctggaaagccgggaagcggaaattgaacggcaaaaaatactctgtcagcaatacgatcaggttgtcgtgcgggaattgaccaacggctatctgaatcaggaagttgatccgcaaacggactggaaaggaattttgcgccagctggagaaaagtgaaggcttcggccggcggacgagcgacttacagatggatctgcaggcgcagtttcagaatcatcggatagtgctgcaggattattcgccaagctatcggtcggttctgcaggaggaactggctgatatccctggccggttagagttgttagcacgaattcagggccggcgggccggttttcaggagctggtcgattatatcggcggcgcgattgctgagctccagcagctgattcaggaacaagagcggacactgtttgaggatatcatgatcaattccattaccaagacgatccggcggcatatccggaccagccgcgaatgggttcagcggatgaatacggcgatgagcgcgatgaataccagctcagcgctgcggctgtcgctgcagtggaaaggccggaaagctgaaaatgatcaggaactggacagccgcgagctgattaccttactggaaaccgacgcgcagatcatgaagccgcaggatcagcagagactggccggacatttccgcaaccggctggccgcggcccgcaaagaagcggaaaaagaagaaaatcaacaaagcttccatcagatcatgcaggaagtgatggattaccggcgttggtttgaattcactattttgtatcaaagaggcgatgagaagaaaaaggaactgacaaattcggctttctactccttcagcggcggagaaaaggcgatcgcgatgtatgttccgctgttttccgcggtttccgcgaagtattcaatggcccgcccggacgcgccgcagattatcgctttggatgaagcgtttgccggtgtggatgaaaataacatcgacgggttatttaagttaattgaaaacttccgcttcgattacatcatgaattctcaggtgttgtggggtgattatccatcggtgaaacatttgcggattgcggagctctatcgcccggacggtgtgcattatgtcacggtcatggactaccagtggaacggcagtgtgaaaagttggattccggaatga

SEQ ID NO: 49994 - DNA, 1269 bp, Holdemania filiformis DSM 12042
atgaaggcggaacaggaatttgccgcatatctgaaaagcaagccggccttcatgcctttgctggaagcgttgaaaacacggtggaaccacagcggaacctggcgcggcaagctggttctgcacgaatgtgatccatctttgcaggaagccttggcggagcttttgggcggttctttttggggacagtccacgatcacgctcacttatggtcaatggaaaaaggcgttaagccggacccggtttgacggctgtgatctgcaggaagtgctgagtcttgtctttgatgaaccgctggagggacaaaatattcagaaacagaaacgcagagtgcaggaacaagcgcgtttcgatgaaatgacacggcagctggccggaacgccggcaggccggtggctggaagaaatccggcaggctcgcgggagtctttacacccgctgctgcgctgaatcggaagcggtattgcggcagtgggcggaggcgatgaatcagctgccgatgcgcactcaggaagtttcgctgattgcggtttatgccgcgcgcgtgctgcatgatccgcatgcgctggataccggtcctgtccggcggctgttaatccagtcgctgcgctgggagctgacggaggactcgacggatgaggaaaaagtctgggaggaaagcgagcttttagaacaagcgggtctgctgcgggatcaggtctccaaccgctgcttagtctataatctgaacggaattggaaatcgcggcgaagtgcatccgggatggcaggggtttgccgaaaaagctgaaccgttcagcgtgacgctgagcaatgtcttgaacgtagagcggatcgaaagtgcagcccagtttgtgatcattgaaaacccttcaatttttgaacggctgagcgctgaactcaggcatcagaaacgttctgacatcagtctgatgtgcagtgaagggcaaccgaatcaatgcgtctggcagctgttaaggcgagtggataaaacgaacacgcagatgtggtactgcggtgatttcgatccggaaggattgcagatggcgcagcggatgctgcggcgttgcccgggtctgaaactatggcattatgaggttcaggattacatcaaggcgctgagtaataaatcgttcaacgctcgccggcgccggattttggaaagctgcggctgcgaggaactggcagcgatccaacaccggatgctgcaggatcagcggtgcggctaccaggaaaaactactggaggactatttaaaatttgattttcaatga

SEQ ID NO: 49995 - DNA, 1494 bp, Fusobacterium ulcerans ATCC 49185
atggatattttagatcagataaaagaaacttcatatctttctactcaaaaaacaatttattacagaagaataatgagagtattttttcgtgaatacgaaaaaatgaaatttcaattatataaagaagatatttttgaagaaataaaaaagtattcagaatttgatggttatacaatagatgagttgaaatcagatttggatatattggtagaatggaaaaatttaaccgctatacaggattctagaaaagtttatactatagcagaatttaaaaatagagaatatagatattctatgagtgaaaaatcagtaatcatagaaagaatgactgtgagtctagaaaatctttattttgaaacaggaaatttatctactaattatattcctagaatgcaggaagcattagaaaaaataagattactttttaataaaaaagaaaattatgatgaaatttatgaatattgggagaatcttcaagaagattttagaaaattaaatcaaaattatcaagattatttaagagaattttatactaagaaaacagaaaatttaatgaaaactatagagtttattgtatataaagaaaaatttatatctattttaagaaattttgtaagagaattacaaataaacagcagtaaaatggaaactactatagataatataaaagatgatatggaaaagggaattttagattatataataaaaaatgaggtaaaaaaccaagaattaaatttgagcaaagaattaaaaaaagataaagaatttgaagatgaaattggagagaatattagagggaaatgggagtcgttaaaaaattggtttggatccagcggaatgagaaaaagtgaatacagacaggtaatggatataactgaggagataataggaaaaataattcaaaatgctttttttataactcaaaagcaaaattggggagtaaacaagaaagaggaatataaaaaatttattaaaatgtttatagaatgtgaagacatggatgaagctcataaactttcggcacatatttttggaatacaaaatataagacattatggaatggatattcctagaagtacagatagttctgaaaatagtgcttacgatgaagagtatatggaatatattttagaatcgcataatagaacatataaaccaaagatagagaaaacaggttttgaagatagaaaaaagcttaaagaagaattgtcattactctataagaaaaaattagaagaagatagagaaatgataatgaagtacttacaaaatggaattttagatatttcaaaaatagatgaaaatatatcttcagaattcagaatatttatattaaatcttataacaagtgcaaatatatctgtagaaaaaacaggaagaacagagtatggtcaaaaatataaaatgtcagaaatgaaagaaaaatttgtattgaagtgtgaagatggtaacttggaaatgtctaaatatatatttgaatttttggaggattag

SEQ ID NO: 49996 - DNA, 1146 bp, Fusobacterium ulcerans ATCC 49185
gtgaaagaaataagacttttactggaaaatttttggatagatagagataaaaataaagaagaatattttgaaattaaaaaagaaagaaaggaaatagaaaagttctatatagaaagaactggttggaaaacactttttactgaaaaggtaataaaagtagaaaaaatacctgcaaaagcggaatcttttatgggaataaatgaatttcaagataagatggactattgtatattatgtggactattgatgtttcttgaagacagagaagatggagaacaatttcttttaaaagagatgactgacagaatagaattttatttaaaagatttgctagagatagattggacaaaatttacacatagaaaatctttagtaagagtttttgaatatgctgaaagaataagagtaatagataagactgagggaaatataaaaaaatatggagaggatgaagaaatagaagttctatatgaaaaaacaggtctttcaagatatttttcagttaatttcgaaaaagatataatgaaatacacttcatatgaagattttgaaatagaaagaaatgaaaatatagatataaatagaggagattttagaactaatagagtatatagaaaactattgactacacctgcaatctattggaatgaaacaaacgatcaggatagaatctatataaaaaatcaaaaacctgttattgaaaaaggattgggtaaattttttaatggaaaacttcatatacataaaaatggagcttttctgatatttgataataaggataagattggagaaatccaccctaaaggaactatgctggcagaattagtacttttactatgtaatgaagtaagaaaaaaagtaattaataaagaagtgaaaaaagaattaaatgatattgtatatatttctaaaaaagaaatggaagatatgatggaagaatgtaaaaatagatacggaataaattggagcaaagaatatagagagatgaaaattgaaaaaatatttgataatattatagaatatatggaaagctggatgctggctgaagtagagggagaaaagatagctatatatccagcagttggaaagataacaggagcatactctaaaagattaaagccaataaaaggggaaaaagatgaataa

SEQ ID NO: 49997 - DNA, 4041 bp, Fusobacterium ulcerans ATCC 49185
atgaataatcgttggaaaatgaacagaataggatttataaatttctggttatatgatgaagaaatattcaatttggaaaatgggaaaatattaataagaggaactaatggttctggaaaatctataacaacacaaagcgtggtaagttttatattggatggggatagaagccctgaaagattagatacttttggttctactagtagaaaaatggaatactattttttaggagatggagagaaagaggacgaaacaggatatatttttcttgaattaaaaaaagaaaatgtggaacaatatcttactattggaatagggcagagagcacaaaaaggaaagcagatgtctttttggggatttattttatcagatggaagaagagtaggagaaaaatttaaactatacagagaaattggaaataaaagaatccctctatctaaaaatgaattagaaagattattgggagataagaataaaatagcatatggtcaaagggattatatggatatgataaataaagaactttttggttttagtgatatcaactattataaaaagcttataaaatttttattgaaaataagaacatctaaactatctacagatataaagccaatgaatgtttacgaaatactgaatgattcattacaagtgttggaagaaagagacttgagagtacttgtagagagccttgaaaaaatggatagtatgcagaagagaaatgaagagcaaaaagaagctcagaaaagtataaatattataaaaaaagaatacgataaatataatagatttattttagggaagaaagctataacatattttgaagcaaagaaagagtatgaaatattaaaaaaaaacatagataaattaataaaagaaatagaaaaattggaaaaagaatctaaagataatagtgaaattaaagtaaaaatagaaaaaagaattgaagatatagaacaggaaaatagaattttagaatctattgacttagaaaaaactgtaaatgaaatgttgattactaaaagagaatttcaaaataaagaaaaagaaataaaagaagaggaagacaagttagaagaacacaatacagagctaaagagacaaggaattagaaaaagagaagaagaaaatagaatagaaagtgtaaagtataaaataaaaaaaatatatcaggaattgaaagatataaatgaaactcttttatttgaaggacatttaaaagatgaaaatgaaatatttcagaaagaaatagcagaaaaattagagtccataaaaaataatttggaagtttatcaaaaaaatataaatctaggtcttgaagcattagagaaaatgaaaaaattgtcagaagatttagagaaagaagaggaagaagtaaatagttatagaaacgagagagatagaatagaagatgaaatgttaaaggctcaaggaatggaagaaagagccagagataatctagtagaaaatttttatattttaaaagagaaaaatgagtttttaaaaatttcgaaaagtgatttggataaaattattgaattaataaaaaaatatgaaggattgatagaagctggagaaataaaaaaaatattagagaaaaactataatttgaaaaaccaagaacttcagcaagaaaaaatagagttaggacatataaaaacagttaaaacaagagaatataaaattgaactaaaagaattagaggaattaaagaatatggaagatagtgttccaatgagaaaagatgaagtaattcaatgcagaaaagacttgaaaaaggcaggcatagagtttatggctttttatgaaacagtagattttgcagaaaatttatctgagattgaaagaaatacactggaagcacaactaaaagatagtggaatacttgattccttagttattccatacgaagagagagaaagagcaaaggacataataagtaaatattcagatattataatcactagtaaaaaaaattctgacaagaattttaaatacaataaacttgttgctgaaaatataagggaaaatgtaaaagaagttatagaagacttttttaagaatatatctccatcagagcaagaaaaaaatgaggatattattattttagaaaaagatggatattttaaaaatggagttttagaagggtacagtagcagtaaagaagaagcttcatatataggggttcaaacaagaaaagaaaaattacagaaatatattttagaaaaagaagaaaaatgtgcagagttgttacatgaaatagaaaattttgatcttatgatagaagatatatctaataaaatatcagctttaattgaagaatataaaaatgtacctctgtatgatgatttagatacaagtataaaattaaaaaaagatatagaatatgcttttcaaaaaattaaaaatgaattagaaataagagaagataaattaaatagaattaaaaccgaatatagagaatggaatcaaaaggtaataactagatgtagaatacttccttttgagaaaaaggtagcagagtataaagaagcagaaacagcttcaaaagaatatctgaaaagtatatatgaacttgaaaatcaattaagaaactatcaaagttctaaatatgaaataataagaactgaagaaatggaaggaaaatcggaagaattaatagatttttatagagataaaataagaaaagggaaaaatgaattagaaaaatatcaaaaagctatagaaaaactgcaagaagttttaaatagtcctaaaaatgttgcagcagcagagaaattaaaaaatcttaaagaagaaaagttagaactaaaagaacaatatgataaagcagatagaaatattattagagttgatacaactattcaaggaagagaagaaatattaaattctgaaaataaaaaggttgaagcaaaagaaagagcagtagaaaaaacacttgaatattacaaagaagaactttctttaggatatgtagtgcaatatgaaaaaggagaagaggaaaaacttcttgaagaaattctcaaaaatgtaaaagatagtgaaaaaacaacagaggggataactgtatctctgatgaaaaaatttaatgataacagcagtagattgtatgaatacatggcagctactgaagaaatttttgaagatgattatgagtattgtaggaagagaatatatataagaatgattaataatggtaaaaaattatctttgtatgagtttgaaaaaattcttagtgaagaaattgagcagagagaatatgctattgaaagagaagatagaaagcttatagtagacattttatcaggaaatataggacataaattaaatgatcagatttatgagagtagaaaatggataaaagaaatgtctaaaataatgtcagaaatggaaacatctatgaaaatgaaattttctatggaatggaaacctaaagaaaaacttaatgaatctgaattagaaataaatgagctggaaatattattaagaaaagatggaaagttattgccagctgaagacttacagaaaatatcagaacattttaaaagcaaactaaatttaattagagaagagatggaaattaaaggcgaagaagtaaactatatagattctataagagagattctagactatagagaatggtttgaatttagaatatattatcatagagaaggggagaataaaaaagaactgactaataatgcttttaatagatttagtggtggagaaaaggcgatgtcaatatatattcctttattagcagcagcatctgctcagtataaaaaagcaaaagaggattgtccaaggataatagctttagacgaagcttttgcaggaatagatgataaaaatataagcagtatgtttgagttgatagacaaacttgattttgattatatcatgaattcacaaatattatggggatgttatgaaactgtaaaaaaattaagaatagcagaattaataaatagaagagatttaaaaatggtaaaagttaatcatttctattgggatggaaagaaaaaaactctagagatgtaa

SEQ ID NO: 49998 - DNA, 1284 bp, Fusobacterium ulcerans ATCC 49185
atgttgaatgaatgtattagatatttcaaagaaagtaaaggatataaacgtatatttcagcaactaaaagataaatatatatcttatgggaaactttctggaaatatagtaatagataatccagaaaaaattgaagtagaagctataaaaggattgctgggaagagtaatggaaggaaataagataaaatttaaaatatctgaatttgaaaaagttttaaaagaatcaaggtttagagaaattgaactgatggatcttttagagggatacttttcagagagcattattactaaaaaagaaaaaaagatagaaaaagaaatgtctaaggaaattttttttcaaaatataaaagagagattaaaaatagcagaagagtataatgaaactgctgctgaattattagaaaaaataattagggataagggatcattttataaacatgatgctgataatacagaaacagaaaatatgatatattttacaataaaagctataaattttttaaaaaaatcaaaggaaagaataaaaatagccatattaggagctgaaataacttctaatccacactattttgatcgtggtatgccagcaggacaactccttttaaatttactgtttcatattaataatatggaatatacaaaagaagcggaaaaagttcttgagctgtactatatttcaggaatagaagtagatactatctctagtttcaccactgcttttggaataagtcttcatacagaaaaaggaattcaccaagcatatgaagaatttataaaacaatcagaagaatatataatcactatgtctaacttgaagaaagtaataaaagctgactgtaaaagaaaaaaggtttttattgtggaaaatcagatggtattttcatacttatgtgaatattttaaagataaagaaatagctttattatgcacttcaggtcagctaaaaacagcttctttaattttaatagacatgttatgtcgaaaaggatgtactctttattattctggagatattgatcctgaaggaattgagatagcagataagcttattcaaagaagaggaagtaaaataattccatggtgctttacaatagaagattataaattaaatatatcagaaaaaattatttcagaagaaagtatgaaaaaattagaaaagataaaaagtgattgctttattgagcttatagaagaagtaaaaaataaaaaaagagcagggtatcaagaattaattcttgataaaatgaaggaagatattaaaaaaataaactgggacttgtaa

SEQ ID NO: 49999 - DNA, 1626 bp, Micromonospora sp. ATCC 39149
atggtgggagtccgacacggtgccggtcgaagcccggctgcgaaagcagggcccgcgcggcacgaccggggcgccggcgcggctagccgacaacaccggcaaccggaagatcgcgcgggcgaacgcggtggcgcagcagtccttggcggcgcagaccgaggcggcggtcgtggcccgctcggggatgcggttgtcggactggccgccgatctcggaggcggagaccacgctgctgctgcagttcctgacggcgatgctgcggggcagatcagcggcgtccgggacgcggaccgcgataaccggggacggccgctggtcgttgcggaccgaaccggttctcggcggcgtggacgccgtgatccacacaccggcgggccggctcgtgcacccggatctgatcttgcacatctccgccaccacaaccgggagcatcgaatgagcgccagaacgtcggagcagcaggtcgctgcgcagcacgcgttcgtcggcctgctcgcccagccgatgatcacccctgccacgaaccgggagttgttccggctggtggttcgccatcaacagccgctgtcggaggcggcgcgccggctcgggtaccggatccagcgggtcggtcaggcggctcgactgatccgggtaccggtcggcggaacggcgaccgttccgccgcggccgtcggacgccccgtctcggcggctgttggcgctgatgtgcctgatcgcggcgtgctgcgaggaggtgtccgggacggtcaccctgcagcggttgtccgacatggttcgtgacgtgtgtgccgccccgggcgtgcaggtgtcgccctacgacccggacatcaagtccgagcgccggcagttgcgggacgcggcggcgctgctggcccgctggggtgtgctgaaccggcggaccagcgacgaaaagatgttggaggaatggactgaggacgggtccggccccggcgccggctacgaagtcgaccgggacgctctgctgctgatgaccagcccggacgtgctcgccgccgcgttgcagccggagccagcggacgcggacgcgacccgcacgatccggctgctgcgggccctggtcgaaaccccggcagtgctctacgccgacctcgacccgatcgacgcggacacgctgcgccggcaccgttcccgatacgccggctatctggcgcagatgactggcggtgcgactgaggcccggcaggaagggatcctgttggtcctctgcgacggcgacggtcgtccgccgacggtcgccgattggccgcgggcgaaagctgcggactgggtcgcgctgctcgccgcggaccaggccggccgcgacggtgtccgccacgacgacggtacggtccacctgacccgggttctggtcgacgagctgatcgacgacctgatccggtcgcggggtgcgtacatgaacgaccggcagaaagccgacccgcaggtcgtcctcgacgacgtgcagcgggtcctgaccgagctcggcctgctgcgggtcacaggtgacggcggctgggtgctgctgccgcccgccgcccgctaccgcgacccggacgtgctctatcccgagaccaccagccgcacctcgtccgccgctgacttgaccgttgtggagattgcctga

SEQ ID NO: 50000 - DNA, 4320 bp, Micromonospora sp. ATCC 39149
atgaccgccctcgccggcctgaccgtaccgtcaccgggcccgcacctgtccgacgcccagctcgccggatggcgcgacgccgtcgcgcacggccggctgccggagccggtccgcggccggtggcagatcctgcgggccggggtcatcggtttgtgggagttcgacgtcgccgagtacgtgttcgctgacggccgcgcccagtttgtcggcgcgaaccagtccggcaagtcgacactgatgacgttgacgacgctgatcatgctcgccggcaacctcgaacggcagaacatcgacaccttcggtgactccggcaaagacttccggtactacgtcgagccctcaggcaacgaccaggaccgccgcgacgactccgcgaccgcgcatcgcggctgggcgtgggtcgagtacggccggatgcgtgacgacggtacctcggagttcttcaccacgctgctgtacgcgcaggccaagcggggcgtgtcgcagctgacccgcacctggatgatctgccacggcaccgcccgggtccgcgccggcctcgacctggtgagcgggcaggcggtcaccgaaccaagacacctcgacggcatcgacggagtccaggtctttcccaccggcacgcactatcggcgcaagctgaccaccgcactgttcgggttcaccgatgaagaccggtacgcgaccgtgctcgagctgctcaagacgctgcggaccccgcatttggggcagaagctgaacccggactggttcaccaaccaaatccgctcggcgttgccgccgctggcccgcgacgagattgaggggctcgcctctggctggcagcaggtcgagcaggtcggtgccgaccgcaccgacgctgaggaggcccggtccgcgatcgtggactatgtcgccaaggcgtggcggccgtgggcagacgccgtgctgcgccagcacgccgacgcccttgccgaagccgacgccgcgctcagcgcggcgtcggcggccgtggacgccgccgccgcgacgctggatcaggcccggcaggctctcgacgccgagtcgaccaagacccagcagctcactagcgccgccgagcgtaatcgcggagcgcatcggcagctgctggagtccgcggcgtacaagagcgcgaccggcagggccgaagccgcgacgttcgcccgccgcgccgccaaccaagccgccacccgcgccgatgacgccgcggcggcgctggtcatgctgcgcagcctgcacgagcaggcgctggccaagcagaccgaggcgcaagcggccctggaggccgcccgcaccggctaccaggcggcggtgaccgccaccgtcaccgccgccggcgcggcgatgctcggggacctggcggcccagtgggccgctgacgcggatactgcccggttggacgcggccgttgccgctcgcaggaccgcggtagccaccttgcggaacctgctgcgggaaacgaccagactggctgcgaagtatcgcacagccgacgacctggcgagcgccgcagaagcggacctcaacacccgtaacgctgatgcggagtccgccgccggcaggctcagcgacgcgatacagcagctgtccgacgacatggaacggtgggccgccgccttgaccggatccgcaccggagccggcccttcggcagcggtggctcgagcaggtcacgacggagtcgatcgccgccagcccgcgtcaggtgctgcagcagctgctcatgcgggagtggctcaccccggccgtcgacccgcggaccacccgagtcgcgcagttgcgcaccgaagccgaacagcagcagtccgcggcgacggccgctgaccgggaagccgacgagctggcgatgcacggtgacccggtcccgccggctccggccggctggacccgccgcccgcggccaccgttcccgtccgcggacggtgcgccgctgtggcggctggtcgacccggccgacggggtcgagcgggacgtgctggaccaggttgaggccgccttgaccgtcgcaggactgctcgacgcatgggtcaccgtcgacggggtgtacacctccggccgcgacggcacggacgtggtcgccacgagcctgccctcggcgactggtccggcgctctcgacggtgctcgtcccagccggtgacagcggcccgctgaccgcgacgatcacggcgatcctcgacgggatcgggttcaccccggccgggcagccgcacgccagtgctgtcgccgtcgccgccgacggccgctggcagaccccgaccgcttccgggcaagcgggtccggccgaacacggcgccgagctgatcggcgccgccgcccgcgcggccgcccggcaacgccggatcaccgagttgcacgagctggccgagcagcaccgcacccgggccgatgacgcgaaccaggccgcggacaccctggtcgatgaaatcaccgcgctgcgggccgcggcggagcgggcgccctctgacggcgacgtggtagccgccgctctggcgttgacgggcgccaaccgcgaacgtgacaccgcccagcgcaagcacgtggccctggccggcaaggccgacgccgcccgccaggtgtgggagaccgcaaccgcagacgcaaccgctcacgcactcgaccaccggctgccgaactccgacgagcacctcgacgccgtcaccgaagcgctcgacgcggccgcaggcgcggtcggccggctccggctcgccgaccaggtccgcaacaccgccgagcggggcagcgccgcagcggagtcgaggaccgccgagtccgaagcccaactcgacgccggcgtccaggcggaacagaccgcagcagccgaggcggcgctgctcgacgagcgggccaccgaggcggagaaggctgtagggcgcggcgaccaggaattgttcgaccgggccgccgaactcgatcgtgaggccgacgcgctcaaatcggcgatcgccgcctcccaccgcgacggtctcgtcctggccggggccgccgcgaccgcgcagagcgactgggaacaacgctgccgagagcaaaccaccgccgaacaggatcgcgccgccgccgtcatcagctggtggattccggtcgacgcgggactcgccgcagcccgcaacctgcccgagccgtgcgggcgcagcgtcgacgacgcgctgcagcaggcccgcaccgcaatcgccgatctacgtccggcgagctggccggcgacgcgcaccggacgcgaggatcgggtccggcaggtgaccgcccggctgttcgccggcccctacaccgagttgcagaccagcctcgaagccaaaggcggccgcgccgtgcacgccgccgaagccgacgacgcccggccactgccggagatcaccatggtggtggaagcctccggcaagcaactcaccccggccgcggcgatcgcgcacctcgacgaccagatcgcaaagctgtccgcgacgcacgacgagaagctgcaccagatgtacgcccagattctgtcgtcgacgttcatcaaccacctgcgcgaccgtctcaagcgtgtcctgagcctgctgagcaccgtcaacgacgtcctcgaacggcacccgaccggagcgaaccgaaccacgttgcggctgcgccggaatccccgcaacgaacagcaggccggctacaagatcttgcgcgctctggagtccggcagcttcgaatccgacgccgcgcaggagcagttgcaggccttcctcatcgaacggctccagcaggttcaggaagccggcctgcccggtgtcgacgactggaccgaccggctcgccaccctgctcgactaccgtgactggttcgacgtcgtctgcgagttccgggtcgggaccgccaccgacccgaaatggagaccgctgacgaaacaggtccacgcggtcgactccggcggcggcaaggtcgtcaccctgatgcaaccgttgctggccaccctcgtcgccctgtactccgacaacccggccggaccccgcccgctgtggctcgacgaagcattcgaaggcgtcgaccccaacaaccgagcgatcatgctgcggatgctgtgcgacttcgacctcgacttcctgctcgccggccccggcgccctcgtcgccgcagcccaagtccccgccgccgcgatctggaccatcacccgggcgccggcgccactgcccggcgttgacctgtccctgatgctgtgggccgggaacacgctgcagatcgtgccggtcgccgacaccgccgcgccgctgctggccaccccgcgaccagccgaacaggacggaccggacctactgtccacgctcactgccgatgttggggccaccggcagcgaggagatgcgatga

SEQ ID NO: 50001 - DNA, 1317 bp, Micromonospora sp. ATCC 39149
gtgggccgggaacacgctgcagatcgtgccggtcgccgacaccgccgcgccgctgctggccaccccgcgaccagccgaacaggacggaccggacctactgtccacgctcactgccgatgttggggccaccggcagcgaggagatgcgatgagcgcggccgcggaccgatgggccgccctgcccggcccgacgaaagtcctcgccgccgcccgagaactgctggagaacggcaagaccggccctggcgtcaccgttcggatcaccctcgacgcggttgaacgcgaccaggtcggacggatcctcgggatgtcctgggaagcttccactgctccggtcaccctcggccggctacgcaaagccctgcacggcctgaacgacaccctggaagacctcctcgtccggctcggcggcccgctcgacgaccgggtcgccaaacgcgaactggatcggcaagccgcccaggaccatctcgacaacgcatacgccatcctgaccagtgcgggcatcccggagcatgcggtcgcactcgcgcgcacccggcgctggctggagcacaccaaccccgatctggccgacagccgcgcccaggctctagccctgctgtggcagcacctgcccgccgccgaccgcccgctgccggagctcgcgaactcgctgttcggcaatccgcaccatctcgaccgcgacgccgacctcggccgcctcgctgcccgcctgctcgccgccgcacacactacggaacccggcgccgccgcagccgcggccggcaccgcgttgagcgccgacgtctggcggcaggtttgggcgagcgccggcgtcagctgcgacgaagtctcggcaactgtcctggtcctcaatctgcctctggccggctccggtgccgcagcggcaatcgccgccgcagccgccgagaccggtgaaccagtctggctgaccgcccgctcgctgcgccacgcgtgggaacccggacccggccttcacaccgtccgggtgtgcgagaacccggtcgtggtcgaaaccgcggcggcacggctaggcccccacgctctgccactgatctgcgtgtacgggcgcccgtcgatcgcggcatggctgctactggatggtctggccgcggccggggtccgtctgctgatgacctgtgaccgcgacaccgccgggcagcagttcctcaccgaactcctgcgcctgcccggcgcggtcgagtggctggccgcggctgacggcgtctacgaggaatcgaggctaccggccctgctggccgacctcgcccctgcaccgccggaggtacttgatccggtacccaagtcggggtaa

SEQ ID NO: 50002 - DNA, 1539 bp, Streptomyces sp. AA4
atggacccgatccgtgtcccgcctgagatgttccgcttcaccagcggagacctggccggactctacgtgtcggtgctgcacgccttcggggaggcgaacgagcgactggagacttccctcggactggacgacgtccgggcccgtctgcgcgcggtcggctggctcgacgcgctcgaagacgaggagctccgtcgtgcacttgatcaactccacgcgtggcggctcgtcgacatagcccagaaccattcggagaactaccggtcagccgccgagtacgagcggcgcaacctgcagtactccctgaccaggcaaggcgaagccgcgttcgccggcgtcgtgcacgcgatgagcctgctcgcgtccgccggagcactgcaaacagcggtcctcgacgcgatcgccgacaggctcgccgatctggcgcgagaactggacgccggttcggaccgccgggtcttcaccgccctgaccgagctggaaagccacctcgaagcactgcgcgcgaacaccaagcagttcaacggcgaactgcagcggctgctgcgttcggaaggaaccaccctcgccactttccacgaggtgaaggcctccacggtggcttatctcgaggaattcctggccgacctggagcagcggaaacacacgatcggcgtccggatccagcaggtcgaggaccgcggagtcgggctgatgcaccagcgcgcgctggtcggggcggacctcccgcggctctccggcgccgatccgggtcccgagtggctggcgcatcgccgggctcgctgggacggtttgcgagcctggttcctgccctccgacgcagcgcagccccgagtcgaacaactgcatgtcgtcgcccggcgcgcgatcgtcacgctgctgcaggtcctcgaccggatcaccgagtcgcggcggcgggccagcagcgccgcggccgatttccgggaactggcgaggtggttcgccgtcgtccccgcccagggcgatctgcaccggttgtggtcgaccgtattcgggctcagttcggcgcggcacgcacatctcgcccatcccgatcctgagctgaccagctcgaccacgtcgtgggaagacgctcccccggtcgaggtctcccctttgctccgcacttcgggaaagaccgaacggttcagccgtaccggcaaggtccgagacgtcgccgcgatcaaggccgcgagagccgagcaggcccgtgccgaacgagccgaactggaggccgcctgggacctgctcgacaccggcgggccggtccgtctatccgccttcggcaggctcgaccacgccgtgttcgaacgattgctcgatctgctcggccgggcactcggaatcgcgccgggccgaggcggtgtccggcagagcacgacgtccgacggccggatcgagattctgctccgcccacccgccgacggagccgtagcgaggctttccacccctcgcggactcttccacggccccgactacgaggtcgagatccgcaccggcggtgtccgccaggcccgcagggcgagcggaggcgcgtcatga

SEQ ID NO: 50003 - DNA, 1242 bp, Streptomyces sp. AA4
atgagccagctggcgaatcaactggccgcggccgaacgcgaggaggtagcgctgggaatccgccagctcctcgccaccccgctgatcaccgaacgcgccaagccggacgcgttcgacttgatccgacgacgcggcgaaccgatccggaaatggttcgactactactgcggatgggcattaacggtcgagccgaggctcggttacgcacgtctggccaaggtgcgggcagccgaggatccgcgtcgcccgctgcggaggctccgctccggcaaagctccgttcgaccggcgccggtatgtgctgttgtgcgttaccgcggcggagctgctcgcaacaccggtgaccaccatcgggctgctcgcgaaacgagtggttcaagccaccgccgcggacgaagcgatcacgacactggacaccgccagccgcgaagaacgccgggcattggtcgatgtcctccggatcttggagcactacggcgtgctcgacgcggtcgacggctcgaccgagacattcgtcgaatcgaccgaggccaaggtgctgtaccagatcgacggcacgctgctgctgcgactgctgtccgcgccggtcgggccttcccgtctcgcagttccgcttgacgaagtggcgctccgcttcgaggaactcctcgccgcggtttcccgcgaacgtcggtacggcgaaacgagtgcgcacagcgaccgccccgggcaatcggaggtgcagcgcaacctgtggctccggcactcagttttccgtcggctggtcgatgaccccgtgctctacttcgaagacctcagtgatgctgaacgcgcttatctcgcctcgcctaccggacggcaactgctccgccgtgcggctggacaaggcggcttcgttttggaagagcgcgcggagggcgtgctgctggtagacgtcgagagcgtcgcgacggattcccggttcccggacgacgcgggcaatgcgaaggtgggcgcgctcctcttgctggaaaccctcactggtccggtcactgtcgagcagttgcggatccaagcggccgaactgctcatccgctttccccgatgggccgagggatatcgcggtacggacggcgccgcccggctggccgccgacgcgatcgaggtgctgatggcattcgggttggcccagctctcttccggaatcgtccggccgcttcccgccgccgctcgctacaccgtccgcgaagcccggaccgctgactccgaaggagcgtcaggatga

SEQ ID NO: 50004 - DNA, 4053 bp, Streptomyces sp. AA4
atgacggtcactgaactcccccggcatgccgaggacgcgttttcgcgccaggcgtaccgctggcaaccggctcgcgccgggatcctgaacgtctggcggtattacgacgagatcttcgaattccaccacggcaggctcctgctccggggcccgaacggcagcggcaagtcgaaagctctcgagctgctgctgccgttcctcttcgacgccagcctgcgcgcgaacaggttgtccacgttcggcaccggcgagcgcacgatgcactggaacctcatgggcgagggcgcgtccggagtgacccgggtcggatacgtctggctggaattccgttacccgggaacccccgagcggtggttcacctgcggcgcacggcttcaggccagctcccgcacgaccaccgtccacccggactacttcacgacctcgcagcggatcggggtttccggcggcatcagcctggtcaacgattccggtcagccgctgacccggcaggcactcgaacaacgactcggctccgacggcacgctctacgggaacgcaaccgactaccgggccgaagtccgcaccacgcttttcccggggctgagcgaacagcggttcgacgcgttgatcctcgcgttgctccagttgcgcatgccgaagctgtcgcagcggctggacccgagcctgctgtccgatctgctgtccaaggcactccctccactgggccaacaggaaatcgccgacctcgccgagggcttcgaaaggctggacaagcaccacgaacggctgaaaggactggaggagctggtcgcatcgacccgcactctggctgcccggcagcggacgtatgcccagcgagtgctgcgcgccggcgcgggcacgctgatctcagccaccaccgagacggagaagcgggcctcgacggcgcgcgagtcggcggtccggtacgaaaccgcgacgcgggaaaaggaaaccgccgagcagcagatcgacgaactggccaagcagatccgcacctcgtcggcgcaccggaacgggttgctcgagagcgaggcgtaccagcgcggttcagaactggaacttcttcgcaggcgaaccgccgatgccaaatcccgggcggaacggttgctgaccgagtcccgccggagaaaagcagcggcggagcaggacgagcgcgcccggagcagtgcggagcaagacgttcgccaccggacggagcacgtacgaaacctggtaagcgagacccggcaggccgccgtacgggccggaatgcccagcgtgcacggcgagatcgcggctcagctggacggcggcgacccggccgcggcccggccgttgctgcgcgccgctgggcaaagccgggaggaacaactgcgggcagtagacgaggcgctgggcggccacgagcgcgcgatcgaccggcggggccaggcagaagaggaactggagcaagcgcgaacggcgttctccgcggcgaaggaagaactggatcttgccgctgagcagcgagccgtcgcgctggaacagctgcggaccgatgtgctcgcctgggcacaggcctgtcacgagctggcgtttccggagccagatctgctgctggaccttctcgaaccagagcgggcgttgaacgccgaggtggagcaggcggtcaacgcggcgttggaggacatcacccggcaggaagcgtcccgcgaagcgctggtggctgaactgcggcagcgacgggatgactgtgtcaccgaggtcgcccggctccagtccgagaaagaccttcccccgctcgcgccgccgacccgtaccgctgaccggacgcggatggccggtgccccgttgtggcggcttgtcgacttctccgtcgcgagttcggaggacgaccgcgccggaatcgaagccgccctcgaaggcgcgggactgctggacgcttgggtcggttcgcgtggagaggtgcaaggccacgatgtcttcgccgccccagaggccctgcccgcggcgaaaggacgttcgctcgcggacgtcctttcgcccgagcccgacggcgaggtcgctccttccgcggtgcgcaggctgctctcttccgtgggtttcggcgacgtgctgcctgccgaaggcccagccgcgatcggtgccgacgggtcgtggcggctcggaaacctcaccggcagctggcacaaggagcgcccggcctacatcggcgcggctgcccggcgacgcgcccgcgaggcgcgaatcgaagagctgcggaacgaaattctcttgctggacgcggaaatcgccgacgccgatgcggaactgtccgcactcgccgtgcgcaggggaacagtacgcgacgagcgagcaagcctgcctccgcatactgacctcaacgctgccgccaggcagctcgaccgggcggagatcggactcgccgctgccgatcggctcgtgcgcgagcgcatcgaacgggtaggcaagcgtgaacgcgaggtcgccgatgccctgcgcacgttgaccgcttgtgccgccgaatacgggatgccttccgaacggtccgcgctggcgaatcttgccgcggccacccgcgagttccacgccgtctgcgaaaactggctggcaagccacgacggactgcgcgcagcacggcaagtgctcggctccttggccgcgcaggccagccggtccgcggacgatgcccgtcaacgggcagaagaagccgagaaagccgaggaggagtactcggagctggcggcgaccctcgaggcggtagacagcactgccggcgtcgagtaccgcgaggtcgcggccaagatcgagaaaatcggcagacgccttgacgaactcgaagccacgcggaattccacgcaaaaccggcataccgagttggcggtcgaggtcgggaagtggaacaaccgccgggagacggacgcggtcgaacacgagaaagcagtgggtgaccgcgatgctgcggcgctccggttccggagactggcgtccggggcgttccccgccgacagcggcctcgacgaccttgagcaattcgaaaccgtcctcggctcgagcgacggcgtccgcgccgcactggatgccgcgcggctggtagccgcgacgtggccgagcgtcccgcactctccgagcaacatcggcgacgcgctgcaccggctgtccgagtccatgcacacgtgtcgcgacgttctccaaacccgcgccgacctcgacctcgaaacagacgaggacgtgcagatcttcaccgccgtggtggacggcatccgggtcggagcggccgaactgctgaagatcctgcgcgaagaggccgaggaaagccgccgcgagatcaccgaacgggagcgggaactcttcgaccagaccctcaccggcgatacccgacggcacctggccgcgcggatccgccaggcgaacgagctggtcgagaacatgaacagccggctggagcaggtgcgcaccgcgtcgaaggtcgcggtccggctggtctggcaggtcgccgccgacctgccgcccggcacgaaggcggcccgcgatctcctgctgaaggatccggcccggctgaccgccgccgatcgggagtccctgcaccagttcttccgcgaccggatcgaggaggccaaagccgacgacaccgccaccggttgggaacagcaactggccaaggtcttcgactacaccgcgtggcaccggttcgtggtgaaggtcgaccgggccaacggcgagggctggcaactgctgacccggaaactgcacggcgcgctgtccggcggagagaaggccatcgcgcttcatctgccgctcttcgccgccgtcgccgcgcactatcaggccgtgccggaggcgcctcggatcatcctgctcgacgaagtcttcgtcggcgtcgacacgacgaaccgcggccaggtgttcgccctcctgtccgccttggacctggatctcatgctcacgtccgaccacgagtggtgcgtttacgcagaactcagcgggatcgggatccatcagctcatcaccggcgctgacggcgacgacgcggtcaccactgcccgcttcacctgggatggtcatcagcttctctcgctagacggggagtaa

SEQ ID NO: 50005 - DNA, 1170 bp, Streptomyces sp. AA4
gtgcacgccaggctctcgtccgggctccccgtcagccgggtccgagtcggcccgctcgacaccgaacagcagacggctgtcgccgatcttctcggtctggctcagtttcccggccagtacaccagcatcaccctggcccagctggacgccgctcttcgcgaggtcgccggcgtcgacgcgcgcgaagtcgtcacacggctggtcgggccggtcggcaaccgcgcagaggatcgccggaaggccgctgaagcccgcgccagtctgtggcactggctggacgtgcatcccgtggtcgccgcacaaccggcgttgcgttcctggacggcgagcattcgccgggccggcctgatcgagggttcgatcgaacgcacccggctcgaactcgaacgggcgctgcgcgtgctgtccgaactgccggccacgggggtgccgctgccggtattcgccgattccgcgctcggtgcgactcatgcgctggacgacggcgcccgcaccgcgaatctcgtcctcaaagcgctgaccgcgatctacgacgtggcacctccgacgaatgcgcccgaacggcgcgcgttgtgggagcgagcaggcgtcgccgacgacgaactgtcgtcgaccgtgctcacggccgggctccagctccccggcgaccacgtcgtcggccggatcctccaggtgtgccgcgccgcgggaacggcagcggtcttgaccttgcagcagctccgcgggagcaagctggcatccgcgccgagcacggtctgggtgttcgagaatcccagcgtcctcgccctcgcgctggctcgcttcggcagctcctgccctccgctggtctgcacatccggctggccgagcagtgccggggtcgccttgctgaagcggttaacgcagatcggaacgaatctgtattaccacggcgattttgacggagacggcctgcgaatcgccgcgaatgtcgtagcccgaaccggcgcgaagccgtggcggatgaccagtgccgactacctcgccgcagtcgccgacggacccgcggccggaagggtcacgccagttccctgggacccggagctggcggttcacttggcggagcaaggaaaaacggtgccggaagaacgcgttgccgacagccttctcgacgagatcaccgagcaagggacaacgcttccgagcgggtga

SEQ ID NO: 50006 - DNA, 1620 bp, Streptomyces sp. C
ctgccgatcacgggtgcgaggcagggagaatggccgacgatggacatgactcgaccgcagcccaccagccaggccggtgggtacgggcccttctcccacctcaccgccccgaacgtgctcctctaccgctccgtgatgagggccttcctcgtcgccaaggagaggttcgccgtacatctgcggcccgaggacgtgcaggccgcgctgcccgtcgggatccggccgggagagctcgacgccgtggtcaaggcgcttgacagcctggtggggtgggggaacctgagggccgacccggacaccgggcgggtgaccgctgtcgaggacttctaccgcaagcggttcatctaccagctgacacgggagggcgaggcggccgagcaggccctggccgcctacgacgaggagctcgggcggcgcggcgcgctccaggcggtcgcgctccacgacatcgtcacgcagctgcgggccctcctcgtcctgacggccggggaggagcccgatccggccaagacgcatctggcgctggacgggctcgccagtcgcttcgccgcactcgccgacaacgcccgggccttcatgggctccctgcagcgcaccatcgatctgcatgacgtaggggaagaggtcttcctcgcctacaaggaccagctcatccagtacctggagcggttcatccaggacctgatcaccctcggcgcccgtatcgcccggttgatcctggagcttgaggacggccggcgcatccagcccttgctgcgcgccgccgccgcgcgcgaggcggcggacgcgaccccgcaggaagccgcggaagccgagcaggccgcgtacgagcggtgggtccaccggtgggaggggctggcggcctggttcctcagccgcgacggccgcgaatcgcagtcccggctgctgcgtggacgcgccctcggggcgatcccgcagctgctggcggtcgtacgggcgctgaacgagcgccgggcaggacgctcggaccgctcggcggacttccgtacgctcgcccgctggttcgccgaggctcccgacgacgacgcccggcaccagctgtggcgtgccgccttcgggctgtaccccgcccggcacctcaccgtcgacgccgagacgctggctgccaggttcgcccgtcccgaggccgcgtccacaccatgggccgacgccgaaccgctgcggatcagtccgcaactgcgacgcacgggcagctacgagcggcgcggcaagccccgcaaggtcgaggaccggcaggaggcgcgccggctgctcgcggagaccgccgccaagcaggccgccgagaccgccgcggctcgggcccggctcgccaccgacggcatcaccacgctgtccgggctcggcgaactcgacccggccagcttccggctcttcctccagctcctcggcgacgcactggccacctggcggcccggcatgacgcgcaccagggccaccagcaacgacggatccatggagatccggctcacggccttgccggacggacccacgatcgagatccgcacgccggtcgggaccttccggggccccgatcacgccatcgagatcgtcgacctcaccgccggaacggacgcaacggaagggggcgacgccccgtga

SEQ ID NO: 50007 - DNA, 1245 bp, Streptomyces sp. C
gtgaccaccccgctcgccgaagtgctggacgggcagcacgccgccgaaatgcgcaaggccgcccgcgccctgctgaaacagccgctgctgccggcccacggcccctccgccgacgcgtaccgactggtccggcggcacgcctccgaactgcgcgaatggttcgaccgcaacacgggctggtccctccgggtcgactccgaaacggcccggctgggcaagatccccgcccacctcgccgacgccacccatcccgcccgggaggccacccgcagcgccgcccccttcacgcgccgccggtacgtcctgctctgcctcgccctcgccgccctcgaacgcggtgaggcgcagatcgccctcggcaggctcgccgaccaggtcgtgctggacgccgccgacccccggctcgccgccgcggggatccagttcaccctggaccgccgcgacgagcggctcgacctggccgccgtcgtacgtctcctcctgagcttcggggtgctgaggcgcgtcgccggggacgaggacgcctacgtcaacggagccggcgacgcgctgtacgacgtcgaacgacgcgtgctggccgggctgctggccacccgccggggcccgtccatggtccgggcggcgacatgggaggagaggctcgcggagctcaccgccgaaacggccctcgacagtgacgaactgcgctttcgtgcccttcgcaggtcgctgacccggcgactgctggacgatccggtgctctactacgacgagctgaccgacgccgaactggcctacctcacccgccagcgcgggttcctcaccgcacgcatcaccgaactgaccgggctggtcgccgaagtcagggccgagggcatcgccatggtcgaccccgacgacgacctcaccgacctccgcatgccggaatcgggcacccacggccacgtcaccctcctgctcgccgaacacctcacctcggccgacggccccgtcagcacggccgatctgatgagcagggtcaccgacctggcggccgagcacggcggcttctggtcgaagtcggcgcgcgaggcgggtgccgaagaggagctggtggaacaggcggtcgtccggctcgccgccctcggtctggtctcccgcacctccgacggggtcgtgccccgcccggcgctcgcccggtacgcggtcggcgagaccgtcgtagtcacaccccgtacggcaggcaccgccgaggtgcccgcgcagcgaaaggcgtcaccgcgttga

SEQ ID NO: 50008 - DNA, 4056 bp, Streptomyces sp. C
atgggcctggtcgatctcttccactatgacgtggaggagttccacttccgcgacggcaggctgctgctccgagggaacaacggcaccgggaagtccaaggtgctcgccctgaccctgcccttcctcctcgacggggacctcagcgcccgtcgcgtcgagccggacggggacgcgggcaagagaatggagtggaaccttctgctcggcggcgaacacccgcactccgaacggctcggctacacctgggtggagttcggccgccgcgacgagacgagcggtgaggaacatttccgtacgcttgtctgcgggctcaaggccgtcagcgggcgcggcgtcgcccgccactggtgggcggtgaccgggcagaggatcgaccactcgacggcaggatcacccgtcgacggctcgctcagcctgctcgacgccaccggtacggtgctgtcgcgggaccgactcatcgaagcggtgtccggacacggaacggtccacgaccaggccaaggcctaccgtcgggccgtcgacgaggcgctgttcggactcggtgagcagcgttacggcgccctcgtcgacctgctcatccagttgcgccagccccagctgtccaagcgtcccaacgaagccgccctctcccgcgcgctcaccgaggcactgccgcccatggaccaggccgtcatcgcggatgtggccgaggccttccggtccctggacgaggagaaggaggagctgcgggccgccagggcggccgaacgggcggcctccgcgttcctcgaccactaccggcgctatgcccgcatagcctcccgccgtcgggcgcgcctcccgcgtaccgagcactccaagtacgagcacctgctgcgcgacctcgccggggcacaggacgagaaagcgggcgccgaacaggagcgggcggaggccgccgagcggatcgccgcgctcaccgagatgcaggcgcgtctggaggccaccgacgccgctctgcgcgagggcccggagatgcgcagcgcccacgaactggagcgagccgccaaggccgctgaacgatcgcagggcgacagcgtccgcgcccgcgccgaccgggaccaggcctcgctgctgcacagccgtgcgctgggtcgcctcggcgccgctgagaaccgcctcgaatccgcccgggaacaggccgagaacacgctgcgcgaggtcggggaggtcgcccgcaaggcccggttggacctgcccgaggccgagggcgtgccggtgggcgagctgcgtgccgccgtggccgaggcgaccgaccgccgccaacgcaccctcggacacgtggaggacctcgccgaccaggcagggaaggcggcggccgagcgccggaccgccgcgctccggctcgacgaggcggaagccgacctgacccaggccgccgaggcacaggaagcggccgacgaggccgcgacggccgccggccgggctctggtcgatgccgtacgcgaacacgcgggccggtgcgcggagctggtgcatcccgacccggcaggactgttggacgagctccaggaatgggccgtgcaccaggacggcccctacccggcacgcctgtacgcggcgcaggtccacagcgccaaggcagcggtgctcgccgaccgagcggcggaagcggcgcactcccgggagggcctggcggcccggacccggcagacggaggaagagctcgcgaagctggaggcaggcgggcggcgggcgccgacggccccgtacacccggacaccgggctcgcgcgatcagacccccggcgctccgctgtggcggctggtcgacttccgggaacacgtcggggaaggcgagcgcgcaggcctggaagcggccctggaagccggtgggctgctggacgcctgggtgcgcccggacggcgtggctctggccccggacggtcacgacgtgctcctcgccccgcggaccgggcccgtcggcggcccgtcactggccgacgtgctccgcccggccgtcgaccgcggcgatgcccaggcggtgtcggtgggggaggaagcagtggccgggctcctcgcggcgatcggtctcggagccgtccgaggggagacggcggccgacacgtgggtcgcgccggacggccggtaccgggtgggtgtgctcaccggccggtggaccaagtccggcgccgaatacatcggagagggtgcccgggaagccgcgcggcgcgtccgcatcgctgccttgaaggccgaactcgcttcccttcagcagcagttggccgatatcgcccagcaggctcaggagctgacaacgcgccgcctggcgctcgacgccgagctggccggcgtacccgacgaggcgcccctcacccgtgcgcatgcccgcgccgccgctgccgccgacaccgtgcgccgggcccggagccgtcgtgaggaacgagccgccgacacgctggccgcagccgagcgggccgagcgggcacacgccgaggtccacgagacggcgacggccctggggcttccctccgagccgtcggagctggccgaggtacgccaggccctggtggaactcgccgcgctcctggccgcgctctggccggcgctgcgcgagcggacagaggcatcccgccaggcggccgaggagcgcgaggaggccggacgggcaggggaacggactgccgaactcggtctgcgagcggaggcggcggcccgtacggcggcagccgacgacgagcggctcacgacgctgcgctcgaccgtgggtgcggccgtggccgagctggagcggcgccttgccgagaccgcgcaaaccctgcgccgctgcgcggcggaccagcgcgtgtgccaggagcgccagacagaggcggaccggcgggccagccgggccgaaggccggatcgaacaactggaaaaggacgtttccgccgcggccgccgcacgcgccgggtccatcgccgcgctccagcgcttcaccgccaccggcctgatcgccgtggcgctccccgacctcgccgtcccggccgcgggaggagaaccgtgggcggccacgccggccatcgccctcgcccgctccctcgaagcggagctggccaccaccgatgactccgacggcgcgtgggagcgcgtacagcggcgactgagcgaagaactcaagaccctccaggacgcgctctcccggcacggccacaccgcctcggcccgcatggtggaggagggaatggtcgtcgacatcgtctatcaggggcgcgagcgtgccgtacccgaactcgccgaagccctcgccgtcgaggtgggggaactcatgcgcatcctgtccgcgcacgaacgggagctcctcgaaacccacctcgtcaccgaggtcgcgggcacgttgcaggaactcatcggggccgccgagcgcaaggtactggccatgaacgccgagctggaggaacgcccgacctccacggggatgaccctgcgcctggtgtggcgggcttcgcgcaaggcccctgcgggactggcccaggcacgtggccggctcctccagaccgctgacgcctggacccccgaggaccgggcagcggtcggggagttcctgcagacgcagatcgcccgccagcagaccgaggacgcggcgggcagctggctggagcacctcaccgcagccctcgactatcgctcgtggcacgagttcgctgtggagcgtcagcagcacggccgttgggtacccgccacgggacccgcctccggaggcgaacgcgtcctggccgtgtcggttcccctgtttgctgccgcctcctcgcactacgcgagtgcgggcagcccgtacgcgccgcgcctggtgaccctggacgaggcgttcgcgggtgtggacgacgactcgcgcgccaagtgcctcgggctcctgcacgccttcgacctggacgtggtcatgaccagtgagcgggagtgggcctgctatccgcaggtgccgggcatcgccatcgcccagctctcccgcgtcgacgaggtggccgccgtcctggtcacccgctgggagtgggacggaacggcccgcacacgccgcgcggacccggtgcgcccggcggagccggagcccctgtgggcgtga

SEQ ID NO: 50009 - DNA, 1305 bp, Streptomyces sp. C
gtgggacggaacggcccgcacacgccgcgcggacccggtgcgcccggcggagccggagcccctgtgggcgtgagcggtccgccggtggacgaagcacgcctgcgccgcctgctcggcggcgccgacctggcctggctcgtggagcgggcacgccgacggctggagcgcgggcagccactcaccggggcggtctcgctggccatgccgagcccggccgagcgggcggcggccgagagactgctgggcaggacacccggtgccggcaaggcgctgacagtgcggctcgacgccgtggacgccgtactggtcagatcgggcatcagcccggagggcctggaggcggccgtatcggtcctcgccgggcgggtcgtccctcatgacgaggtccgccggagcgaggaacgggcatggacggaggcgtacgcgcctctcgccgggctgggcgaagaccttccggcctatgctgcttgggccgtacgagtgcgtgacgacggcctcgtgcgccgcctcgcccgtactccctccgccgcccgttcgctggtggagcagaccgtccgcgtcctgagggagctgcccgtcgcaccaccacgatcgcttgcggtgttcgccgcggacaccttggggagcgcccatgccctcgacgacggcacgccggtggccaccctcgccctcgccggagtccgcgctctgaccggccaccccgatggagcgggatccgcctggcgacgggccgcctgggcttccgcaggcctgctccgggacgacgtctcctcgacggtgctcaccctgaacctccgcgggacgccggccctggactggatggccgagatgggcgagccgagcgtactcaccctccgacagctcgcccaccgtccactgcggacggcaccgcccgtggtccacatctgtgagaaccctgcggtccttgctgctgcggcggacaaccacggaacgaacgcccggccgctggtctgcgtccaaggccagccgtcggcagcagctctgacccttctcacccgtctgcatgagctcggtgccgctttccgctaccacggcgacttcgactggggcggcctacgcatcgccacgacgctgtcggggcacgtgccctggcggccctggcgctacaccgccgacgactaccgtgcggcggtagcggcggccggacctgtcctgcgcccgttggacgggaagccggcgcagtcgccatgggacccgggcctggcgctcgctcttgccgagcacgccctgcgcgttgaggaggaggcggttctggggctgctgctgagcgacctcgcggggtag

SEQ ID NO: 50010 - DNA, 1620 bp, Streptomyces viridochromogenes DSM 40736
ttgtcagtgacagtccgtaggctcgaggtcatggaggggaacgagcggaaaaccgcacacggggaggaagccggcgccgaggcctggcagcgactgagtgcgtacgcctacctcagcgcgcccgagcgcctggagtacgtcgccgtgatgcgggtgttctgcggcacgctgctcgccgacctgtcggtacccgaccttctcgccaagctggccgagacggacggcccgggggcggcgctggacgcggaaacgctcacccgcaggctcgaagaactcgtgcgctggggcagtctgctgcgcagcacgcacaccgtcagagcgaccagcatcgccgaataccagcgctcacggtcccgctatcagctgtcgaagctgggggagcgcgtgcagcgggacgcggacgaggtactcgccggggcggacgcggcacgcgaggtcagcagcgagttgctggccctcgtcgaccgcggtctgcgggagatcgccgcgatggccgaggccccgggcggcgccgatccgcagcaggcgctggagcggatcagcacgctcttcgtgcagttcgccgaattcgccgagtccgtccgggacttctacgcctacctgggccaggtgctggcgcgctacgacctcgattcggccgagtatcaggggttcaaggaactgctgctcgactacgtggaggccatcaccgaggacgtctccttccgggccccgcgcatcgcggcccacctggattcggtctggccgcacctgcccgcgttgctcgcccggatcgacgcgcacgcggcgggtatcggcgcgctcgccgacgggctgccggagacgcgtgtgcagcgcagccgcggacgcgaccgcgcggactgggaggggctgcgcgagtggttcaccgtcaccggagggcactccagccaggtggatcagctgcgggacgccaccctgcgcgccttgcagtcgctgctcgccaacgccaagcggatgctgcgttcggcctccggtgagatgtcccggcgcaaggacctgctgcggctcgcggcctggttcgacgccgcggagccggaagaggcccacgacctggcggtcgccgccttcgggctctacggcgcacgccatctgggggtggcaccggatcccgaccggtccgtgccggcgtatgtgagctggtggaccgggcccgtggtggaggtgccggtggcgctgcgcgagcgcggcagtagggttccgcgcggacgtgccgcggcggcagaggaccactccgcgcagaaacgccgccttgtggaacaggcgcgacagcaggccgaggcccgccaggcggcggcggacgaactgcgcagcgcttcgggcaggttcgagcaggtgcgcctcagcgcgccggcgatgcgactgctgctggagcttctgaccaccgccctcggcaacgcccagctgcacaaggacgcccacgacttcctgctcgacggcgcccaggcggccgacgaggacctcggcatccggctgaccgcgtggcgcacgcccggcaggtcgatggtcctcaagtccgtggacggtgacctgaccgcggatgacctcaccgtcgccgtggacagcgcgtccgggcccgcggtgggggaggcgagcgcctga

SEQ ID NO: 50011 - DNA, 1338 bp, Streptomyces viridochromogenes DSM 40736
atgcccctgccgtccgcgcacgacgtcgcactcgcggccgagcgccgcaccgccgcccggctcctgctggcccaccccctggtcaccagccacggaccgcacagcgacgcctttccgctcatcagacgccacgccgactggctggcccagcgcttccagcaggtcttcggataccgcctgctggtggaggcgtcctacgcccggctgttcaaggcaggcctcggaacgggctcgggccaccgcctggaacgtccctcgaccggaacgccgttcagcccacgaacgtacgcctacctggccctcgcgctgtcggtcctcgtcaccgccccggaacagctcctgctctcccagctcgtcgccgacctgcgggccgcggccgtcgacgccggcatcgagatcgccgacaccggacggcaggccgagcggcgaaccctcgcggccgcgctgcggcaactcgtcgactggggcgtgctggtggagaccgagggccaggtcgcggccgtcgccgaggaacggggcggggaggcactgctgaccgtggaccgcgagatcgcgcgcgtcatcgtcgccggcccgctcacccagagccgcgacggcgcggacctcgtgcgccgggccgccgaccccggtttcggaggaccgcgcacctacgtccgcaggcgtctcgtcgaaacccccgtcgtccacctcgacgacctcacggacaccgagcgcgaatggctgcgcacccggcagcggcgcgaggcgcaggcgttctccgaactgctcggcctggaagccgagatccgcgccgagggcatcgccctggtcgacaccgaggacgaactcaccgacctgcacctgccgggcaccgggacggtcgcacaagccgcgctgctcctcctggagcggctggccgaccgactgcgtcccgaggaagccgggcatccggcggtcggcggacggctggtcatcggcgtacccgtcccggacgggctgctgcccgagctgctggacgacctgatcgaggagtacggcaggcgcagcggctggcagcgcggccatctggaggaccgggacggattcctcgcggccgtgctcgacctcctcgtccggatgcgcctgatggctccggccgggcccgtgcgcgcggacggccacggtctgcccgagggatacgaacagacggtggccgacggccgctccgtcaccgacgtctcccgggcgcgcggccaaggcagtgcggacggcggctggatcctgctcgccgcggccgctcggtacgccaccactgtggcggtcaagcaccgtaccgaccggtccccggcggacgacgactccaaggagccaccccgatga

SEQ ID NO: 50012 - DNA, 4317 bp, Streptomyces viridochromogenes DSM 40736
atgaaccgcccgccggccccgcaccgctaccgactgcaccgcgcgggcatccgcaacgtctggcagtacgacgagcaggagttcaccttcggagaggggcgcctgctgctgcgcggcaagaacggcgccggcaagtccaaggccctggagatgctgctgccctacctcctcgacggcgacgcccgcgcgctggacgccacgggaaccggacgcaccaccctggcctggctgatgctcgacggcttcggacagaccaaccgcctgggccacctgtggctggagttcgcgcgcaccgacgaggagggcaacgaccatcacctgacgatcggcgcggccatccgcgcgtcccagtcgaccaagacggcgaagccgttcttcttcaccacccggctgcgggtcggcgaggcactcgacctcgcccccgccgggcagccactccccgtcgaccggctgaagtcactcgtcggctccgagaacgtcaccgaccgcgccgtcgagcaccgggccagggtcgcccgcgaactgttcggcctcaccgacccggcgcgctaccgcaacctgctgcacctgctgcaccggctgcgacgccccaccatcggcgaccgcatcgactccggcggactggtctcggtcctcgccgaaaccctgcccgccctcgacgacgaggtcgtggagaaggtggcccgcagcctggacgacctcgactcggtcagggcctacctcggccgcctcgaacgcaccgaccaggcgttgcgcgccttcctcaccgactaccgcggctacctgcacggggcgctgcgccgccgcacggaccaggcgagcggtgagctcgagcagctgatggcgcaccgcaggtcggcgagcgacgcggcgcgcacggcggacgggctccgcgagcgcgagcaggaaatcggcgcccgcatcgaggcactcgagggcgagtcgaacgccgccgcgacggacctcgcggcgctgcacgccggcgccggataccgcagcctgacggaactcggggagaagcgcgccaccgtcaccgccctgcacagcgcggccgccgccgccttcaaggccgtccggcaggcacacggcaaccaggaggaggcaggacggcgtctcaccgcggaagccgaccggctcggtgaggagctcgtcgaactgaacaccatgtacggcgaattggtgcgggaggcagagcggtccgggctcgaccccgtgcacctgggggaacccgtggcgacccctgtcgcgcccgtcgtgcccgccgccaccgccgaactgaccgcgccggacggcgacttccacctcgtacgacacagtgcggtgctggccgtcgacacgcggacatgcgaggccgcgctgcaggcctgggacgaacggctggacgccgcccagccggtgatcaggaaccgtgcccggttcgtcaccgaacttgccaccctcatcgaacggtcggacgaggcccgaagggaggccgccgaggccgacgcggcccgggagcgcctggaggaacaggcggaacacgcgcgccgtcggactgagcagcggctccaggaaaccgtgcacgagtccgaggcgtacgccctcgcggccacagcctggagcgagcggctgcgggaatccaccggggtgcccctggacgcgctgctcgccctggtcgcgccggagccggcagacggccccctgcccgcgcagacccccgaggccgtggtcgaagcggcccggtcggccgtcgacccctggctggcggcgctgggagcggagcgcgacgacctctccctgaccgtccgcgaacgggagacggaacaggaccgcctccggcagcagcgcgcggactgggaacgccgcaccgaccccgagcccccatccccgtcccaccgcacggctccccgcacacccggcaccggagcccccctgtaccgtctggtggacttcgcccacgacgtgggaccggacgcgcgggcagggctggaagcagcgctggaggcgagcggcctgctcgacgcctgggtgcgcgccgacggcaccgtcctcgacccggccacgtgtgacacccttgttgttccaggagcacccgtgcccgggccgacactcgcccaggtgctgcggccggtcgccgcgcccgacagcggtgtgacggtggagcaggtcgagcgggtgctgggcgcggtggctctggccggcggcgagaccctcaccggcgagcccggcaccatgggcgtgcaggtgggcgcggacgtggaggtggcggagccgcacaccgcgatcggtaccgacggctcctggcggctcggcatcgcccgtggccgccacaccaaggaggccgccgaatacgtgggcgccgaggtgcgtgccgagacccgccgccgcgcgctggcggaactcgaccgtcgactgctcgacctggagcaggagttggtggaacgcaggcgcggtctgcggattctcaccgagcaccgcgacctggtcacggacaccctgcgccgcccgcccccggcacgtgggctgacggacgcctgggctcgtaccgccgaggccgagcgtgccgccgagaccctggcctcgcaggcgaacacggcggcccgcgaggcggaacaggcacgggcccgcgcggtcgtcgcccggcgcgaagccgaggccacggcgagtgcccacgacctcccggcggacccggccgcgctccagacggtccgactcgccctggaccgcctcgggcagggtgcgcagcggctgcgccgacgggtcggcgcggtcctctccgccgccgacggccacagcgccggccgcgcggactacgagcgtgccgagtcggcgcgccgggaggccgagtccgactacgcggagccgctggcccgcctggaagccgcccgccgcaccgtccgggccctggaagaggctctcggtgccacggagcaggagatcctggcccgcgaggccgagacgaagcgccgcctggacgccgtcggacgccagctcccgggcgcgcgaagggacatggccgacgtacacgaccggagagtacgggcggaagaggacgagcggatgcggcgcgaggcactcgccacgcaggaggccgaggtgctggcctgcggcaggagactgcggacggccctttccctgccgggcgtgctgaggggagcgggcctcgaagccgacgcggacaccggcgcggaggccgacgtggactccgaggccgacgtgggcgccgacgcggacaccggcgccgaggccgacgcggatgccggcgcggaccaaggggccctgaagtccctggaccccgtccaccacgatgtacgggagcgcatcgcggcggtgcgcgtgctggtcgacgccgtgcgccgcggcctggatgccgtacgccgggacgtctcggacaccaccctcctcaaccggcacaccgaactgcgcgaccagctctccggcggctacgacgcgacgatggaggaacgcgagggcatcaagctgtgccgcctcgtcgacgaccacggcccgcacgacatcgccgcggtcggcgagcgcatcgcagccgaggccgccgaggcccgtgaccgtctgacggagcgcgagcgtgacgtcttccagcgcttcctgaccggagagctgggcgaccatctgtcctcgcaggtgctggcggcgagcgccctggtcgccgccctcaacaccaccctcgccaccgtccgcacgtcacacggtctgggcgtcaccctcgactggagcctggccgacggcgtggaagcggacgtcaaggcggccgtggacctgctgcgcagcccctccggcctgcgcacccgtgaacagtccgagcagctccgcgacgtcctccagcgccgtatcgaggacgcccgccgcgccgacccggccgccggctacgcggcccacctgcggaccgcactggactatcgcgactggttcaccttcaccccctgggtggtgaacgacgcggcaccgggcagccgccgcaaactctccggccgcacgggcctgagccagggcgaacagcgggtcctgtcctacctggtcctcttcgccgccgcggcggcgcacttcaccggcctggccgacaccgcaccgcaggcaccccgcctgatcctcctcgacgacgcgttcgccaaggtggacgagcccacgcacgcccgcctcggccgcatcctggtcgacctggaccttgacttcgtcctcaccagcgaacgcctgatcggcaactggcccgacgtaccgtccctccacatctacgagtgcctgcgcgacccgcatgtccgcggcgtggccacgctccactacacgtggaacgggcggcagcggaggctggtgtcggtatga

SEQ ID NO: 50013 - DNA, 1332 bp, Streptomyces viridochromogenes DSM 40736
gtggaacgggcggcagcggaggctggtgtcggtatgacgggcgccgagcagaccgacgagcgtcccccggacgccgaagccctcgcgtttctcacccgcccgggtctcactcgcctctggacggcggcccgtacccggctggaacgcaacggcctgcgaccaatcggaaccctcaggctcgagcacctggacgcgcgggagcgagaggcgctgtccctcctcctggccagaccgatcatcggccccaccgccacgatccgcctgccggacctggacacccgcctgcgcgccagcgcggtcggacgcggcctgacctcgacgctggaggaactggccccaccgctgaccgaccgccgggcggtccgcgacgcggtggcggccgaacgctcccgcctgtggacgacggttcaggccgagctggaaggcacgtcgctgtcggtccagccctggacggcacagtggctggaggagatacgacgcggcggcacgctcgcccgccaggacccgcacaccgcgaccaccgtcatcacccaggccgtccagaccctggcgacactcttccccggcacggacccacgcctgaccccggcctcctggggccgcggcgaactggccacccgcgccaccggctcggcacacggcctggacgacggcaccctgctgtcccggctggtcctgcgcggcatcgcacgggcacgaggtgtcgagttccccgccgacgcaccggcgcgccgggcgctgtggcgcatggcctcggtcaccccggacgaggtctccagcacggttctcgcgtacggcctgcgccccaccggcggcacctggcgggaggcggcactgcgcgagcgcgccgaccaccacatggaaacccacctgaccctgcgcgaactacgcaccttcaccctgaacatgccgcccggcacccgggtccacatctgcgagaacccgcgcgtggtcgaggccgcggccgacgccggccgcacggcacccctcgtctgcacctcgggaagcgcgacgacggtcgccctcaccctcctggacgcgctggcgacggccggctgcgccttcgcctaccacggcgacttcgactggcccggcatcgccctcgccaaccgggtcatgcagcggtacgcggcggagccgtggcgtatgcgcgcggccgactacgagtacctcgcgacccgagcgcaggtgaacggcacaccgtcgatcgccctcaccggaccgtcggccgaggcgctgtgggacacggaactggcccccgccatggacgccctgggcatcgccctgcacgaggaggcggcgctcgatctgctgctggaggatctcgggtga

SEQ ID NO: 50014 - DNA, 1677 bp, Paenibacillus sp. oral taxon 786 str. D14
atggagtctcatttgccggggttgccggtgcaatcgttgcgcgggatacccgagttgaagtatgtcaatgctgacaacgtggttcgctaccgggcgatcatgcgttttttctatcaggagtataaaagactgcggtattggctgaagccggaagacgtctttgaagcggtcaaggcttggaacgtgtggccggattatacacttgaactgtgccaaggcgacctggatcaattggtggagtggcaaaacctgactgcccgtcacgacggtggacgctcctccacgctggaagagtatctcaaaaagaagatgcagtatttgctccgcccgtattccatcgaaatcgaacggctgctggagacgctggagaaggtaacggggtatggcggttcgctggaagcttccttattcgacacgattgcggataaactgtttgacattcgtagccaggtcggagaactggagccggacgcggcgctggagctgtggaacgtcttgtaccgttcgtttgttaacctccatgaaaatgcggcggactatatcgctagcctgcatacggctcgggcggaagagatgatggtgacggaagctttcttgatctttaaggaaaagttgaccgattacctgcaaaatttcgtacaggcgctacagcggagcgcttataaaatcgaaggtaatttgcagcgaattaacgattcggtacgggatctgtttttagagcaggtcgtggaaggtgagctccgaaagccgcggctggaggacgaaccggatcgggaggaactgctggaagaacttcgtcaaggctggacgaatatccggcgctggtttgtgggcgagggggctgcgcccagcgagctcaccttgctggagcgggcgacgaaggatgcgattgcccgtattgtacgcagcgcgattcgtattcaggaacggaagcgttcgggactaagccgcaaaaaggagctagagcacttggcccgctggtttgcttcgatcgaaacggtcgaggaggcgcacaggttgtccgcatacgctttcggattgttcccgacgaggcacttgcagggcgaggatctgcgcgactcggaccgggcggacatgtcgtcctgggaggagcggccgatggtgcgcatgctgcgttcgcgcagccgcaagcgcggagagcgtcagccggcggacgcggtgcgtgacaacgagcggcggaagcagcgggagcgggaagcgttcaaactgcggcaggcagaggaatggcggatgatcgcggcgttactagatcggagctccgtcaaagtgtcggagctcgggccggtgacggccaaggagcggctacggttgctgcagtggatcggccggtgcatgacgacaggaaatggccactcgtttgttacgccggaaggcgtgttgattcggatgagcaatccgcgtacggcggagcggacaatcttgcacgcggaagacggcgagttggaaatggcaaactacgagctgcattttaggctgacggaagcggcgaatggcttggccgtgggaacagccgcaaagcagggggcaaacggggccgatattgccgctgcggaagcggctgcggcggccgatacggcagaagtcgagggagaagccggatcaagatttgaatcggaggtccgatccgaaaacgaggcggaaaggcaggggcggtag

SEQ ID NO: 50015 - DNA, 1209 bp, Paenibacillus sp. oral taxon 786 str. D14
atggctggaggtgcgctcaaaagactaagcaaacggggaataaacgccgagcaggcggccgaacgaaagcgcgcgtgcatgcacgcgctcttgaaccgtccgtgggttgcaaaggaggaagacccggacttgtattttgccatccgggaccattacgaggagctgcgcgactggtttatggataaggcaggttttccgctgattatgacccggacaatcgccaagctggacaagacgcctgtgaaggcgcacccgtggatgggttttcctgagtttcgcgaaaagcgggactacgttttttttacctatggactgtggtatttggaaggaaaaacggagttggaccagttcctgctcaccgacatcgtggaggaaatccgcgagcagatgctgagcgcggggctggaggccgactggcggaattactatgaccgcttgtcgatggccagagcgctgaagaagctgcgggcgcttggcgtgctgcacagcgtcgacggcgatgagggccagtgggcgcaggacgcggagcgcaatgcattgtacgagtgttcgcctttggcccgatatgtgcttcggcgctttccgcgcgatttgacgggctgctcgcggctggaggagttggaagaccccattccgtacgccgacacacaggacgggcagtcgatgcggcggcggcaccggatataccgccggctgctattggagccggcggtggtggacaggcactgggatgaggaagatttgaattatgtgctgtggcagcggcgggcgatcatcgatcaactggaaaatatgctcggctggaccgggcggcgttaccgggaagggctgtggtttttccatcccgagctgaccggcgagagcgagctgtttccgacgatgtcggccgcttcggatttggcgctgctgcttgcgagcgaaatccgcaaggaactggcggagggaggcgtattgtacgtggaggacaacggcacggtccggttgaccaaggcggatatcgagacgcttctgtacaggctacagcttaaacataaagagttttggagcaaggatcttcgggaagctgcctcccaggaactggcggaactgtgtatgaaccatttagccgaatgggggctgggagagtgggagggcgagacttcgttcctgatctcgcccgtactggctagatggagttcggaatatgcaaataacgattttgatacttag

SEQ ID NO: 50016 - DNA, 4206 bp, Paenibacillus sp. oral taxon 786 str. D14
atggaacagcaaatggtggagcaggaaagcggtctgagagcggacggggcttccggtcaaggcggccgagcggccgcaaggtggcagatgcatcgcgtcgggattttgaatttctggtattacgatgaagaggaatttcaactcgaggaaggccggctgatcttgcgcggcgccaacgggtcgggcaagtcggttacaatgcaaagcttcctgccgctcgtgctggatggcgacaagcgggcgcaccggcttgacccgttcggttcgcgggaccgccgcatcgagtattatttgcttggcgaggaggacggcggtaagacggatacgacgggctacttatggatggaattcaagcatggtgcgaccggagcgtacagaacggtaggcatcgggctgcgggcgagaagaaacgcggcccaggtgcagttctgggggtttttgctggaggatgggcggcgcatcgggcgtgacttctggctttacgaccgtaatggatggctggaggacggcgtacgcattcctctcgaccgcaaggaactggaagcgaaggtgggaacgggcggccaggtcgttttggatcagaaatcgtatcaggatatggtgaacaagcatattttcgggttcgcggatacggatgcttatcaggacttgctccaactcatgattcagttgcggagtccaaagctgtccaaggacttcaagccttcggcgatctatgagattctccatcaggcgctgccgccgttgatggaggaggagctgcggccgttgtcagaggtgctggaggacatggaccaaatgaccgaccggctggacgaactgaagcggcatcgcgccgagatggtgaagctgcaggagcggtacgatttttacaacaagcatgtgttgtatacgaaatctgaggacatgttggaggccaaagctgcttatgatgaagtcgctgccagagtaagaaggtccgaagagacgctggcgcaagcggaggcggaaaaggcgggggctgtgacagagcgcagcggcatccagaaccggttgcaggagattgccgtcgagcgcgaattgttggagaagcatgaagctatcggcaagcaacgggagtatgaggcggccgcggcggctttggcggacacggaaaagcagttggaacgcgcaaaggaaaaagcgggcaaggcccgcataaagcaagagcaacttgagcgcgggctgcaggaggccgaagccaagcgggacaccgccgaacgggagcaacgggaactcctgaacgagttggaggcgattgcgggcgacatggagtttgccgggcatgtcgtatatcaccggtattggacagcgaacgtgccggtggatgatctgtggaaagaggcgtggcgaaaagatctgcgcacgcatcgcgatgctgtggaacggggcctggccaaggcggcggaggaaaaaatggcggctgcgctggtcaaggaaagcgaaatcgagttgggtgaagcgagccgagcgcgggatgaggcggagcgcgagcgcggcgagcgggataagcggtttgctgacagcaaggaggcgtttaaggacgagattgtcgcctggcaaagcgggctacggcaactgccttttaatgaggaggcgctgcgcgagacgtttggggcgctacgcgagtacggactggagcagacctcgctggagccggtgcgggggccgctgctggaccggtacgaagcggcccgggatcgtttggtggcccgccggctcgatatggagaagcagcggagggatttgttggcggagcgctcgagcttgcaggaagagaagcgcggctgggagcaaagtcgggagccggaacccgggcgcagcacagcacgtgcgaaattccgcgaagctaatgcagagcgaggcggggcgccgctcttcgctgcgtgcgatttccggccgcacgtaggcgatgacaccaaggcgcggatcgaggaagcgctggagcgttcggggttgcttgatgcctggctgtccccggacggccgggtgcaggagtgtggcaatgacgatgaagaagcctggatcgtacctcgtccgcaggaattcggctatacgctggcggacatgttggttgccgatccaccagagggaagcgggctcacggccgcggcgatcgatgcggtactgcgcagctttttgtgggacgaggaaggcggcctactggatgacggcgactggagcggcatgatcgcagccgacggctcttaccggcttggcccgctcgccgggaaggcggcggtgaaggagcgggcggagtatatcggcaaggagacgcgccgccgtacccgcatgatggaaattgcccggctgggcgaggcgatcgccagattggacgccgtgctgcgagagctggacgaacggcttgccggtcaggaggcagcggaaaggcagttggcggtagagcgtgagctttttcccggcggggcggacctggctggagccctgcgcgaactacaggcagcggattatcggctgcaggctgcggcccggcaggaagcgcaggccaatgagcggttcaaggcgaagtcggcgcagtggcgcgaactgcagcgagagttggtagagctgaccgcgaactggacccggttgaaacgcgagccggatcttgcggcggcggttaacgccttgcgcgattatgaagcgtcgctttcggacctgcattccgcctggcggcagtacagggacgctcacgcgtcttgggagcggttcaaggatgagttggacgctttgatcctggaactggaggatgaagaagcactggcggaagagctcggcgagcggcagcgggatcagcgcgctcaggtggatacgttgcggaggctgatcgaggagttagggttggccgatgttgcgcggaggctggaggaactgaagcgcgagcaatctgcgttacttgtccgcgtcaaagaacaggagcggctgctcgatgcggccaaagacaaggcatcccgggcggaagcacagctggtgctgctgcgggagcaggcagaagtgctgcacgtcgagttggaacgaacgctggagcaactgctagcagagctgcgccaaggtctggttgacgagtggcggagcgtagcgactgaggcggatacagcgaacgcggcgaactcgggcgcagccacaactcgggcagttttcctgcaggcctctgccaaagaaattctgcggcaatacgaacccttgtttaccgggcgtaatgccgaaaacatcgttaaccgtttgttggagcagtttaatgccgcgcgcatgctgctgacggagtatgtgctggagacggttgcggatgaaacaaccggacgtttgttgctgctttccatgcgtaacccccgccagccgctgccgccgcaggcgttgctggaagaactcgaacagcaggaagcggagcaaagcgctttgttaagtgagaaagaccgcgaactgtatgaggaaatcattctccgcagtgttggcaaagcgatccggcagcgaattcaccgtgcggagcaatgggtgcgggaaatgaacaagctaatggaggagcgagacacatcaagcggtcttcgcttgaagcttgagtggcaacctaaagtcgcggcgggggaacagcaactcgatgtctccgacctggtcgaactgttgaagcgggattctcataggctgcgcgaggacgaaatcgacgcgatgatcgagcattttcgtgggcaaatcgtcagcgcaaaacaggcagcccaggaggagcaggaatcgctgcgtcaacatctctaccaagtgctagattatcgcaactggttccagtttgaactgaaatacaaaaaaggtgagcagattggttaccgtccgctcaccgatgcgcgcttcaacgtgctgagcgggggcgaaaaggcaatggccatgtatattccgctgttcgccgccacatggtcgcggtattccgacgcgagaaccgacgcgccgcggcttatttctcttgacgaagcgttcgcgggcgtggatgaggagaacatgcgggatatgttcaagctgctgacggatatgggctttgactatatgatgacctcccaggtgctgtggggttgctacgatacggttccaaagctggcgatttatgagatttaccggccgaaggacgtcgatttcgttaccttgttccgctaccgttggaatggcaaaatcaaggaatatatagaaagcggtgcagaagaatga

SEQ ID NO: 50017 - DNA, 1452 bp, Paenibacillus sp. oral taxon 786 str. D14
atgagcggcgggcggatgaacgatcgttcagatcaggcggccaaagcccgggactatttttctcgtcccgggttcaagagaatgctcgaagccgtctggaagcgatacgccagtctggagaaggcgggcgggcacgccgtcatcagtagatctactgcagcggaatgcgaggcgatcaataccttttttggctggtacaaaaaaccgggggacgatatccgagtaccacttgcggattttgaacaggaattgctggaatcggcatttaccttcacgattaccgaacttcatgaagtcctgaccggcgagccgctgcgaaccaaatcggatcgggaattgctggcgatgcaggagtgggggaggttgtttgagaccctggaagcccagtttgcggagcaaggaacgccactccagccggctgtggcggaatggttaagtggtttgcgccacggccgtgcagccggttaccgcaccttgcgtgagctgtggcgcgctgctcccgagacggcgcaaagagagctggcgagtgccacatgcgcgtggaacctgctgcttgcgggggatgcaacagcaggtttgggcgagaacggtagcccaccatcagctgtccgcctaccggtgctggccgcgcaaactaccggcgatccgcatgcgctggaccggaacgtcccggcagggcggctgctgttccaggccttacgctccaaggagcttgggaagcagtttgccgaaacggatcaaactgacccatcagatcccgaggcgatacccggcttgtcatccggagtggataccttggaggcgcgggagatttaccgcagcgcgggaatttttgatgacgacatatcttctctcgttcatatttattgcccttgggacggcggtaacgggccatatgttttatcgttaaggcaagttgagataaccagcgtgctttctccgatcaccgatttttatgtggtagagaatccagcggtattttccactttggttgatttgaatgaagccaatgaatccgcctatactgcgggaccgatgctagtttgcaccagtggaccggcaagcgcagcggcattgcgcctgatcgatcgttatttggaggaaaacctggtttccggccacctatattactctggtgattttgatgttaaagggatttcgatcggaaatgttctggcttcccgttatggggaccgatttaccgcctggcgttttaaccgggaaagttacatggaggggtgtgccttggcgcttcccaatggcgtaaccttatcaacagaagagcggcttcgtttggctaagatgcaggccatttgggataactcgctgtgcaacacgatgcgcgatgtaggacgtaagctatttcaagagcaaataatcgtaaatttgatcaatgattggcgaaaagcggtcataggaggggagatcggcggccgtttgcattccaaatga

SEQ ID NO: 50018 - DNA, 1509 bp, Catonella morbi ATCC 51271
atgaaggtcagtgaaattattaaaaagcctgtggtagaggcaaagtatctgaatgtagataatgctgacagatatcgccctattatcaggcttttttatttaaaatacgaaaaattaaaatactggctgtatcaggaagaggtatttgaggaattaaaagaggatacatattttgccgggtatactattgagcagtgtaagcaagacttaaatacgcttactgaatggggcaatcttcttgctatgcaggatacgagaagggcagctaccttagaagaatttgccaataaaaaatttcgttaccagctctcagaaaccgcagtagaagtagaacgtatggtaattaggatagaaaatctttttatagagagctcttccttagaaccaagcctgcttgaaagactaagaatgagccttgcagggctaccttctatgttagctgaaaatgatgaaaagttgtattcatactggaatgatttaaataatgattttaaaaggcttaaccagaattatcaggattatatgagagagcttaatagtgtaaaagctgaaaatcttatgcgtactaaggaattccttatatttaaggacaggttgattgaatatttgagaaattttgttaaagggctgcaaacaaatgtaggtataattgagactattattaagggctttgatgaaacaatgctgcaatcccttataaacaggatattccggtatgaactttctattccgagattagaaactgttgtagatgaggagagaattttagataatataaatggcaggtttgaaagtcttaaagactggtttgtaagtgatggcaataaagagtctgaggtagtgaaagtctttgataccactaatgaaataatccgtaaaattacaggttatgccgcaagaataagtgagagtggcggcagcagtgcgaatagaaaagaagaatataaaaagctggctgaagttttttataattgtgaagatatatgtgaagcacatcgttttgcagggcttgtttttggtacggcaactacatttcatttaagaggaataggggaaaggcagacagaaagtataaatagcggagtatatgaggaaaagacctgcataaaaacagttactccaagggtaaggacttacagagagaaagcaaaaagaagcggaattaaggataattttaaagcaaaagaagaactgcgacttgctacaatagaaaaacttgctgctgaaagagagcttttaagaggatatattaaagacggcaggctggtatttaaggatttgcctgagataacaccatttgtaagagatgtgtttttaacctggatatcaagggctttggagaataaagaaggcaggggaaagactgaagaagggaaaagattcagacttatctctcctacgacagaagagatttgtgaacttaaaagtgaagatggagtgttgtatatgccgtcttatgagattatatttgaggatgaaataaatgaaagcattggaagtattgcttag

SEQ ID NO: 50019 - DNA, 1131 bp, Catonella morbi ATCC 51271
atgaaagcattggaagtattgcttagtaaaaggtggatattaaagtcaagagacagggagctgtattattctgtaagagatgaacttcccaagtttaagtcatttttaatagaaaaattaggctttcaggtggttgtcaattcttatcttataaagcttgagaaaattcccgctgtggctgaaaactggatgggaataaaagaatttagcgataagatggaatatgtaatttttatgactgtacttatgtttttggaagaaaaagatatgggagagcaatttgtgctttcagaacttaccgaatacatccagactgcagtagaggtggaaagtatagattggacagtatacagaagtagaaaatatcttgtaaaggttatgaaatatctggtttcagaagggattttagagattaatgatggaagcgaggaagattttcaaaaagacggtataagtgaagttctctatgaaaataccggagtttcaagaaattttgtaaagaatttcaccagagatatatcaaactttaaaggaatggctgatttttacgacggagattttatagatacgaatgaagataggggaatagtccgcagacagagggtatataggaagcttttgctatcggcaggattatacagaaatgaaaatactgaagaggattttaactatataagaaatttcaggggaataatagcgaatgactttgaaagtttatttgactgtaatcttcatatacataagtccagtgcttatttggtgataaatgaaggttcaagacttgggagggcatttccggaagaaagtaccttatcggatatagtactccttgtaaatgatctgatacttagcaggatagatgaaaataaactgactcctgcagtagatgaaagtataattttatctttagagaattttaatgagctgattgaggaaactaagagattgtacggaaacggctttgcaaagacttacagggatatgacaacgaaggagatttgcagtgtggtaactgagtatatgatggaacttgggtttatagaatatcttggaaatgatgtgaaaataaatccgattgtaggcaaggtggcaggaagatatccaaaggattttgaaagtgtacaagaataa

SEQ ID NO: 50020 - DNA, 4086 bp, Catonella morbi ATCC 51271
atgaacagcaactggaagataaacagagtggggctggtagatttttggtattatgatgacgaggaatttgtctttgatgatggcagaatgcttttaaggggtgcaaacggttcaggcaaatctgtaacaatgcagagccttattcctctgcttttagatggcaacatgcgtcctgagaggctggatgccttcggtacaagagccagaaaaatggagaactatctgcttgaagaagatgatgacagagaagaacgcacaggctatctttatatggaacttaaaagagaggaaaatgaggaatatgcttcctttggtataggcatcagggcaaggagaaataaacctttggaagtctggtattttcaaattacagacagcagaaggataggaaaagacatatttttatacaaggaaatggatggcaggattactctctcaaaaactgaacttaagaataaaatagcagagggtggaagggtaatagagagccagagtgattattcagcagcagtaaataaaacactttttgggtttgaaaatgaagatgaatacaaggaactcatagatatactgataagacttagagcacctaagctttcaaaagacctcaaacctacacttataagtgagattttaagctcttctttgcaggcactttcagatgatgatttaaagccgatgtcagatgcaatagagaaaatggacgagaccaagttaaaccttgaaaatcttaaggaaagtcttgcttcagccagacagatagaaaaagtttataagctttacaatgaagtcttgctttttaacaaggcgggtttcctcgtagaggcagatggtgattataagaggcttaaaaaagaagaaacagatagttttaaaagacttgaagatgttaaggaaaaaattgagttaaaaagcacgaagataaaggaactggatagtgaagagaatatattaaaagaagaaaaaaattcattagacagtgatgagatagtaaaactaaaggaaaatgagggaaggcttgagaatgaaattaagctttttgaaaagacaataaaagataaagaagagaaagaagaggagaaaaaagaaagagaaagaagtttacaaaaagaaatcagagaagataaagaagaagcagattcattatggaaatcctgtgaagctactcttaatgatatggaagcagaacttgaagccgtaccttttgatgagtttgcttttatgagagatgagtttgtaaaaaataaaaatgagaactattcttttgaagctcatattaagacttttgaagcctatgtatcaagagcaaaggaaggaaaaaggcttttagaggaagaaaaaaatcagaatgaaaaatatgaccgcattcttaaaacttttgatgaatataaaagtaaacaggatgatttagaaaagactgagaagcagtgtgatactcttttctttgatgaaaaagaaagattgacggaagaaatatatgtttgggaaaagaaaaatgttgaattacatcctgaaacagagattttgcaaaatatagaaagagaaatagaaaactatgacgagaataaaaactattttgacataaaaaatattgcaaagcctgcttatgaaaaggtttccggagaaatttttgaagataacataagaattgaaaatgagattaaatctcttagaaaagagataaaagaaaaagaggaagaacttgcagaatggcaaaataaaaaagatcctgagcctgaaagaagcgaaagtgttataaaaaacagggataaactaaaggcagaaggtattgaatacctgaatttttataagacggtggattttgctgccaatatttcagaagatgaaagaaacagtcttgaagaaactctgcttgaaatgggaatacttgatgcaattatagtttcgggcaaggacagggagaggatacttgcctttgataaagggcttagcgacaggtatatatttgatgatgtacaggcagtaaatgataatatattaaataaatttgaaatcgaagaagaatacaacaatattttttcgaattttaaaataacggctgctctttcaggcatttctctaaaaaaatctgaaaagggcggaacttggataggtgaaaacggaagctttggactgggcataatagaaggaaaaaccacaggagaatataaggcaggttttataggtagtctttcgagggaaaactacaggcttgcaaaaataaatgaacttgaaaatgatataaaaggcttgcaagaagaagtaaggcttagaaaagaaaagatgatggcggtacaggcaaggaaagaagaacttgttaatgaatgggagagctttccaaagcctgacagtatgaatacagcccttattgaattaaataaagtaagaagcagtctaaaggggattttagaggatatagcgaagttaaagacagagcttgacagggagaaaaaggccttggatgagataaggcttgccgcaaatgaagcctgcggaaaatgctatgtaaaggcaaggcttgatttatttatacaacttaacgaagcacttgataattacagagctttacttatggaactgagggcttcgcacagggaataccttagtaggctggaattgatatgttctaaggaaaccaaccttgaggaagtagaggaatatcttgagaatatccgttatgagctatcactggagagagcaaaactaagagaagcaaaagcaaagcttgagtccataaaggagcagttaaaacttaccgactacgacaagataaaagacaggattgattatatagtaagaaggcttaatgaaatacctaaggaaagacagaaagtctcaatagaacttggcagcagaaaacaggaagaaactgatcttagagaaaagcttgagggatttaaaccactgcttgaattaagcctgaaacatagggaagatatgaagagagcctttgccgacgagttaaggcttggtttggtagaagttataaaacttgatgaggatgtactaagtacggcagaaaggcttaggaccggtctaaaacagggaataggtgaaacaaagcgggaagatatattgggtaaattgcaggagaatttccaaaaatacagaggagggcttgcaaggtataatataaatatgaatcctatttttactgaggaagaagtggactatggcagcagtaaaaatgtgaaaagacaggagatttctgcaaaatacaagggaagcacagttaagtttggaggacttgtaagcgcacttgatagtgaagttttagaacttgaaaatattcttaaagaaagtgacagacaaatctatgaagatatccttataggtactgtaggaagaaagataagggcaaaaatccgtcgtgctgaaaaatgggtggaaaagattaaacggcttatggaatctatggaaacttccagtggtttaactttaagtcttgcctggaagcctaagaaggctgaaaaggaagaggagattggtacaaaagttttagtagatatccttatgagagatgaggagatacttagacctgaagactctgcaaatctgtcaggacattttcgctctaagataaatgctgcaaagaaaaccgcagaggagtcaggaggaatgaaaagcttttatgcagtaataagggatattcttgactatagaaaatggtatgagtttaacctgatgtaccaaagagcaggtgaaaataagaaagagcttacagacagagtattttttacctttagtggaggagaaaaggccatggctatgtatgtacctttattctcagcagttgttgccaagtataagggagctagggcggatgcgccattgttggtagcactggatgaagcttttgcaggagttgacgaaaccaatattagggatatgttcagactgatgtcggagtttaagttcaactttgtgattaattctcagagcctctggggagattatgacactgttccggctcttgcaatttatcaacttgtacgccctgaaaatgcaaaatatgtgacggtaatcaggtacaggtggaatggaataagaagagaactggcagataatgcacgtgaaaggggttaa

SEQ ID NO: 50021 - DNA, 1284 bp, Catonella morbi ATCC 51271
ttgtctgagataaatgaagcgctagagtattttaagaagaaatctgtatatgaaaaactttttaaggtatttaagaagaagtatgaaagtctggggaaaatttccggaacagctgtacttaccggacttgacaggggagagaaacttgatttgtcagattttttgatgaaggattttacagaggacaaagaagtaagggtttctgtaaaattatttgaaaaggctcttttaaaaagtaaattcagtaatctcacaacagagaatatacttgcctattattttggggaagaacttcgtactaaaaaagaaaagaacgaagatgatgagattagaaaggcggaataccttgcagaactcaaaaaatacacagataaaacttatataaaggactggctgcagggagtattttatggaaaagcagagggagcagggcttattataagaaattataatactgataaagaagaacttaaaaatacgataataaaacttgtaaaggcaattccgttaatgcctgattttacaaaaggtgaaaagaaagaactgctggcagtatttgcagcaaaaactacagccaatccgcatttctttgatgatgatactatagcacagagcctgctcatagcatttttaaaagattattataagtatgaatatgaagacggattatctgagtccgagaataaaagcgatattttatttaaggcaggaattataaaagacagcctgtccaatgatgtgatagcttacggaataagaggaagatatccggatggaagcttgcaccagggaatggaaggttttttcactcagaaagaaccgcttaaactaagcctgtttaccttgggcaatttggaagaaacatttgcaactaaggatattaaaagggtttatataattgaaaatcctgctgtattttcgatacttataagtcattttccggacagagcctttatatgcagttatggacagataagaagggcagtttttatgcttttagatttatttgataaaaatataacattctcatatgcaggggattttgacccggaaggactccttatagctgaaaagcttaagaaaagatatggagaaagattgactttttggaagtatgaacctgaaatttacctgaaatatatttcggagaaaaaactgacagaacaaagaattaagaagttagacggagtttcagatattactcttttaaggattgcggaacttattagaaaagaaaggcgggcagtttatcaggagagtatgattggggaatatttaagttaa

SEQ ID NO: 50022 - DNA, 1482 bp, Clostridium carboxidivorans P7
atgtttttagacaataaattaaaaaaggaaattgtagaaacaaaatatctatctgtagataatacctggcgatacaggccaataataagaataatgtttaaaaactatgaaaaaatgaacttttggcttttaaaagaacaaatttatgaagagcttataaagtatgaggatttcaagaaatatgatatggaaactttaaagcaggatctagaagtactggtgaattgggggaatctactcaccatgtatgatacgagaaaaatgaaaacgctggaggaatttaaaaataagcagtataaatatcaagtatcaccttatactgttgaaatagagaggatgctcattagacttgaaactctaaaggaggaaaacagggggtccttggaggctactttggtagaaagatttaaagaagaacttaaagagataaatagtatgtcttcaaaagaaaatgttaaggtatatgattggtggaagagattaaacagagattttaaaatcttaaatgaaaattatcaagattatataagtaagttttattcacctaaaagtgaagaattgatgaaaactacacaattcttaatttttaaggaaaacttcatatcctatttgagagattttataaaggggctgcaagtaaatgcaagtgctattcgagaatttttgcaaaggttagatgaaaacgctatagaaattgtaatacaaaaatctttagagcacgaaaaatctcttccaagattggaaggagagttaaatgaagagttttatattgaaaagaatagaggtaggttttacagtattaaaagctggtttttaggagaaggacacaaaagttctatggcagatcagcttttagacagcacaaatgaaataataagaaaaatcacaagatatgcagtgcagcttacagagatgagatacataagtggcaacagaaaagaagagtataagaaaattgcagagcttttttcaaagtgcagcactatagaagatgctcataagctttcatcagtagtatttggtgtttttataccaaagcatattaaaggaaatcctgttagggaaacggaaagcatagaaagcagtatatatgaggaaaaaccttattatgtcacagtaaagcctagaataaggcagtatagagagaaaactgccagtagagttgcagtgaaggatagaagtgtagaaaaaaggataaggcttggaaaaataatagctaaaagagaagaagaaaaaaagttagtagaaggtttaatagtaaatgataaaattactttttctaagctaggaagtatatccagaaatcaaaggggaattttgcttagatggctttccaaaggaataaataacaaaaagggtattggtaaaacggaatatggcaagatttataatgtggtacagcatgaaaataaagaatatataacgctgcattgtgatgatggtgaatttaaaatgcctgactatacgcttgtttttaaataa

SEQ ID NO: 50023 - DNA, 981 bp, Clostridium carboxidivorans P7
gtgaagcttgaaaagataccaggcagggcagaaggctggatgggtatagaaggctttactgatataaaggagtatatattttttgtgatacttttaatgtatttagaggataaaaataaagaagaacaatttgtattgtcctttgtaacagagtacatatcaaatcaataccagaatgaaaagatagattggacaaaatacagtaatagaaaatccttggttaaggttataaagttagcattaaaattaggaattatgaaaaataatgatggtgatgaagatgagttttccagtaatgaaaatgcagatgtactctatgaaagtactggtatttcaagatatatagtgagaagcttttcaaaggatattatggaatgtgaaagtcttgaagaacttatgcaccacaactttgaaggagtggagcaggataagggaatgctaagaagaaatagggtttataggagattgcttttatcaccagttgtctataatggtggaacagaagatagtgactatgattacataaagaaatttagaagcagccttcaggagaattttgaaaataatttaggctgggatttacatgtacataaaaatggtgctcttatagttttaagtgatgataacaaaataggtgatttgtttccaagtatgaagggagaaagtgaagctatacttctatttggaaagcttataagggaaaagcttgaagaaggaaagcttgttttaaatttaaatgatgagatagttttaagtagggaaaattttaatgagcttttattagagttaagaaataaaaaaggaagcggctttaaaaaagaacttagagacagtaaggatgagtattttatagatgtgttgttaaattatatgaaggatttccttatggtagaagaaagggaagcttctatagtgatacttccagtactaggtaaggttgtaggtgattacccaaaggattatttagcagaggaaaattag

SEQ ID NO: 50024 - DNA, 4053 bp, Clostridium carboxidivorans P7
atgaaggaaagatggattgcaaataagtttggcctttttaatttttggtattatgatgaagaggaatttcagcttttaaatgggaaaattcttttaagaggaagcaatggaagtggaaaatctgtaacaacacagagctttattccactgcttttagatggaaataaagcacccagcaggcttgatccttttggttctactgcaagaagaatggaaaattatcttcttcatgataatcatgaggacaggatagggtatttatatatagaatttaaaaagcctgaaagtaacttatatataactattggaatgggaatgagagcacaaaaatctaaagctatggattcttggtattttattttaaaggatggaagaagagtaaataaggattttaagctttataaagttttaggagaaaagtatcctcttacaaagcagcagtttaaaaattccttaggtgaggggaatttctttactgaaagtcaaaaggaatacatgtataaggtaaatgagcatctttttggtttcagtgacattgaaaattatgaggaacttttaaagcttttgattgaaataagaagtccaaagctttctaaagaatttaagcctactaaaatatataacatattaaataattctcaaaagactttatcagaggatgatttaagacctatggcagaggctatggataatatggattctttaaacatgaagcttatgtcctttgaaaaaagcttgaaggcagcggaaagtcttaaggaaagctttcataattataataaatatatactcttttcaaagtctaaggattatttggagaaagaagattatgtaagggcattgacaaaggaaagagaaagcttgctgcttgacattgaggagttaaaagatgaaaaagatataaaaaagaaggaagcagataacttaaaagaaaaatatgataaagcaagagtggaatatgagaaactcataaaaaatgatatttttgctactaaaaatgaacttgaaaatttaaagatagagataagtgaagaagaaaaagaggtcagtgctttaagaacttccctagataaaaagaataaagatttaaaagagaaggaaggcaaactagaagaaataaaaaaagaagaagaatacatagaatcacagataataagagaattggatgacatagaagactatggagaagaatttaattttgaagaaggtgctttattaaaaaaggaacttttgaagggtataaaggactatgattttacatttataaaagaaagcttaaataaggaagaaagaaaattagaaaatgcttttaaattcataaagacgtatgaagatataaaatctgaaaaagaagaatgtgaactagaaagagacaaaacagctaaaattgtagaaggcttaaatagtgaactgaaagaaagctatgaatattttacccatattaaagaagaatacatggaaaaaataaatatttataatggaaataataatgagctcattttaaaggatgaagagcttcaaaagctatttaagttggtaaatgatatagaaaaaagaggggatttggaaaacctgaagccaattataagtgatgcttacaataattttagaggaaaacttttagtagagaaaacaggacttcatgagaaaaggaaaagctttttagaaagcattaaagaattagaaaaacagataaaaatattggagcaggaaaaagaagctgagtttatattggaggaggaggtaaaggttagccgtgaaaagcttgaagagaagaaaatacctttcatacctctatatagagcctttgattttacagaaaacttgtcagaagaagaaaagaagctcattgaaagttctttaatagatatgggtatgataaatgccttgatagtacctaataaatataaaaatgaattgatgaatataactgcaaaggatagatatttatttgctggagaggaaaagaagagcaataatctttcatcatttttaaaagtagaacatggggaatttgcttcactttataaagatgaattagaagcagtgcttagtagtatatctgtagaagaaggaacatctacatatttaaacaacaaaggtatttataacataggtattataaagggaaaaacttcctccaattatgaattgaaatatataggagaggaaagcagaaaaagacatagagaagccttaataaaagaaaagcttcaggaaatccaaagcataaggctgcaagtggattctttagaagatggcttaaagtatttagagaaaaaaatggttattctgcaaaaagagtatgaagcttttccttctaaagaggatttaaaaaccaatctggagcttattgaagaaaaggaagatgaggttagaagtcaggagaaaagcttacttattttaaaggagaaatatgctcagttaattaagaggttggaacaggctaaagtaaaagtttttgaagaaacaagtgaaataagcttagaaaagaattcaaagtcttttgaagatgccttggatgctgcagaagattatagaaaaactttaagtaaaatagaaattagtgtagaaaagtttaaaagctgcagcttgagaataatatcaatagatgagcaaatagaatatcttaaggaagatttggatagactttggcagaatgtagcaagcttagataaaaaaataaagaataaaagtattaaggtacaagggcttcaggaagtacttataaaggctaatttaagtgaaatagaaagagccatagaagaggctaagcacatagtagacagctatccctataaaagtagtgaaatgaacaaagcagtaactactatagccaataagattgaaagcaatatggaaaaagaaaaggaaaaggaaataaaaataaaaagggaaaaagaatttctcaaaatattagaagaaaacttattaaaagaaattgaacttaattatgtagagataaatgcagcagataccttaaaggaaaaagctgaatatgtggttactaattataaggaagacaaaaataaagatgaaagaacctatggaagagagctttttgaaagcgtacaaagatatgagggagatttgagagagtacaatttaaagcatatggaaatctttgaactagaggaaaatatagaagatgaggaaaagaaaaggctgtatatgaagggaaaaagatatgatattgtacttagatttaatgggaaagtttccatttataatttaactcatcttttaagggaagtcatagaagaacagaagttatttatcagtgagaaggaaagacaaatttttgaggaaactttgataaatactatcagtactaagataactggaaagatatatcaaactaagatatgggtagatcaaatgaatgatttaatggagtctatgaatacttcaagtgggcttaaatttagtttaagatgggttcctaaaaaggcagatagtgaaaatcaaatggatgtttcaagcctagtaaacattcttgaaagaggtgctgtagtaacagaagaagatatagataaactatctaaacattttaaagaaaagcttaagcagcaaaaaagggatcttgaagctagtggtgaagtagtaaactatcaaagtattataaaggatattttagactataggcagtggtatgaattcaggctttattatacaaagcctttagaaggaaagaaagagcttacagataatgaattctttaagttttctggtggagaaaaagctatggctatgtatgttccactttttgcagcagtaaatgcaaaatataatggagcggataaaaaggattgtcctagaattatagctttagatgaagcttttgcaggagttgatgaaaataatataagtgatatgtttaagcttttagaaaagatgaatttagactatgtattaaattctcaggttctttggggagattatgaaacggtaaaggaattggctatttgtgaattaacgagagataacgaagatgatattgttgtagttgagagatttcagtggaatggaaaggaaaaggttatagttatatag

SEQ ID NO: 50025 - DNA, 1302 bp, Clostridium carboxidivorans P7
atgttagagaaggaagcggtgaagttttttcaggacaggaaggaatatgaaaggatacttactgcaatatttgaaaagtataaaagtattggtaagctttctggaacttttcaattaaaagagctaaatgatgatgagcgaagaatacttgctcctattcatcataagtattttgctgctaaagaagctaaggtatctgtgaaaaaatttcttgatcatttttgcagtggaagatttgaaggtttggattttacaaaggttttagcaatatattttaaagataaccttacaacttatagagaagaaaaggaaggtaagaaaataaaaaaagaagagttttttaaagaattaatcaatataaataaaggaacaaaatcagaattatggcttcaggaagcactagaaaacaaaggctttggatacaatatattgataaaaaattatgaagcttatagtaaagataacaagttagaagattttaagctgcttttaagtgctgtattaaatgggattaattcacttacctttagtgctagtgctttagaaagtcttcctatattttcttctagaattacaaaagatcctcactattttgatatgaatactacagcaggaaaaattttaatacatggtatatgctatatattaaaaacagaatttccaaaagatgcggaagaaactgccgaaatactatattctgcaggactattaaaggatgaaatatccagttatgttgcaacctttggacttaaagcttataaagaagaaggtgaactggaatttgtatatggttttacaaatatgggagagcctcttatttttaccttaggaaacttgtctaaaatagataggtttatttgtaataaaaatagattatttattttcgaaaatccatccttgtttaatgaggttataaaaagaacagctgaatttaaaccttctattgtatgtacaagtggacaattaaagcttgcttcagtggttttgttagataaagtagttcaagaagtagaagaaatttattattctggagattttgatccagaaggaattttaatagctaataaattaaagctaagatatggagataaattaaagctttggagatttgatgtggaggattatttgaaggttatatcaaataaattcatatctgatatcagcagagcaaagcttaataatattcaaaacagcgctttagaacctttgataaaaaagcttgaggatataggaaaagctggatatcaggaaatgttgattgaagagtatgttgaggatgttataaaagtaagctcaacatga

SEQ ID NO: 50026 - DNA, 1557 bp, Streptomyces clavuligerus ATCC 27064
atgtgcagggttccgccggagatgttccggttcattacgggggagacggccgacttgaacggggccgtgcttgaggccttcggggtggccggcgagcatttggagaccgagctcgggctcgacggcgtacgggagcggctgcgtgcggtgggctgggtctcggacctccaagacgaggaactgcacgaggcgctgaaacggctggtgaagtgggaactcctcgacgtggttcacaaccacgcccagaactaccgcacggctgaggagtacgagcggcgcaacctgcactactcgctgacccgccggggggaggccgcgctcgccggggtgcgacacgccctggaggtgctggcttccacaggggcgctgcagaccgcggtgctggaggcgatcgccgaccggctcgacgagctgaccgtgctgtccggcgaacattccgcggccgaccggcggatcttcagcaccctgcgggagctggagggccatctggagagcctggtggagaacaccaaggccttcaacggccagttgcagaggctccttcgcgccgaaggagtggatctggacgtgttccgtgaggtgaaggccgccaccgtcgcgtatatccaggagttcctggtcaatctcgaccggcgcggcgagacggtggccgccgctgtggcccgcgtggaggagcggggcatcgcggtgctgcgtgagcgggccttgcgcggtgccgagctgcctccgaccccgggagaggacccggcagccggctggctggagagccgacgggcgcgctgggcggggctgagggcctggttcctgccggacggcggggcgcgcccccggatcgagcagctgcacgacatcgcccggcgcgccatcgtctccctcctgcaggtgctcgagaggatcaatgagtcccggcgccgcccctccagcgtcgtacaggacttccgggagctcgcgcgctggttcgctgcggctcccgacgaggaggacctgcaccggctgtggtcagccgccttcggcctcggcccggcccgccatgcccacctcgcccacccggacccggagctgatcccctcgtcccactcctggtccgacgcgccgcccgtaaaggtgtcggccctgctgaggaccagcggacggaccgaacgcttcactcgtacggccaaggtgcgggacgtcacggaggtcagggcggaacgcgccgagcgggccagggctgaacgggcggagctggcacgcgcctggcaggcgctggagacggacggccccgtgcggctctcctccttcagagccctcgatcccatggtcttcgaccgtctcctcgacctgctggggcgggcgctggccgcccgacgggacgcggacggccgacgacgggccacgaccggggacggccgggcggaggtggtgctgtcgccgccccccgacgggcgcaccgcagtactacgtaccgcgcaggggacgatgacaggaccggactacgtcatccacatcacggccgtgggcggggctatctccttcccggcagtccgctccgccacgggacaggaagccgcaggatga

SEQ ID NO: 50027 - DNA, 1314 bp, Streptomyces clavuligerus ATCC 27064
atgagcaccctcgccaaccaactggcctccgccgaacgggaggaggtcgcccgtgccatccgcctcctgctggcccgcccgctgctcaccgaggcagccgacccgaccggtttcgatttggtgcgccgccgccgtgacccgctggctcgttggttcgactacacctgcggctggagtctggttgtggaaccccgccgaggctacgcccgcctcaccaaggtccgcgtcagccccgacggctcccgccccgctcgccgcgcgcgttccggccgggccccgttcgaccgccgacggtacgtcctgctgtgcgtgaccgccgcggagctgctgtcgatgccgatgacgaccatcggcatgctcgccgaccgtgtcgtccaggccatggcggccgaccgcgcgctggcggggttcgacccggtccgccggccggagcgcatggcgttcgtcgacgtcctgaagctgctggagtcgtacgacgtactgcgtgtggtggatggcacgaccgagacgtacgtcgactccgcggaggcgaaggtcctctatcgcgtggacaacacactgctcatgcggctgcccgccgcaccggtcggcgcctcccggctcgccgtgccccaggaagaggtgcccgcgcggttcgaggacctccttgccggcctggtaacggagcgccgctacggaggcgcttctgccgacgggacggccgacgacacgcatgccgagaccgccgcgaccacggatgcccagcgcaatctgcagttgcggcactcggtgctgcgccgcctcttcgacgaccccgtgctctaccgagccgacctcgccaatgacgagctcgcttacgtcacctctttgaccggacgccagatcctgcgccgctctgtcgaacaggccggtttcctcctagaggaacgggcggagggctttctactcgtcgacccggacgctatcgctaccgacgtccgttttcccgatgacacctccaccgcccgagtcgccgcgctactccttctctcaccgctctgcgccacgcccgtgggcctgttgcccgagcagctggccgaggccggagcggagttgctgcgccgctttccgggttgggccaaggcgtaccagtcggaggaaggcccggcccgccttgccgacgacgccgtacggatcctgctcgacgtcggcttggcctgcagggcccgagaccgtgtcatcgcgcgaccggccgcgcaccgctaccgcctgacggagaccaccggcccagctccgaagaacgatccgccagccgtggccgccaccggcagcgccggagaaggagacaagcagtga

SEQ ID NO: 50028 - DNA, 4128 bp, Streptomyces clavuligerus ATCC 27064; identical to SEQ ID NO: 49978

SEQ ID NO: 50029 - DNA, 1308 bp, Streptomyces clavuligerus ATCC 27064
atgaccttgcaagaccaccccgtgtccggcgggctgacctctcgggagcatcttgccttgggcgacgcgccccttcgccgccccgaactccttgccgtctggcagacggtccacgaccgtctctcctccggccgccccgtcacacgcgtacgcctcggacctctggacgagacccagcgcgaagccctcgcagacctcctgggcctggaccgcctgccggacccccggccctccgttgccctggcgtgcctggaggaggccgtcaccgagctctccggccgcaccgtacgagaagtcgtcgccgaactcatcggcccactcggcgacagagccggtgaacgccgtcgccaggaggacgaacgcgccggtctgtgggcctggctggctggtcacgacacggtacgggcgcagccggtgctcaccgactgggctgcgtcatgtcgagccgcaggactggtcggtggttcgacggagcgcacccgtacgctgctcatcgacgcgctcaaggtgctcgccgagctacccggccaggccgaacctctaccagtcttcgccgcccgagtcctgaacggtcacgcgcacgctctcgacgacggcacacccgtctccaccctcgtcctgcgtgccctggcgactctgtacgacattgcaccgccgcagtccgcggcggaacggcgcgccctgtggtcccgcgccggtgtcgccgacgacgagctgtccgccaccgtcatcgccggcggactgcgccctgtcggcgacggccttctcgcccgtgtggcccgcctgtgtaccgaggccggccaggccgccagcctgactctcgcccacgtcaggaacccgggcgagctcaccctgcccgccacccctgcctcactcgtcgtccacgtagtggagaaccccagcatcttggctctggccctccgtcgcttcggctccaactgcccaccgcttgtctgcacgtccggctggcccaacagcgcagctatccagctcctgcgcctactcgcggaccaaggcgctgctctccgttaccacggtgacttcgacggcgaaggcatccgcattgccgcatacgtcatggagaaagcaggggcgcacccctggcgcatgacggcggcagactaccgatccgcgatcgtccgcaacgcgcacggtcctcgacctgggcgcatcaccggagcaccgtgggatcccgagttggccgaagccatggcggggcacgacatcgccgtggtcgaggagctggtagccgatgtgctgttggaagatctcactgctacgactcgtcagcgacacccctccggctga

SEQ ID NO: 50030 - DNA, 1515 bp, Rhodococcus equi ATCC 33707
gtgagcgattcaggtgacccgcgcgcgtccgccgcggacgtcgacttcgccgtgcgcgaggaccggttgcgactgttctccttcaccacggcggagaaacgcaccgactacctgtgggtgatgcgggcgttcgaccacgcgcgtgccaactacgttgtcctgctgcatgccggtgaggtcgccgacatcctcgcccgtatcgccgacgacgacccgtcgggtgctctcaccgccggtgagatcccgcccctgctcgaccagttgcacacgtggggcgtgctcgaacgcagctacgacggcagccgcgccgcgacgctcgccgagtaccggaaccggcacttcgtgtaccagttcagccaggccggctacctcgcgttccgggcggtcgaggacctgctgggtgcacggctcgaggacgcgacgctctcccggctcgcgctgcccgacctgttgtccgacctcgaggaactcgcgcaggcgaaccgctgcggcgacggtgatctcatctatcgcaagctcgcacggctggattcgacgctcaccgacatggcggcccgcgctgcccagttctatctgatgctgggcgatctggtgcgcacgacggagatcacgccggaggcgttcctctcgcacaaggacgcgctgctcagtcacatgcgcgagttcagttccgacctcgcgcggtacgcgccgaagctcggtgccgcgatcgagaacgtggaggcgaccggcatcgaatcgctgatcacccgtgccgccgcgagcgacgaccgggtgttcctctcccgcgaggaacgcgaatccgattggcgggcgcggtggtcgggcctggcgcagtggttcgtcgcggccgccgggccgagcgagtcggacaggctgcgcgagggcacgatgagcgcgatcgcggcagtgctctcgctgctgcgccgcgtcaccgagacccgacgcggcggcgtgagccgcgagagtcagttgcggcacctggccggctggttcgccgcaaccccggacgaggaatcggcccacgcgctgttccagctcgtcttcgacctgggtcgccctcgacacctgtcgatggtgcacccggacgcggacatcattcccgagtcccggtcgtggtgggacgccactccggtggagatctcccgcacgctcgccgagaccggccgggccgcccagcccggtatgccgtcgcgcatgcagcgcaacgaaggcagcatccgccgcctccgggaggaacaactcgccgcccagcgggcgcgggcgatcgcggcgtcgtcgctggcggcttccggagcgtacgaccgggtgctcgacgagcaggagaccgacgtcctgctcagcctgctcaatgccgcactcaccgcccgggtgccggtcaccggaaccgttcccagctccaccgggtcggagaacggcgtcaagctcacactgagcccgcacggggaatcgaccgtcgtgcacaccgctcgcggcaggctccacctggacggactgcgggtgagtgtccgatga

SEQ ID NO: 50031 - DNA, 1413 bp, Rhodococcus equi ATCC 33707
atgaggaaccgttccgtctccccactcgacctcgattcgtaccagcgagccgcgcgggtaatcctctcgaatcaccttgtgacgcagacgtatcctgatcgcctcgcgctgccgctgctgcgccggtgggccaccgagctgcgcgacgacctgctcgagttgttcggctaccgactcgaggtcaccgagaccaccgcgcgtctgttcacagtgacggaccggctcgaacccggcgcgcccgcccgcaccggcaccgatcgccccttcgaccggcatcgctacgcgtacctggcgctcgccctcgccgcgctcggccgcgccggcaaccagatcaccctgtcggagctggccgatcacgtcgcatccgaggccacgcaggtcgccggagtgacactgtccaccgaccgcgcggcagaccgggacgcgttcgtcgacgccgtcggctggctcgccgcgcgcggcgcgatcgtcctcgccgacggtgacgcgggcggatgggcgtcgaatcccgatgcgggagaggcgctctacgacatcgaccgctcggtcgtggtggcgctgttccggccgccccgggcactgcagcacgtgacgtcggtgcgctcgctgctcaccggtgagccggcgcccctcgacgacgacatcaccgcctaccgacccaccgacgcgcgcgagaccgcccggcggatgcggcgcgccctcgtcgagcgtccggtcgtgtatgccgacaccctcaccgacgacgagcgactgcagctggcgctgccgcgcaccgccgccgacgtcgaggatctcaccgggctcgtggccgagcgccgcgccgagggcatcgcgatgatcgatccgtccggtcggatgtccgacgtgcggttcccgagcaccggcaccatcgcacaggtcgcgttgctcctggccggcgagatggccgaccgggtcctcgatctcgatgctgccccgctcccccggcacccgctgccgaccaccgatcaggccgagctgatcgagcggctggactcggcgatcccccgatcggggatcttcgagcagttggccgacccgttcgagtcggccgagtcagcggagtcggcgggatacgccgccgacgaccgtgacgacccgatcgaacccgcccgctacgcgctcctcgacgacgactgggtgaccggggccgtcgacgaactcgtactccggttcgggcgcaccttcgccgcgcagtggcaggcggaccgcaacggcttgcgccgcaacgccgtcgcgctcctcgatcggttgcagctcgtccgcagtgtcgacggcggcgtactcgtgctgccgccgatcgcccggttccgtggcgtcgtcgtcaacatccgcgaccggagcgcccagtccgagttgttccacgaaccggtctccgccgagaagcactcctag

SEQ ID NO: 50032 - DNA, 4173 bp, Rhodococcus equi ATCC 33707
atggcatctgcgcgtttcaagccgacccgcgccgggatcatcaatctctgggactaccgcgaccaggagttctcgttcgcggacggccggctggtgctccggggcccgaacggttcgggcaagacgaaggcgctcgaggtgctgttcccgttcgtgttcgacggccgcatcgagccgcggcgactgaacccgttcgcgggcgaggagcggacgatgaagtccaatctgctgtatcggggccaggattcggcgcactcctacgtgtggatggagttcgcccgcgggccgcaggacgaccccgaggccgtcaccgtcggaatcggcatgcgcgcgagccggcagaacgacaaggtcacccggtggtacttcgtcgccgacggccgggtcggcgtggacttctcgctcctcggcgacgacgaccggccgttaacgaagaagcagctcgccgaacagctcggcagcgacgcgatcaccgatcgtcccgtcgactaccgcgccgccatcgatgcgcggctgttcgggctcggcgccgaacggtacgaccagctgatcaacctgatcctgacgctgcggcgtccgcagctggcgaagaacctcgaccccaaggggctgtcgcaggccctcacggacggtctgcgcccgctcgacgagcagctcgtgctcgaagcggcccgctccttcagcgacatggaggaggtaggccgcgccctcgagggtctggccgccgcggatcaggcggcgcagagcttcgtgaccgtgtactcgaagtatctggcgcagcaggctcgcacggacgtcgaacaggtggcgcgacgcctcgaatcggtggaccgcgcccggtcggtgctcgacgcggcggtcgcgctgcaatcgtcgcgacaggaggagcgactgctcgccgaggaccgcttcaccgccgccgagcgcgccctcgagcaggcccgcgccgacctcgacaccctgcaacgctcgggtgcctacgagggcaaacagcagctcgacgacctcgcggccgccgtcgcacagctgaagctgtcgaccgagcagcaggcagacaaggcccgcaaggcgcaggccacgctcgaacagcgcaccggcgaggcaacgcgcgccaccgaatcggtgcggaccgccaccgcggcactggtacgcgccgagaccgaactggccgaggccgccgagcaggccggcatcgcgtggaccccgctgccggagggcgcgcgatcggatcagatcatcgccgcggtccgcgggcacgccgaggaacgcgacggcgacgtccgcgccgtgcgcgccaccctcgccaccgtcgagaaggcgaacaccgaacgcgaacgcgcggaccgggccgccgacaaggggcgcgaactgctcgaggccgcacaggccgcggtcgccgaagccgaggcgacggtggagctggcccgggcggattgcgcggcggcgttgcgctcctggtggaccgagcattccgccgactacgccgcgatcggcgtgaccgcggacctgttcgcggcactggacaaggcgctcgcgcaggccggcgacgacgactcccccagtctgagcaccgtgctgcacgagcacgtcgaatccgcactcgacgagcagcgggcccgccgccgcgaggccgccgccgcgcaggcggccgcgaccgcccggatcgcggaactgcagaccgaccgcaagcacgtcgccgccgagaaggacgacgcccctgcccgattcgcgtcccgcaccggggaccgcagcgaacagcccggagctccgctgtggcgtctcgtgcgcttcgccgacgacgtcgaacccgtcatcgctgcaggcgtcgagtccgcgctcgctgccgcgaacctcctcgacgggtgggtgcttcccaccgacgatgcgccggccgacatcgagtccgagcagttcctcgagccgctgccggaagaccgccgcccgcagggcgcgaccctcgccgacgtgctcgccgtggaaagcgataccggagtgcccgaagagcgggtccgggcgatcctcgactcggtctcgctggaccgcgacggcagcgcccgcgacacgcacgtcgggatcggagtcgacggacggttctggcagggcatcgcgcggggccggcacgtcaaggccgacgccgagtacatcggcaccacggcgcgcgaacgtcgacgcgcccagcgcatcgacgaactcgacgccgagatcaccgcggcggaggacgcccggaccgccgcccgcgcggtcgaaggcgacgcgaaggcactgctcgacacgctcgcgggtgccgcgaagtcgcttccgcgcaccggtgccgtcctcgccgcgctcaagaagctgaccgaagctgccggagcgctgcgaacccggtcggagtcgaccgagtcgtccggccaggaactcgaccaggccatcgccgatcacacggcgaaggagaagcaacttcgcgccgtcgcggttgcgcatcgggtgtcgcaccacgcccgtgacgtcgatgccctcgccgcgtcgatccgccacttcgagagccagggcgaacagctgttgcgctgccgccgggagcacgagaaggaactggaactccatcgtgaggccgaggaccggctcgaggaggcccgcggcaacaccgaggagttcgtcgaggaggcagcggtcgccgaggagaactacgcgcagcaggtctcgcgcctcgagacgctgcgcgaggcgttgggagcgagcgccgaacagatcgatgccgatctcgaggaagcgcgggcgcggatcgaggtgtgcaagaccgaacagcgggcggcacgcaaggcctacgacgcggcggtcgagcagatcggcaaggccgagggtgcccacaacgcagccgtcgaaggactgcgcagcgcgctcaccgagacccggaccgacgccgaccgactggcaccgtacgcgcgacgtgacctcctcgacctgctgcgggtcgagggcgagcacacctggccgcagagtgcggccgcgtggctcaccgcggaccagctcgtctaccggatcgtcaccgagggcgatccggacgcaccgatcctgccggccgaggtcgcggcgctctatcgcgcgatggacgccgcgaccgcgtccgtccggaccagcgagaacgcgaagaagtcgacccggtcggcgctcaccgcggcactgcaggacttcgacgcgcaactggccgcggctggtcaggactaccgcctgcagtgggacgcgccggacgggctgaccgtcgtccgagtccaggacgatcagggctactcgtcgatcggcgagttctcgacgcggatcgcggcggcacgtcaggaccaggaggtcctgctcaccgactccgagcggcgcatcctcgaggacgcgctgctgaccggcctcgcccagcagatccacgagcgcaccgcggacgcccgtgacctgatcgcccagatgggtgccgagatgcgcgagcggcgcatgtcgtcgggcagcacgatcggcgtgcactgggtactcgccgacaacctcgacgacacctcccgtgcagtgtccaagctgttggaccgcgcgcccgcggcgttgagtgccgacgagctggcgaccatccgcgcccacttcgcggcgcaggtgcgcatcgcccgggccgcgcacccggagcgctcgtaccccgagatcctcgcgtcggcgctcgactaccgccggtggcgggtgttctcgttcacattgatcggcggggacggcagcgaggaccgtctcaccgtggcgcggcacagcgcgctgtccggtggcgagcagtcggtatccctgcaccttccgctgttcgctgccgcgcacgtgatgctctcgtcggccgatccgcactcgccccgcctgctgggcctcgacgaggccttcgctggtgtcgacgacaacgggcgcagcgaattgctgggtctgagtgtccagttcgatctcgacctgttcatgaccggctacgacctctggatcacgtacccgggcgttccggggtgcgcgcactacgacctggcgcactcgacagccgaacagagcgtcagcgcggcactgctcgtctggtccggcggcgacctgctcgccgagcacgacggcagcgatctcgcccgggccctggggtcaccgctgcgccgccgcgtccccgccacggcggacggtggtctggagttcgcggacgcgtag

SEQ ID NO: 50033 - DNA, 1560 bp, Frankia sp. EuI1c
atggcgcacgaccacggcgacggcgagccggacctggcgtccgccgcgcgcgagatggcggccaggcgctcgcttttcacctatctcactgtcgaggccgccgacgagtacatggccgtcatgcggctgttcaccgagaccctgttggcggacctctccgcagccgaggtcgcgtcgcggctcgccgagcggggccttgacctcgacaccgacgctgtcgaaagccgctgcgcgcaactagtcgtctggggcaacctggtgcggtcggtcagggagacgcgggtgcgcaccgtcgccgcctaccaccggtcccggtcccgctatcaggtctcgaagctgggcggccggctccatcgcgaggccgaagagatcctgcggaccgtcgacggcgcgcgggaggtcgcccgggaactgctcgcgcggatttccgacaccctcaggatcatcctccttcaggtctcgtacgacagggtgccggtcgacgcggagtcgttagccggtcaggtcaccggggtcttcaacgaccaccggctgttccaggagtccgtgaccgacttctatgcctacctggctggcgtcctgacccggtacgacctcgcgggcgaggagtacgcccagttcaaagacctgcttctcgactatgtggacctgattggggccgacgtcgcccggaacgcgcccgagattctgaaccggctgaagaccctgctcactcccccgctgatcgacacgttgctcgccaacctgcccgcgccgcccaccgcgggcgatcgcctcatcgtggtcgagcgactgccgggacggacactcgcggactgggaacagctcgccgcctggtacggggcgtccgaccaacgatctgggcccgagcagctgcgcgtggccgcccgccaggcgctcggccagctgatcgcgaacgccaagcgcatgctgaccgcgtccgggaccggggtctcgcgccgggccgatctcctcaggctcgcgggctggttccacggcgcggacggcgagaccgcgcatcgcatgttcgatgccgcgttcggcgcgttcccggcccggcatctgctcctcgggcccgaggagcaggacctgcgggccgggccgagtacctcatggtgggtggcggcgcccgtcgacgtgccggtttcgctgcgggaacgaggtgatcgcaccgcgcggggacgagcgtcacgcgtgcccgacgcaaaggctcagaccgagcgtctggaggcacaggcgcaggagcggacgagggctcgtgagatggccgcggccgagcttctcgccgccggcgggctccacggcagccacctcagccgagccgctcgggacctgcttctcgagctggtccccgcgctgttcaccacggcggctggcggccacgaagaggcagaccacccggtatccgacctcgggttgacgctgtggggagcgcctgacccaggcagtcagaccgtcatcaacggggacgacggcgtcctgaccatcgaaggcctgctgctctgggccctgccgctgggcgaggacttcgagcgggcgcggaaggcggtgaactcgtga

SEQ ID NO: 50034 - DNA, 1242 bp, Frankia sp. EuI1c
gtgagcttcgcccccgtcgcgggcacagcggcccgagcggcgcaggagagggtcgacgcggcccgcgcgctgttggccaaccccgtgctgacggccgcggcgcatcccgatgagctggcgctggttcgcctgcacgcgcaggcattgcgcagcaccttcaagaagcaactcggttacgtcctcgtcatcgaggcgcagttcgcccggctgttcaaggcgccgttgacggcggacacccccgcgcggcccgcccggcggggcgacggcggcccgttcactcccatcgcctacacgcatctggccctcctctgcgcggcgctgctggcgccgggcacgggcgagatgattctcatctcggcgttgatcgaccaggtccgggcggacgcggcgacgatcggggtaccgattggcgacaccctgccggaacgccgggcgctggtaacagccgtcgacctcctcgtgcgctggggagttctcgtcgaggccgacggaaccgcggcggcctggggagagcggcagattgacgaggcgttgcttcacatcaatcgtcaccagcttccacacctgctcgcccgtccgctgtccggcatgaccaccgcggacgatctcctcgcgtgcgatccagcgaccgccgatcaaccgcggcggtcgctacgccgccggctggtggagaacccccttgtccggcgcgaggatctcacagaggccgagcgcgatgttctctcgcgcgaacggtccgagctgactcgggtgctcgcggacagtttcggcctcaccctcgaggtacgagcggagggcgctctcgcctacgacgcgacgggatcgctgaccgacagcccgtttcccggtaccggcacggtcaggcaggcagcgctgctcctggtcgacgcgttgattgccaggcgggagccgcagccgggcgacacggccgtgctgcgcgacgggcgcgccgtggccgggttggcggccggctggtccgaggtcgactcggtgctcactcggctggcccaggaacacgcgaaggcatggagttcggctgccttggaggacctgcgcaaactgcgggacctggtcgcgacgacactcgccgaggtcggtttggtttctgtcctcccaggcggcctcgtgatccatcccgccgccgcccgataccgcccactgccggccagcgaggtaccgacacgggcggctcgtcgcctgggataccgcgccgcctcgttccagccggaaccggagctgtga

SEQ ID NO: 50035 - DNA, 4188 bp, Frankia sp. EuI1c
atgcagcaggctctcgcactcggtgatcccgcccaggacacgttcggcccgatgctggccaggcaccacccccaccgctggcggatgtcgcgcgccggtttcgtcaacgtgtggcactactacgacaacgtcttcgacctctccggtggccgcctgattctccggggcaccaacgggtcggggaaatcccgcgccctggagatgttgctgccgttcctcctcgacgccgatcgacggaacatgggaacaggctcggcggtgcgcatggaggacctgatgtccgcgggcgccgcaggccagacaaaccggctcggctatctgtggcttgagcttcgtcgtcagacagagcccgacgaggacccgaccgggcagttcctgacgctcggcgcgctggttcagttctccgcgagtacgaaagcggccaaggtctggtacttcacgacgccgcttcgagtcggccacgagctcatgctcatgacctcggaccgggcgccactctcgcggcgcgaactgggcgaggccatcggggaggaccggatcagcgatgggccggaacggcatcgcgaacgggtgcgggccgaggtgttcggcctcaccggcggtgaggccagcaaggaacgtttcgccggcctgatgcggctgttgcacacactgcgctcccccgacgtgggcaacaggatcgaggaggggaagctgccactgatcgtcgccgacgcactgccctccctgtccgaggaggcactgacggacgccggccagcagctcgacggcctgaccagcacccgggaggagcagcagcggcttgaggccgcccacgaccaggtcgtgtcgttcctcgacacctatcgtcgttacgtgacgggggtgctgacccagtcgctcacgcggctgcggcagcacgcggcggcctgcgccggggccgaggtcggggcggaacgtctccgtctgacggcggacgggctcgcccgcgagctttccctcgcggagcaagaccgcgcgctgcgcgaccaggagatggcgacgctacgagccgcgttggaggcgttgaaggagtcggaccgctaccgaggcgcgcaggagctcaccgacctggccgcaaccgtcggctcactcgccacgaccgccgaggcccggctggaaacggcccagctgcggcgcgacggcgaagcggacaaggcggccaccgccaacggcctggccgacgagctgacagccagcgtcgacggcctgtccacgacgatcggccaggctcgcggccagttgaccgccgcggggctcgccacccacgagttgcccgcctcggtcggcctgctgcggacgccgcgcggccagcgaaccgagatagtccggctgcgccgggaagccgcccctggcccactcgcgcgccccgtggctgacgaggtgcgcgtggttcccgctgacctcgccgagttgcgtggcgcgaccatccgcgtgcgggatgccgtgcggctgcgggcctcgcacgcgaccacaagggcggccgacgctcgccggatcgccaccgagcgagacgaggtcaggcggaccgtcgagcgggccgacgaggcggacgacggggcgcgcgccgcggcggaccgggccgagcagcaggccgagcgtcgggacgacgaagccgtcagcctcgtcgagcggtggcgcgcgtggctggctgcacccgcgaccgccggcctcctgggcgacgtggactggtcggcgtccgctgccctcggcccgctgcttcgcgaccagctggcgctctgtggcacggacagttcggtcgatctcgcggacctcgaccgcgcgcccatcgacgcggccgacagtgcgcgagacctgctgacgaccgagctgcagcggctcgcggccctcgacacgcgggaccgcggcgcggtcctggtgcttcaggaggagcggaaggatctcctgaaccttcgggacgccccgccgtcagcgccggtctgggtcaccgccacgagtgacgcgccgctgtggcggtgcgtcgatttcgccgccgacactcccgaggacgagaaagccgggctcgaagcggcgctcctggcctccggcctcctgacagccgccgtcgagtccacgggtggcctgacggcggccagcggtcagctgctcgtgtcgccgaccggcccgcgggccgccgtctccctcgccgaccggcttgtgcccgactcggctggcccggcggcccctgaggtggtcgtcgctctgctcggccggatcgggcttgccgaccggtccgtccccacctgggtgtcggccgacggcagctgggcgaacggcccggtgcggggccggcacaccgtcgcggcggcccagcacatcggtgccgccgctcgggaagcccgccggatccgtcgtctcggcgagatcgacagcgagctcgccgtactcacggaaacgttgcgggaacgcgaggaacagcgagagcggatcggcgcgcgcaagaaggcgatccgagatcacctgtggtcggtcccgcggtcgaatccgctcggggaggcccgcctgcgggccgcgctcgaggcgcgtctcgccggcgaggccgcggcgaaggccgccgggctgcgggccgaggccgaccaccggaccgtcgcactggccgccgacgagcgggcgcaccgcgcggcctgcgccgagttcgggctgcccgccgacgtcgacgagctgaccggcctggttcgcggcgccaacgcggcggcggacacgtgtgaccgcgcgatcgggcagatcaacgccctcgacgcggcgatggcccggcaccagcgcgccgtcgccactctcgacgacgaggcggctccacgcgcccgggccgaggacgacgccgcacgagcctgggacaagtggcatgccggggagaccaggctccaggcactccggaacgctctcggagccgacccggcccaggtgctggaggagcttcgagccctcgagaagcgccagctgaaggccgaacgtgagcgggaggacacggagagaatagtcaaccggcttcgcggcagtgccgcgacggccgtcgccgacgcacgggcggcgagccagcgggccgtggaggcgcgggccggtctcaccgaacaggtcacggccgtccgtatccagctaggcgagcccggtgtcgtcgacacggcattcacgacaaagcccgcggagccgttcaccgactcgtcgacggccggcgtggacgcggacgtaaccatcctgctcgccgggcttcgcaaggctcggatcgacgagaacgcactgatccgcgcgcaacagggattcgaacgtgagatctccgcgagctacgaggtgaccgtcacccgggaaagcgacatcctcctctacgaactgaccgacgccgacggccggcggccgctcgtccaggcggccggtgagcttgcggccaagcgcgaacgaggccgcgcggcgctcaccgaacgcgagcagcacgtgttcaccgagttcatcctcggcgaggtcggcgaagagctccggaatcgcctgctccaggcagacaacctcgtcaaggcgatgaacagaagcctgcggtccatccagaccagccacgggatcggggtccggctcacgtggaagctcgacacggagggagacgcggccgccggcaggatcaaacagctggccgccaccgcggcctcggtacgcagccaggcacaggacgccgaactgctgagcctgctgcgggacagagtcgccgccgcggcgatcgccgaaccgaacggtggatacgccctttacctgcgccgcgctctggactatcgcgcctggcacacggtcgaggtcatcatcaccggtcctgagccgggccaggaacgcaagatcagccggcgcgccaagctgtcccagggcgagacccggttcgtctcgtacgtcacgctgttcgccgctgtcgacgcgtatctgtcgggcctcgacgacaccgccaccgcgctgcggctcattctcctcgacgacgccttcgccaaggtcgacgagcccacgatcgcggaactgcttggtctgctcgtgcgcctcgacgtggacttcgcgatgacgggccacgccctgtggggatgtgtcccgcaggtaccagccctcgacatctacgagatctgtcgccaggacggcggcgggccggccgcgacggtgcacgtgcgctgggacggccgaaaccggcatttccttcggtccgcatga

SEQ ID NO: 50036 - DNA, 1326 bp, Frankia sp. EuI1c
atgatgtccccgtcgcccaccccgctgccggccgcgacgcgggcctatcttgaggctccggttctcgcgccagtgtgggcggcggcgcgggcacggctggagcgcaacgagctcaagccgaccggcacgctcaggatggatctggacgaggccgccgcggcgcagctgtccgggctgctcggcgtcgccgtcccggcgggagcgggccgcgcgatccgactcgccgatctcgacgtcgcgctgcgcgcatccaaggccggccgcggcctcgtgtccgtactggagagtctctcgggcgagaccctgcgcgaccggaaggccgaccagcgcatcagtgacgaacaatgggcgcgagtatggcgcgctcttgacgaaacgctgcatgacgaaggcctcggcacggccccttgggtgggaatctgggtagccgacctgaggcgcaccgggatactcacccgcgccggcgccgatatcgcgcgccgagccgtcaccgacgccgcccacgcccttgggcagctaggccgcacgtcggcgcctggcctctgtaccgccccggacgaaccgtttcccggcgaagcgtccacccagttacagatcggcgccctcgcaacggcgacaacgggcgactcgcatggactggacgatgcgcgtctgacgagcgcggccgttcttcgtgccgtcgcgatcgcttgcggactccccgctccggcatcgtcggccgacaggcgcgcgctgtggcggatggtcggcgtcgcgaccgacagcgtgtccgggaccgtcctcgtctggtcgcttcgcccaccgggctgcgacccgtggtccgagatgatgcgcctgcgagcggacctcggcctcgtcacccacctcacgctgcacgagctcgaacgtgctgggaaggtgcggctgcgtccgggcggccaggtggtgtcgctctgcgagaacccgcaggtcctccaggccgctgcccgagcggaggtctcggcgccgttggtctgcctctccggcagcccggccgaggtcggcacacgtctggtgcgaacactggtcggtgacggcgctccggtccgctaccacggtgacttcgactggccgggaatcgcgatcgcggcccgtcttctcgcggtgggcgcgacgccctggaggatgtcagcggccgactaccggagggcggtggcggggcttgccgccgacgtcggcctcccgctcacgggcacgcccgaggccaccgcgtgggatccggatctcgcggccgcgatgatccgagcgggcgtggctgtccacgaggagtctctgcttgacgatcttctggcggacctcgccctctga

SEQ ID NO: 50037 - DNA, 1461 bp, Caldicellulosiruptor owensensis OL
atgataaacttccaagctccgcttttggggaaactcaaatattttgagtaccttacagcacctaactcagaaagatacagaacaataatgagatactgttttttgtgccatttagagtacaaaaacagacttacaaaagaggagattttcacgtttttaaaaagttttccacagtttgcagactacactgaacagatgtgcgaacaggacttgaaaagtcttgttgagtggggcaatttaaattcaattcaggatacgtcaaagaccaggactgttgaagagttcaaaaacaaaagatttttgtatgaacttacacctataggacttaggattgaaaggtttttgtttgaacttgaaactcaagaagacacaaaagcagagctaaatcccaaacatattgagaagatatttctcttgcttcagcaggtggatagtatattgcaagacccgcaaaaaagagcggttgactggtgggacgagctaacaagatcatttgaggagattgaaaagagctattcagagtatatttcaatgttaaagtcgtacgaagctgaaaatctcatgataaaagaaaagtttttggactacaagtcaaagcttgtacagtacctttacaacttctatattatatttcagaactatcttccaagaataagatccatctttttgttattggaagactctaaagttgaaaagcttttgaactacataatcgaccaggaaaaagaacatcccaaaaacatattcaaagacccagagagcatagaaagaaatataaaagcaaggtttgacaatataaaactctggtttgttgctcctcatggccaggcagaaaaactttctgaccagatccaggggcttataagaaaagtatctgaccttgcagcaaggctttcggagctgtcaagtgtcaaagtaaacaggcaggaggagttcaagcacttggcaaaaatcttctcaaaccttgatttagctacatgtcacaagctttctgcagttgtgtttggtgtgcttttgccacgatacattgcagccgaggaaaagaggcagagcgaacttgcaagtcttagcattcttgatgtaccaccgatgaagagtttgcttcactcaagaggaagacttgtgagggaaaagagcaaggttttgccggcatctgaattttctgaagacaagaagaaaaggtttgaggagtacaaaaagaagattgaagaggaagaaaagcttgttgctgagcttataaaagatgggagaattgagtttgaaaatcttcctgttttgactccacaggttagaaaaaaacttcttgtgtggctctcaagaggactttcgtcaggttttggtaatacagactcagggaaaagatttaaagttgtaagaccaaaagatggaagatattgcgttctaaaatcaacagatggtgagcttgagatgccggcgtatgtaattgagtttgttgagtaa

SEQ ID NO: 50038 - DNA, 1224 bp, Caldicellulosiruptor owensensis OL
atgaaaagtactcttttgaagctacttagcaacttttgggttttgaaagaaaaggacgtggagagctattatgagtgcaaaaatattgacaaagagttgaaagactttatagtttccaagctgggacttagattttatgccacatctgacatggtcagacttgaaaaggtaccgcttgtcccaagaaagtacatgggaattttggactttgaagagccgaaagactatgtatttttctgtcttgttcttgcttttttagaggacaagggcaaaaacactcaatttttgcttgaggatatcacgcagtatatacggtcgaattttcctggtgaggaaattgactggacgatgtattctgacagaaggtcgcttattagagtgcttaaattttgcgaaaagatgggacttatcaagatagatgatggcaatcaagagctgtttatggaaagagttgatgtagatgtactttatgaatcaacagggctgtcaaagtactttatgaggacatttcctaaaagccttgttgagtatttgtcagtcgaagagattttaaatagcgagtttgagtttacaaatggactttctgaccaaatcactgatataaagagaataaaagcctacagagggcttttgatagatggcattgtggattttgagtgtgaagcaccactttattacattaaaaagcaaaagacaaccattttacaggaccttgaaaagtttgtaccagagcttgaacttcacctgttcaagtcgtttgcctaccttagcgttgaaggtgattacaagtatacctatcctgatgattcgaacctgtgcgatgtgttgcttttatgctcaagagaacttcttgaaagggttgaaaaaggagagctaagactttcgcctgcacatgatatacttgaaatttcgcttgaccattttaagctaattgtggaggatgtcaagaaaaaatacggacatttttggaacaaggagtggagggaaaagtcaacagagaaaatatttgaagaacttttagagtatttgcagcttcacaattttgcacagacaaatgatgatggatatcttgttatatctcctattttttttaggattgttggtgaatatcaggattatgagacgaatagtcagctttccgaaaaagataatagtaatgagaaagcttttgaggatataaatgtagatggaggttttcattttgaagatgagcagggaaaatag

SEQ ID NO: 50039 - DNA, 4053 bp, Caldicellulosiruptor owensensis OL
atgagcagggaaaatagatgggaactcagcagagccggagttttcaactactggtactatgacgaggagtattttgacttttatgatggcaggatgcttattcgtggtcctaacgcttcaggcaagtctgtcacaatgcaaagttttattaccctgcttttagatggcaactaccatccgtcgcggcttgactctttcgggtcaaatgcgcgaaagcttgaagattatgttcttggcgagcagggaccaggtcagaaaaatgaggcaatagcctatctttttcttgagtttaaaaaacaaaatgtatttgtatccgtaggcatgggaataaaggcaaaaagaggcacgagccctgatacgtggtattttgttcttacagacggaagaaggtttgggattgacatcttcttttatgaaaagataggcgaccaaaaaatcccacttaccaagaagaagtttgaaaacctcataggagacggcggcaaggtattttcaggcagaaaggattatatggaagaagtcaacaaaattttattcagttttgagaacatagaagactttgagaatttgatagacttgattgttcgaataagaaccccaaaactttcgagggatataaaacctgacactgtttgcaggatgctgcaagagtcgcttcctgccctatctgagtcagacttgcgtagtctttctgactccatagaaaacatggacaagattcaaacagaactgaaaaatcttgaaatcataaaagatgtgctggaaaagttaaaaaaggtttacgatgagtacaaccagctgttacttgcgcagagtatatttagagtggttgagagcagcaaagagtactatagcctcaaaaaagagcttgaaaatactcaaactgaacttgaaaaaaatagtaagttgaaagctcaaatagaagaaaaaatagaagatcttaaaaaagagcaagagtctttaagcttgagagttgcaaacataaaagaaagcgatgtgttcaagcttcagacagagctttcaaccattgaagaagagctcaaaaacatagaaaaccagaaaaccaaaaagatttcgcagctaaatgcagcttctcagaagcttgaaaaggaaagacaggagttaaaagctttagaagaggatttggaaaagtgcagaaagagaataaaggattatatagatgaagggaagttacttgtcgagttcataggttttcagagatttttggaaacgctggatatgtattttcttcaaaacggcagtcttgatattttaaaagaggtgctttcctctttcttatctcaggttgagattgttttaaaaaactatgaaaagctgagtgaaattaagaaagatttagatgatctttataaaaatcttgaccgcaacaggacagaagcacaaaaagtagaggaagaaattcaaaatcttctttttcagcttgaggatgtaaaaaataacttaaagaacgccatttccatttactttgagcaaaatgaggtgtttaaggctcaggatgaacaaaaaacagtgatattccaggcgataaatagttgtgagaaaaaaggagattatggcagaatatattcgactttggatgatatttataacttccattatcttacaacctcagatacaataagaaggcttgaatttgatatagaaatgttaaatagccaaattaaagctaaaaaagaagagattgagaagattaaaagccagaaggatgacgagattatactctcgcctcagcagaagaaggtaagagataggctattgcaaaaaggggttccatttattccgttttatatggctgtggatttcaaagatggtgtggatgagagaaagaaagccgtcattgaagatgcgctgagttcccttgggattttaaacgcgttgattgttccggaaaaatacaaagatgttctttcggatcttatggatgatgaaaaagaaattattctcttttcaaaacctgcgtatttttcgcatctactgaaccagtttttgaaagttgccaactttgatggacctattgagctaaagcaggaagtggcagctgtgattgacagcatctttgccactgaaaaagatgaaggcatctacatctgcgaggatggaaggtttggcagcggaattttaaaaggtagaacaaccacgtgcgaaagtgcaaggtttattggtattgaaaatagaagaaggtacaggcagatactcatatcacagcttgaagacgaaatacaaaagatttcacttgaattagagcgaaaaaagcaggagaaaaatgtacaaaaaactttgcttgaaaagttaaaagaggagagaaacagttttccttcaatggttgaccttgacactgcgtttgagatgattgaagaaagggaagatagaaagtcagaacttcaaaaagagatagagtttctggaaaagaagataagagagctccttaccaaagaaaatagtttaaagcatgagatttctgtcattgcaacaaagctttctgtcacggcgacaagagataactttttgaagctcaggcaagaggcacaaaaacttgaaaggttgctctttgttctagaaaaagagactgagatggagaaagtggttgcaagctctgcaaccacaaagaaaaagctgattttacaaatagaagaaaacctgcagagtttaagtttagaccttcaaagcttgaaggcaagatgggaaagcctggatgtaagaagaactgaaattgtaagaagactttcaagcgacgatgcacaaaaactttttgaagaggaaaaaagagctatacagcgtcttaatagtattccgaaagagatagaaaatttcaacaaaagtttgcaggaaacaattgcaaaaatatcacagcttgagactttgattgagataaaaggctcacaccttgaaaaggctaaagaagaatattcaaatagccttgagatactaaagattgaacttggttttggttttgtattccgagaagaaaaccttgaagatgagaaaaggcttttagagtttgcaaaggaaaaaagtagttttgccagtgagtttaaatctaaggatttgaaccaggttttacaacggcttatatcggcacactatgcggcacaagtacagcttgcagagtttggcgcaaatctttatcttaaagaggatgataaaactggttatgaaagatatttatggacagccaaaaaggatgggcgattgctttcgctttatgagtttttggagaaaatagaatctgaaataattgagaagaaaaatcttattacccagcaggaaagagaactttttgaagaggttttgataaaagacatagggcgaagaatctcaagtaagataatgcttgctcaggactgggtaaagagaatgaatgcgctgatggacggcatggacttgtcaggtgctcttaagttcagactttcgtgggagcagaagaagcaggaacttgaagatgagctttcaactgcggagttgataggacttatgagcaaagatttgtctattgcaactgatgaagacaaacaaaaggttgtgagacacttcagggcacgcattgaaagagcaaaaagacttcaggactcgcccgacagttttcgaagtctttatgagataatgaaagagattctggattacaggcagtggtttgagttcaggctatattatcaaagaggtatggaaaacagaagagagcttacaaacaacgcatacgacaagttttccggcggtgaaaaagcactttctatttatgttcctcttttagcggctctttgtgcaaagtaccagagcgctgcaagctttgcaccgcgcataattgcgcttgatgaggcgtttgccggtgttgatgagaacaacattgaaaagatgtttgaactcattgaaaatcttgaatttgactatatcatgaactcccagattctgtggggggattacaaaacagtgccaggtctttgcatttatgaacttatttcagacaggagcaaaggctgtgttctcaaagtaaaatacatctggaacgggtacaagaaggtgttggtggagatatga

SEQ ID NO: 50040 - DNA, 1266 bp, Caldicellulosiruptor owensensis OL
atgaaggaagataggcttttacaagagtgcatagaatacttttcgcacaagggtttttcgcgtgtgctggagctcatttacaacaaatacaggtcgctcggcaggttttcaggcagggttgttcttgaaaagccagatccagttgaaaaagagatgctttcgcgctattttggaaggattataagtggcgatagagttgttattaacgtgaaagagtttgcacaaaaaaggtttgaacagactaagttttcttcgcttgattttaaagatgtactatcatatgtattgaaaaaagatgttttgacaaaaaaagaagaaaaagagagcaaacaaagacaaatttcagactttcttgaaaagttagaaaaactgttggcaaacggcgcagataatgagtttgtatttcaaactgtaaaagaaaatttcaaatggtttgaaggatattttaagaagtattctgaagaaaagcttttgggtattttaagctgtagcataaaagctgctgcaacaaagccagaaaaaattgaaagccttgcagtgtttgcaaccagaatagcacatgacccccacttttttgatgaagaccgtgacagtggcaagatatttttaaagattttatgcctgctaaaaaatgttgaatatccaaagtcttcagaggaaaaagctgagcttttgtacatgcacaacatcatcatagacgagctttcaaactggtgtttagtgtatggcataggtgcaattacagaaaacgaaaaagaggacgaagcactcaaaatttttgctttgcaaagaaagccggtgattctgcctctttataccattaaggattacaagcagttttttggatattcaaaaaaaattgtggttgtagaaaaccctgctgtgttttcgatactaatgcaagatttaactgatatttctctcatttgtacaaacgggcagctaagactttctacaaagattttgcttgaaagtctttcaaaagcaggctttactatattttattcgggcgattttgaccctgaagggcttttgatagcggataggattgttcaaaactatggtgctattcccctttgcatggatgaagagaattatcttttgtctttatctaataatagaatttcacaaaagagacttgtgatgcttagaaatattcaaagcgagcaacttttgtctgtatgcagaaaaatgaatgaggtaagactgtcgggatatcaggaaaagatagttgataggctgttaaaaaagataaaaacaatatga

SEQ ID NO: 50041 - DNA, 1464 bp, Caldicellulosiruptor hydrothermalis 108
atgataaatagttttcaagctccacttttgggcaaactcaaatattttgagtacctcacagcacctaactcagaaagatacagaacaatcatgagatattgttttttgtgtcatttagaatacaaaaacaggctgacaaaagaagagatattcacctttttaaaaagttttccacagtttgcagactacacagagcagatgtgcgaacaagatttgaaaagtcttgttgagtggggaaatttaaattcaattcaggacacttcaaagaccagaactgttgaggagtttaaaaacaaaagatttttatatgaacttacacatatcggacttaagattgaaaggtttttgtttgaacttgaaactcaagaggatacaaaagcagagctaaatcccaaacacattgaaaagatatttctcttgcttcagcaggtggacagtgtattgcaagacccgcaaaaaagagcagttgactggtgggatgagctaacaagctcttttgaggagattgaaaatagctattctgaatatatttcaatgttaaagtcgtatgaggctgaaaatctcatgataaaagagaattttttagagtacaaatcaaagcttgtacagtacctttacaacttctatattatatttcagaactatcttccaaaaataagatccatctttttgcaattagaaaactctaaggttgaaaagcttttgaactatataatcgctcaggaaaaggaacatcccaaaaacatattcaaagacccagagagtatagaaagaaatataaaagcaaggtttgacaatataaaactctggtttgttgctcctcatggccaggcagaaaaactttctgaccagattcaggggcttataagaaaagtgtctgaccttgcagcaaggctttcagagatgtcgagtgtcaaagtaaacaggcaggaagagtacaaacacttagctaaaatattctcaaaccttgatttagctacatgtcacaagctttcttcagttgtgtttggtgtgcttttgccgcgatacattgcagccgaggaaaaaagacaaagcgaacttgcaagtcttagcattcttgatgttccaccaatgaagagtttgcttaaatcaagaggaaggcttgtgagggaaaagagtaaagttttgccggcatctgaattttctgaagacaagaaaaaaaggtttgaggagtataaaaagaaaattgaagaagaagaaaagcttgttgctcagcttataaaagatggaaaaattgagtttgaaaatcttcctgttttgactccacaggtgaggaagaaacttttggtgtggctttcaagaggactatcatcaggttttggtaatacagactcagggaaaaaatttaaagttgtaaaaccaaaggatgggagatattgtgttttaaaatcaacagatggcgagcttgaaatgccagcgtatgtgattgagtttgtcgaataa

SEQ ID NO: 50042 - DNA, 1233 bp, Caldicellulosiruptor hydrothermalis 108
atgcaaagtgcacttttaaaattgcttgaaaacttttggattttaaaagaaaaagacgttgaaagctattatgagtgtaaaaacattggcaaagacttaaaagactttatagtcacaaaactgggacttaagttctatgctacatctgacatggtcagacttgaaaaggtaccacttgttccaagagagtacatgggtattatggagtttgaagagccaaaagactatgtgtttttctgtcttgttcttgcatttttagaggacaaaggaaaagatactcagtttttgcttgaggatatcacccagtatatacggtcgaattatccttacgaggaaattgactggactatgtattctgatagaaggtcacttataagagttcttaagttttgcgaaaagatggggctaattaaaatagatgatggcaatcaagagttgtttgtggaaagagctgatgtagatgtactttatgaatcaacagggctatcaaaatactttatgaggacatttcctaaaagctttgttgagtattcgtcagctgaagaaattttaaacagcgagtttgagtttacaaatggactttctgaccaaatcactgatataaagagaataaaagcatacagaggacttttgatagatggcattgtggattttgagagtgaagcgccactttattacattaaaagacaaaagacaacaattttacaagaccttgaaaagtttttgccagagcttgaacttcacctgttcaagtcgtttgcatatattagcgttgagggagactgcagatatacttatcctgacaattcaaatatgtgcgatgtgctgcttttgtgttcaaaagagattcttgaaagggtagaaaaaggtgagttgagactttcaccttcacatgagatgcttgaaatttcgcttgaccattttaagctaattatagatgatgtcagaaaaaaatacggaaatttttggaacaaagagtggagggaaaagtcaacagagaaaatatttgaagagcttttagagtttttacagcttcacaattttgcaaagacaaatgacgatggatatcttgtcatatcccctatttttttaagagttgttggtgagtatcaggactatgatacaaatggtcagctttccgagaaaaataacagcaccgagaaagcttttgaggatatagaggatataaatgtggatggaggtttatattttgaagatgagcaaggaaaatag

SEQ ID NO: 50043 - DNA, 4053 bp, Caldicellulosiruptor hydrothermalis 108
atgagcaaggaaaatagatgggtgatgaacagagccggagttttcaactactggtactatgacgaggagtattttgacttttacgatggcaggatgcttattcgtggtgctaatgcttcgggtaaatctgttacaatgcaaagttttattaccctgcttttggatggcaactaccacccatccaggcttgactcttttgggtcaaatgcgcgaaagcttgaagattatgttcttggcgatcaggggccgggtcagaaaaacgaggcaatagcctatctttttcttgagtttaaaaaacaaaatgtatttgtatccgtaggcatgggaataagggcaaaaagaggcacgagccctgatacgtggtattttgttctaacagacggaagaaggtttggagttgacattttcttttatgaaaagataggcgaccaaaaaattccacttaccaagaagaagtttgaaaacctgataggagatggtggtaaggtctttacaagcagaaaggattatatggaggaagttaacaagatcttgtttggctttgaaaatatagaggactttgaaaatttgatagacttgattgttcgaattagaacgccaaaactttcgagggatataaaacctgatactgtttgcaggatgctgcaagagtcgcttcctgccctatctgagtcagacttgcgtagcctttctgactccatagaaaacatggacaagattcaaacagagctgaaaaatcttgagatcataaaagatgtgctggaaaagttaaaaaaggtttatgatgagtacaaccagcttctgcttgcgcaaagtatacttagcgtgctagaaaaaagcaaagagtatttgagccttaaaaaagagcttgaaaaagctcaaactgaggttgagaaaaatagagaagaaaagcttaagatagaagaaaaaatagaagagcttaaaaaagagcaagagtctttgacattgaggcttgaaagtataaaagaaagtgacatattcaagcttcaaaaagagcttttaaatataaaagaagagctcagagaacttgaggagcagaaaaacaaaaagctttcccagataaattcagcttcacaaaaacttgaaaaggaaagacagcagcttatcgctttagaagaagagcttgaaaagtacaaaagaaaaataaaagatagcgtcaaagaaggcaaattgctaatcgaatcaattggttttcagagatttttagaaacgcttgatatgtatcttcttgagcagggaagccttgacattttaaaggatgagctttcatctttcttatctcaggttgagattgcacttaaaaattatgaaaagttaagtgaaatcaagaaagatttggatggcttttataaagagcttgatatgaacagagcagaagcacaaaaggtggaggaagagatacaaaatcttttgcttcagcttgaggaagtaaaaaataatctgaagaatgctatttctatttactttgaacaaaatgaggttttcaaagctttagatgagcagagaacagcaattttccaggcgataaatagttgtgagaaaaaaggagattatggcagaatatattcgactttagatgatatttataactttcattatcttgctatctcagatacaataagaaggcttgaatttgagatagaagttttgaataaccagattaaagctaagaaagaagagattgagaggattaaaagccagaaggatgatgaggttatactttcatcccagcaaaagaaggtaagagacaggcttttgcaaaaaggggtgccatttatacctttttatatggctgtggattttaaagacggtgtggacgaaaaaaagaaagctatcattgaagatgcgctaaattctcttggtattttgaatgctttgattgtgccagaaaagtacagagatgttctttcggaccttatggatgatgaaaaagaaatgattttaatttcaaaacctgcgtatttttcacacacgctaaaccagtttttagaggttgccaactttgacggacctattgagctaaaacaggaagtggcagctgtgattgacagcatttttgctaccgaaaaagatgatggtatttacatctgcgaggatggaatgtttggcagtagcattttaagaggcagaacaaccacatgcgaaaatgcaaggtttattggcattgaaaatagaagaaggtacaggcagatgctaatatcacagcttgaagatgaagtgcagaagctttcagttgaattagataacaaaaaacaggaaagaaatgcacagaaaaatttggttgagaagctaaaaaacgagagaaacagctttccttcattggttgaccttgacactgcgtttgagatgattgaggagagagaaaaccacaaatcaaaacttcaaaaagagatagagtttttagaaaagaagataagagagcttttgggaagagaaaatagtttaaagcatgagatttctgtcattgcaacaaaactttctgtcacagctacgaaggataatttttttaagctaagccaagaagctcaaaaacttaaaagtgtacttgttaatttagaaaacgaggttgaaaaagaaaaattagtttcaaggacaacagattcaaaaagagaacaaattgtacaaatagaagaaagtctgcagaatttaagttttgacattcagagtctaaaaacaaggtgggaaagcttaagtttaaagaaagctgaaattgaaaaaaggctttcaagcgatgatgctcaaaagctttttgaagaccagcaaaaggcaattgagcgtcttgatagtattcctaaggagatagagagctttaacaaaaatcttcaggagatagttgcaaaaatttcgcgacatgaagtgctgattgagacaaaagctttgcagcttgaaaaagccaaaatagagtacacaaatagccttgaagtgttgaagattgaactttcttttggttttgtatgggaggaagaaaatcttgaggatgagagcaaacttttagagtttgcaaaggaaaaaagtagctttgctaatgaatttaaatccaaggatttgaaccaggtttttgaaaggctcatttctgcacactatgaagctcaagtgcagcttgcagagtttggagcaaatctttacctcaaagaggatgaaaaaacgggatatgcaagatatgtgtggacagcaaagaaggacggaagattgctttcactttatgaatttttagagagaatagattctgaaataatcgagaagaaaaatcttatcacccagcaggaaagagagctttttgaagaggttttgataaaagacattggacggagaatctcaagtaagataatgcttgcacaggactgggtaaagagaatgaatgcgctgatggacggcatggacttgtcaggtgatcttaagttcagactttcgtgggagcagaaaaagcaggaacttgaagatgagctttcaactgcggagttgataggactcatgagcaaagacttgtctattgcaactgatgaagacaaacaaaaggttgtgagacacttcagggcacgtattgaaagggcaaaaagacttcaggactcacccgacagttttcgaagtctttatgaggtaatgaaagagattttggattacaggcagtggtttgagttcaggctctattatcaaagaggtacggaaaacagaagagagcttacaaacaacgcatacgacaagttttctgggggcgaaaaagcactttccatttatgttcctcttttggcagcgctatgtgcaaagtaccagagcgctgcaagctttgcaccgcgcataattgcgcttgatgaggcgtttgccggcgttgatgagaacaacattgaaaagatgtttgacctgatagaaagtttggagtttgactatatcatgaactctcagattctgtggggagattacaaaacagtgccaggactttgcatttatgaacttatttcagaccgaaacaaaggctgtgttctcaaagtaaaatacatctggaacgggtacaagaaggtgttggtggagatatga

SEQ ID NO: 50044 - DNA, 1263 bp, Caldicellulosiruptor hydrothermalis 108
atgagcgatgaaaagcttttacaagagtgcatagaatacttttcgcacaagggtttttcgcgtgtgctggagctcatttacaacaaatacaggtcgcttggcaggttttcaggcaaggttgtgctggaaaacccacagccaattgaaaaagagatgctttcgcgctatcttggaagaattgtcagcggtgacagggtggttgtcaatgtaaaagagtttgcacaaaagaggtttgagcagaccaaattttcttcgcttgattttaaagatgtgctttcacatgttctaaaaaaagatattttaacaaaaaaagaagaaaaagagagcagacaaaagcaactttcaggctttcttgaaaagttagaaaaacagttggcaaacggcgcagatagtgagtgtgtatttcaagctgtaaaagaaaatttcaaacagtttgaagggtattttaagaagtattctgaagaaaaacttttgaacattttaaaagtatgcttaaaagctgccgcaacaaagccagaaagaatagaaagtcttgcggtgtttgcaactaaaatggcgcatgaccctcatttttttgacgaagaccgcgacagtggcaagatatttttaaggattttaagcctggtaaaaaatgttgaatatccaaagtcttcagaggaaaaagctgaacttttgtacatgcacaacatcatcatagacgagctttcaaactggtgtttgatgtatgccataggcgcaatatcagaaaacgcagcagaagatgaagcgctcaaaagttttgctttgcaaaaaaagccggtgattctgcctctttataccattaaggattacaagcagttttttggatattcaaagaaaattgtggttgtagaaaaccctgctgtgttttcaatgctgatgcaagcttgcagtgatatttctctcatttgtacaaacgggcagctaagactttctacaaagattgtacttgaaagcctttcaaaagaaggctttactatattttactcaggcgactttgaccctgaagggctcttgatagcagacaggattattcaaaactacaatgcagttcctgtttgcatggataaagaaagctaccttttgtctttatctaaaaacaagatttctcaaaagaggcttgtgatgctccgaaacgtaaaaagcccagagctttttgatgtatgcagtaaaatgagagaattaaagctttcggggtatcaggaaaggatagttgatagaattgttgaaaagttaaaaagttaa

SEQ ID NO: 50045 - DNA, 1464 bp, Caldicellulosiruptor kristjanssonii I77R1B
atgataaatagttttcaagctccgcttttgggaaaactcaaatattttgagtacctcacagcacctaattcagaaagatacagaacaattatgaggtactgttttttgtgccatttagagtacaaaaacaggcttacaaaagaggagatttttacatttttaaaaaattttccacagtttgcagactacacagagcagatgtgcgaacaggacttgaaaagtcttgttgagtgggggaacctcaactcaatccaggacacctcaaagaccaggactgttgaagagttcaaaaacaaaagatttttgtatgaacttacacctataggtctcaagattgaaaggtttttgtttgaacttgaaactcaagaagacacaaaagcagagctaaatcccaagcacattgaaaagatatatttcttgcttcagcaagtggacagtgtattagatgacccacaaaaaagagcagttgactggtgggacgagctaacaagaacttttgaagaaattgaaaagagctattcagagtatatttcaatgttaaaatcgtatgaagctgaaaatctcatgataaaagaaaagtttttggactacaagtcaaagcttgtacagtacctttacaacttctatgtcatatttcagaactatcttccaagaataagatctacctttttgtcattggaagctgctaaaatagaaaagcttttgaactacataatcgcccaggaaaaagagcatcccaaaaacatattcaaagacccagagagcatagaaaagaacataaaagcaaggtttgataatataaaactttggtttgttgctcctcatggccaggcagaaaaactttctgaccagattcagggacttataagaaaagtgtctgaccttgcagcaaggctttcagagatgtcaagcgtcaaagtaaacaggcaggaggagtacaagcatttagcaaaaatcttctcaaaccttgatttggcaacctgtcacaagctttctgcagttgtgtttggcgtgcttttgcctcggtacattgcagccgaggagaagagacagagtgagcttgcaagccttagcattcttgacgtgccgccaatgaagagtttgttacactcaagaggaaggcttgtgagggaaaagagcaaggttttgccggcatctgaattttctgaagacaagaagaaaaggtttgaagagtacaaaaagaagattgaagaggaagaaaagcttgttgctgagcttataaaagatggaaaaattgagtttgaaaatcttcctgttttgactccacaggttagaaaaaaacttcttgtgtggctctcaagaggactttcgtcaggttttggtaatacagactcagggaaaagatttaaagttgtaagaccaaaagatggaaggtattgcgttctaaaatcaacagatggtgaacttgagatgccggcgtatgtaattgagtttgttgagtaa

SEQ ID NO: 50046 - DNA, 1173 bp, Caldicellulosiruptor kristjanssonii I77R1B
atgaaaagtgctcttttaaagctacttagcaacttttggattttgaaagaaaaagatgttgaaagctattatgagtgcaagaacattgacaaagagttaaaagactttatagttaccaagctgggacttaagttctatgctacatctgaaatggtcagacttgaaaaggtaccccttgtcccaagagagtacatggggattttggagtttgaagagccgaaagactatgtatttttctgtcttgttcttgcgtttttagaggacaagggcaaagacactcagtttttgcttgaggatatcacgcagtatatacggtcgaattatccttacgaggaaattgactggacaatgtattctgacagaaggtcgcttattagagtgctaaagttttgcgagaggatggggcttattaagatagatgatggaaatcaagacctgtttgtggaaagagctgatgttgatgtactttatgaatcaacagggctatcaaaatattttatgagaacttttcctaaaagccttgttgagtattcgtcagttgaagagattttaaatagcgagtttgagtttacaaatggactttctgaccaaataactgacataaagagaataaaagcctacagagggcttttgatagatggcattgtggattttgagagtgaagcaccactttattacattaaaaaacaaaagacaacaatttcacaggaccttgaaaggtttgtgccagagcttgaacttcacctgttcaagtcgtttgcataccttagcgttgaaggtgactacgactatacctatcctgacaattcaaacctgtgcgacgtattgcttttgtgctcaagagaacttcttgaaagggttgaaaaaggggagctgagactttcgcctgcccatgagatgcttgaaatttcgcttgaccattttaagctaattgtggaggatgtcaagaaaaagtacgggcatttttggaacaaggagtggagggaaaaatccactgataaaatatttgaagaacttttagaatttttgcaccttcacagttttgcaaagacaaatgacgatggatatcttgtcatatcccctatttttttaagagttgttggtgagtatcaggactttgttgcaaatggtgagctttctttgcaagatgatggtatagaagaaagattctga

SEQ ID NO: 50047 - DNA, 4053 bp, Caldicellulosiruptor kristjanssonii I77R1B
atgagcaaggaaaatagatgggtgctaagcagagccggagttttcaactactggtactatgacgaggattattttgacttttacgatggcaggatgcttattcgcggtcctaacgcttcaggcaagtctgtcacaatgcaaagttttattaccctgcttttagatggcaactaccacccgtccaggcttgactcttttgggtcaaatgcgcgaaaacttgaagattatgttcttggcgaccagggcccgggtcagaaaaacgaggcaatagcttatctttttcttgagtttaaaaagcagaatatatttgtatccataggtatgggaataagggcaaaaagaggcacaagccctgatacatggtattttgttctaacagacgggagaaggtttggaattgacatcttcttttatgaaaagataggcgaccaaaagattccacttaccagaaaaaagtttgaaaacctcataggagacggcggcaaggtcttttcaagcagaaaagattatatggaggaagtcaacaaaattctgtttggttttgagaatatagaagactttgagaatttgatagagctgatagttcgaataagagcaccaaagctttctaaggatataaaacctgatactgtctacaagatgcttcaggagtctttaccagctctttctgagtcagaccttcgcgcgctttctgactcaatagagaacatggacagaattcaaacagagctgaaaaatcttgagattataaaagatgtgctggaaaggttgaaaaaggtttatgatgagtataacaagcatttgcttgcgcaaagtatatttagcgtgcttgagagcagcaaagaatatttaaacctcaaaaaagaggttgaaaaagctaaagctgatgttgagaaaaatagagagttgaaagctcagatagaagtaaaaatagaagagcttaaaaaagaacaagagtctttgacattgaggcttgaaagtataaaagaaagtgacatattcaagcttcaaaaggagcttttaaatataaaagaagagctcagagaacttgaggagcagaaaaacaaaaagctttcccagataaattctgcttcacaaaaacttgaaaaggaaaggcagcagcttatagctttagaagaagagcttgagaagtataaaagaaaaataaaagatagcgtcgaagaaggcaaattgctaatcgaatctattggttttcaaagattctcagaaacgcttgatatgtatcttcttgagcagggtagccttgacattttaaaggatgagctttcatctttcttatctcaggttgagattgcactgaaaaactatgaaaagctgaatgaaatcaagaaggatttggatggtctttacagggagcttgatatgaacagagcagaatcacaaaaggtggaggaagagatacaaaatcttttgtttcagcttgaagaagtaaaaaatagtctgaagaatgctatttctatttactttgaacaaaatgaggttttcaaagctcaagatgagcagagaacagcaattttccaggcgataaatagttgtgagaagaaaggggattatggcagaatatattcaatcttagatgatatttataacttccattacctttctatctcagatacaataagaagacttgagtttgagatagaagttttgaataaccagataaaagctaagaaagaagagattgagaggattagaagccagaaagatgatgagattatactctcatctcagcaaaagaaggtaagagacaggcttttgcaaaaaggggtgccatttatacctttttatatggctgtggattttaaagacggtgtggatgaaaaaaagaaagctattattgaagatgcgctgagctgtcttggaatcttgaatgctctgattgtgccagagaagtacaaagatgttctttcggaccttatggatgatgaaaaagaaatgattttaagttcaaaacctgcgtatttttcgcacacactaaaccagtttttggaagttgccaactttgatggacctattgatctaaaacaggaagtggcagctgtgattgacagtatattcgccaccgaaaaagatgaaggcgtctacatctgcgaggatggaagatttggcagcggaattttaaaaggtaggacaaccacgtgcgaaaatgcaaggtttattggcattgaaaatagaagaaggtacaggcagatgttaatatcccagcttgaagatgaggtgcagaagctttcagttgaattagataacaaaaaacaggagagaaatgcacagaaaaatttggttgagaagcttaaaaacgagagagacagctttccttcattggttgaccttgacactgcatttgagatgattgaagaaagagaaaaccaaaagttaaaacttcaaaaagagatagaatttttagagaagaagacaagagagctattgagcaaggaaaatagtttaaagcacgaaatttctgtcattgcaacaaaactttctgtcacagctgcaaaggataattttttgaaacttgctcaggaagcacaaaagcttaaaagtgtgctggttgatttagaaaacgaggtcgaaaaagaaaaattggtttcaagaacagtaacatcaaaaagagaacaaactttgcagatagaagaaagcctgcagaatttaagttctgaccttcagagcctgaagacaaggtgggagagcttaagtttaaagaaggctgaaattgaaaaaaggctttcaagcgatgatgctcaaaagctttttgaagagcagcaaaaggcaattgaacgtcttgatagtattcctaaggagatagaaagctttaacagaaatcttcaggaagtaattgcaaaaatttcgcggtttgagacgcagattgagacaaaaggtctgcagcttgagaaagccaaagtggagtacacaaatagccttgaagtgttgaagattgaactttcttttggtttcgtatggaaggaagaaaatcttgaggatgagaccaaacttttagagtttgcaaaggaaaaaagtagctttgctaatgaatttaaatctaaggacttaaaccaggttttgcaaaggctcatctctgcacactatgaagcccaggtgcaacttgcagagtttggagcaaatctgaacctcaaggaagataataaaacgggctatgcaagatatttgtggacagcaaagaaagatggaagggtgctttcgctttatgagtttttagagagaatagattctgagataatcgagaagaaaaatcttattacccagcaggaaagagaactttttgaagaggttttggcaaaggacataggctttaaaatctcacgcaagataatgcttgcccaagactgggtaaagaggatgaatgagctaatggacggcatggacctttcaggaaatcttaaattcaggctttcgtgggagcagaaaaagcaggaacttgaagatgagctttcaacatcagaacttgtaaaacttatcagcaaagaccccgcaacagcttcagatagcgacagacaaaagattgtcaagcattttagagtacgtattgaaagagcaaaaaggcttcaggactcacccgacagttttcgcagtctttatgagataatgaaagagattttggattacaggcagtggtttgagtttcggctctacttccaaagaggtgcagaaaacagaagagagcttacaaacaacgcgtacgacaagttttctggcggcgaaaaagcactttccatttatgttcctcttttggcggcgctatgtgcaaaataccagagcgctgcaagctttgcaccaagaataattgcgcttgatgaggcgtttgccggcgttgatgagaacaacattgaaaagatgtttgaactcatagaaaatcttgaatttgactatatcatgaactcccagattctatggggagattataaaacagtgccaggactttgcatttatgaacttatttcagaccgaagcaaaggctgtgttctcaaagtaaaatacatctggaacgggtacaagaaggtgttggtggagctatga

SEQ ID NO: 50048 - DNA, 1263 bp, Caldicellulosiruptor kristjanssonii I77R1B
atgaaggaagataggcttttgcaggagtgtatagaatacttttcacacaagggttttgcgcgtgtactggagctcatttacaacaaatacaggtcgcttggcaggttttcgggcaggattgtgctggaaaacctacagccagttgaaaaagagatgctttcgcgctatcttggaagaattgtcagcggagacagggtggttatcaatgtaaaagagtttgcacaaaagaggtttgagcagaccaaattttcttcgcttgattttaaagatgtgctatcacacgtattgaaaaaagatgttttgacaaaaaaagaagaaaaagaaaacaaagaaaagcagctttcaagctttcttgagaaattaaaaaaacaagtagaaagtgaaccggctgcggaaaaagtgtatctggttgtaaaagaaaatttcaaacaatttgaagggtatcttaaaaagtattctgaagaaaagtttttgggtattttaaacttatgcataaaagctgccgcaacaaagccagaaaaaatagaaagccttgcagtgtttgcaaccaagatagcgcatgaccctcatttttttgacgaagaccgcgacagcggcaagatatttttaagaattttaagcttgatcaaaaatgctgaatatccaaagtcttcagaggaaaaagctgaacttttgtacatgcacaacatcatcatagatgagctttcaaactggtgtttggtgtatggtataggcgcaatatcagaagatgcagcagaagatgaagcgctcaaaatctttgctttgcaacgaaagccggtgattctgcctctttataccattaaggattacaagcagttttttggatattcaaaaaagattgtagtggtagaaaaccctgctgtgttttcaatgctgatgcaaacttgcagtgatatttctctcatttgtacaaacgggcagctgagactttctacaaagattgtacttgaaagcctttcaaaagaaggctttactatattttactcaggcgactttgacccagaagggcttttgatagctgacaggattattcaaaactatggtgctgttcccatttgcatggatgaagaaagctatcttttgtctttatctaaaaacaagatttctcaaaagaggcttgtgatgctccgaaacgtaaaaagcccagaactttttgatgtatgcggtaaaatgagagaattaaaactttcggggtatcaggagaagattgttgagaggatagttgagaggttaaaaagttaa

SEQ ID NO: 50049 - DNA, 1464 bp, Caldicellulosiruptor kronotskyensis 2002
atgataaatagttttcaagctccacttttgggcaaactcaaatattttgagtacctcacagcgcctaactcagaaagatacagaacaatcatgagatattgttttttgtgccatttggaatacaaaaacaggctcacaaaagaagagatattcacatttttaaaaggttttccacagtttgcagactatacagagcagatgtgcgaacaagatttgaaaagtcttgttgagtggggcaatttgaattcaattcaggacacttcaaagactagaactgttgaggagtttaagaacaaaagatttttatatgaacttacacatatcggacttaagattgaaaggtttttgtttgaacttgaaactcaagaggatacaaaagcagagttaaatcccaagcatattgaaaaaatatttgtcttacttcagcatgtggacagtgtattacaagagccacaaaaaagagcagttgactggtgggatgatctgacaagatcttttgaggagatagaaaatagctattctgaatatatttcaatgttaaagtcgtatgaagctgaaaatctcatgataaaagagaattttttagagtacaaatcaaagcttgtgcagtacctttacaacttctatattgtatttcaaaactatcttccaaaaataagatccatctttttgcaattagaaaactctgaggttgaaaagcttttgaaatatataatcgctcaggaaaaggaacatcccaaaaacatattcaaagacccagagagtatagaaaggaatataaaagcaaggtttgacaatataaaactctggtttgttgctcccaatggtcaggcagaaaaactttctgatcagatacagggacttataaaaaaggtgtctgaccttgcagcaaggctttcagagatgtcgagtgtcaaagtaaacaggcaggaagagtacaaacacttagctaaaatcttctcagagcttgatttggcgacctgtcacaagctttctgcagttgtgtttggtgtgcttttgccgcgatacattgcaaccgaggaaaagaggcagagcgaacttgcaagtcttagcattcttgacgtgccgccaatgaagagtttgcttcactcaagaggaaggcttgtgagagaaaagagcaaagttttgccggcatctgaattttctgaagacaagaaaaaaagatttgaggagtataaaaagaagattgaagaggaagaaaaacttgttgctgagcttataaaagatggaaaaattgagtttgaaaatcttcctgttttgactccacaggtgaggaagaaacttttggtgtggctttcaagaggactatcaacaggttttggtaatacagactcaggtaaaagatttaaagtggtaaaaccaaaggatgggagatattgtgttttaaaatctatagatggtgagcttgagatgccggcgtatgtgattgagtttgttgagtaa

SEQ ID NO: 50050 - DNA, 1233 bp, Caldicellulosiruptor kronotskyensis 2002
atgaaaagtgcacttttaaaattgcttgaaaacttttggattttaaaagaaaaagaggttgaaagctattatgagtgtaaaaacattggcaaagagttaaaagactttatagttaccaaactgggacttaggttctatgctacatctgacatagtcagacttgaaaagataccacttgttccaagagagtacatgggtattctggagtttgaagaaccgaaagactatgtatttttctgtcttgttcttgcatttttagaggacaagggcaaagacactcagtttttgcttgaggatatcacgcagtatatacggtcgaattatccttacgaggaaattgattggactatgtattctgatagaaggtcgcttataagagttcttaagttttgcgaaaagatggggctaattaaaatagatgatggcaatcaagagctttttgtggaaagagctgatgtagatgtactttatgaatcaacagggctatcaaagtactttatgaggacatttcctaaaagccttgttgagtattcgtcggtcgaagagattttaaatagcgagtttgagtttacaaatggactttctgaccaaataactgatataaggagaataaaagcctacagagggcttttgatagatggaattatagactttgaaaatgaagcaccactttattacattaaaaagcaaaagacaacaatttcacaggaccttgaaaagtttgtaccagagcttgatcttcacctgttcaagtcgtttgcatatattagcgttgagggagattacagatatacttaccctgacaattcaaatatgtgcgatgtgttacttttgtgttcaaaagagattcttgaaagggtagaaaagggtgagctgagactttcgcccccacatgagatgcttgaaatttcgcttgaccactttaagctaattgtggagaatgtcaagaaaaaatacggaaatttttggaacaaggagtggagggaaaagtcaacagagaaaatatttgaagagcttttagagtttttacagcttcacaattttgcaaagacaaatgacgatgggtatattgttatatcacctatttttttgagagttgttggtgaatatcaggactatgaaataagtaatcagctttctgctaaaaatgagagtacagtaagatcgtttgaggatatagaaaatataaatgtagatggaggtttatattttgaagatgagcaaggaaaatag

SEQ ID NO: 50051 - DNA, 1263 bp, Caldicellulosiruptor kronotskyensis 2002
atgaaagaagacaggcttttacaagagtgtatagaatacttttcgcacaagggtttttcgcgtgtgctggaactcatttacaacaaatacaggtcgcttggtaggttttcaggcaaggttgtgctggaaaatccacagccgattgaaaaagagatgctttcgcgatatcttggaaggattgtcagtggtgacagagtagttatcaatgtaaaagagtttgcacaaaagaggtttgagcagaccaaattttcttcacttgattttaaagatgtgctttcacatgttctaaaaaaagatattttaacaaaaaaagaagaaaaagagagcagacaaaagaaactttcgggctttcttgaaaagttagaaaaacaggtgtcaaacgacaaaaatagtgaatgtgtatttcaagctgtaaaggaaaattttaaatggtttgaagggtattttaagaagtattctgaagaaaaacttttgaacattttaaaagtttgtataaaagctgctgcaacaaaaccagaaagaatagaaagtattgcggtgtttgcaactaaaatggcgcatgaccctcatttttttgacgaagaccgcgacagtggcaagatatttttaaggattttaagcctggtaaaaaatgttgaatatccaaagtcttcagaggaaaaagctgaacttttgtatatgcacaacatcatcatagacgagctttcgaactggtgtttggtgtatggtataggtgcaatatcagaaaacgcagcagaagatgaagcgctcaaaagttttgctttgcaaaaaaagccggtgattctgcctctttataccattaaggattacaagcagttttttggatattcaaagaaaattgtggttgtagaaaatcctgctgtgttttcaatgctgatgcaagcttgcagtgatatttctctcatttgtacaaacgggcagctaagactttcgacaaagatagtacttgatagcctttcaaaagaaggttttaccatattttactcaggcgactttgaccctgaaggactcttgatagcagacaggattattcaaaactatggtgcagttcccatttgcatggatgaagaaagctacattttgtctttatctaaaaataggatttcacaaaaaaggcttgtgatgctacgaaatgtaaaaagcccagagctttttgatgtatgcaataaaatgagagaattaaagctttcggggtatcaggaaaggatagttgatagaattgttgaaaagttaaaaagttaa

SEQ ID NO: 50052 - DNA, 1512 bp, Thermosinus carboxydivorans Nor1
atgaacgaacaggacttgcggccgattgtggaaacaagctatcttaaccgggaaaatagctggcgctaccgggcgattctgcgctactgttttgtgcagcatgaacgactgcatcactatgtatatccggaagaaatttaccagcacctgaaggcaagccccttttttgccgaatataccgaagaccagctgcagcaggacctaaagcagctggtcgagtggaagaacctcattcctcgccaggagacggggcgggtacatacgattgaggattttaaacggaaaaagtttcgctatcaatgcacgccctacacgattgaaatcgagcggatggtggcgcgcctgcagcagttaggcgacagtttcggcgggtcgctggaggcaacgctgtttgaacggctgcttactgcccttaccaggctgctggcggaaggcccgtcgctgccgccggaagaactttttcgggcctgggatgacctttacggccattttcgttccctggtccagaatgcttccgactaccttgcccatctcaaaagcgataaagtggaagaacagatgcagaccgaggcctttatcgcctataaatccgcatttacccagtacctgcagaattttattctcggcatgcagcgcacggccgccaaaatcgaggccgtattgaaaaaagcgccagccgatagggtgaagctcattgccgaacggctggccgaataccagctcagcattccccgcctggacagccagcccagccgggaagaatgggtgacattgtaccttgaccagtatgccagtttggccgagtggtttttggggcggcccaaccaccccagtgaactcatcaccctccagaacgaaacgaccgatactatccgtcgtattgcccgctttgcccagcggatcagcgagcgccatcaggcttttcgcagccggcgccatgattacctctatttggcggggtggtttgcccgcacggaggggttagacgaagctcaccggctggcggcgatgttgtttggcgtaccccattcgcgtcatttgtatgcccagccgcgcgcgagcgacgactttgacttgacggtttgggccgaaccgccaaccatagtaacgaccgcgccccgcctgcctggtatgcgggaacggagccggccgggagcgctcattgaccgccgcgccgaaaaagaggcggcgctggccgcgtatattcgcgcccagcacgaccgggaaaggctgattgaccagcttattgtcgacaacaaaatcgtgctggccgacctgccggaggttgacccgcatgtgcgcaagaccttgctggcctggattgcccgctgcatgcagcgcgaagaccgcaccatccagacggaagcgggcagacgcatccggctggtaaccgccccgggcggccaccgggtagttttgcgcagtgctgacggatggctggaactgcccgcgtttattattgaattcgtcgacgcccggccggctatgaaggcaggtgaggcccgtggctga

SEQ ID NO: 50053 - DNA, 1167 bp, Thermosinus carboxydivorans Nor1
gtggctgagatggaagaagtgcgggaggcgttggcgctgctactagagaactactggattgttcgggaagaagccccggagcagtataatctcattcgccggcatgaggctcatttgcggcgctattttttggaaaaatgcggctggcggttgatggcgacaccgcaattttacaagctggaaaaaattccggcccagccggcgtcctggatgggtattcaagagtttagccatccccgagactacgcgcttttgtgctgtgtgttagcttttttggaagaaaaaagcgtaaatgaacagtttttgctcagtgatttgtgcgaaagtttgctcgcgctttatccgcacgaagcggacgaacggctcaattgggaaagttacgagcatcgccggtcgctggtgcgggcgcttaagttcgccgtggaacgtggccttgtccgtctggttgacggcgacagcgaacagttcgccctgcgggcggaaagcgaagcactgtatgaagtgacggtgctggcccgctattttctgcgctcataccccaaggatctccatcagtacaagtcgttggccgaactgcagtcagccgagctgtttgacgacgaggcgacaacggggcgcgggcggcgggcccgggtttaccggcagctcttgcttacggcggcgtacaatgctgccgacgcccggccggaagatttcctctatttgcggaatatgcaccgccggctgcgggacgagctggagagctatacggggctgcagtttgagctctataaagactgtgtcctactcactagtccggagcggacgaactggtgcaaacagattttccccttttatcaaagcggcctccacaccgttattctgcacttggccagtttttgccgcgaccgctggccggccggcgagggttggcagcagagctttagcccggtagcatttgagcggctggtcggcgaatgtcgtgaatgctatggcgccgggtggacgaaggaatatcgcacggcaactctcagccggctggcggcggaagtgttagccgaactggaggggtggaatatggcggcttatgatccggaaaccggctttatcacgctcaggccggcgctggcaaggctggccgggcgttatccggacggctggccgtcaaggtccgagccagcagactaa

SEQ ID NO: 50054 - DNA, 4245 bp, Thermosinus carboxydivorans Nor1
atgacaaggcaaaccgcccgggagcgggaccaatggcgcctgagtcgcgccgggctaataaacttctggtattatgacgatgaagaatttcattttgccgatggccggctgctcttgcgcggcgctaacggctccggcaagtcggtgactatgcagagcctgattaccgtgctgctggacggggtaaagacacctgaccggctagacagttttgggtcgcgatcacgccggatggaagactatcttttaggggaaaaagagctggtcaatcgcgatgaacggaccggctatctctatcttgaatacaagcgccgcggcagcgcgcagtacctgaccactggcatcggactgcaggcccgccgcggcagcagtctcgacttttggggatttgtcatcaccgataaccggcggattagacatgatcttttgctatacaaagaggagattaatcccttggacggcacggtcgagcgcgttcctctgacgcgggcggagctggaaagggcaattgggtccggtgggcaggtggtgcgcagccagaaggagtatatggaactggtaaaccgccacatttttggctttgcctcgcttgagcagtatgaggaactgatgaaattgctcatccagctgcgcagcccgaaactgtccaaggattttaaacccagcgtaatttacgatatattgaacgaagcgctgccgcctttgtcggacgaggaactgcgcccgttgtcggaaacgatcgagagtatgcagcgcaccaaagaccagattgagcagctggaacgggacaagcaggccctcgatcggttgtgccggaactatgacctctacaatacctatgtgctggcggaaaaggccgatttggcccacaaagcagagcggcggcttgccaaactgcagcgcgaacaggaagaactccgccagcggctggcggaagatggccgccaattggtcgaggcaagacagcgccgggaggagctaaagcgggaagagaccgtactggcccgagagcgcgaagacctgcagcagcacgatgcttttcgggcccagcagcagaaacagcagcacgaaacccagcttaatcaggttaccgcactgcagcgggacaaggcggccaaactggcggaaaaacagcggcgcgaacggcaggaacagcacaagttgcgcgactatgaggcgagggcggaggagtgccgcgctcgccaggaagaactgctgcaagatatgaacgatgccgccggtcaggcggcttttgccgagcataaagcgctagccggcgcgttggctgaagggaacgccgctttttcattcgccgcttggcgccgggccgccggcagctatagcggccggttgagcgaagtgctggggctgcttcggcgccaggccgagctgcagctgcgccggcaggaaattgacaaagagctgggcgaggagcgccgggtgttggacgaataccgcgctgaataccgtcgcctggaacagcagtttagcgaagcccgcgaccagctgcttgcggacctgcattattggcggcagcagcatggccggtggctgccgctcgcgcaggacgaactacgcgatgcggcgcaagccattcagggcttgtacgaaacccgggcctggccggatgtggaggccccgctggctgccgcttacggccggcgcgtgcaggtgataaaccaggaactgggtcttattaatgccgagctaaaggtactggaagaagaggagcgggagctgacggccgcgctgaatgactggcgcgcccggcgcgagccggaaccgccgcggctgagcgacgcgcaggcggcacgggcgctattggctgaacgcaatattccctttttgccgttctacgccgcggttgagttcaaccccgacgtttctccggacatgcgcgaacggatcgaggccgccctcaccgatatggggcttttggatgcgctcattgtgccccggcagcggcggcaggacattcccccggacatttacggcgccgtcattcagccagcgccacaaattatggcggtgacgctggccgattacctttatcccacgccggttgacggcgtagcggtgacagccgccgatatcgatgacgtactccgcagcattatcgtcgaagatgtaaagctttggggcgaagcggcggaagacggcgcgggcgccgctcttgccgcgaatggcgcctactgcatcgggccggtgacaggcagagctccccgccgccagacggccatgtttattggccggcaggcgcgcgaggcgtaccggcgtcggcaaattgccgcgctggaagaacagctggcggccctggcgcttaagcaggaagcgctttatggacgggcggccgagctgcaggaaacgctggagcgcgccagccaggccaaggccaattttcccgccgatacggcgcttcgtgctttgcaccacgagaagctggccgtggccgccaatatttcgcgtcaggagcaggccgttgaacgggtggacgcccggctccgcgcggttgtccgcgacctgcaggagctgcgcggtgcgcttgcgcaggccagcgccggccttgcgctgccgctgcgggaaggggactatgccgcggccgtgcaggcaatggccgactaccaggccagtctgcacgagctggaattatgttgtcaggactataccaaccttatggccaacgcccggaggtgtcgggaatttttgaccgatatccggcaggaagtggatgacttaaaaggcgagctactggttttggacggccaggccgcccagctgcgtctggccattgcccacctggaaagccgtctgcaggaactgggtgcggacgaactccaggcgcgcatccgcaacgtggccagacggctggacgaaattccggcggaaacggctgcggtgattgaggcgattgtcaccctgcaggccagtatcgaaaccggcgagcggcggctggcgcagctgactgagagctgtgctttcctggaccaggtatgccggtgctggcagcaggcggtggaggacgagctgaaattgggccttgtctatcctggggagggaacgtggccgacggtttcggctattatccaggaaaaaggcggtatcctgaaacaggatcgcctgaaccggacgacggtcaccggccgcttgagcgagtctttttatgccgagaacaatgtgctgatggaataccggatgcagcttgagccgatgacggctgagtcgtacgggctacctgagttgccggcagacgttgatgacagcggcgaactggcgggggaactggacaggctgcgcgagaagcggcagcgccaggtcattaccctggactatgaaggccgccgactaaacccgtatcagctccgggaagcgctggaccgacagcttgacatgctgcggttggtgttgtccgagaaggacaaagaattatatgaagaagtcatcctcaataacatcggtcgtctcatcaaccggcggattaacgccgccgagcaatgggtcgaggatatgaaccgcttgatgcgccagcgtgatacgtccagcggtttgaggtttaagctggaatggaaagccaggccggcggagcaagatgacgagctggatactgaggaattggtgcggctcttacatgccgacccgacagcgctgcgggacgacgacctcagcaaaatcgagcgccattttaaggcgcggattgagcgggccaagcaggccagcgacggcggggggcaaggggcggaaagcgccacgacctttcagcaggcagtgcgggaggtgctcgattaccgccggtggtttcagttccggctgtattatgagcaggccggcctgacgtggcgggagctgaccgaccgggcattctttagatttagcggcggggaaaaggcgatggccatgtatattccgctcttttcggctgtttattcgcgctatcaggaagcgcggtacgacgctccctatattatcactctggacgaagcctttgccggcgtggacgaaaacaatatccgcgacatgtttgccttggtggaacagttaggctttaattacatcatgaactcgcaggcgttgtggggcgattatgatgtggtgccggccctgacggtgtacgagctggtccgtcccaaaaacagcccgtatgtgacggtggtgcgttaccactggaacggccaagcgcggtccttagccgtaaccggcgaggacgatggcggcctgttcgaagtggccgcagccacgcaaacagattag

SEQ ID NO: 50055 - DNA, 1380 bp, Thermosinus carboxydivorans Nor1
atggatcgggaagaactattgacagcagcggccgcttattttggccggccgggttttcaccggctgctggcgggtttggccgctaaatatcggagtttgaaccggttagggggcgtggtcgtactaaacgaccccaccgctgaagaacgggccgaactggaagcattgctgcgccgccgcctggcgcccggggctatccgtgtatcggcccgggagtttgccgccgcgctggcggcgaccaagtttggcgcccttgacccgaaagaagtattggaaagatggttgggcagcgagctaatcagtaaccaggaacgccgccggcggcgctggcggtgcagggcgatgctccttgagcggctaacggcgcggtttcctcacccgttttgccaaaaatggctgcaagcgctgctggccaaagagacgaacatccggtgggcgccggacggcaatgtagcgccggcgtttgtcgccgatttggagctggctttgcaggccatcagccggttgccggacgagtatcagcgcctgcccgtatttgcccaaaaggtgtgcggcgacccgcacgggttggacagcgaccgcgacgcaggcaagctgtttttggtggcgttgcgctttctgcgaaacgaagaagcgaagaccggcccggatccggatccggataacgaccgaccgctgtcgtcagccgaggaagtgggcgagctgttatatcatttccgcttgctgcgcgatgatgtgcttaattttgccacctgctacggtctggccgcctatgccggcgcgagcgaactcatctactggcgggcggcggccgcggccggcgcgcccttaaacattcccttgcgcgagcttgtccgggttacggcagtaaggccgctcgcggcgccggcccggcctgatgatttgtttgacgtttatctggtggaaaactccggggtcttttccgctttgcttgacgcggtcacagcggatagaaacgctgcggccgcgccaactggcgcggcgcgcccgttagtctgcctgcacgggcagtttaagctggcttcctgggcgctgcttgatcgccttattgccagcggtgccgttcttcactattccggtgatttcgacccagaagggctgcagatggctcagaaactattatgccgctatcccggccgggtgcgcctgtggcggatgacgcccgctgattatgcggccgcccggccggcagcgccgctggacgagcggcggctgaaaaagctggccgccgtggaccatcccgtactggcgccgttggcaaagtatattgccgcccggcgcctggcggcgtatcaggaagggattttgccgcttttggcagctgatttagcttgcttggcatcaggtgttggcgggtag

SEQ ID NO: 50056 - DNA, 1479 bp, Bacillus coagulans 36D1
atgaagaaagttgtcgaagcgagttatctgacggcggattcggccgcccaataccgtgtgattttgcgcttcttttatcgacaacatgaaaggatgcgcgactttattgcaccggaggaagtgctcgaatatctgcgttcgctcccggccttccaggattatgcggaagaacagctgcaccagcagttggcccagcttgtgaaatggaataatctggttgctcgccaggatatgaccaatgccaaaacaatcgaagaatataagaaaaaaagattccgctaccagtgcacaccttacacggtagaaatcgagcggatgctgatccagcttgaaaaattgggagaccagttccaaggatcgctcgaacgttcgcaatttgaccgcctactcgcctctttggaaaaactggaagaggaactggaacatccattgaataaacctgcagccgattacatgcatatttgggatgacatttttcactttttcgggaccatccggacgaatacggcggattacatcgcttatatcaacagcgaaaagacgtcacaacggatgcagacggaagcctttctcgtatataaaaaccaatttacggcttatttgcgtgattttatcgtatcgttgcaaaaaacttccctgcaaatcaggggaagactgcgtgaactggatgggcaaagattggcaccgttttttgaaaaactcgtggaacacaggcgccaaattccgcgattggaagatacggcagcttccgaacaagaatggctggaagagttccacgaatactgggggtctttgcggcggtggtttcttgggggcagctcttcccaaagtgaattggaaatgttgcagatgcaaacaaatgagatgatccggagaatggcccgttatgtacaacggatcagtgaacgccagcaacatttccggagccggaaaaaagattatttgcatctggccaaatggtttgccgaatgccgcaatcttgaagaggcccatcaattgtcatcgatcgtgttcggggcgatgacagtaaggcatttgcatctggaggaagcgacaacggacaatcttcatgccgagacatgggaagaacagccggagatgcggcaaatcaagccgcgaacgaaccggtaccgcgagaaaacaaagccgggcgctttccgatctaatcatgaacagaaagaaaaacagcggctcgcctatttaaaagagcgcgaacaggaaaaacagctgattgaaaaatacatgaaaaacggagagattcgccttgcagaaattggaaccgtagaaccgtttgtccggaaagtgctgctcggctggattggaaaatcaatggcagcgaaaaaccatgaggtaaaaacggattacgggatgaccgtaaaagttgcgatgaatccggatcatctcatcacactcgatgcagaagacgggaaactgatcatgccggatgtcgtatttgaacgatcaggaggagagcgctga

SEQ ID NO: 50057 - DNA, 1164 bp, Bacillus coagulans 36D1
atggatccgttacaaatttttgatgaaaaagcggtgcagggaatggacttgttattccatcattattggattttgcggtccgagcacccggactggtaccagctcatccgcgaacgcgaaaaagtgctgcgccgttacatcagcgagaaatttggccttaggctgatcatccatcagcattttatcaagctcgaaaaaatcccagtggaaccggaaagctggatgggcatcctgcattttcaggagccgatggattatgcaattttttgctgtgcgctctcctttttggaaggaaaagcggtggatgaacagtttctcttgtcggaaatgtgccaggaaatccaaaacaattatcctgtagaagatgagctggactggacgctttatcttcatcggaagtcgctcatccgggcagtccaagctctgatggaattcagtctgattcgcacaatagacggcgatatttctaggttcgacacttacgaagaccaggaagtcctatatgaagcgaccgtttacagccgctattttctaagaagctttccggatgattttacaagttatccggactggaccgggctccttgaagaagactggaaacaaaatcaggaagatgaacggcgtaagcgggtgtatcggaaattgtttttctcacctggcctgcaccggaaagatatgcaggaccctgattttctttatatccgcaatttccgcaaccggcttttggaggacattgaagaacacagccattataaactccatgttttcaaaaacactgcatttttatctgccgcagaaccgcggagttaccatcatgtttacccgaatgcaaaaggttccacggatctgatgctgcagttgtctaagacgctacacgaccatccggaaaaatatgtccccaatgaagcgggggaaattttgcttacggaaggcgagttggaagcggtgatagacgatatgcgcacccgccttgaacgcgggtggtcgaaacattttcgagatgccggtacaaaagcggtatgtgcggaattgctcgaaatgatgaaagaatggatgatggcggaaacggatgaagcagcgggactgatccggataaaaccgctgttgggcgtgcttgcaggcgagtatccggctgattttgagaaaggggatgaggaaccgtga

SEQ ID NO: 50058 - DNA, 4095 bp, Bacillus coagulans 36D1
atgaaccgcgccggcttgttaaatttttggtattatgacgatgaagtttttaaatttgcagacggaaagctgttgttgcgcggcacaaacggttcagggaaatcggtgacgatgcaaagcattttgccggttttgctggatgggaaaaagacgcctgatcggcttgatccattcggctcaaaagcaaggaaaatggaagattatctgcttggggaaaaagaagtgtccggccatgacgagcggaccggctacttgtttctggaatatcgaaagcaagggacaaagcagtatatcacaacggggatcggcatgcaggcaaaacggcacaaaactttaaaatcatggtattttgtcctgactgacaaccgcaggatcggctacaattttgaattggcacacacccgccaatcggaacggattccgttgtctgcaaaagagcttgaaaaccgaatcgggtctggggggcatcttgtccattcgcagaaagaatatatggaactggtgaacaaatatatttttggtttccagtcgatggaagcttttgaagatttgatcaagcttttgattcagctcagaagcccgaaattgtcaaaagatttcaagccgacggtcatctatgaaattctcgagtctgcgttaccacctttgacagatgacgagcttcgccatttgtccgacacgattgaaagcatggacgaaacggagcagcagcttgaacagcttgaaagagagcacgaatcggcaaaaaaactggtgcgccaatacgatctttacaatcaatatattttggcagaacgcgcccaaaaatggcaggaggccgaaagcaggctgcaggaagcaaagcaggaggccggtacgttagcagttcgctgtgaatccctgcgcggagtgattgaaaacctgacagaagatcaaaaacagaacgaacagaaacgcgacgttttaaaagcggaacaggaacggctgcagcaccatgaggtatggcgccttgaaaaagaaaaaggagaacaacaggccagggctgaaaagctaaaaagtgaagcagcagatctggagaaaaagtgggaattaaagaaaagccagcttttaaacatccgcttggaacaggaccggttggaaacagaaaacagcaaggatggagccagcatgcaggagacgctggatgaacttgcactggatgccggagaagcggctttcccccagcacgagatcaatgccggagacttttctcggcatgaaggggaagcttttgatttttctgtttggaaacaggaaatcaaacagcacagcggacttttgcaaaagttgcagcaactggccggagaagcggagcggcttcacgagatgcatatgaaattgcagcgccagtcatctgccaaaaagcaggaaattgacgaactccgtaaacaacttgaccatttggagaactggtttaccgaacaaaaacaagaactggaagatgccgtgtttttatggattgaacagcatccggccctcccctttacagacgaacgactccggcgcattgccggcgcgctggacgggctctatgaagaaaaccgttatgaagcggtcagggaagaaattgtgaaggcggcaaacgattatattttgcaagtgcagaaggaaatttcccgcgcggagcaggcgcaaaaggcaaaagaacaggaattggctgaagccgaagaaacacttatgtattggaaaaacttgaaacttgccaatccggagcgccctcaggatacggaagctttccgcgccggtctcgatggagcagggaaacgctatctccccttttatgccgcggtggaattccaggatcatgtgaccgaagcccaaaaagccagaattgaagcggcactccggcagacgggaattttggacagcctgattacggaagaaccggttacacctgtgcacgaccgggttatccgtccaaatccgcacattctcggctacacacttgccgattacttaaagccggatccggataatggcagcccggtatcagccgcacgcattgacgaagtgttgcgcagcattccgcttgaaccgtcggacagcggctttcacattgatgcggatggctctttttcagtcggctgccttgttggccatgctccggatgaaggaccttccaaattcatcggcagaacatcccggaaacggtaccagcaggaaaaaataaaagaaacagagcaaacgattgctgaaatccgcctagcccttttgcaaatcgaaaaccgcctttcggaatgggctaggaaagtacaagaagcagaagattggaaagcgggcattccagatgacaaagatttacgcgaccttgaagaacagattgaaaaaacagcgcgcagcctgaaacaggaacaggaatttctgacagaaattgaccgcgattggaaacaagtataccagcatttgcaaaacatccggctacagctgcatgagcaaggagccggcttgaaccttgtccttcaaagcggtccgctcgatgaagcactagcagctgcgaaaagttatgaagaacatcttcacagcctggagctcatttttcaacgtttgttttccgggcgcaaaatgcttgcgcgtcttgctgcggatatccttgaaaaagagcaggaactcgatgaaattcgcggtgaagagaacatccgccggtcagaatgggagaaaacggtggcaaatattgaagcgattgagcagcagctgaaattgcaggggattgatgaggttcgcgcccggattcaggcagtccaacacgaatataccagtacggaggaaaaaatcagggagatctacgaagaaaagccgaaaaaagaagcagaactagaaaaatgcaccaccaatttgtctcttgccaaaacgcgtaccacgttttggacaaatatggcggcggaatgggagaaactcgtaaaagcagaactttccctcggcttcgtggagagcgagcacacagaaccggaaagcattttgacggcgttttctggtgtgctggaaaagtatgaccgcgcaaaattaaatgaaaacttgacaaaagtttttttcaacgaacagtcaaatttaacagaataccgcatgtctgagtttacaaaagaagcggacccgccggattggttcgctgaaaaactcgatgactattacgaaacgttcaaaaaggaatgggaaggcttgcggggccgccgcctcatccagatggaataccgcggccgcagggtgagcccgtatacggtactcgagtctcttgaaaaagaacttttaaacttgcaaagttatttggatgagcaggacagaaggctgtacgaagatattatcgtcaatacggttggcgtcattttgcggaaccggatccagcgggcagccaagtgggtaaaagaaatggatgcgatcatgagaaaccgggataattcgtccggacttactttttcgattgcctggaaggaaaaaacggcggagtccgaggatgagctcgatacaaaagatcttgtcgcgttgctgcagcgcaacagcaagtttttaaacgaggacgatttgaaccggattacgaaacatttccgctcacggattgcggctgccaaagaactgattgaaatccgcaatgaagggtcgacgctccatcaagttttaaaagaagtgctcgattaccggaaatggttccaattcgtgctgtcatacaaacgtgccggcgagccgaaacgcgaactgagcaataccgcgtttttcaaattcagtggcggagaaaaggcaatggccatgtacattccgctctttacagcagcctattcgcgctatttggaggcaggcagtatggcgccgtacatcatttcgctggacgaagcgtttgccggggtagatgaaaacaatatccgtgacatgttcgaagtcgtcgagcagcttggattcaattacatcatgaattcgcaggcgctctggggtgattatgacaccatatccagtcttgccatctgtgaccttgtccgcccgaaaaacgccaattatgtgacagtgatccgttaccggtgggatgggcataaacggtcgattgtagagaagccgaaagaatcattggcaggcgccaccccggatctgctttga

SEQ ID NO: 50059 - DNA, 1299 bp, Bacillus coagulans 36D1
atgatgaaggatgcgatcgatctgttaaggaaggaaccggggatgctgaaactgttccacctttttaaagaaaaataccgttcgctcggccatattgggggaacagtcagcctttccggttttacgcgcaccgaactggaggcgattgccgggctggccggcacgtcccctgatttgctcagagagaaaaacaaaatttcgctgcgggcatttgaaaaagcgctggcaccgactgttttcggaaaatacacccttgtcgaactgcttgaagcggttttgaaggaaagaattttttccaaagcggaagaggaagaaattgagaaaaagaaagaggaacaatttttggcacggctgacggaaacgatgccggacggaaatgggtggtggcgccggattgccagtaaaacggctgacacgcgttttatctggcatgcatacaagcaggacccggatacgttgtccgcacagctcaaaatggtttggaaagctttcacgatgcttccagaagaagggaaatacgaacggattccgttttattcccagcgtattaccgggaacccgcatttttttgatcaaacccgtttcgcgggcaagctctttatccactgtttgttcaccgaccaatggttaaaagggctgatcgaagaagtgccgaaaacaacggaagaattgaacgaactgtacgcaaatgctgggctgatgcgggatgacttatggagtttcgtgacatgccgcgcatttttggcggaaaccgaaaacggcctgcacccggtctggcgtgaagccgcagctactgggacggtcatgaacgtcccagtgaaagaattattgcagctaacgaatatttggccacgagcgggaaaaaaggtttggatcattgagaattccggtgtcgcttcggctgtgcttgatgcagtgtccgatgcgcctgtgatttgcacgcatggccagttccgcactgctgcctggatcatgctgcaacatcttgcaaaaaacggctgtactttttattattcgggtgatctcgatccggaaggcgttgtcatggcagagcgcctcagcagccgtttcccggggcaaacggtattttggcggatggatccggatgcatactttttgaccctgtcggaagaggatatatccacccggctttccaagctggatgcggttcaatcccctgaactgcttttggtggcaaatgaaatgcggttaaagaaaaaagcaggataccaggaaggccttgccgatttgttgatagaagatttgaagaaaagatggttgagtggaaaagaagcatga

SEQ ID NO: 50060 - DNA, 1497 bp, Pseudoflavonifractor capillosus ATCC 29799
atgcagatggcactacaggcagatatgctggagagtatcccgcaaacaaaatatttgtccgcagagagctatatttcctaccgggccattatgcgcactttctatctagagtatcaaaacatgcattatcagctggataaggatactattctatccctgctgcataaggacgtcctctttgctgcatacactgttgaacagctcgtatcggatctcgatcaactggtcaagtggaagaacctggcccctatacaagatccccacaaggcatacaccattgctgattttaaaaatcgccagttccagtacatgatgacggaagccgccctggaagtggagcgcatgaccatcacccttgaaaatctgtatacacagaccacaggtctttcttccagcgctttccgccggattcaaaaagcactgcacaccgctgagcatctggaggaaatgtctctgaaggatgttggagaatggtggcaggaactccaggaggatttccgccgtcttcgtcaaaatcatcaggattacctgcgggaattttatggtcccagcgcggaaaaacagatgagatctgctgagtttattgcatataagcagcatctgatccgttacctggaagattttattcaggatctccagagcagcgcgacacaaatcagtgcacagcttgaggccttttcagaggcgcaaatcgagcgtattctcacgctcgtttatcaaagcgcactggagattccccgtccccactctgagcagacacctctttggaaggaagaacttcgtcaaaaagagcggggtgtatggaagtctctgacggcctggtttaccgggaaagactccactgccaggcaggtcatggatgtcacaaatgaagtgatccgcagagtggttcaaaatgcggcgattctggtccagatgcaggatatgggtgtcagcaacaaagcggagctgcgccatctgatgatactgttttccaatcttccctccctggaggatgcccacaaactttccgctttggcattcggcgcccagcaggccagacactttaccgtaaatgatgagcgggagacggagcgcattgactcaagcacctacgaagaacgccctctggactattccctgcagccgagagtacggacctataggccccgcatggaccgcagcggatttgcggataagagtgcggaaaaagcggcccagcggaaaaaaattttggaagaggagcgccagcttcgagaaaaaattacacagtacattcaagacggaaagctggatttttccgctttgtccgagcctgtcccacccgaagtgcggacggtattcctgtcgtgggtcgcaatggcgaaccttgcgccggatggctatggccatacccagtatgggcaacgctttatgctggaaaggcgcggaaaccgcacctgcaacctgatttgcacagacggtacactgtccatgcctgactgtgtgctgctttttgaggggaatggaaatgaatga

SEQ ID NO: 50061 - DNA, 1173 bp, Pseudoflavonifractor capillosus ATCC 29799
atggaaatgaatgagtttcgatatctgctggaccgcttctgggtaacacgttcagacaataaggacctgtatttttctgtgaagcgggcgctgccccactaccgccgtctggtaaatgagcaattgggatggaacctgattgtcaatgaatcggtcataaagctggaaaaggttccgcccaaggcaatgtcctggatggggatacaggaatttcaggaaagcctggactactgcctgctatgcggcacactgcttttcctgtctgatttggacgatggggaacagtttctgctctcctctctgacagacgcgctggaagcaatccttgcagaaatacagccaatggactggacccgcttttcccatcggaaatctctcgtaagggttctccggtatgcgcagcagatagggctgctcattgtttatgacggcgtcagcgagggcttcggaagtgatcagacccaggaggttctctatgaaaacaccgggttatcccgtcactttcccgtccatttcgggcgtgacatcatgcattgcagttccattgaggattttgaagcattttcctgggagggtgaggacgcggagcgaggccgccagcggatccagcgcgtatatcggcagctgacattggctccggcactctattggtctgagcaggaccacagcgattatgactatgtgaaaaatcagcgctcgtggatcaatcgctatctgggagaagccataggcggagagctgcaggtccacaaaaacggtgcattttttgttttggaagaggaacatcgttttggcgccgtccatccgcgggattccgcgatctcagatgtggctcttctgctgtgcgcacagcttcgcagccaaattacagccggcatttatccccgcagcgaagacgacaccgttttcctgacccgccatgagcttcagcacgaactgctacaatgccatacacagtacggaaccggctggggccgccgtctgcgggagctttcgctggaaaatctggcccaggaattgattgcctatctatcaggctggatgctgttggaccaacagccggaaggctttgtactctatcccgctgtgggaaaatggattggacactatcccgcccgctatcaggatgggcttagagaggagactgcggatgaaccgctggaagatgcataa

SEQ ID NO: 50062 - DNA, 4047 bp, Pseudoflavonifractor capillosus ATCC 29799
atgaaccgctggaagatgcataagctggggtttgtgaatttctggctgtatgatcacgaggaatttctgataaaggatgggcacatcctgctgcgcggcaataacgcctcgggaaaatccattaccacccagagctttatccccttccttctcgacggcaacaagagcccggaacgactggacccctttggctccagagaccgcaaaatggacttctatctccttggcgacggagaacgggaggaatccaccggctatctctatctggaattcaaaaaagccaatacagaagaatttctcacaatcggcatcggtatgcgggcgcaaaagggaaaggggatcgacttctggggattctgcctgtgcgatgggcgccgcatcggtccagacggaatatcgctctacgaaaagctcgggggacagatgcttccgctgaccaagcagaagctccgcaatctcatcggcgacgaaaacaactgggcagaagcccccggtacttacaagcagctggtcaatgaccgggtatttcaattccgggacattcgccaatatgatcagctcattcagcttctcatcaaggtgcgcacgcccaagctgtcgaaggaggccttccgcccctccgaagtgaagaaaatattgaatgagtctctccaggtgctgacagatgaggacctgtccgcaatggtcagcaccatggaacgcatggacgcactggaggacaccctgcgggatcttcggtctgctatgcgggatgcttccaccatccgcaacgagtacagccgctataatcagtatatgctgggcatgaagggtcaggcctatctgaaggcacataccaaaacactccagctccaaaatgagcttcaggacgcaaaaaccgacctggaaaacctggagcgtgagctgctcgctcaggcgcagcagcaggaagacgcagagcgtcggcttcagcaggccaaggcccagtatgcggccttgggggaagacgatcttgaggcccagcggaaccggatggcggatgaagaaaccacctgccggcagcttgcggaacaattggcggaaggaagtcagcagctggaaacccttcaaaacagcatttcccgctgtgaagtggacttgcggcagcaggaacgggagcggtctgatgcccatgactccgtaaaacacggcatccgggacctgaagcaggagaatgagtgcttgctgcttggagaagagcacgaccagtatgtccagcagctgtcctcacaggataaggaggtggaccatcagaacctcctccttgcgctccagcagcggaaaaaacagatcaatcaggttctgacctgcttccgggaactgtcccgcgccaaagagacctatgacaccgcctgccaggcattggatggggcaaacacagcagagctccaggcgaaaagcgctttgcgtgacgcacagcagcaggaacagcaggagcgggatcatcttctggaggagttctcgcgccgtcaggccagcaatcaggagcttcacttttcccaggaggatacccttaccataaagcggttgatttcccaataccgttcccctgctgactggacagagattcggaatttgattgattcctgctaccgcgaccagctcggccagcttcagggtgcgaaaaaccgtgcagattttgaactgaagaaccggcagaaggagcgaaatgagattcagctggagctgacacggcttcgaaaccaaccggaacccataccgtaccgcagagaccagatacaagcgacccgccttcaactgatgatgcgcggcgtccctcatgcggccttttatgaggtcgtggacttttcgccggaccttgggcaggacatgagggatctgctggaagcgcagctggctgatgccggaattttggatgctctggtggttcaagcggagcatttgggtgagattcaagagctactccaaacatatccggaccgttttcttgttccggagactcccgtcagggatcccattaccagtctggtcccagatggcgacccacgttttcgggaaaccgtcctggcctgtctgcgcggcatctcccggtctgatccggaggcgggaactgcgctgctgccggacgggagattccgctgcggtatgatccatgggtacagctgtgcggagggtccggccggctttgtgggcgctgcggcgcgccgtgccaaccgggaacgtcagctgcgcgaatgcgaggaacgcctggcgcatgctgaggaaatgctgcgggaaaaggaagccgaagcagttaccctcgctcgtcgcttggaacagttgaaggaagaacgggaacagctgccggtggcgctggacttggaccacgcgctggaaatgctggcacaggcgcagagggcattggcggaagcggaagccgaaaaggagcggcgcctggagcaggagcgagcttccaagcaggccgttgcccaattggaacggcagacccgtgagctgagcatggggcttccctacatgcggactgaggaggcctatgaggaggcgctcgactccgttgacagctaccaggcgttgatgagcacgctgacaatttgccacagcaagttcatttttgctgccagaacggttgtgtcaaccgaggaccgcatcgcggaacttcgagatcaggcaagcgcgcagagcaagagcaatgcgcaaatccaaaagcagattgatgtgtcccagtcgcgtatccaggcgatacaggcatttttggagcagccggaaaaccaggccaaggcacagcggcgcacagaactcactcaggaaatggacgcacagcagaagcgcatgaccgacgctgagaagcagtatgctgtgctgaaaagcgaacagaactacaagcgcacgcagtttcagcagcgcaacgaccgtctgtgccgcgcagttatagaagaggacgatttggagaagtatttcctggaggatttgaagctggggctctcctccgtatctgacggtcccatagaacagcaagcccaggaggcctgcggaaaggtccgcccggaagaccgggagcgtacccctgaacgcatcggggacgcactgcgcaacaactaccagcagcacaacaatacgcttctgaaatatcagccgaaaatcgagctggtatttgatgacgccgccaatcagggaatgcttcgtcaacggttgtgcatcagtctgcaatgggccggaaaagaactctcactctacgattttatccaggaattgcagtcaaaaattgatatgaccgctacgctgctggaggaaaaggatcgggagctgtttgaaaacattctggccgagaccatcagccacaagctgcgctcccgcattgaggaaagccagcagtgggcaaagaacatgaccgatctgatgggcacgctgaaaacctccatgggattgaccttccgcctggaatggaaggcaaaaaaggcggagggcgaggcagaactggacaccgcccagctggtcctgctgctgaacaaagaccgggcgcttgtgactcgcgaggacagtcagcgcgtatccacccacttccgcacaaaggttaaacgcgccagacaggaagccgcgctccaggagcagctgatcagctatgcagacctgatccgcgatgtactggattaccggagctggtatgaattccatctgctgtatgagcgggatggagagccgaaaaaagagctgaccgaccgtgtctttaacaagttcagcggcggtgaaaaagccatggccatgtatgtcccgctttttgcggcggtatccgcccaatatcagaaaggcggttcccagtgtcccatgctcttggctctggacgaggcctttgcaggcgttgatgagcgaaatatcagcgccatgtttgaattggtgggtgttttggactttgactatattatgaattctcagtccctttggggatgctattccaatgtaaaaagtctggatatcgccgagctgcaccgccccgccaatgcctcggtggtgaccatcctgcgctatcactggaacggcgctcagcggacatcggaggaggacggccagtga

SEQ ID NO: 50063 - DNA, 1281 bp, Pseudoflavonifractor capillosus ATCC 29799
gtgaataagttgacagcggactgtgcggcttttttcaaagcgcgtcccgcataccaccggatcttggagcttcttctacaaaagtgcaaaagctttggccgctcagccggaacgatttgcttgtccgacgccacattggaggagtgcgatgcggcccgggccctgtttggccgcacattttctcccccacttcgcatcaaaaccgcggattttgaagccgcacttcaggataccccttttcacggcgtcattttaaaagaagtattggagtgctactttgacaccgtaatccagaccaagcaccagctcgtggagcagctggatacccagatgctgcgcatcatcgagcaggcaaaaaacgccgtacagagcgaggtatgccgccgctggctggatgctctctcccataagcaaggcgacggatatcatttgattcggacttctctaggcaaagatgagaatgcagtctatcaggccattttacaggcctgcaaaagtttagagtggttggaacaacaccccgcagagcggccccgtctggccgtgctcagcgcccatgcaacatcagatccccacgcgctggataccacctcccttggcggcaagctctttctgcatctgctgtctgtgcgaatggacaccaagccccccgctacggcagaagagcgggcttcactttactataactgtggtattttgtgcgacagcatatcaagttctgtcacacaggtaggcgttcacttgtatacggacacagaggaacatccggcttaccgcgccttccgcctgcggaacgaagcaggtaccctcacgctcaccaatctggcctgcatccaggcggcaagcagttcctccgggaaggcgtatttggtggaaaaccaaatggtattttctcagctgtgcgatcaggcccctcattttcattctccgctgatctgcacatccggacagccgacggtcgctgtgttccgtctgctggatatgcttgtgtcctccggcacgaagctgttttattccggtgactttgatggaaagggcctgtccattgccttacagcttttggcacgctaccctgaccatctgtatctatggcatatgactgcggcagattatgcgcggtgctgctcagatgtacgtctgagcgaagccagccttgcccttctccgcacctgcgcaaataccgccctcactcctaccgcagaggccattgagcgcaaagggtatgacggttatcaggagctgctgctatccgaattgctggcagacttgattgatacctga

SEQ ID NO: 50064 - DNA, 1524 bp, Ruminococcus gnavus ATCC 29149
atgaagaataaaaatacaagaggaattgatgacatgaaaattcaagaaaaaatgagaaagccgatgttggaggcgaaatatctgaatgtagagaatacagacagataccgtcccatcatccggcttttttatttaaagtacgaaaaattaaaatattggatgtatcaggaggaggtctttgaggagttaaaagaagatccttattttcaggaatatacgatggaacagtgtcagcaggatctggcggcgcttgcatcctggggaaatctgcttacaattcaggatacccggaaagtgacaaccattgaggaatttaaaaacaagaagttccgctatcagctttctgagacagcagttgaagtcgagcgaatggtgatccggattgaaaatctgttgatcgaaggctcttcgctggagccgactttattggagcggcttcggatcagccttggaaggctgggggagatgtcacaggcagaagcggaaaagcggtacggatggtggaatgatctgaacagtgattttattcggttgaatcagaattaccaggactatatgagggaattaaacagtgtaaaagcagaagagatgatgaaaacaaaagagtttcttgtgtttaaagaccggctgatcgagtaccttcgctcgtttgtaaagagccttcaggtaaatgtgactgcgatcgagcagcagcttcgaagtgttgaccgggaggtcgtgaatcagattttacagaaagtgacagagtatgagctctcgattccgagaatggatacagagattgatgagcagatgatttatgacaaaatgaaggggcgttgggaaagtatttccgagtggtttgcaggaaaagacgggatggaatcggaagcaggaaaagtgtttgatacaacaaacgagatcatccggaagattaccagatatgccacacgaatcagtgagatgagcaatcagggctcaaatcggcgggaggaatataaaaagctggcggatatatttggaaagtgcagggatatcaacgaggcacaccggctgtcagcggtcgtattcgggatcgagaagccgctccatctcaaaggagaattgagcagagagacagacagcattaacagtggtgtatatgaggaagaagcatatgccgtgacagtcactcctagagtgcgcacctacaaacaaaaagccagaagaagcggtatcgtcgaccggtcaaaagagaaggaagagatgcggctgctgatgatcaggaggttggaagaggagcggaagctgctcaggagttatatacataacggacgacttgagtttgcaagtcttccggtgatcgaaccgcctgtacgggatatgtttcttctgtggctttcaaaggctctggaaaggaagaatcatcgtgcaaaaacagaagacgggcagatgtattatattgaacgggcagatgtgaaagagtattgtatgttagaatgtacagatggaacatttcagatgcctgcttatacaattgtgtttgaagatggggaatcaaaatga

SEQ ID NO: 50065 - DNA, 1146 bp, Ruminococcus gnavus ATCC 29149
atgagaacgttggaattattattaaaccgccgatggattttaaaatccagagagagggagctttattatcaggtgaaagaagagctttcatcgggagaagagaagaaattcctgatggagaagctcgggtatcaggtggtcgtgaatccgtatatgatcaaggtagaaaagatgcctgcagttccggaaaactggatgggcattttagaatttaaagagccgatcgagtatgtgtttttctgtcttgtgctcatgtttctggaggataaagaggcagaagagcaatttgtattgtcagaattgacagaatacgtacagagccagtatcaggaggagcagatcgactggacagtttaccggtacagacgtcatatgatcaaggttatgaaatactgcgtagccgtcggaattctgaatgtggatgatggaagtgaagaaggatttgcgaaagatgataccagtgaggtattatacgaaaatacaggagcatcccggtattttatgaaaaacttcacgcaggacatcatgggttacacatctgcaaaggagtttgaaaaagaagagtggatcgatgtgaatgaagacagaggaatcgtgcgcaggcagagagtataccgaaagcttctgatgtcgatgggaatgtataaggatgcagaatcagaggaggattttgcctatctgagaaattacagaaatatgatacagggggacctggcagaattatttgactgtgaactgcatgtacacagcagcagtgcatttctcgtgctgggagaagagtgcagactggggaggtgttttccggaaggaaatacactttctgacgttgttcttttgacaaatcaactgatacagaaaagagtaacagagggaaggattaccgttccactggacgaacagatttgtattccaaaggaagtttttcgtgcaattgtggaagaatgcaaggaaaaattcggagaaggttttaataagacgtaccgggagatgacgtttgccgagttttatcgggaagtggaaagatatatggaagagctgatgctgatagaaattggagcagatcatgtgaaaatcagaccggcagcaggaaaaatctatggaaaatatccggaagattttttgaaaaacggaggaagagatgaatag

SEQ ID NO: 50066 - DNA, 4092 bp, Ruminococcus gnavus ATCC 29149
atgaatagtaaatggcagataaacagagttggattgctcgatttttggtattatgatgaggaagaatttgattttctggatggacgtatgctgcttcgaggggcgaatggttccggcaaatcggtaacaatgcagagctttattccgcttctgctggacggaaacatgcgtccggagcgtttggatccatttggttcccgcgccagaaagatggaaaactatcttctggaggagggagatgagagagaagagcgcacagggtatctttacatggagttaaaacgcctggaaagtgaagaatatctgacgcttgggattgggcttcgtgcgagaaagaataaaaagctggaatcctggtatttctgcgtgacggacggcaggcgtgtgggaaaagatttgtttctgtataaagatgtggaaaataagattacctgctcgaagggagaactgaaataccggatcagtgagggcggcaaagtgatggaaacacagggagagtatgcccagtgcgtcaaccgcctcctttttggttttgagacacaagaggaatacaaagagcttctggagcttttgatccagctgcgtacaccgaagctttccaaagactttaagccgaccgtgatcaatgagattttaagcagttcgcttcagacgctttcggaagatgatctgcgtccgatgtccgaggcaatcgaaaacatggacaatctgaaaacaaatctggatacattaagcgaaagcattcacgcagcgcggcagattgagaaggtatacgatcagtacaatcagattgtgctttatgacaaggcgctgttgttttcagatgcagggaaagcatatgagaactgtatgaaaaatggaaaacagattacggaagatctggcgattcatatggaagaactcaggaaggaagaacagcattatgaagctctgaaacaggaagaggaaattttaaaagaggaaaaaacctctctggataaaagtgatgcggcacagttaaaagagcaggagagtaagttgaaagcagagcttctggagagagtaaaggagcagcagacaaaagagaaacaggaacaggaaaagaaagaaaaacagatcgatacagaagaaaagataaaagcagaaacagaaaaaacagaacgtatctgggacgagattgaaaattgtctggaagagatggaaacagaactggaagaaattccgtttgatgagtttacatttttgaagaatgatatcttacaggatcgggaaaaagaacagagtttttcttcacatcaccagcttttgaatgactatacaaagaaagtagaacagggaaaagaggctcttttggaagaaaagaacagccaggaaaaatatgatcgctgtcttctggagttggatgtctgcagggaggaaagaaatcttgcagaaaaggaaatgcagcaatatgagaaccttctgcatgagacaaagtcagaattgacagagcagatgtatttatgggaaaaacaaaatcaggagcttcaccttcttccggagaccatgcaggaaatctcaaggaaaatagaaagctatgaaatgggaagcgattattcagaaatccgggaactggccaggccaaagctatatgaactggaacgacagttttctgagaatagaatggtactggagcgaaatctgcaggaagagcaggagcatctgtatcaggcagaaacagagttggaagagtggaaaaatcaaaaggatcctgaaccagaacagccggattgtgtaaaggcaaaccgagagctgctaaaggagaaaaaaattccgtatttccagttttataagaccatagaatttgaccagatattagaggaagagcgcagaaatcatctggaagaagcattgctagagatgggcatactggatgcgctgattgttcctaaggagtatcgggaacaggtctatgctctggacaaaggagtatgcgatcgttatctgttcagcgatgtggcacatgtcagggaaagtctgcaggaagtgctggaagtggagaatggggaaaatgatattttgttttatcagaatatttccaatattctttctgcgattggatttggtgatacacatgcagagcacggagaatcctggattgatgccaatgggaattaccgcatcggcgttctggaaggaacgatcaccggggaatatcaggcgcgctttatcggggtgcgtgcaagggaaaagtaccggaaggaaaagatagaagaattgaccggactctgcgaacagctcagagccagtgttgaagatttagaaaaacaattggcagaaaacagagcgcggacagaaacattgcaggcagaatggaagtcattcccgggagaggaagatttaaagacagcggcaaaagaattttctgatcgcgaatataagttagaacgaacgaataaaagactctgggagcatcaggaactggcagaaaaagaaagaaaagcactggatggggtacgcatcagggtacgggagatctgtggaaaatgttatctttcgccaagattggatttgtttacacaggctcttttggcattgcacagatataaagaaattctttcccagcttcaggttgcgcatggcaagtatcaaaatagtctccggtatatcatgagccagagagactatctggaagaactggagcttgatctggatgatattcgttacgaattcaatcggatctgtctgaaagtcagagaagtggaaggatttcttgcgtccgttcaaaagcagctggaactgacagattatgaagaaatcaaagaacgactggatcattgtgtagaacggcttggaaaacttccgggagagcgagaggcctgtgtcaggaatcaggcggcacttcgaaaagagacggaagtactgcaggaaaaagaaagagaaaatgaactcagacaaaaggaactgcttgagaaaaaggaaaaatatcagaatgtatttgaacaggaatatcagcttgggtatgtagagcgagtatttgttgttacagaggatatggaagatcaggcgaaaaaaatctgcagccagtttgccggaagctttggaaacaagaagcagagcgatctgtttggaaatcttcaggaagcctatcatcagaacagaggatatctgctggattaccagattacactgcagtccctgtttgaagaactggatggagagggcagttttctggacgtaactgtgaagcggattgatattttggcaaaataccgtggaatgccggtaaaatttaaggaattgattgaaaaaatgaatgaggatgccgaagtactgaaacgtcttttaagtgatcgagacagagaattgtttgaagatattctggcaaatacgatcagtaagaaaattcgtggaaagatccaggccagcaagcgctgggtggaaaagatgaatacactgatggaatccatgcagacatcaagtggattaaagctgagtctcagatggaaaaataagagggcagaaaaggaagaacagctggatacaagagcattggtagaattattgcaaaaagacgtggaaattatgcgtgaggaagaggtagaaagtctttccagacatttccgttccaaaattgaagaagcgagaaaaatttccggggatatgggatcggttcaatcgttccatgccacaatgcgggaagttctggattatcgaaaatggtttgaatttcagttggaatgccagaaaacgggagagaaaaagaaagaattgacagaccgtgtattctttacgtttagtggcggtgagaaagcaatggcaatgtatgtcccgcttttttcggcagtggtggcaaaatatgcgggggcacgtccggatgcgccgaagctgatttcactggatgaagcgtttgccggtgttgatgagaccaatatcagggatatgttccgtctgatggtcgagtttgaattcaactttatgatcaattctcagattttatggggcgattacgatacagttccggggcttgcaatttatcagttgatccgtccggaaaatgcaaagttcgtatcagtgatccgctatatctggaatggaaaagtaaaggtgatgcttacaggagaggaatcgtga

SEQ ID NO: 50067 - DNA, 1320 bp, Ruminococcus gnavus ATCC 29149
gtgaaagcagaagagaaacagaagttgatgcaggagtgtttacagtattttcgtgagcgccctgtgtatgaaaaagtcttccaaaaaatgagaggaaaatatgagagcctcggacatataggcgggaaagtggtattgatcgggttaagccttcaggataagagccaattgggcggatttttgcagaaggattacaccgagaatcagtctgttaccatatcagcggaagcttttgaaatctgtctgtccaaaagcaggttttctgatatttctctggaggaattgctggatgcttattttgggaaaaagctgacggtgaaaaaagaagagaggcgaaagaaacaggaagaaagagatgccttttttgcggaagtccaaagtgggtatgaggacacgacaggaggaagatggcttcagaatacgttgaaagagcacacaacaggctatgaaattttgcagcagcaatacaacagtgctccggaaattctgcgggaaattctgaaatatgtgtttgaggcagtaaaacagcttccgcgaatggaagaaaaagaacttttaccggtatttgcggcaaagctgacaggagatcctcattattttgacgcaagcacagtggcggaaagattgctttttatcattctttctgcctgttggcaggaaacgaaagacagagaattatcagaagcggaaagaaaaaaccagattttttacagggcgggtattttaaaagatgatctgtcaaatgatacgcttgtctatggaatccgagcatggaaacacaatggaaatcttcataaaggaatcgaaggattttttcaggaaagagaaccagtccgcctgacgcttcgaacgattgggacgtttggaggggtgcatgcagaaagagagaaaatttatctttttgaaaatccggcagtattttctgtttttgtaaaaaaatacccggactgtgcagcaatctgcggaaatggacagccaagacttgcaacacttcttctgctggattttctaaaggaaaatcatagtttttattatcatggtgattttgatccggaggggcttctgattgcgcagagattgaaagaacggtatggagaaagtatctgtctctggaattaccgggcagactggtatgaaagatatctgtcggatgtaaatctgagcgaagtgagaatgaaaaaactggagaaagtatatctcccggaattgctggaagtgaaaatgcagatgcagaagagaaaaagagcggcgtatcaggaggcgatgctggatatgttggaacccgaaaaaaatgagtggatcacaaggagtgtgaagtga

SEQ ID NO: 50068 - DNA, 1491 bp, Geobacillus sp. Y412MC52; identical to SEQ ID NO: 49884

SEQ ID NO: 50069 - DNA, 1197 bp, Geobacillus sp. Y412MC52; identical to SEQ ID NO: 49885

SEQ ID NO: 50070 - DNA, 4062 bp, Geobacillus sp. Y412MC52; identical to SEQ ID NO: 49886

SEQ ID NO: 50071 - DNA, 1221 bp, Geobacillus sp. Y412MC52; identical to SEQ ID NO: 49887

SEQ ID NO: 50072 - DNA, 1506 bp, Rhodococcus erythropolis SK121
atggtggaagaaacgagtgcgcccgattacgccgcgtacgccgacaccaatcgactgaagctgttttcgttcacgatcgcggaaaaacgggccgagtacctctgggtacttcgtgccttcgaccatgctcgcgccaactacaccgtcctgctgcatgccggagccgtcgcgcaaatcctcgagaagatcggtggatcggatccggcggccgatctgtcggcagcagaggtcactcccctgttggatcagctccacgtgtgggagatcctcgagcgcagctacgacggcacccgcgcggccacgctggccgagtaccgcaatcgccacttcgtctaccagttcggtcaggccggataccaggtctatcgatcagtcgaagacgttctcgccgcacgcctggactcggcgtcgctctcgcgtctcgctctgccggacctgctcgcagacatgtccgaactcgccgaggccaaccgacgctccgacggcgatctgatcttccgcaagctcaagcgcctcgactcgacactctccgacatggccgatcgagccgcgcacttctatctgaccctcggggacctcgtacggaccacggagatcactccgcaggctttcctcacgcacaaggacgctctgctcacgcacatgcgggagttcagctccgatctggcgcgctacgcccccaagctcaaggaagcgatcgagcacgtcgaatccaccggggtcgatcgcatgatccgcctcgccgccgccagtgacgaacgggtgttcgtcccgatcaccgaacgcgaagacgactgggctgcgcgctggcgaggattgaccgcctggttcgtctccgcggaatcggggatcagcgagtccgagcgtctacgtgagggcacgatgagcgcgatcgccgcggttctggcgctccttcgccgcgtcacggaaacccgtcgcggcggcgtcagccgcgagagccagctccggcacctcgccggctggttcgccgccacgccgtccgaagacgcagctcatgctctgttccaggcagtgttcgacctcggccgtccacgccacctctcgatggtgcatccggacgcagacatcatttctcactcacgttcgtggtgggaggcaccgccggtcgagatcgcgcgaacactcgccgaaaccggccgcccgccctcaccaggattgccgagcaaagtcgcccgcaacgacggcagcatccgccgcctacgcgaagagcagttggcagcgcaacgtacgcgcagcgccgcggcgcaatcactcgcgtccaacggcgtctatcagcgtgaactcaacgagcaggagaccgaagttttgctgagtctgctcaatgcagcactgaccgcgcgcgttccggtagtgggacgcgtcaagagctccaccggtagtgagaacggggtgaagctgacgctcagtccctcggacggttcgaccaccatcaagaccgcccgcgggcgtatgcacctcgacggcatcgaggtcagtgttcgatga

SEQ ID NO: 50073 - DNA, 1443 bp, Rhodococcus erythropolis SK121
atgagagctcgcgagatcacgccccttgccctcgactcgtatcaacgcgcggcgcgagtgatcctgtccaaccacctgatcacctcgacgtacccggatcgaattgcgttgccgctcttgcgccggtgggccaccgagctgcgtgacgacctactcgaactgttcggctaccgcctcgaggtgacggagaccaccgcgcgcctgttcacggtgtcggatcgactcaacccgtcggcaccggcccgaactgcctccgagcgaaccttcgatcgcacgcgttacgcctatctggcactgtgcctggccgcgttgggccgcgccgggaaccagatcacgttgtcggagttggccgatcacgtcgcggccgacgctgcacaagtcgacggcgtcgaactctccaccgatcgtgcgtcggaccgcgacgccttcgtcgacgcagtgggctggctcggcgtcagaggcgccatcgcactcgccgacggtgacgcaaacggctgggcgtccaatcccgaagcgggagaagcgctctacgacatcgaccgttccgtcgtcgtagcgctgttccgtccaccgcgcgccctgcagcacctgcactccatccgcggactcctggccacggagacctcgagcgctgccgaggacgacggaattcctgtggacgcgaaagagatcggacgccgagtgcgtcgggcgctggtcgagcggccggtcgtactggcgggtgaactcgatcagcacgaattgatcgccttggcgcagcccaagaccgcgtcggaagtcgaactactgacggggttggtggccgagcgtcgcgccgagggaatcgcgatgatcgatcccaccggtcgcctctccgacgtccgcttcccgagcaccggaactatcgcccaggtagctctactcctcgccggcgagattgccgaccgcgtactcgacgtcgacgctcctgaactgccgaaacttccgatcccgcacgtgtcggacgatcacctgatcgaacaactcgatgccgccatcccggaggccgggatcttcgaggacctcgccgacgaggacgacgacttcgtgttgcctgccggcgaaccggccgagcccccggaacccgtcacgtacccgaaaatcgacgacgactggctcgccgacaaggtcagcgagttggtggaccagttcggacgcacgttcgcagcgcaatggcaggccgatcacaacgggctgcgcaagcaggcgctcgggttgctgcaacgtctgcgcctgacgcatgcggtcgacggcggcgtactggtgttgcccgtccttgcccggtaccgcgacgtcgtggtctccgtgcgcgaacgcgatcctcagatcgacttcgcggtggacaactccgcaccggatccggtcgacgaattcggccccgaaccttcccccaacggcgaactatcagaggtagagaacgtatga

SEQ ID NO: 50074 - DNA, 4176 bp, Rhodococcus erythropolis SK121
atgagcaacgcccgcttccgacctactcgggctggaatcatcaacctctgggattaccgagaccaagagttctcgttcgccgacggtcgactggttctgcggggacccaacggatccggcaagaccaaggccctcgaggtcctgttcccgttcgtcttcgacggccgcatcgaaccgcggcgcctcaacccgttcgccggtgaagagcgcacgatgaagtccaacctgctctaccggggccaggacagcgcgcactcctacgtgtggatggagttctgccgcggctccctcgaagatcccgagtcggtgaccgtgggaatcggcatgcgcgcaacacgcaccaacgacaaggtcacccgctggtacttcgtcgccgacggccgcgtcggagtcgacttctcgctgatcggcaacgacgatcgtcctctcaccaagaagcagttggccgaacaactcggcagcgattccatcaccgaccgtcccctcgactaccgcacagccatcgacgcgcgaatgttcggtctcggtgtgcagcgctacgaccagctgatcaatctcattctcacgcttcgccgcccccagctcgcgaagaacctcgacccgaagggcctttcgcaggcactcaccgacggtctccgtccactcgacgatcagttggtcctcgaagctgcgcgttcgttcagcgacatggaggaagtcggccgcgcgctcgaggggctcgcggccgccgatcaggcagcccagagtttcatcggggtctacaccaagtacctgcgtcagcagtctcgcggagagatcgaacaggtcagcacccgcctcgcagcggtcaccagaggtgttgccgccatggacgagtcgtcgctcgcccagacccgcagccgtgaggcgcgggcagcagccgaggagcgcttcaaccaggccgagcaggcactcgagaacgcgcgcgccaatgtcgaagcactgcaacgctcgagcgcgtacgaaggcaaacagcaactcgacgacctcgcccaggccgtcgcgacgctcaagctctcgaccgagcagcaggcagacaagtcccggaaagcgcaggccgcacttgctcaacgcggcgacgaagccgacaaggctgcatcgtcggtcaagcgtgcggccgaagcactctcgcgcgccgaggacgaacttcaggcagcagccgaggacgccggcatcgtctggactcccctgcccgacggctcacgcagtgaccagatcacggcagccgtccgtggccatgccgaggagcgtgacggtgacgtacgcgtcgtccgcaccgcactggcgaccgtcgagaaggcggcgaccgaacgaacccgggccgaaaacagctctcgccgtggacaagagctgctcgaagcgtccaaggccgcggtactcgagggcgaagctgccgtggaactcgcacgcagtcagtgcgccagcgggctgcgcgcgtggtggaccgatcactcctccctgttttcggctgtcggcgccgacacgtcgctgttcgaagctctcgacgcggcgctcgccgaggtcggcgacgaagacgctccggcgctgtccgcagttctcgccgagcacaccgaggccggcaccgagacgctgcgcgagcgtcgacgtgaggccgaagctgaaatatctgcatcacacgcctccatcgcggctctcaaatccgagcgcaaggccgtctccgcggaacacgacgacgctccgcctgccttccacgcacgctccgacaaccgcaatgaactgggtggtgcaccgctgtggcagttggtgcgcttcgccgattccgtcgaaccagacgtggccacgggaatcgaatccgcactccaggcggcaaatctgctcgacggctgggtctgcccggacgagaagattcccgagcacgtcagcgagcagttcctgacggctctgcccgtcaagcagcgtccgaagggacgaacgctggccgacgtcctcgaggtcgaaggcaatgccgacgtacccgacgctcgggtacaggacattctcgcgtcgatcagtctcgtcgaggcgccgggcgactccgacgcaagcgtcgcgatcggcgtcgacggccgcttctggcagggcgtcgcgcgtggccggcacgtcaaggccgacgccgagtacatcggcaccacagcacgggcgcgtcgacgcgaggctcggatcaccgagatcgacgcggctctggaagaacttgccgcggcagtcgatacggccaaggcactggtggcgcagaccaacgagcaactgagccgaatcaactctgcggcaaaggaattgccgaagacaggttcgatcctgcgcgcactcaagacggtcaccgaatctgccggcgcactccgtactcgctcggaggccacggaaacggcacaacgcgaactcgatgcggcgatcgctgatctcgcggcgaaggaaaagcaactccgagcgacggcgtcgcagcaccggaccccggatatcggccgtgaactcgactccctcgcggcggcgatccgtcatttcgagaagcagggggaactggcgctgcgctgccgacgggagcatgccaaggaagtcgaactcgaacgcgagtctcgcgaccgtctcgacgaatcacgcgccaatgcggaggaattcgccgaggaagccgccatcgccgaggagagtctgctccagcaggtgcagcgtctcgagacgctgcgcgacaccctcggtgccagcgccgagcagatcgacctggacctggcaaaagcccgcgcgaagatcgaagaatgcaaggtcgaacagcgtgcggcgcgaaaggcgtacgacgctgccgtcctccagatcggcacggcggagggtgcgtacaacactgccgtggagaccttgcgtcacaccctgaccgaaacccgcagtgatgcagagcgactcgcaccctacgcgcgcccggaccttctcgagttgttgggcgtcaaggaacatctgagctggccggcaagttcagcggcgtggatgagccccgatcagttggtctaccgcatccagaacgaagatcgcagcgaggacgcagcccacccgcctgtcctccccgaagacgtcgacaagttgtaccgagcgctcgaggctgcgacctcggcagtccgagtcaccgacggcgcccgaaaggcaacccgcacggcactgacctcggcgctgcaggacttcgacgcgcaactcgcagcagccggacaggactaccgtctgcagtgggatgcaccggatgggctgaccgtcgtacgagtccaggacgatcagggctattcgtcgatcggcgagttcgcaacgcggatccacgacgctcgcggcgatcaggagcagttgctcaccgaatccgagcgtcgcattctcgaagatgccctgttgaccggattggctcagcagatccacgagcgcacggtcgacgcacgcgagttgatcgcacagatgggcaccgagatgcgtgagcgtcggatgtcctcaggcaataccatcggcgttcactgggtgctcgccgacaacctcgacgacagctcgcgggcgatctccaagctgctggatcgagacgcgtcggccctcggcgtcgatgaactagctactctgcgagcacatttcgcgacgcagatccgtaccgcccgcgcggcgcaccccgaacgctcgtacccggagattctgtcctcggcgctcgactaccgtcaatggcgcgtgttctcgttcaccctcatcagcggtgagggcaaggaagaccgtcttaccgtcgcgcggcacagcgcgctgtccggtggcgagcagtccgtctcgctgcaccttcctttgttcgccgcggcgcacgtcatgttggactcggccgacccgcacgccccgcgtctgctggcactcgacgaggccttcgccggtgtcgacgacaacggtcgcagcgagcttctcggcttgagcgttcagttcgacctggacctcttcatgaccggctacgacctgtggatcacgtacgcagacgtccccggctgtgcgcactacgacctcgcgcactccacggccgaacaggctgtcagcgccgcgctgctggtctggtcgaacggtgagctgctcgccgagcacgacggaacggatctggcgagggcattgggctcgccgctacggcgccgggtgccgacacccgccgaaggtgcgttggactacgcctag

SEQ ID NO: 50075 - DNA, 1488 bp, Thermoanaerobacter brockii subsp. finnii Ako-1; identical to SEQ ID NO: 49833

SEQ ID NO: 50076 - DNA, 1152 bp, Thermoanaerobacter brockii subsp. finnii Ako-1; identical to SEQ ID NO: 49834

SEQ ID NO: 50077 - DNA, 4167 bp, Thermoanaerobacter brockii subsp. finnii Ako-1
atgagtgaaaaattagccgaaagatggatgattaacaggattgggcttcttaatttttggtattatgatgatgaaatatttgagtttgcagatggaaggcttcttttaagaggtgctaatggttctggaaagtcagtgacaatgcagagtttcatacctttagtattagatggcaacaaaagtcctgaaagacttgatccctttggctcaaaggcgagaaagcttgaggactatcttcttggggaagaagaggtaagtgggcttgatgaaagaactggctatcttttcatggaatttaaaaaagagaaaaaagacagctacattacaataggcattggactaaaggcgaaaaggcatcaaaatatggacttttggggctttgtaatacttgacggcaggcgtataggtatcgacttctttttatacaaaatggaaataggcgatgacggcaaaagagcaaaagtcccacttaccaaaaaagaacttaagaatagaataggtgaaggcggagaagtagttgaaagccaaaaagagtacatggaaatggtcaataaatacatttttggctttagttctatcgaggaatacgacgagctcataaaactgctgatacagcttagaagtccaaagctttccaaagacttcaggcctactgtgatatatgaaattatgaaggcttcactgccttcactcacagatgatgatttgaggcctctttcagaaaccatagaaaatatggaccagattaagatgcaccttgatgttctttacaggaatatggctgcagtaaaaaagcttaaaaatgagtacgacaactataacagatacattctttatgaaaaggctggggatttagtaaaggcatacagcgatttatacgcatcaaaaaaagaatacgataatttaactaaagatattgaaaattacagaagtacaatagcaaacttaggaaatgacatcatttctcttgaaagtgaaagagaagccttaaagaaaaaggaagaacagctttcaagtggtgatgctaaaagaacccaaaaggagttattagaagaagaggatcgatataagcagtatttggaggataagtctaaaaaagaagaagaactccggaataaacaagataaatattatggtttagaaagaaagataaaaaacactgaggaacaaaaatacaaactggataaagaactacaggataaattagagaatatatcttcaattgcacaggatatagatttcatggaacatgagttttctgtaagtgaacttaaaaaagtgtatggaaaagaatttgattttacttattggaaaaatgaattaaaaaagcataaagataaaataaagcgtgcaatgagtgcattgagagaagaaatagaagcaaataaaaggtatgatgccgcacttaaagagcaggaaaggcttaaaaaagaaagagaagacagggctaaaaagcttaatgaggcagaaaggctttttgacgaacaaaaaagagaatacgttgaaagagtttatagttggtcgcagggcaatgcagaacttaagcttttaagtagccaactggaaggcttaagccgtgtcatactggcgtatggagaggataaaggatttgacgatattttggcttttgtgagaaaaccctatgaggaaatactaaatggaattcagcaagaaattttaagattacaaaatcaaagagaggtaaaagaaaatcagcttcatgagaaagaaaagttattggaggaatggaaaaacaaaaaagaccctgagcctgaaagagatgaacaagtcataaacaacagaaaaaggcttaaagaagctggaattccttacattcctctttacatggcgattgattttaaagaggatgtggatgaagagacaagaggcaatatagaagctgcgatagaagacatggggcttttggatgctcttatcgttcccaaagaatattttgaaaaagctcttcaaatggacagcaatatggcggataaatatgttatgcctggaagctttaatatgatgttaaatgtatctcaatattttaaagtagttgacaatgaagaaggagtttcaccagaagatatttcggatgctttaagcaatatatttgtatccgaagaaagcgggacaacctatattgattcaaatggcacatatggaataggagtaataaaagggaaagcgcgggataaagttaaatcaaagtacatcgggagtgagtctagaaagcgctacagagaagagcttattaaatctatacaagaagaaatacaggctataaaagctgaaatatctgcaatcgatgaggaaataaatgcaaaaaaatcaaggatacagaggctggattacgaatattcggcatttcccgggaaagaagatattgaagaagcatatagatatttaaaaacggcaaaggctgattacgaatacacctctcataaactggatgaacagctttttacagttaaaaactgttttgaggaccttcagaaaaagaaagctgttgtaagagaattgacatctggcataaacatacatccagatattgatacctattcttctgcgtatgaatatgcggaagaatacgcttcagggcttaatgaagtagaaatactatacaacaaatatgttttgcacatttcaaacgaagaaatgttattgcagcaaaaacaagatttagaatacgatattgataacttaaagtacgaaatagacgtactggaaaacaaaatacagagttctgttaagaaaattgagatgctaaaagagacattaaaagaacttggacttgaagaaattgagaaagaactagagttttgcctaaaaaggctggaggaaatacctaaagagattacaaataaatcagccgaaaaagcaaaacttgaggagcggctacagagaagcttaaaagaccttttaaacattgaagaagagattcatcttaaagaggaaatttacaatattgttgaagagggtttaaaaaaggaattagcacttggctttgtcaagcaagacgttgaaatggaggatatgttaaaattaagtaaaagcattctttctgaatacaaaggcttttttgacaaagcgggctttgacagagaaaagtttacagagagacttcaaaatgtgtattttgaaactcgcaacgaacttttagaatatggactttcaattggcaatatctttgacgaagcttgtgagggagacaatgaaagaataaaagaagcaaagagtaagcagagaagacttaatattacggcaaatataaatggtaaagttgtttcattatatacgctttattctaatattgaagaggatataatggcgaatgaaagccttttaagagagacggataagattctttttgaagagattataatgcacaatgtgggaattaagataagggcaaagatttttaaagcagaagaatgggtaaagaaaatgaacaaactcatgtctgaaagggatacttccagcggacttatgttctctattgagtggagaagcattcctgcttccaatgaagaagaacttgatacaaaggaacttgtggatattttaaaatctgatgctgatatgctgaaaaaggaagtcttcgataaagttgtaaatcattttaggtcaaaagtagaaagagccaggagggcaatggaggaaaaaaacaatacagaaacttttcacaagattatgaaagaaatattagattacagagattggtttgagtttaagctttactacagaaaagaaggggaaagtcgcaaggagcttactgataatgcctttaataagttgagcggtggagaaaaggcgatggccatgtatatacctttgttttccgcggtttactcaaggtatgagggagcacccccgactgcacctcgcataatatctctagatgaagcatttgcaggggttgatgacacaaacataagggatatgtttaaactgattgaagatctaagatttaattatataatgaattcgcaggttttgtggggagattatgacactgtccccaagctttcaatttatgaacttataaggccaaaaaatgcaaaggctgtattggtcatgaagtatttgtgggatggaaaggtaaagcatcttatacttcctgaaaaagaggaggttgccgctcttgaggtgggtgctgtaaatgaataa

SEQ ID NO: 50078 - DNA, 1296 bp, Thermoanaerobacter brockii subsp. finnii Ako-1; identical to SEQ ID NO: 49832

SEQ ID NO: 50079 - DNA, 1488 bp, Thermoanaerobacter brockii subsp. finnii Ako-1; identical to SEQ ID NO: 49833

SEQ ID NO: 50080 - DNA, 1152 bp, Thermoanaerobacter brockii subsp. finnii Ako-1; identical to SEQ ID NO: 49838

SEQ ID NO: 50081 - DNA, 4167 bp, Thermoanaerobacter brockii subsp. finnii Ako-1
atgagtgaaaaattagccgaaagatggatgattaacaggattgggcttcttaatttttggtattatgatgatgaaatatttgagtttgcagatggaaggcttcttttaagaggtgctaatggttctggaaagtcagtgacaatgcagagtttcatacctttagtattagatggcaacaaaagtcctgaaagacttgatccctttggctcaaaggcgagaaagcttgaggactatcttcttggggaagaagaggtaagtgggcttgatgaaagaactggctatcttttcatggaatttaaaaaagagaaaaaagacagctacattacaataggcattggactaaaggcgaaaaggcatcaaaatatggacttttggggctttgtaatacttgacggcaggcgtataggtatcgacttctttttatacaaaatggaaataggcgatgacggcaaaagagcaaaagtcccacttaccaaaaaagaacttaagaatagaataggtgaaggcggagaagtagttgaaagccaaaaagagtacatggaaatggtcaataaatacatttttggctttagttctatcgaggaatacgacgagctcataaaactgctgatacagcttagaagtccaaagctttccaaagacttcaggcctactgtgatatatgaaattatgaaggcttcactgccttcactcacagatgatgatttgaggcctctttcagaaaccatagaaaatatggaccagattaagatgcaccttgatgttctttacaggaatatggctgcagtaaaaaagcttaaaaatgagtacgacaactataacagatacattctttatgaaaaggctggggatttagtaaaggcatacagcgatttatacgcatcaaaaaaagaatacgataatttaactaaagatattgaaaattacagaagtacaatagcaaacttaggaaatgacatcatttctcttgaaagtgaaagagaagccttaaagaaaaaggaagaacagctttcaagtggtgatgctaaaagaacccaaaaggagttattagaagaagaggatcgatataagcagtatttggaggataagtctaaaaaagaaggagaactccggaataaacaagataaatattatggtttagaaagaaagataaaaaacactgaggaacaaaaatacaaactggataaagaactacaggataaattagagaatatatcttcaattgcacaggatatagatttcatggaacatgagttttctgtgagtgaacttaaaaaagtgtatggaaaagaatttgattttacttattggaaaaatgaattaaaaaagcataaagataaaataaagcgtgcaatgagtgcattgagagaagaaatagaagcaaataagaggtatgatgccgcacttaaagagcaggaaaggcttaaaaaagaaagagaagacagggctaaaaagcttaatgaggcagaaaggctttttgacgaacaaaaaagagaatacgttgaaagagtttatagttggtcgcagggcaatgcagaacttaagcttttaagtagccaactggaaggcttaagccgtgtcatactggcgtatggagaggataaaggatttgacgatattttggcttttgtgagaaaaccctatgaggaaatactaaatggaattcagcaagaaattttaagattacaaaatcaaagagaggtaaaagaaaatcagcttcatgagaaagaaaagttattggaggaatggaaaaacaaaaaagaccctgagcctgaaagagatgaacaagtcataaacaacagaaaaaggcttaaagaagctggaattccttacattcctctttacatggcgattgattttaaagaggatgtggatgaagagacaagaggcaatatagaagctgcgatagaagacatggggcttttggatgctcttatcgttcccaaagaatattttgaaaaagctcttcaaatggacagcaatatggcggataaatatgttatgcctggaagctttaatatgatgttaaatgtatctcaatattttaaagtagttgacaatgaagaaggagtttcaccagaagatatttcggatgctttaagcaatatatttgtatccgaagaaagcgggacaacctatattgattcaaatggcacatatggaataggagtaataaaagggaaagcgcgggataaagttaaatcaaagtacatcgggagtgagtctagaaagcgctacagagaagagcttattaaatctatacaagaagaaatacaggctataaaagctgaaatatctgcaatcgatgaggaaataaatgcaaaaaaatcaaggatacagaggctggattacgaatattcggcatttcccgggaaagaagatattgaagaagcatatagatatttaaaaacggcaaaggctgattacgaatacacctctcataaactggatgaacagctttttacagttaaaaactgttttgaggaccttcagaaaaagaaagctgttgtaagagaattgacatctggcataaacatacatccagatattgatacctattcttctgcgtatgaatatgcggaagaatacgcttcagggcttaatgaagtagaaatactatacaacaaatatgttttgcacatttcaaacgaagaaatgttattgcagcaaaaacaagatttagaatacgatattgataacttaaagtacgaaatagacgtactggaaaacaaaatacagagttctgttaagaaaattgagatgctaaaagagacattaaaagaacttggacttgaagaaattgagaaagaactagagttttgcctaaaaaggctggaggaaatacctaaagagattacaaataaatcagccgaaaaagcaaaacttgaggagcggctacagagaagcttaaaagaccttttaaacattgaagaagagattcatcttaaagaggaaatttacaatattgttgaagagggtttaaaaaaggaattagcacttggctttgtcaagcaagacgttgaaatggaggatatgttaaaattaagtaaaagcattctttctgaatacaaaggcttttttgacaaagcgggctttgacagagaaaagtttacagagagacttcaaaatgtgtattttgaaactcgcaacgaacttttagaatatggactttcaattggcaatatctttgacgaagcttgtgagggagacaatgaaagaataaaagaagcaaagagtaagcagagaagacttaatattacggcaaatataaatggtaaagttgtttcattatatacgctttattctaatattgaagaggatataatggcgaatgaaagccttttaagagagacggataagattctttttgaagagattataatgcacaatgtgggaattaagataagggcaaagatttttaaagcagaagaatgggtaaagaaaatgaacaaactcatgtctgaaagggatacttccagcggacttaagttctctattgagtggagaagcattcctgcttccaatgaagaagaacttgatacaaaggaacttgtagatattttaaaatctgatgctgatatgctgaaaaaggaagtcttcgataaagttgtaaatcattttaggtcaaaagtagaaagagccaggagggcaatggaggaaaaaaacaatacagaaacttttcacaagattatgaaagaaatattagattacagagattggtttgagtttaagctttactacagaaaagaaggggaaagtcgcaaggagcttactgataatgcctttaataagttgagcggtggagaaaaggcgatggccatgtatatacctttgttttccgcggtttactcaaggtatgagggagcacccccgactgcacctcgcataatatctctagatgaagcatttgcaggggttgatgacacaaacataagggatatgtttaaactgattgaagatctaagatttaattatataatgaattcgcaggttttgtggggagattatgacactgtccccaagctttcaatttatgaacttataaggccaaaaaatgcaaaggctgtattggtcatgaagtatttgtgggatggaaaggtaaagcatcttatacttcctgaaaaagaggaggttgccgctcttgaggtgggtgctgtaaatgaataa

SEQ ID NO: 50082 - DNA, 1296 bp, Thermoanaerobacter brockii subsp. finnii Ako-1; identical to SEQ ID NO: 49832

SEQ ID NO: 50083 - DNA, 1482 bp, Clostridium carboxidivorans P7; identical to SEQ ID NO: 50022

SEQ ID NO: 50084 - DNA, 1131 bp, Clostridium carboxidivorans P7
gtgaaggaacttttagcactactagaaaattatattattttaaaggaaaaaaacagggagctttattatcaaataaaagataattatgataattttaaggattttttaattgagaaactgggttataatttgatttttcatgaggattttgtgaagcttgaaaagataccaggcagggcagaaggctggatgggtatagaaggctttactgatataaaggagtatatattttttgtgatacttttaatgtatttagaggataaaaataaagaagaacaatttgtattgtcctttgtaacagagtacatatcaaatcaataccagaatgaaaagatagattggacaaaatacagtaatagaaaatccttggttaaggttataaagttagcattaaaattaggaattatgaaaaataatgatggtgatgaagatgagttttccagtaatgaaaatgcagatgtactctatgaaagtactggtatttcaagatatatagtgagaagcttttcaaaggatattatggaatgtgaaagtcttgaagaacttatgcaccacaactttgaaggagtggagcaggataagggaatgctaagaagaaatagggtttataggagattgcttttatcaccagttgtctataatggtggaacagaagatagtgactatgattacataaagaaatttagaagcagccttcaggagaattttgaaaataatttaggctgggatttacatgtacataaaaatggtgctcttatagttttaagtgatgataacaaaataggtgatttgtttccaagtatgaagggagaaagtgaagctatacttctatttggaaagcttataagggaaaagcttgaagaaggaaagcttgttttaaatttaaatgatgagatagttttaagtagggaaaattttaatgagcttttattagagttaagaaataaaaaaggaagcggctttaaaaaagaacttagagacagtaaggatgagtattttatagatgtgttgttaaattatatgaaggatttccttatggtagaagaaagggaagcttctatagtgatacttccagtactaggtaaggttgtaggtgattacccaaaggattatttagcagaggaaaattag

SEQ ID NO: 50085 - DNA, 1479 bp, Clostridium carboxidivorans P7
atgaaggaaagatggattgcaaataagtttggcctttttaatttttggtattatgatgaagaggaatttcagcttttaaatgggaaaattcttttaagaggaagcaatggaagtggaaaatctgtaacaacacagagctttattccactgcttttagatggaaataaagcacccagcaggcttgatccttttggttctactgcaagaagaatggaaaattatcttcttcatgataatcatgaggacaggatagggtatttatatatagaatttaaaaagcctgaaagtaacttatatataactattggaatgggaatgagagcacaaaaatctaaagctatggattcttggtattttattttaaaggatggaagaagagtaaataaggattttaagctttataaagttttaggagaaaagtatcctcttacaaagcagcagtttaaaaattccttaggtgaggggaatttctttactgaaagtcaaaaggaatacatgtataaggtaaatgagcatctttttggtttcagtgacattgaaaattatgaggaacttttaaagcttttgattgaaataagaagtccaaagctttctaaagaatttaagcctactaaaatatataacatattaaataattctcaaaagactttatcagaggatgatttaagacctatggcagaggctatggataatatggattctttaaacatgaagcttatgtcctttgaaaaaagcttgaaggcagcggaaagtcttaaggaaagctttcataattataataaatatatactcttttcaaagtctaaggattatttggagaaagaagattatgtaagggcattgacaaaggaaagagaaagcttgctgcttgacattgaggagttaaaagatgaaaaagatataaaaaagaaggaagcagataacttaaaagaaaaatatgataaagcaagagtggaatatgagaaactcataaaaaatgatatttttgctactaaaaatgaacttgaaaatttaaagatagagataagtgaagaagaaaaagaggtcagtgctttaagaacttccctagataaaaagaataaagatttaaaagagaaggaaggcaaactagaagaaataaaaaaagaagaagaatacatagaatcacagataataagagaattggatgacatagaagactatggagaagaatttaattttgaagaaggtgctttattaaaaaaggaacttttgaagggtataaaggactatgattttacatttataaaagaaagcttaaataaggaagaaagaaaattagaaaatgcttttaaattcataaagacgtatgaagatataaaatctgaaaaagaagaatgtgaactagaaagagacaaaacagctaaaattgtagaaggcttaaatagtgaactgaaagaaagctatgaatattttacccatattaaagaagaatacataggaaaaaataaatatttataa

SEQ ID NO: 50086 - DNA, 1488 bp, Thermoanaerobacter sp. X561; identical to SEQ ID NO: 49829

SEQ ID NO: 50087 - DNA, 1152 bp, Thermoanaerobacter sp. X561; identical to SEQ ID NO: 49830

SEQ ID NO: 50088 - DNA, 4167 bp, Thermoanaerobacter sp. X561; identical to SEQ ID NO: 49831

SEQ ID NO: 50089 - DNA, 1296 bp, Thermoanaerobacter sp. X561; identical to SEQ ID NO: 49832

SEQ ID NO: 50090 - DNA, 1488 bp, Thermoanaerobacter ethanolicus CCSD1
atggaaaataaacttgacttgaatgtgataaaacccattgaagaggtaaagtatttgtctgcggaaaatgcttcgcgatatcgcctcatcatgaggtatttttatgaacagtaccagaaatttaaatattggctgtacaaagaggatgtatatgaatatgtaagtcaatttgatatgtttgctgactatacaatggaaaaatgtgagcaggacttaaaagcacttactgaatggaaaaaccttattgcgacacaagataccagtaaagcttctacgattgacgaatttaaaaacaaaaaattcaggtatcagctgagtccatattctattgagatagagagaatgaccataaggctggaaagcatcgtcggttatggtgggtcactacagccgtctttatttgaaaggatttaccgcaatttaataaagataaatgaaatggcgaaaaaagaggatttacaggaaataaacagatggtgggaagacctcaataccgactttgaaaatatatatcacaatgcgacagattacattgcaagtcttcaaagctctaacgctgatgaacttatgaagtcagagcagtttatcatttacaaagacaaacttatagaatatttaagagattttataaaagaccttcagagattttctgttgccatagagagctttttgaaaaaggtgagtccggagattgtcaattccgttgtagataagttatgccaatatgaaatgagtatcccaagaattgacagggttttaaatgaagaggaagtaaaagaagatttgatggataagtggaataacatatctttttggtttacaggtcataattttgaagacagcgaggcagtaaggcttcttaatatatcaaacgaaataatcagaaaaataacaatgtatgcggcgagaatagcagaaaacaggatgaaagctgccagcagaaagaatgaatatattgctctttctaaaatgtttgcaaaagcaagtaatataaaagaagcacaccttttgtctgcggcggttttcggttgcttttacacaaggcacataaaaggtgattttgaaagaaagacagaaagtgtaaaccagagcgtatgggaagaaccgccctttaaagtgattataaagccaaaaacaaggagctacagtaattctgttaagacaaatgcgattattgatagaagtgctgacaagacggagatgctgatggactatctcaatcagaaaaatatagaagatgaaataatagcaagttgcattgttggcaatagaataaggataaaggatttacctgttgtaaaaccttttgtgagggcaacgatacttaaatggataggaaaagcgatggcaagaaatggctttataggtaagacagaagatggaagaacatacaagcttcatatgccaaagaatggtgagagggcaatactaaaatgcacagatggtaatcttgatatgcctgatattgtaattgagtttgttgattga

SEQ ID NO: 50091 - DNA, 1152 bp, Thermoanaerobacter ethanolicus CCSD1
atggaagaacttcagatgcttcttgaaaatttttggatactgagagaggatagagaaaatttcaacaaaataagagatgctgagaataaaataaaaccttttgttgaagaaaaattaggatatagattgattataaacccatatattattaagttagaaaaagtgccgtcagatgttgaagagtggatggggatagatgcatttcaaatgcctatggattatgcatttttgtgtttgctcttagcttttttggaggataaaggaccagaagaccagtttgtgctgtctaatataacggaatatatagaggcgcagtatgatggacctgataaagtagattggacgctttttcagcacagaaagtcacttgtgcgggtgctcaattttgctgtagatattggcataattaaaatagatgatggtgaccacgagaggttttcagaaagtgaagatactgaagttctttacgaaaacacaggcatttcaaggtattttttgaggtcttttaacagagaaattacagaagacatgaagattgaggattttttgcaggaggatttaaatctttcaaaccccaaagatgcggttatacagagaaggcacagggcgtaccgaaaacttattctttcaccttctgtgtatagtgaaggacctgatgaccaagacttcatgtatataaaaaattacagaaatactatagcgaaagatttagaggagtatcttgatgcaaaacttcacctccacaaaacttctgcttttgttctctttaatgacaacaaatatttaaagtcctattttcccgacaaaaacaaaaacatatctgatataatgctgcaggtaagtaaaattataagacaaatgattggagatggaaaactcgcctataatcctgatgatactatagatataactgaagcagaatttataaatattattttgaaagtaaaggaaagatttagtgatggttggtataagtcttacagggaaatgagtgaaaagcagcttatagaagaggtcattgaaaacatggaaagctttaagatgataaaaagagttgaggaattgcattctattaaaatattgcctatggcggcaaagttaattggggaatatcctccagattttgaaaaaggagaaggtgcagatgagtga

SEQ ID NO: 50092 - DNA, 4167 bp, Thermoanaerobacter ethanolicus CCSD1
atgagtgaaaaattagccgaaagatggatgattaacaggattgggcttcttaatttttggtattatgatgatgaaatatttgagtttgcagatggaaggcttcttttaagaggtgctaatggttctggaaagtcagtgacaatgcagagtttcatacctttagtattagatggcaacaaaagtcctgaaagacttgatccctttggctcaaaggcgagaaagcttgaggactatcttcttggggaagaagaggtaagtgggcttgatgaaagaactggctatcttttcatggaatttaaaaaagagaaaaaagacagctacattacaataggcattggactaaaggcgaaaaggcatcaaaatatggacttttggggctttgtaatacttgacggcaggcgtataggtatcgacttctttttatacaaaatggaaataggcgatgacggcaaaagagcaaaagtcccacttaccaaaaaagaacttaagaatagaataggtgaaggcggagaagtagttgaaagccaaaaagagtacatggaaatggtcaataaatacatttttggctttagttctatcgaggaatacgacgagctcataaaactgctgatacagcttagaagtccaaagctttccaaagacttcaggcctactgtgatatatgaaattatgaaggcttcactgccttcactcacagatgatgatttgaggcctctttcagaaaccatagaaaatatggaccagattaagatgcaccttgatgttctttacaggaatatggctgcagtaaaaaagcttaaaaatgagtacgacaactataacagatacattctttatgaaaaggctggggatttagtaaaggcatacagcgatttatacgcatcaaaaaaagaatacgataatttaactaaagatattgaaaattacagaagtacaatagcaaacttaggaaatgacatcatttctcttgaaagtgaaagagaagccttaaagaaaaaggaagaacagctttcaagtggtgatgctaaaagaacccaaaaggagttattagaagaagaggatcgatataagcagtatttggaggataagtctaaaaaagaagaagaactccggaataaacaagataaatattatggtttagaaagaaagataaaaaacactgaggaacaaaaatacaaactggataaagaactacaggataaattagagaatatatcttcaattgcacaggatatagatttcatggaacatgagttttctgtaagtgaacttaaaaaagtgtatggaaaagaatttgattttacttattggaaaaatgaattaaaaaagcataaagataaaataaagcgtgcaatgagtgcattgagagaagaaatagaagcaaataaaaggtatgatgccgcacttaaagagcaggaaaggcttaaaaaagaaagagaagacagggctaaaaagcttaatgaggcagaaaggctttttgacgaacaaaaaagagaatacgttgaaagagtttatagttggtcgcagggcaatgcagaacttaagcttttaagtagccaactggaaggcttaagccgtgtcatactggcgtatggagaggataaaggatttgacgatattttggcttttgtgagaaaaccctatgaggaaatactaaatggaattcagcaagaaattttaagattagaaaatcaaagagaggtaaaagaaaatcagcttcatgagaaagaaaagttattggaggaatggaaaaacaaaaaagatcctgagcctgaaagagatgaacaagtcataaacaacagaaaaaggcttaaagaagctggaattccttacattcctctttacatggcgattgattttaaagaggatgtggatgaagagacaagaggcaatatagaagctgcgatagaagacatggggcttttggatgctcttatcgtccccaaagaatattttgaaaaagctcttcaaatggacagcaatatggcggataaatatgttatgcctggaagctttaatatgatgttaaatgtatctcaatattttagagtagttgacaatgaagaaggggtttcaccagaagatatttcagatgctttaagcaatatatttgtatcaaaagaaggcgggacaacctatatcgattcaaatggcgcatatggaataggagtaataaaagggaaagcgcgggataaagttaaatcaaagtacatcgggagtgagtctagaaagcgctacagagaagagcttattaaatctatacaagaagaaatacaggctataaaagctgaaatatctgcaatcgatgaggaaataaatgcaaaaaaattaaggatacagaggctggattacgaatattcggcatttcccgggaaagaagatattgaagaagcatatagatatttaaaaacggcaaaggctgattacgaatacacctctcataaactggatgaacagctttttacagttaaaaactgttttgaggaccttcagaaaaagaaagctgttgtaagagaattgacatctggcataaacatacatccagatattgatacctattcttctgcgtatgaatatgcggaagaatacgcttcagggcttaatgaagtagaaatactatacaacaaatatgttttgcacatttcaaacgaagaaatgttattgcagcaaaaacaagatttagaatacgatattgataacttaaagtacgaaatagacgtactggaaaacaaaatacagagttctgttaagaaaattgagatgctaaaagagacattaaaagaacttggacttgaagaaattgagaaagaactagagttttgcctaaaaaggctggaggaaatacctaaagagattacaaataaatcagccgaaaaagcaaaacttgaggagcggctacagagaagcttaaaagaccttttaaacattgaagaagagattcatcttaaagaggaaatttacaatattgttgaagagggtttaaaaaaggaattagcacttggctttgtcaagcaagacgttgaaatggaggatatgttaaaattaagtaaaagcattctttctgaatacaaaggcttttttgacaaagcgggctttgacagagaaaagtttacagagagacttcaaaatgtgtattttgaaactcgcaacgaacttttagaatatggactttcaattggcaatatctttgacgaagcttgtgagggagacaatgaaagaataaaagaagcaaagagtaagcagagaagacttaatattacggcaaatataaatggtaaagttgtttcattatatacgctttattctaatattgaagaggatataatggcgaatgaaagccttttaagagagacggataagattctttttgaagagattataatgcacaatgtgggaattaagataagggcaaagatttttaaagcagaagaatgggtaaagaaaatgaacaaactcatgtctgaaagggatacttccagcggacttaagttctctattgagtggagaagcattcctgcttccaatgaagaagaacttgatacaaaggaacttgtagatattttaaaatctgatgctgatatgctgaaaaaggaagtcttcgataaagttgtaaatcattttaggtcaaaagtagaaagagccaggagggcaatggaggaaaaaaacaatacagaaacttttcacaagattatgaaagaaatattagattacagagattggtttgagtttaagctttactacagaaaagaaggggaaagtcgcaaggagcttactgataatgcctttaataagttgagcggtggagaaaaggcgatggccatgtatatacctttgttttccgcggtttactcaaggtatgagggagcacccccgactgcacctcgcataatatctctagatgaagcatttgcaggggttgatgacacaaacataagggatatgtttaaactgattgaagatctaagatttaattatataatgaattcgcaggttttgtggggagattatgacactgtccccaagctttcaatttatgaacttataaggccaaaaaatgcaaaggctgtattggtcatgaagtatttgtgggatggaaaggtaaagcatcttatacttcctgaaaaagaggaggttgccgctcttgaggtgggtgctgtaaatgaataa

SEQ ID NO: 50093 - DNA, 1098 bp, Thermoanaerobacter ethanolicus CCSD1
gtggcaaagtttgaagagtcgctaaaaaatacgcgatttgaggagtatacgctaaaagacatactggaatactattttggcgaaaaactcaccagcaaaaaagaggatatggaaatattggcaaaagaaagagaagagttctttaaagagctcttctctaaataccaggaatgtaagtgcattgattggctaaaaagtttgtatgagggaaccgctgtaggggtaaggacagtaaatcagaggtatttaaatgatagaaatgggctaaaaaaagatataatgtatgtatgtgatgctataaataatttgcctgtttataaaggggaaaagaaaagactgccggtgttttcttcccagattgcacgtaatcctcactattttgattcaaatacagaagctggaagtatgtttataaacgctttatgcactttaatggggctgaatgaagtaaaaggaagtgaagaaatatcagaactttattacaacgttggcattttgatagatgaaatatccaattatgtcacactctcaggacttttggcatatgagggcgatacggaaaatcaagtatttaaggctgcttatgaaagcaatcaagtcttgcaagttcctcttttaaatttgagtaaaattgagagggtcataagcccttctaagaaagtgtatgctgtagagaatccttcagtttttacatctttaatagatgccacaagcaaagtatttcctcttgtatgcacatatggccagccaaaactttcttctctcctgctcttggacatgctttataaagaagggacagagatatattactcgggagattttgacccagaggggcttatgatagcagataaattgtacagaaggtataaagacaagtttcactttttaaggtacgatgtagaagattatttaaaatctctttcaaacgaagtcataaatgatgtgaggcttagtaagctaaataagattgaatcacctttactctttgatgtggcaaaggagatgaaaataataaaaaaagcagggtatcaggagcttataatagatgatattataaatgatataaaattgattgaagaaggtaagggggagtggtaa

SEQ ID NO: 50094 - DNA, 1521 bp, Streptomyces sp. ACT-1
gtggcccacgtggccgaggactggtggagcgttctggagaccggcctgttcgacgtcttcaacgacgacagacaggccgggaaacaacgactgaccggcgccgtactcgccgctctgctggtggcgagcagccgcggcccgatgtggacgctgtccgacattcgcaaactgctggccgaggtgggctacgagaacgcggccggcaacgaagacctcgtcgaagtcctcgaggtcctgaaggcccatggatacgtcacgccgagcgtcgaccacaccgcagccgtggagagcctcagcgacggacgccggcgccgcgaggcgtgggcgctcacccgacagggccgtgtggttgtggctggcgtccgggacatcgcccgccgcctgaaccgttccttgcggcttccaccgcgtctgctcgacgccgtcgagcaaacgctgcaggccctgttgcagcattaccacgaagacgccgaaatgctggaccccaccctggaccaggtccgcgcccacctggaacaacttcaggaggcaggcggagacttctacagcgcggtcggctccctcgcacaaggggacgtcaccgacgacgcggtgttcatcaccagccgccgccacattctcctggccctgcagcacttcgcacgccgcaccgagcagtccctcaaccaggtcaggatggccttcgacgcactggccgaggtcggcacgaagaacatcgtccaccgcgcgatcgccggcgctggaatccttgacccgtccgaacagcaggcgtggacggccgaccgggaacgggacctggccgacctcgaggcatggttcgtaccccgcggctcgatcgagcgcctggtcaacacggcggcggacgccatccacgcactgctgggagccatcgaccgacgcttctacgccagtgcccgcggcagcgacgtcggcgaggacttccgccagatcgcccggatgcttcacgcccagcccaccgaggcccgcactcagcaggtgttcgccgcggccttcggtatctggtcagcccgccatcccgtggagaccgtcgaagagtccctcgccccgctgcacaccgcccgcagcgaagacagccacaccatcaagctggtcctgcggccccatgatcgcggtgcgcgttccaccggagcaccccgcaaagtcgccgacctcaccgagcagcggagagcggcagaagccgccaacgaagccgagatcgcccgcacggaatcgatcgcaagagcgctggccacgcccggcgtggtcccgctgacccacttcaccggactcgatgccacgcacaccgaagtcctcgtggacctgatcgaggaagccctcaacagcttcgacgacacaacaggcacggggacagccgccacggtcggggccgaactgaccctgtggatcggcacgccaggtcacgcggtgagcgtcgtgctgcaagaaggagagctgatcgccaccgacttcctcatccgcattcgatgcaccccgccgcgagaaggagaggaagcggcatga

SEQ ID NO: 50095 - DNA, 1308 bp, Streptomyces sp. ACT-1
atgaccaccacaccccccgccccaaccggcgaccagccatccctcagccccgaagcagagccggtcgtggcaagactgctgggccaccaggtcctggcagaggaggacgaccccgaacagttccgcctggcctgccaccaccgacacgagatcacccgctggttcagcgaaaaccccggctggcgcttccacatcgaacgctcggcaggcatcggccgcctctacaaacgccactacgacccacccgccggtcgtgtccccctcctgcaccgcagcaagccgtccgcccgcacccccgtctctcctctcgtgcagatcctgaccgcgctgatctgcgagcagatgtggcgcgctacccagaccacgttcaaccacctccagcgtgccgtcatccaggcatgcggcaccgaagcctcaacaggcctgcttccccgattccagccggtcgccaccgcaggacagaagcaggccaccgccgccgcacaccgcctggcattcatcgacgccctgcgcctcctggaatcctggcacttcctcacctccgaccagcccctgaacgttctcgagcaggacaacgacgcagacctgaccatcaccgcacgccgagaacgcctcgccctgctgatcgcctgcccagcaccctcgctcctcccgatcgacctggacgaccccgaaagccacatctccgccctctgcccagaccaggcacccccgcccgaggacgcactctccgtcgacacggcacgccaccaccgccacacggcactgcgcgccgtcctggacaaccccgggatcgcgcccgaccccgccaccgggccaggcgcctacctctcatcgtggagcggccgcgaacaggccctgaacgtcgccgcagccgccggcttggcctgcacggtccgccaggactggtggatgatcaccgacccggccggacacaccacggaactcaccttcccccgcagccgcaccgtcgagcagcaagcagccctgctcctgctcgaggccctgacaggccggggcgaccccatggcctggttcggcccccactggaccaccgacgtactcgccgagcacctcagacagcgaccgtggtgggcccgcaactaccaaggcacaggcaaggccagaaacctcgccaccgccgcggtacaccacctgctctccattggcgcgtgcaccgccgacccgccgcccggcaccggctggcagcccacccccgccatccacctctggcgactcagcatcaccgacgcgccccgcccgcacccggctaccgaagctcacgagggatccagccgagatgaatga

SEQ ID NO: 50096 - DNA, 5325 bp, Streptomyces sp. ACT-1
atgaatgacaccccccgccaccgcctcctcgccgacgtggccggagccttcaccgatgtaccgaccctcgacccgcaccccaccgcacgcgggcgctggcagcccacccgggccggagcggtcaactcctggctctggaccaacgagcagttcgcctacgcaggcggcagcctcgccatggtcggcatgaacggctccgggaagtccctgaccagcgccgtcctgttcccgaccttcatcgatggcaacgtcaccgccaagaacctctcggccgcggcagaggccgccggaacgctgaccgccatccacacgctaggcaggccaggaccgcccaagagcggcacctggtggcaggagtacggacaaaccgaccccgacggcccgcactcccgtacgcggtggctcaccgccggtctgtggctgcacagcggcggaggccagcgcaacaccctggaccgggcgtggttccttgtccccgcccgcgtccacgcccagctcatcctcgaacgggacggcatgcccgtcaccatcaccgacctcgccgcccaactggaggcattcgacggcctgctgttcacctcgtccccccgcctggaacagcaatgccgggaccacacctctgtgctgcgcaaggaagaggactatccggagacagtccgcgagctgatgtaccagccgctggacggcacccagaccgacgccctcgccaccgtcctgcgcgccctgcgcagcgtccaggccggagacaagatcagcccccggatcatggaggagacccttacctccgcactgcccgccctcgaaacccgccgcgtccaaaaccttgccgacgctctgagcaaggctgaacagctccagggccacctgcaagcggcacacaccgagcgcggcatcctgtccgacgtccgaaccgcctaccgccgctacgtcgccgctgccgccaccacgacctctacgacctacgcgaacctccacaccctgcacgccgacgccgtcaccgcccgcgaccaggcactccacgcagagaccctcgcagaacagcgacagaaagaggccgccgcagccctccaagaggacgaagaccgagcagcccaactacgcggcacaatccgcaccctcgagaaccggctcaacgagcatcccggaacgagcctcgcagacctcagccgccacgcccaggactgcgagaagcgcgcctccgacagcctgcagcacgccgacgaagcacaagccatccaccaagagcgccaggaacagagtgcagccgaccagcagacagccgaccaagccctggcggcctgggccaagacgacacacgacctcggcagactcgccggggacctgggcgccgcggcgtttcacgagccgctggccagcgtcctcagcgaaacccagcagcaccagaagcctgccggcaacggcgccaccgtagccgcccgcgaacaggcagcagcatgggtccaggcacagtcccaggcggccgaacgtgttcaggcagcgctggagcacttcaccaacgagcagaacgagcagagcgccgctcaagacacctacgagaacaagcggcagcacgccgaaacagcagaagcacactcacaggatgcgaccgacgcgctggaacaggccgaggaggccacccgcaccgcactgtcgcgctacagcgcccacctcaagcgactcccggcgctcccggacgacctgtgcgacgcgaccccgctcgacccgactgccatccgtgcctgggtcaacgaccagaccgccgacgccctcgcaaagctcgacgtcagagcctgcgaggaacgcgcggatgcccgatcccaggctgcggacgaagcgtccgcgcgtgccaccacagccagtgaactcgcggccggagcagtcaggcaagccacgtccatcgcagacgcgctgagcaacaaagccgatgcgttgaccgacaccccctgctccctgctcgacctcgtacacgccgcccgcgaggtcacccgccccgcacccccacgcccgaagtccaccactcacacggggcccagtgaccaggaggaatgtctcctcgacaccctggaggagaccgcccacagcgacctcggccgccgtcggctcctgattcggcaagccgcccgcgacctcaccgacgccgcacgcgcccaggatcgggctaccgccacatacgcccaggcccagaaggcacaagccctcgcagctgccgcggaggagacatcccgcgacgcacgatgcaccgcggaccaggaagcacacacctgggcacgccatgttcacgcatgggcccacgacctgaagatcctcgacccggccggcctgcgcctgccggactttaccgatggtccccttgacctcaacgcgacgcaccacctcgcccacgacaccgcgacagcgcaccgcagcgccgtggaggccctctccggccgacttgccgaagcagaactgcgcctggacgcagaccgcgcatccctggaagacctcgaggcgaagatccgccacgcccgtcaggctgacacccctcccaccccaccggactggagggcctcgcggcacggccgggctgggacgcccctgtgggaggccgtcgagttcgcccagcacctccagcccgacgaagccagccggctggaaggagccctgctcgcggccggactcctggacgcctggatctcgcccacaggcgaaatggcagtcggtgacatcaccctcaccctcacccccgagcaccaaggaccgtccctggccgacgttttggtgcccgactcccacacccccctcgacccggcactggtccgacggatcctggcaggaatccgcctcctgcagcccggtgaacaaccgctgcccgggcaggcagccgtcggactggacggcaccgcatacatcggccccctggccgccgcgtcccctgccacctgggacgcctgccacatcggtgccgcagcccgcgaacgcgctcgccagcagctcctcgccgacctcaacgagaagcgtcaccacgcggcaacggcactcgccgcaacccgtacgcttgtcgacaccctcaagcgcgacctgaccaccgccgatcgcgagcaggccacccccgacccggtaccgtggcgcagcgctgaagaagccgccgccaccaccgccttcgaagccgaggtcaagaacgccgccgccggcgacgcgacacacgccgccgccgtcgtggaggagcaccggcagtccacctctcgcaccgcacagcaggcctgcaccaacgcgagcctcaccatgaaccagcaggccgcggaagccgccctggcgctgtgcaccgagctggccgggcacctcaccacgacgaccgtcgccacaaagtccgcgatcgcagccactcgcaccctgcacgccgccgacgagtacgccgacaggactcgggtcgaggctgcccaagcacaccacgcactcagccgtgcacgacaagccgcacacgaaaccgaacaggaccgcaggaacctcccgggcgaactcgacctcctggccccagcccaggaagcggccggccgggcccaccggtgcgcccaggaggcggcgaaggaagcgaccgcagccgaggaagcactcggccgccgcacacgcctgctcagtacagccgtatcccgcctgcactccacagcgcgcgatggcgtcgccgagctcccggtagaagccgaagccctggggcgctaccgcagccgcctgcagacgctcattgcttccctctccggttggggcgacgccgccatgcgcgcgcagttcactgcgcagaccgctgcgggcagcctcagcaatgccgccgccgccaaagagcaggcggaacgacttcgtcgacgtgccagcgacgatcaacgcgccgccgaccatgcgcgccaccgccatgacgaggaggtccgccagcatgagcgtccgtaccagcagctctccgccgaactcgaacaacgcctgaaagaacagaacgaccttggcacccgccttgccgaacgccggaacgccgatcagcaggcccgccttgaccattcgcgcagaggcgacgagaccgtggcctgtaccgcgcgcgtcgcggcctcggcagaaggacgagcagcggccctgactcaactgcaggcgctgttcgaccacgggctggtcgccgaactcgcagacagcgagagccttcaccggcccgaacatcccggcgaggcactcgacatcgcccgggccgtcatggaacaacgaggcctcggcctcgcgccgacccgcgaacaggcagctacagcggagagcgaagccagaacacaactcgaccgccgcattcgccacaacctcagccgactcctggaaatcaaccggcacgtcgtctccgaggacatccccggcacaacctggcggcggatcaccgtcacccacctcggccacgcaagcgaagccggcaccacgcaaccccacatgcagccgctcagcgccatcctggccggcctcacccacaccatcaccacgctggagaacgacttcagcgaacaggtgcagaacgaagtcaagggtgtcgtcttctccgaactccgaagagacatcaacactcgtatcgacacggcccagagcatcgtcgatgacatcaccaaaaccctcaacggcgtccggacaggcgtagccaacgtcggaatccgcctccagtggcagcccaagaacgacccgatcgccaccgaagcactccagctcatccaggcagccgacctcacaggcaacttcgaccgcatgtacgacttcttcatcgagcagctgaagaacgaagaagccaaccaccccacatgggccaaacgcgtagagcacgtattcaactaccgcaactggttcacctgggagatcgcactcacccacaacgatttccgtgacgaccccaccagcgacaccgaggtcttccgcacactgacctcccgcaacaaccccctcgcgagcctttccggaggagagaagcgactggtcaccatgctgccgctacttgcggcagcacacgccttctactccaccgagggctaccaggggccgcacatggtcttcatcgacgaactcgatgccgccctcgactcacgcaacctgcgcaaactcctcgaactcctgcggatctgggacttcgacgccgtcgtcaccctgccctccatgcgcccgcttctcgttgccgagacccagtccatcggtatccaccgcatccacaagacccgcaccgcccgctacaccatcccgagcatctggaccggcgcaggcacaccacacaccacccgcatccacgcaagcatccccacaccgcggccacacgagcagcccgagaccgaagggagcgcctga

SEQ ID NO: 50097 - DNA, 1329 bp, Streptomyces sp. ACT-1
atgccctcagacctccacgaccccgacatccggcccctttggcagtccctggccgaccgcctggcccaaggagacgcccccgagaccatcaagacgatcaccgtccccctcaccaggcccgcccgggcgcgcatcgccggctggctcgcccacaccacgcctccaggacgccgccgtcctctacggaccggagacaacggcacgacgatccccgtaccccgactcctgaccgccctcggacacacacaccacgacctgcgcaacctcatcgaggccgcaggcctccacatcccagacaccgccagcacgcgcacagtagcccgccgcctgcgcacagaaatcgactcacatgccgcgcacgccctgcccgatgccccactcctcaacgagcgcctgcgctcctacggcatcagcgaagataccctcgaggaacggcgcttcctcatcgacgccctggcgcgcgcccacgcggtcctgcccctgcccaggcggctctcactggcccgcctcgcccatcactgcgccgccgacccccattacttcgacctcaacgacaacggccgcggcgcactactcgtccttctggcccgcgacctcctgaacgcagaacagcccgacacgccggcgggcgaccgcgggctcctggcccgcctcggcatcgtcgccgaccgcctgtcccagacggtcctgctgttcaacgtccaggccaccggcgacggtccgagcgaccgagcgctcaacctcgcctacaaggaccggcgccccgcccacctcaccctgcacgacctcactgcacaccccccgactctccaggccggccaaagactgctcgtcgtcgagaacgtctccctcatcgacgaagcactcgaacgcggcgtcaccagaccgctcgcctgcacgaggggaaccctcagcgccgtcgaccacaccctgctcgctctcgcccgcgacgcgggcctggcgctcgaatacgcaggggaccacgacccatggggtcacgccatcgccgcgacggtccatgatcgctaccgcgccacactcgtcgccatggacgatgccgcacaccgcagcgctgctgattccgagcccgactggagccgacttccacgagccggcagggagacgaacgaccatgaacctccccgcgaccgcagtggcgtcgagggcaggatctaccaagagaacagcgccattatcgacatgctgctcggcgccagcagatccgatcctctgcgacctgacaccagccccgcaacatcatccgcacagagccacaccgaaccgtggcctccatccccgcatgactccgtacacatgccgagtcgatga

SEQ ID NO: 50098 - DNA, 1674 bp, Streptomyces sp. ACT-1
atgcccggcacaccgccggaacccggcaacgcgccctcggcacacgacgccgacgagacgcaccgccgcctcgacgcgtacgcgtacctcaccgcgccggagcggctggagtacctcgcgatcatgcaggtcttctgcggcaccctcctggccgatctggccgtcccggacgtgatggcgaagctgcgtgagggcggcgggcccgcctcggggctcgacgccgaccccctcaccgcacggctggaacagctggtgaagtgggggaacctgctgcggggcagccacacggtgaaggcgtccagcatcacggagtaccaacgttcgcgggcccgctatcagctgtcgcggctgggcgagcgggtccagcgggacgccgacggggtgctggccgaggccgacgccgcccgcgaggtgagcaacgaactgctggccctggtggagcgggggctgcgggagctggccgagttggtcgccgagccgggcggcatcgccccgcaggacgggctggagcggatcagcacgctgttcgtgcagttcaccgggttcgccgactccgtccgggacttctacgcctatctcggccaggtgctcgcccggtacgacctggacggcggcgagtaccagggcttcaaggaactcctcctggactacgtcgaggcgatcacggaagacgtgtccttccgcgccccccgcatctcggcggccctggacatgctctggccccacctcccggacctgctggagcagctggacgctcacgcgcaggggctcgccgggctgccgacgcggagccagagccgtacggagacccgcgtgcagcgcagccggggtcgcgagctcgcggactgggaggggctgcggcgctggttccgggacaccgacgggcagggcagccaggtagaccagctgcgcgacgccaccctgcgggcgcttcagtcgctgctggccaacgccaagcggatgctgcgctcggccaccggcgagatgtcgcggcgccgggacctgctgcggctggcccggtggttcgacgaggccgcgccgcaggacgcgcacgacgtcgccgtcgccgccttcgggctgtacggcgcccgccacctgggcataccgcccgcctccgacgaggtcgtgcccgcctacaccagctggtggaccggcccggtggtcgaggtgccggtcgcactgcgcgagaggggcacccgcggccagcgagggcggacggcatcggtggaggaccattccgcgcagaaggaacgactgcgggaagcggcccgtcagcgggccgccgagagaagcgccgctgcggacgagctgtgcagcgcgtccggccgcttcgacgacgtacggctcacgtcggcggcgctcagcctgctcctggagctgctggccacggcgctcgggaacgcccagttcaggcgccacgccccagtggacgggcaggaggagcgggagttcgagctggacgcggcgtggagcgaggacgtcgatctgggcatcctgctcacggtgcaccgtacggcgggagcgcgcacgcttctgcgctcggccgacggggatctgctgctggacgacctggagccgacggtccacaggacggccggctcggtcggcggagcggagccgaccgggcctcccacgcggtcgcacggcgcgtccgtcggcggcagcgggagatga

SEQ ID NO: 50099 - DNA, 1329 bp, Streptomyces sp. ACT-1
atgacacttccctccgcccacgacgtggctctggccaccgaacgccgcaccgcggcacggctgttgctcgcacacccgctggtcacatcggacggcccgcacgccgacctctttccgctggtccgcaggcacgccgattggctgggcggccggttccagcaagtgctcggctaccgcctcctggtcgacagctcctacgcccggctgttcaaggccgggctcggagcccggtcggggcaccggctcgtacgatccaccggcacgccctttaccccgcacacctacgcgtgtctggctctggccctgtcggtgctggtcaccgcgccggagcaggtactgctgtcgcagctcgtcgccgacatccgggccgcggcggccgacgcggacatcgagctggaggagaccggacgagcggccgggaagcggacgctggtcgcggcgctgcggcagctggtcgagtggggcgtcctgatcgagacccacggccacgtgggcgtcatcgcccaagaggccgacggggaggcgctgatcacggtcgaccgggagctcgcccgtgtcatcgtggccggaccgctcgcccagtcggggggcggcgccgacctggtcaggcgggcggcggacccggggttcggagggccgcgcacctatgtgcgccggatgctcgtcgagacccctgtcgtccacctcgacgaactgaccgacaccgaacgtgactggctccgcacccgccagcgccgggaggcccaggcgttcctcgaactgctgggcctggagacggagatccgggccgagggagtggccctggtcgaccccgaggaggagctgaccgatctccacctgccagggacggggacggtcgcccaggcggcgttgctcctggtggagaggctggtgcagcggctccgcccggctgaacccggacatcccgcgaccgggggtgtcctcgtcgtcggggtcgccgttccggacggtgtggtggatgagctgctggccgagctgatcaccgagtacgggcagcgcggcaactggcagcgcggttacctcgaagaccccgacgccctgcgcgaagccgtgctggacctgctctcccgcatgcgcctgatcgccccggccggcccgctgcgctccgagggagcggggctgccggaggagtacgccgacgagctgccggagggacgccaggtcaccgacgtccgggcggcccgccccagcggcggcgagggctgggtcctgctcgccccggcggcccgttacgccacccaggtcaccgtgccgacgacgggtggacggaacaaatccaccgacacacagcaggagttgccgctatga

SEQ ID NO: 50100 - DNA, 4263 bp, Streptomyces sp. ACT-1
atgaccgccgatgctcgtggtctcgtcccccttccacgttcaggtcacacgcaggcggcgcgtacgcgcttccggctgcaccgggcgggcatccagaacgtctggcagtacgacgagcaggagttcgccttcggcgacgggcggctgctgctgcgcggtaaaaacggggcgggcaagtccaaggccctggagatgctgctcccgtacctcctggacggcgactcccgggctctcgacgccaccggcaccgggcggacgacgctcgcctggctgatgctggacggcttcgagcagaccaaccgcctcggctatctgtgggtggaattccgagggacggacgcggccggcgaccaccgctgcctgacgctcggcgccgcgatccgggcctcgaagtcggcgcagaaggcggtgccgaccttcttcgtcaccccgctgcgcgtcggcgaggacctgcacttcgtcgaggcgggcaaaccccttgccgtcgaccggctcaaggagatcgtcggctccggcaacacgacggaccgggcggtcgaacaccgtgcccgcgtggcccgggacctcttcgggatcacggacgcgacgcgctaccgcaacctcacccagctcctgcaccggctgcggcggcccacggtcggcgaccgcatcgagcacggcggtctggccgtgctgctgagtgagaccctgcccggactcgacgaggacgtggtcgagaaggtggcgcgcaacctccacgatctggacaccgtacgagccgaactggggcgcctggaacgtaccgacgcggccttgcgcacctttctctccgactatcgccgctacctcgccggagtgctgcgctccgcggcgcggggcgtgagccaggaactggacacgctctccgagcgccgccggaacgccggggacgccgcccagcagacgagcgtcctgaggaagcgcgagaaggaatcggaggaggggctgaggacactccgcgaggaggaggagtccgcccggacggaactcgccgccctgcacgacagccacgcctaccgcagcctgcgcgagctgtcggagcgccgcagcacggtggaagccctgcacaccgcggccatgaccgccttcgccgcgttgcgcggcgcgcacgaggcggaggagagcgtggccgaacggctggacgagggcggccaggagctgggcgcccggctcaccgaactggccacggagcaccgggagctactggcacaggcggagcgggcggtacttcccgccgcgcatctcggcgaggcggtcgcactgccgcacaccgtgcgttccccgtcggcacagatggagttgaccggaccggacggggaatcgcagaccgtacggcaccgacctgtggtgcgggtggacctgacgacgacggaggccggactgcgttcctggcagcagcagttgggggccgccgagaccgttgtacggaaccggcagcggaccgtccaggaggtgacccgcctctcctcgctggccgacgaggctcgtggcggtgcgatgcgggccgacgaggtgcgggaacggctggagggcgaggcggaggaggccgctgaccgcctcgaagccagccgccagaaggtcgccgaggagagctgggagtacgctggcgaggtcgccgcatgggtgcgcgagacgcgcaacgcgacagggccctcgtgcccgccgctggacgccgtcctctccgaagtggactgcgcgtcggactccgacgcggcgtactcctcccgcacgctcccggctggcatcgacacccacgcgcggcagacggcgcatctggctcttgagccgtacgcggatgccctcacccggcatcgcgacaccctggcggtcggcgtcggccgactcggtgaggagatggaccgcctggcggaggagaggcaggcttgggaacgccgtacggacccggagcctccggccccgtaccaccgaagcgcggtgcgagacgcggccaacgggacgccgttctaccggttggtggacttcgccgagcacctgaactccgccgaacgggccggtctggaggcagcgctggaggctagtggccttctcgacgcgtgggtcagcacgggcggcgcccttctcgacccgctctccggcgacacccttctcgacgcggctccggcccacgacccgctgccggtggcacagaccctcgcctcggccctgcgaccggtcgcgcagccggacagcggcatcacatccgaccaggtggagcacctgctgtcagccatcgtgctcgcaccggccacgtggacgacggacggggggacggcgaccgcgagtacggtccacttcgacggtagctggcggctgggagccctccgagggcagcaccacaagagcgccgccgagtacgtgggcgcagcggtgcgggccgagacccggcgacgggcactggccgagctggaagaccggctcgggcagacggaacggcagctggcggaagcccgtaccgagctcgctgcagccgattcccggcgacgggcccccgcgcaagcggaacgcgacttccctcgggcgcagcggctctccgacgcctggagcacccatgcctcggaggagagagcggcacgagcgctctccgccaaggcggccgaagcggcacgccaggcggaggaggcccgtgccctggccgtttcgacgcgctccgatgcggacgccaccgcgaccgcccatgacctgcccaccgacaccgtcgcactggaccgcgtacgcaccgccctggcctcgctgttcaccggcgtcggccacctacgcagggcggtcaacggtacggtcgcccggctcggcggaagccaggcggacgaccggcgatacgcggaggcccgcgagaagcggacggaggtggaagagggctaccggctccgccaccggcaactcctcaccgcccagcaggatctgcggacccgggaggccgccgtcggatcatccgaggagaagatcctcgccgacgaacaggccgccaaggaccgtatcgcccatgccgtgcgggccatcccgtcgagggagcgcgagcacaacggtctgcgcgaccagcgtgtacgggcggaagagaaagaggagcgtctgcgcgaggaactggcggaccaggaagcaaccgtgatcgagaccggccgcgcactgcgcggcgctctcagccgcccggagatcgtcatcggagcgggactagatcgtacgaccctccccgatcagctacaggacgacccgggcaccagcgcgcgcgaccgtctgcgcgcactccgaacactggcggaagcggtggatcggggtctcggccgtcaccgggaagaggtgtccgacagccttctcctcaaacggcacacaacgctgcgtgatcaactggcgggcggctacgacgcacagctcgacgagcacgacggcatcaaggtgtgccgcctgctcgacgactacggttcgcacgacgtcgcggtcgtgggcgagcggatcgccgtggaagcctccgaggcacgaggacggctcacggaacgcgagagcgacgtgttccagcgcttcctgaccggcgagctcggcgaccacctctccacgcaggtcatcacggccgccaacctggtcgcggcgctcaacgacacgctgaaaaccgtacggacctcgcacggcctcggcgtggaactcctctggaagctcaacgacgacgccgaggccgacgtgcgggtggccgtcgaactgctgcgcagcccgtcgagtctccggacacgcgaacagaccgagcagctccgcgacgtactgcaacgccgcatcgaggacgcccgccgcgccgacccgtccgccggctacaccgcccacctccgcaccgcactggactaccgctcctggttcaccttccacacgttcgtcgtcgaggacgccgtccccgggcgcagaaggaagctgaccggccgcacgggcctgagccagggcgagcagcgcgtgctctcctacttggtacttttcgccgccgctgccgcccacttcaccagcctcgccgacgtggccccgcacgcgccccggctgatcctcctggacgacgccttcgccaaggtcgacgaacccacacatgggcggctgggccgcatcctggtcgatctggacctcgacttcgtcctcacgagcgaacgactgatgggcaactgggccgaggtcccttccctgcacatctacgagtgcctgcgcgacccgcacgtacgcggagtggccacgttgcactacacgtggaacggccgccaccggcagccggcatcgggatga

SEQ ID NO: 50101 - DNA, 1272 bp, Streptomyces sp. ACT-1
atgagcgcccttccgcccgccacgcgcgactggctggccggtcccggcctcgtccggctctggagcgcggcacgcaaacggctggagagcaacggagtgcggtccaccggctccctccggctaacggcggtgagttcccaggagcggaacgatctgtcgctcctgctgggcaagcccctcaccggtacggcggtgacagtgaggctcgacgtgctcgacaaacgcctgcggacctcggccgcggggctcgggctcaggcaggtcctggaggaactcggcggccctccgctcgtcgaccggcgtgcggcccgcgagcagaacgcggcagagcgtcagcgcgtctgggccgcgctcgcctcgtccctcgacgcgtcgccgctggcggggctggagtgggtggagcagtggtcggatgtgctgcgccgcacgggcgtcccgaaaggtgtggcaccagaagcggctgtacgcacgcttcagcaggccgtccaagtgctcagcacgctgctcgacccacaccggacggacacacgaggccgcggcgagctggccgcgtcggtaacaggctcggcgcacgggcttgacgacggcacctggctcgcccgcctcgtccagcgtggtatcgcgctggcccacgacacggatcttcccggtgacgcggtcggccgacgggcactgtggcggctggtcgcggtcaccccggacgaggtctccagcacagtgctgacgtacggcctccggcccctcggcgaggactggcgcgcgaggtccctgcgggagcgtgccgatcaccatgcggagacccacctgacgtcccgggacctccgtgacgtgccacttcgcctgccagccggctccatcgtccacctctgcgagaacccccgtgtggtggaggccgcagcggacgcgggctgttcgcaggccctggtctgcacctccggcagcgccgcgacggtggtcctcacccttctcgacgccctcgcctcgggcgactgccgcttcgcctaccacggcgacttcgactggccgggcatcgctctggcgaaccggatcatgcgccgttacggagcccgaccttggcgcatgggcgctgacgactatgaatacctggctacgcgcagccaggccgagggaatccccccactgccgctggtcggtgagcccgtcagcgcggtgtgggacgccggtctcgcccctgccatggcagcgctcggggtggcgctccacgaggaggcgacgctggacctgttggtagacgacctgggtatcccgtag

SEQ ID NO: 50102 - DNA, 1521 bp, Streptomyces sp. ACT-1; identical to SEQ ID NO: 50094

SEQ ID NO: 50103 - DNA, 1308 bp, Streptomyces sp. ACT-1; identical to SEQ ID NO: 50095

SEQ ID NO: 50104 - DNA, 5325 bp, Streptomyces sp. ACT-1; identical to SEQ ID NO: 50096

SEQ ID NO: 50105 - DNA, 1329 bp, Streptomyces sp. ACT-1; identical to SEQ ID NO: 50097

SEQ ID NO: 50106 - DNA, 1542 bp, Frankia symbiont of Datisca glomerata
atgacttcgacgcatcgggtgccaccggagatgttccggttcgcgaccgagcagaacgtcgacctgtacacggcgatcctgcacgtcttcggtgaggcgaacgagcggctggagaccgcgctggggctcgacggcatctccgaccggctggcgtccgtcggcttcttccgcgagctcggtccggacgagcttggccgcgcgctcgcgcagctgggcaaatggcggctgctggacgtcatccagaaccacggcgcggactacaccaccgccgccgagtacgagcgcggcaacctgcagtactcgctgacgcgacgcggggaggccgcgttcgcgggcgtccagcacgcgctggcggtactcgcctcggcgggcgcgttgcagaccgccgtcctggacgccatcgtggaccggctggacacgctgtacgcgctgatggccgacgaggcctcgccgaaccgcaggatcttcacgacgctcagtgagcttgagggccaccttgaggctctccgggtgaacaccaagcagttcaacggtgagctgcagcggctcctgcgggccgagaacgccgatcttgacaccttccacgaggtcaagcgggccaccgtcgcctacctgcaggagttcgtcaccgatctcgatcaccggtcgcacgagatccgcgaggcgatccggcgggtggagtcccgcggtgtcggcgcgttacgcgggcgcgcgctgctgggcgcggagctctcgccgatcggtggggacgatccggcgccggcctggctggagcaccgccggctgcgctgggagggcctgcggctgtggttcgacccggacggcggtgcgcgcccgcgggcggaacagctgcacacggtggcgcggcgggcgatcgtcgccctgctcgcggccctggaacgcatcggcgagtcccgacggcggtcgtcgagcgcggcccgcgacttccgcgtgctcgcgcacgcgttcgccgccgctcccgccgaggacgacctgcaccggctgtggggcgcggcgttcgggctggccccagcccgccacgcgcacctgcggcacgccgacgccgaactggtgccgaccggcgtgagctgggcggacgccccctcggtggaggtgtcgacgctgctgcggcgcgcgggccgggtggagcgcttctcccggaccggccgggtccgtgacgtcacggccgtccggcgtgcgcgcgaggagcgggcgcggcgggagcgcgccgaactggaggccatctggcggcggctgagaacggacgggccgatccgcctgtccgcggtggccgagctcggccatgaggagctgtcatacctgctggacctgctggggcatgcgctcgacgggccgctggacagctcgggcgcgcggcgggccacgacgtccgacgggcgggtcgagatcgtcgcgcggccgacggatgacggcaggctggcgatgatccgtaccccgcggggtgtgctgaccgccccggaccacgtcgtcgaaatcatcctcgtcggccagcgcgcacgtcccagcgaggccgcgcagtga

SEQ ID NO: 50107 - DNA, 1449 bp, Frankia symbiont of Datisca glomerata
gtgagctcgtcggcgaaccagcacgtccaggacgagcgcgtcgacgtcgcccggggcatccggctgctgctcggcagcccgttgctgacggcggccggccgcccggacgcgttcgcggtcgtgcggcggcggcgcaggccgatcgcggactggttcgactacttctgcggatggcagctcgtcgtcgagccgcgggccggctacgcgcggctggtgaagatccgttcggagccggatccgtcgcgcccggcgcgccggccgcggtcgacgcgggccccgttcgaccggagcaggtacgtgctgttctgtgtggtggccgccgagctgatggccggtccggtcacgacgatcgggctgctggccgaccgggctgcctcggcctgcgcggcggacggcgccctgccgcccttcgacaccgccagccgcgccgggcggatggccttcgtcgacgcgctgaaattcctggagtccctcggcgtggtcagcgcggtggacggcgtcaccgaggcctatgtgcagtccgaggacgcgaaggtcctctaccgcgtcgacaccacccgcctggtgcggctgctcgccgcaccggtcgcgccgtcacgggtggtcaccgccggcgcgtccgtggcgcccggcgccggtgacgcgcccgccacgcccactgcggacgacactcccgacgatgccgggaaggccggcgcggccccgcccccgaaccaggagctgatcgacatcgacgtgctcatcgccgacatgctcgtcgagacccgttacggggacgccgcggccgaggccccgacggtctccgactcccggcgcaatctctggctgcggcattcggtgatccgacgcctggtcgacgacccggtcgtctatcgctggcagctcagcgcggcgcagctggcctatctcgccacgccgacgggccgcacgatggtccgccgggccgccgagctggcaggcttcgagctggaggaacgagccgagggatatctgttcgtcgaccccgacggcatcgcgaccgacagccgcttccccgacgacgcgagcagcgcaaagatcgctggcctgatgctgctcgacgcgctgcgggccgcgccggccgggctcacgatcgaacagctggccatcgaggcggggcggatactcgcggggctgccgtcctgggcgaagagctaccgttccgaggagggcgcgcaccggctcgcgcgggacgcggtcaccgagcttcggatgttcgggctcgccgcgctggacacgggccacaccggcgcctccgccgtcgtgcgggccctgcccgccgcggcacgataccgcgaccaccgcgaggatcggtcgcgcctcacggacgtggcgtcatccgccgcgaaggctgccaccggggatgtcacagccaccggggatgtctcagggggcgctgagcgggacgtcgcgtcgggcgggcaggcgtga

SEQ ID NO: 50108 - DNA, 4203 bp, Frankia symbiont of Datisca glomerata
atgagcgtgaccaggctgcccgttcgcccggctccggccgacgcccaggcccgggtggcccgctggcggccacagcgcgccgggatcgtcaacgtctggcgctactacgacgagacgttccacttccaccgtggccggctgctgctgcgcggtcgtaacggcaccggcaagtccaaggcgctggagctgctgctgccgtacctgctcgacgcgaacctgcaggccaggcggctgtcgacgttcggcgggccggaacgcacgatgcactggaacctgatgggggacggcgcgagcggccagacccgcgtcggctacgtctggatcgagttccgtttcggtgctctccccgagaccggcccggccggcccgaccggccagccgagcccggtgcggcccgtcggtgacggtgacggcgagggcggtggaccggccaggcccaatgggtccgatgaacgttggttcacctgcggcgcgcggctacaggcgtccgtgcacacggcctcggcgacagcggactacttcacgaccaccagccggatcgggctgcccggtggcctgagcgtggtcgacgaggcgaacgccccgctgacgcgcaaacggctggaggcggagctgggtgacacgggccagctgtaccccaccgcggccgactaccgggcggcgatccgcgccgaactgttcggcggcctgagcgagcagcgctacagcgggctgatcaccgcgatgctgcagctgcggacgcccaaactgtcggaacggctcgacccgtcgctgctgtcgacgctgctgtcccgggcgctgccgccgctcgggggagccgagatcgctgagctggccgagggattcgagcgcctggaccgacagcgggagagcctgcgccggctcgacgaggaggtcgaggccgcgcgggtactggccgaccggcagcgagcctatgccagccgggtgctgcgcgcggccgccgccgacctcatctccgccaccagcaccctggacgcgctgacacgcacggcccgggaaagccaggaggagtacgaccgggtcgtcgtcgagcgcgaggcgctcgacgagcgcatcacggccgccgaaaccgaccgcgggacgctgcaggcccgggtcgagggcctgcaggtcagtgacgcctaccgggccggtgggcggctcgacgagctgcgcggccagatccgggcggcacagcgacgcgccgccgacacccgcgagcaggccaccggggcgcaggagcgggcgcgtgtcgacaaggccaccgccacccggacggcgacgggcgcggcccgtgccgaggccgagcttgcgtccgcgcgggagacggcccgccccgccgccgaccgggcgggcatgaccgcgacctaccagcagctcgccgccgtcaccgagcgcgccgccggcgccggggaggaccgcgaggacgtcgccgccgcctcgtggagtgccgcggcgacgcggccccggtcgttgctgcgcgcggcggtcgaggcccgaggccgtcagatcggcgccgtacgccgtgcgctgggtgaacaccggtccgcggtcgacacgcggaccacggcggagcggaacctggagcgggcccgccaggaactcaccgccgcgacagcggctcggcgcgatgcccgcgtggcatacgaggacgcgcgggaggccctcggcgaggcgctggcccgctgggccgccggctgcgcgcagctgcggttcaccgacccgggggcgctgcgcgacgcggccgagtccgaacccgacgtcctgcgcctcgtcgaggagaccgccggcccgctgctcgaggcgatcgccgcccggtcggccgagctggcccgggagcacagggaccgcggcgccgaacgggacgcgcacacggcggagcgggaccggctgctgatcctcaccgagctgccgccgtccgtcccgccgaccaggaccgccgaccgggccgggctgcccggcgcgccactgtggcggctggtgtccttccgcgacggcgtcaccccggccgtccaggcgggcattgaggcggcgctggaagccgccgggctgctcgacgcctgggtgttcccgacgggcgggctcaccgtccccgggcacgacacggtcatcgacgtcgaccagatggcctccgcgcccgcgggcgggctgggcgcggtgctcacacccgagccggacgcgaaggtgccggccgagcgggtgctgcgcctgctcgccgggatcgccgtcggtaccaccgcgcccgacggccacccggtcgcggtcggtgccgacggcacctggcggctggcggcggcccggggcagctggtcgaagccggagcccgcccacatcggggcgctggcgcgtgaccgggctcgccgacgccgtgtcgacgagctgaccaggctgatcagccagctggacgacgttctcgccggcatcggccgggaactcggcgaactcggcgcccggcgggaacggatcgcggcggagcgccgcgcccggccgagccaccgcgcgctcgacgacgcgcgcggcgcgctggaggccgcggacgcggcggtggcggcccgtgacgacgtggtcagccaccggctggaggaggtccgggaaggcgaggacgcggtgcgcgccgcgacccgtgccctgaccgcggcgggcgccgagcacgggctgccgaccgacacggacgcgttggaggcggtgcaggacgccgcgacggccttccaccggctggcggacggctggctcgactgccaccagcgggccaccgccgcccgagacgccgcggtggccgcggcgggggtggccaccaggtcccaggagagcgcgctcgggctcgccgcgacggcggccgaggcggcgggggagacccagcgcctgcgcgcgaaactcgacgggatcgaggccgcgatcgggcccgagtatcggcaggtcctcgacgagatcgccggcgcccggcgccggctggaggaactggcgaaacagcgcgtgatgatggagcagtcagggcgcgcgctggagcgccgcgtcggcgagctggacgagcggcgtgtcgtggacgcggaccgccgcgaggtcgccgtcgccgagcgtgacagccgggcgaaccggtttcggcacctcggggccggcagcctcgccgcggacacgcggctcgatctcccgctcgccgggctggacggggtgcgccccactctggaggccgcccgcgcggtcgcggccaggctcacgaccaccccgtacgccaggcagaacctcaaggaggccgagacccggctgaccgacgccgtgcaccgcagccggcaggcactcgcggaccgggccgagctggtcctggagccggacgaggacatccagatcctcacggcggccgtcgacgggatccgtgtcggtgccgcccatctgcacgacgctgtccgcgacgagcgggagcgctcccgcgccgagatcaccgaaggtgaacgggagttgttcgaccggacgctcaccggcaacacccgccggcacgtcgccgaccggatccggcaggcgaacgccctcgtcgcggacatgaacagccggctggagaaggtacgcaccgcctccaggaccgccgtccagatccagtggcgggtcgacccggccctgcccgccgcgacccgtggcgcccgcgatctgctcctgcgggacccgagccagctcaccaaagccgaccatgaggcgctgcacgagttcctgcgcggccgggtcgacgacgcccgtgacgacgacaccgcgaccggctgggaggaacagctcctgcgggtgttcgactacacggcctggcaccagttcatcgtccgcgtcgaccgcggcaacgagcggggctggcagccgctgaccaagaagctgcacggcgcgctgtcaggcggtgagaaggcgatcgccctgcatctgccgctgttcgcggcgctcgccgcgcactaccagtcggcgccgatcgccccgcgcctgatcctgctcgacgaggtcttcgtcggtgtcgacacgaccaaccgtggccaggtgttcgagctgctcgcctcgctcgacctcgacctgatgatcacatctgaccatgagtggtgcatgtaccgcgagctcgacgggatcgcgatccactctctcatcaccggggacggcagcgacgacgccgtgacgacggcccgcttcacctgggacggcctgcgcctgacggacgcggacggccagccgctgtga

SEQ ID NO: 50109 - DNA, 1503 bp, Frankia symbiont of Datisca glomerata
gtgaccagccaggccgacacggccacggcaaccggccgggcccacacggccgctgtgaccggccgggccgccgccggtacagccggtgcaggcgcgggcggggcttcccgcgtggccgccgggctggaccgaccggctcttgccccgctgtggcgggcgttgcacgctcgcctctcgagcggacgacccgtcacctccctgcgcatcggaccgctcgacgacgaccagcggaccgccctcgcggacctgctggggctggaccggctgccgggcagcgtcaccaccgtccacctcgaccgcctcgacacgctcctgcgcacgtcgttcggcctcgacgcgcgcaccgtggccgaggcactgcacggcccgctcaccgaccgggcggcgtcccgggccacagcggcgcgcgcccggcgtgacctgtgggaatggctgtgcgcgcagcccgtcgtcgccgccgaacccgcgctgctggcctgggtcgcggacgtccggcgggcgggcgtcgtcgacggttcggtggacacgacgcgcgcgctgctcgacgcggcgctgcgcgtcctggccaggctgccggcggacggccagccgctgcccgccttcgcggacgcggtcgtcgggcgcacccatgccctcgacgacgggacgcggctgtccaccctggtcctgcgcgcgctggccgcgatctacggtgtcgcgccgccggccggtgcggacgagcgccgcgcgctctgggaacgcgccggggtcgccagcgacgcgctgtccgcccaggtgctcgtcgcgggcctgcggccagttggtgacgacccgctgagccgcgcgctgcggctgtgggccgaggccgggcaggccagcgtcgtcacgttggcccaggtccgcgcctgtccggggctgcgtgtcgtcgcgcggcgggtgtgggtcgtcgagaacccctcgctggtcaccatggcgatcacgcggttcggtgccgcgtgcccaccgctggtctgcaccgctggctggccctccagcgccgcggtcacgctgttgcgccagctggctgcatcagacgcggacctgcgctatcacggcgacttcgacggcgacggcctacggatcgccgcgcacgtcatgacgcggaccggcgccaggccatggcggatggccaccaccgactacctcgccgcggttgcggccatgccatctgcggccatgccatctgaggccgtgcgggctgaggccgtgccggccgcagccgatcacccggccgccgcggccccggcgggatccacgggcgtggcccggccgggccacgtcaccgacgcgccctgggaccaggaccttgcagccgccctacgcgcccgggacatcgcggtcccggaagaacggctcgcggacatcctcctcgccgatctcgctggtgacgtccgtgccggtgatggccggtcgcaccgatcgcatgatcttcatggcgactcgcgggcgggcggaccggtcgccctgaccgaagcgccggactga

SEQ ID NO: 50110 - DNA, 1554 bp, Frankia sp. EUN1f
gtggaggagcgcgggggcggcggagcagaggacgaatccgctgtgcaggacagggcggccaggcgcgcgctgttcagctacctcaccgccgaggctgccgatgactacatggcggtgatgcggctcttcagcgagacgcttctggcggacctgtccgcggccgaggttgccacgcagctggtcgaacgcggccatgagctcgacaccgacaccgtcgagacccgatgccggcagttggtcatctggggcaacctggtgccgtccgtgcgtgagacacgcgtgcgcacggttgccgcgtaccaccgttcccgttcccgctatcaggtctcgaagctgggaggccggcttcaccgcgaggccgaggagatcatgcgggccacggagggtgctcgggaggttgcgcgcgaactgctcgcgcgtgtctcggaaaccctgcggctgattcttctgcaggtctcctaccgcgaccggccgatcgattccgagctgcttgccggccaggtcaccggtgtgttcaacgaccaccgcctgttccacgagtccgtcacggacttctacgcctacctgtccggtgtcctgacccgttatgacctcgccggtgaggaatacgcccagttcaagaacctcctgctcgactacgtcgacctgatcggcgccgacgtctcacggaacgcgccggagattctcggccggctgaagacgctgctctccccgtccctcatcgacacccttctcgagaatctgcccgagccaccggcgacgggcgatgcactgatcgtcgttgaacgtctgccagggcgtacccgagcggaatgggagcaactcgccgcgtggtatggggcgtcgagcgtccgttccggcccggaacagctgcgcgtcgcggctcgccaggcgctcggccagctgatcgcgaacgcgaagcggatgctcgccgcatccgggaccggagtttcgcgtcgtgccgacctgctcaaactcgccggctggttccactgcgcggacagcgagaccgcacatctccttttcgacgcggcttttggcgcgtatccggcgcgccacctgctgcttgggcccgaggagcaggacctgcgggctgggccgagcacgtcgtggtgggtggccgcgcccgtcgacgtcccggtgtcgctgcgggagcgtggtgatcgcacggtgcggggccgggcgtcccgggtacccgacacgaaggagcagacagatctgctgatgaatgcggcgcgggaacgtgcacaggcccgggaggcggcggccgccgagctgctcgcggccggctcgttgcaccgcagccggctcagccgagccgcccgggacctgctgctcgagctgctacccccggtactcagtgccacggccggcggtgaggcggaggccgaccaccacgcctcggatctggggctggcgttgcgcggtgttccggcacgcggccagctgactgtgatcaacggtgacgacggaacactgacggttgacggccttctgctgtcggtcgtcccgctcgccggtcccggccgggcgcgcacggcggcgagcgcatga

SEQ ID NO: 50111 - DNA, 1242 bp, Frankia sp. EUN1f
atgaggcctacacccgagacgggcaccgcggccagctcggcgcgggaacgagtcgaggcggcccgcgcgctgctggcacatccagtgctgaccgccacgtcgcatcccgacgagctctcgttcgtccgcctgcacgcccccgcgctgcgcggcatgttcaaggcgcagctgggctatgtgctcgtcgtcgaggcgtcgttcgcccgcctgttcaaggcgccgctggcacccggcgcaccctcccggcccgcgcggcgccgcgacaacagtccgttcgctccggtcacctacacccatctggctctgctctgcgccgcgctgctcgctcccggaaccggcgagatgatccttatctccgcgctgatcgagcaggtgcgcgcggacgcggcgaccatcggcgtgcgcgtcggcgacacgctgccggagcgccgcgccctggtcaccgccgtcgagctgctggtccgctggggagtgctgatcgaagccgatggcacggccatggcctggggcgaacggcagatcgaggaggccctgctccatgtcgcccgtaaccagctgccgcagctgctcgcccgctcgctgacgggtgtcgccaccccggacgagctgctcgcgcccgacccacaggcggctgagcaaccgcggcgctcgctgcgccgccggctggtggaatgcccgctcgtccgccgtgaggatctcaccgatgccgagcgcgacgtgctctcccgcgaacgctccgagctgacccgggcgctggccgagaacttcggcctcaccctggaggtgcgcgcggagggcgcgctcgcctacgacgccaccggctcgctgacggacgagccctttcccggcacgggcacgatcaggcaggcggcgctgctcctggtcggcgcgttgctcgcggagcgggagccgcggcccggcgacaccgccgtcctgcgcgacgggcgtgcgatcgccggtctggtggtcggctggcccgacgtggaggcgacgctcgcccggttgtcgtcccagtacggcaaggcatggagctcggacgcgctcgacgacccccggctgctgcgggactcggtcgcggcgacgctcgcggaggtcggcctggcgtcgatcctgcccggcgggttggtgatccatccggccgctgctcgctaccgcccccagccgattgtcgccccgccgacccgcgcggcccgccgcctagatagcgggcgggcggcctaccacccggagctggagctgtga

SEQ ID NO: 50112 - DNA, 4194 bp, Frankia sp. EUN1f
atgcagcagactctcgccctcaccgagggcaccgaggacaggttcggcccgacaccgatcaggcgtcatccctatcgctggcgactgtcccgcgccggtttcgtgaacgtgtggcactactacgacaacaccttcgacctctccggcggccggctgatcctccgcggcacgaacggttcgggcaagtcccgggcgctcgagatgctgctgccgttcctcctcgacgcggaccggcgcaacatgggcaccgggacggcggtccgcatggaggacctgatgaccgccggtgccggggagcagacgaaccgcctcggctacatgtggctggaactgcgtcgggacgtcgaggccgacgaggacccggccagcggatacctgaccctgggagccctggtccggttctcggcgagcacgaaggaagccaaggtctggtacttcacgacggcactgcgggtggggcacgagctgtcgctgctcaccgccgaccgcaagccgctcggccgcaaagaactgggccaggccgtcggcgaggaccggatcagcgacggacccgagccgcaccgcgaacgggtacgcgccgaggtcttcggcctgacgggcggcgatgccggcaaggaacgcttcaacgggctgatgaaactcctgcacaccctgcgttccccggacgtcggcaaccggatcgaggaaggcagactcccgcagatcgtctccgacgccctgccgcctctgtccgaggaggcactgacggacgccggtcagcagctcgacggcctgaccagcacccgtgacgagcagcaacggctcgaagccgcgcacgggcaggtcgtggcgttcctcgacagctaccgcaggtacgtggccggggtgctgacccggtcgctgaccggaaccaggcagcgtgcggcgagctgcctcgagaccgaggccgaggcggtgcgcaggcgcgcgatcgccaccggcctcgagtccgagctcctcgagacgctggaacggcgtcagtttttggccgaccaggtctccgaactcgcggcggcgctggaggcgctcaaggagtcggaccgttatcgcggtgcgaaggagctcaccgagctgagcgcgacggtcagttcgctcgccgagaccgcccgggccaagctggacctggcccagctgcgtcgagagggcgaggtggagctggtcggcgcggcgaacgccctgctcaccgacatgtcgaccgcggtcgacgagctttccgagcggatcgaccaggcccgcgaccagctgaccagggtgcggctcaccgcccacgagctgcccgcatcgatcggtctggtccggacgcccccggagcgacggagcgaccttgtccgcgtccatcgggacgcaccgcccgtcccgacgctccggccggcggcggacgtgccgcgcctggtcccggcggatctgatcggcctgcgggccgcggcgggcagtttgcgggaggccgcggacctgcgggccgcgcgtgccaccagccgcgccgcggacgcccggcggctgtccgacgaccgggccggcgttcaacgggccgtggagaccgcggacgacgcggccgtcgaggcggagaccgcggcgagccgcgccgagcagcaggccgacgagcgcgaccgagaggctgtcggcctcgtcgagagctggcgggcctggctgggggaccccagaacgggagatctcctgggcgacgtggactggtccgcccagcggaccctcggcccactgctgctggaccgactggttttgtgcggcaccgaggcggacagcccggtcgacctggccgagctcgaccggtccgcggacgacaccgcgaccggtgcccgtgaccggctggcgggcgaactgcatcggctcgacgccgacgacacggcggaccggcgtgtggtcgagctgctcgtcaccgagcggcggcagcttgaggcgtcccgcgacgatccgccgctcgagccgttctgggtcaccgccgctcgcggcgctgccctgtggcagtgcgtcgacttcgcacccggccagtccgcagacgagcaggccgggatcgaggcggcgctgctcgcatcgggcctgctgaccgccaccatcgacgcccgcggccagctgaccgccaccagcggccagctgctcgtctcgccgatcggcccccgggctgccgtctccgtggccggaaagctggtgcccgacccggcgggtccgatcgaccccggggtgatcagcgcgctgctgggacggatcggtctggccgacccgtccgccgccatgtgggtcgcgcccgacggcagctgggcgaacggcccgctgcgaggccgccacacggttccggccgcacggcacatcggcgccgccgcccggcaggcccaccgggtccagcgcctgcgtgagatcggcgtggagctcgaggagctggccgcggcggcgcaagcgcgggcggaacagcgcgcccgcatcgaggagcgcaagaaggcgatccggggccacctgcggtcggcaccgcggtcgaagccgctcagcgacgcccgggtccgggcggcttccgaggagcggcaggcgacccaggccgcgacgaaggccggcagactgcgggcggaggccgaccggcgggctgtcgcgctggccgagagcgagaaggcgcatcgcgccgcctgcgccgagttcggcctgcccgttgacgccgacgcattggccgacctggcgcgtgccgcgaccgttgcggccggcacgtgcggcgcagtgatcgaccaggttgatgtcctcaccggtctggcggagcgacaccagcgggcggtgggcgccctggcgaccgcggccgagccgcgggggcgggccgagggcgacgcggagctcgcctggaacgggtggcacaccggcgacacccggatccaggcgctgcgtagggcgctgggggccgaccccgcgcgggtcctcgaggagctcaaggccattgaggctggccaggtcgcggcgaagcggaaactcggcgccgcggagacggccgtcggcgagctgcggagcaccgccgcgaccgcggccgcgcaggccgacaacgccgatcagaaggtccgcgacgagcaggccgccctcgccgagcaggtggacgccgtgcgggcgcagctcgggcaacccggtgtcgtcgcctccgcgttcacggcgaagcccgccgaaccgttcaccgaccacaccgccggggccgtcgccgcggacgccgccgagctgctggccggcctgcgcaggtcgcggatcgaggagaacgcgctgatccgcgcccaacaggtgttcgaccgggagatcgcagccagctacgaggtgatcgtcacgaggcacagcgaggtcctgctctacgaactggccgacgcggacggccgccggccgctcgtcgaggccgccgccgacctggcgcggaagtgcgaccagggccgggaggcactgaccgaacgcgaacagcaggtgttcaccgagttcatcctcggtgaggtcggggaggagctccgcggccggctgtaccaggcggaggacctcatcaccgcgatgaaccgcagcctgcggtccatccagaccagccacggcatcggcgtccggctcacctggaagctcgccgcggacaacgacgccgccgtcagccggatcagacagctcgtcatgactgccgcgtcggtgcgcagccaggctcaggacgccgagctgctcgagctgctgcgcgagagggtcgccgcggaggcgctcgccgaaccgaacggcggatacgcccagttcctgcggaaggcgctggactaccgcacctggcacacggtggaggtcatcatcaccgggccggagccgggccaggaacgccggatcagccggcgtgcgaagctctcccagggcgagacccggttcgtctcgtacgtgacactgttcgccgcggtcgacgcgtacctgtcaggcctcgacgacacagccaccgcgctgcggctcatcctgctcgacgacgccttcgccaaggtcgacgatccgacgatcgccgagctgctcggtctcctggtccgcctcgacgtcgacttcgcgatgaccggccatgcgctgtggggatgcgtgccgcaggtgcctgccctggacatctacgagatctgccgccaggacggcggcggcccggccgcgacagtgcacgtgcgctgggacggccgtaaccgccacttcctccactccgcatga

SEQ ID NO: 50113 - DNA, 1374 bp, Frankia sp. EUN1f
atgaagtccccgccctcagcggcactgcctgcgcaggtgcaggcctatctcgaagcgcccgtgctgcggcccctgtgggtcgcggcacggtcccgactggagcgcaacggtctgcaggcgaccggaaccctcaaagtggacctggacgagaccgccgccgcacagttgtccggtctgctgggcgtccgggtcacggtcgggccgaagcgtcccgtcggactcgccgaactcgacgccgcactgcggcgttccagagcgggccggggtctggtgtcggttctggagcacctcgacggccgccccctgcacgaccggaccgccgcgcggcgcgccaccgacgagcagtgggcacaggcctggcgggggctcgacgaggcgctggccaccgcgggcctcgccggggccccgtggatctcgggctggatcgcggatctgaggcgcaccggcattctgacgcgcgccggagcagacaccgcgggccgcgccctggcctgcgccgccagcaccctcggactgctggcccgcacgtcggcgacgggcctcaggacaggcctggagacgggcccccggacaacgtcgggaccgttaggcggtgacgaccccgtcggctggcagatcgcctccctcgcgaccgcgacgacaggtgacgctcatggcctggacgactcgcggcatacggcggcggccgttcttcgggctgcggcgatcgccacaggccgcccggcgccgttgacctccgcacagcggcgcgaactgtggcacgccctcggcgtcgccaccgacggcgtgtccggcacggtcctggtctggtcgcttcggccacctggcgacgacgcctggtcggcgatgatgcgccagcgccgggacctcggcctcgtcacccacctcaccctgcatgaactcgggcgcgccggtgaggtcgccctgggctcaccggaccagacggtgtcgatctgcgagaacccgcaggttctacaggccgctgcccgggccggggcgccggctccgctgatctgcctctccggcagcccagcggaggtcgggacacggctggtacaggcccttgtccttggcggtgtcccggtgcgctaccacggggacttcgactggccagggatcgccatcgcggggcgcgtcctcgcgctgggagcggctccgtggaggctgtccgcgagcgactacctgggggcggtgggaggcgtcgaagcctccgggggcgtcccgctcgcgggcagcccggccgcgactccgtgggatcccgacctggccacggcgatgggccgcacgggggtcgctgtccacgaggagtacctgctcgacatcctcatcgccgacctcatgcacgacacggaacgccgcagcggcggagcgtga

SEQ ID NO: 50114 - DNA, 1500 bp, Ethanoligenens harbinense YUAN-3
atgccggtcaatgcagtttctatggataatatacctgaaacatcttatttaaacacggataatacagcgcattatcgtgccatcatgcgtgtgttttatgacgaatccgagaagactcattaccagttagataaggaaactgttctggaaaagctacatcaaattcctgcctttgcggactacacgatggaacagcttcttccgcacctgaaccaattggttatttggaaaaatctcacacccatccaagatccgagccgggcaaacacaattgcggaatataaaaacaatcagttccgctatcttatgtcaggggcggccgtggaagtagagcgtatgacgatccggctggaagcgctcgtattagaaagcgcctcgctttcgatttacctgttcccccgtattcaaaacgcactgatggagatggaatctctgcaggccgccccacttaaggacgtggatgaatggtggcagaacctgcaagaggatttcaaacggctcaatcagaattaccaggattatttgagagacttttattcttcaaaggcagaacacatgatgcgttctgcagaatttattgcgcataaagagcacgtcgttaaatatttaagagattttgtacaggaactgcaatcaaggggcggaaaaattgagaaagtactctttgaaattcccgatacgttaataaatactattttagataaaatcgttaaaagtgagctggacaagccgcgtccctcatcggaacgcccgccaaatttcaaggtacagatcaaagaaaacatccgtggaaagtggcgttcactttatgagtggtttgtttctgaagcaggtcgcctgagcgaaagtcaatatgttttggaaacgaccaatgaagtgattagaaagatcattcaaaatgccaattttatcattcagatgcaaaacaatggtgtaagccgcaaagaagattacaaaaagtttctccggctatttgcggaatgcgagaacctaaaagaagcacataagcttttcgcccatgtttttggtgttgcctccgtccgtcattttacgatcaatagcgcccgagatacggataacataaacagcagcatttatgaggaagccccttgcgtgtatctactcgacacccgcagccgtcaatataagccacgcatcgacaaaagcgggttttcaagcaaaagtctggagaaagcggcgcttcgccaaaaacttcttgaagaacaggagcgaacaaaaagactggcgctgcaatatatccggaatggaaagttggatttttctaccatcacagatacacttgaaccttcgacacggcaaatctttctaaactgggttgtgctggccaacaacgcctctgaccgtcatgccatcactgagtatggacagaagtttcatttgctccgccagccaggctcctgtgtgctgcactgcacagatggtaatctgaccatgcccgcctatgtactggtgtttgaaggacgtgatgcgaatggatga

SEQ ID NO: 50115 - DNA, 1137 bp, Ethanoligenens harbinense YUAN-3
atggatgaatttcgtgctcttttaggacaattttggattcttagagaacaggatgctgccctataccaccgtgttaaacgagccttacccacttttcaaaagattcttggggaacagtttggctggaagctgttcatcaacgaaaaactgattaaattggaaaagattccggcacatgcggaaccttctatgggaatcgaagcttttgatgcaccttccgattactgtctgctatgtgcattattgatttttttggaggacagagatgagggagaacggtttctcctttcagaactcactccctcattgcttgcttatctgcagcctgttctttctgattggaattgggaaaccttttctagccgtaagagtttggttcgggtactatgctatgcggagtctctttcgctgattaagacccgagacggaatcagcgagaatttctcatccgatcagagtcaggaggttctttatgaaaataccggattgtcaagatggttttccgtcagcttcagttatgacatttcaggcttttcctgcgccacggactttgaaaaggagggcgcggaaaacctgaatcaggaccgtggtgtccttcgtacccacagagtgtatcgccagcttgcgctgtcacccgcagtgtattgggagcagcctgatgatccggtttatgcatatatcaagaatcaacgcggttcggtacaacattacctggaaaagaccattggcggcaatttgcagatctacaaaaacggtgcgtattttgttttggatgaagatgagtcatttggtatgagctatccggaagaccgtatgttgagcgatattgcgttaaacctttctgcaagattgcgctcagttgttcttgagaatgagtacccacgtgccatgaatgatttcgtggagttgtccttccatgatttcacccgggaactggagaaatgccgaacacagtattctgctttatgggggaagcagtatcgtgagatgccccttgaaaaattgaccgaagaggtactctcctatatggaaagctggatgcttttgtcccggcgagaagagggccttacacttctacccgcagcgggaaaaatgactggaaattaccgggaaagaaatgaaacagaggaggtatga

SEQ ID NO: 50116 - DNA, 4044 bp, Ethanoligenens harbinense YUAN-3
atgttgcgctggctaatgaaccgtttaggcttcgttaatttttggttatatgatgttgaagagtttccctttcgaggcggcagattactgctgcgcggcgcgaatggtgcaggtaaatccattacgacgcaaagctttatcccctttattttggatggtaaccatcgtccggaacgcttggattcctttggaactaaggatcggaaaatggatttttatctcttgggagacggcgaccgggacgaatccaccggatatttgtatttggaatttaagaagccggacgtggaacattattgcacactggtaatcggaatgcgtgcccagaaaggcaagggaatttcatcgttttggggattctgcctttgtgacgggcgcagaatcggttccgacttgtgcctgtaccgcgaagccgggtcacagcggcttcctctcagcaaacaagaggctaaaaacgcactaaacgactccggcaattgggccgacagcacgaccgaatataaaaagctggtcaatgaccgtattttccagttcccggacattgaccaatatgagcagtttatcacactattgattcaaattcgtgccccaaagctaagcaaggatttcaaaccatccttggtacaggatatcttgaattcatccctacagccgctcagtgataatgacttgcaggcgatggttgacgcgatggaaaagatggacagcattcaggggaatctggaacagctggaacgcgcgcagatcagtgcgggaattatccgaactgaatatacccgatataaccaatacatgctggcacaaaaagcgcgtgcgtttttgaagcatcacgaggaaacggaaaatctgcaaagtcatgtttccaccacacaaaacgatattgcaaacctagagcttgaaattgagaagctgaatgtaaagatacagaaggatagcgaaaccctttctcagcttaaagcagagaaaaatgcgcttggcggcagcgacacactgcaggaaaaggcggatcgcttgacagagctacaagatgcactgcaagaaaatgatcgcgaatttgaacaggatgcgcgtaatgttgaaggacagagggaaaaacgaaaccagtcgcaacgcacgctagataatctgaaacggcagaaagacgaccaacaggcgctttaccaacaacgattggatgagctggacgaggtgcaggagcagttgcaatggaacgggccttcggaactaaaaaagcagctcgccaaaaagtcatacaccgctttcaaagaggcctacactgccggcacggtttatagccgccggttgaaggacgctcagaccgcgctggaacagcaggaagaaaaaagcagagaactggacgatgtccaaaagcggttgaacgacgcggatgtcaagtgtcgtaccgcccaaaatgagttagataccgcatatttggtagagcagaaagcccgcgacgaactgattgaagcctttttgcgcatacaagccggaaatcgggaatttgtattttccgatacgcttttaggacagattaaacaaatcgtctcccattacaaaagcacggtggacgacagtgaattgaacgcgcttctctccaatgaaaaaaatgcactttacagccttttgcagacgcaattagccgaatgtcaagcacagcggaaggaattgcaggatacttataatgcgttgtgcgcacagctcaaagtgctggaggatgcgccggaacctattccactccggacagcggcagttcaggaaacccgtgaagagctgtgccgccgtggcgtttcctgtgcacctttttacgacctgattgattatgccccaggtatggaacaaaggaaaaaggatttgctggaagcacagcttaccgatatgggtctgcttgacgctcttgtggtgccacagtctgaacaggcggttgtgtctgacattttacagcgacatcctgaccattttgtcaaaatatccgatgcccatatccgtcagccgctgcatgatctttacgctgtagaaggcccattgaaggaagccgcagagacagcgcttagtggaatctcctgtacggacgatgacggggatactgccgttcttccggacggtcgttaccgtctcggtgttttaagcggaaaaagccatcctttaaaaacggcaggcttcattggagcggctgcccgccgcgagaatcgccaacggcaaatagacgcgcttaagcagcaaattgcggaatgccaaggcgcgctgggactgcagtatatgaaactcgaaaaattgcagcagcgcatcaataacctaaatgcagaatatgagggtagaccttctaccgctgatctcgcgatggcgctgagtttggtacagacctgtgaaaacagccttgcggtcgccaagggtgcagtagagcagcttgataaggcggaaaaggatgcccgtgccgctttgggcaatgcaaagcagcgagcgattactctgtgcaaagaaataccggtttcaagaaccgcaagcgcatttctggaagagcagaattctttggacgattacatggcgctgctgcatgatctggaggaaggctggaacggctatcaccacgccgaagaactttttggggcacaaagtgacaagctggaacaggtcgaggattatttgctgtcacttgaactagcggcgcgaacgaggaaaaataaatcacagacgctgacccgggaaatcaaagcgcttcaggaatttttaaatcaacccgagaatcgtgcgctcgcggaaaaattgcaaaaaattaatggggaaatctctgatttagaaaaaaatctgccagattggaaagcagacgtcagagtagacgggaccaaacttgaacagctatgtgaaaaaaagctgcaaaaagcgcaagaactcgtgactatgattgaacatgaaaataatctgaggacgtattttctggaagagcaggcgctaggatttttccccgatacagcggatgaaagcgttttagcagctgcgcgcaaagccgagcttaagttgcgcgcacaggatgtggagcaattgcctgataatatgtatcaggcgcttcacgaaaattttctcaaaaacagcgccgcgcttacggactatcagcccaaaattattccgcagtttgaagagaccgagggggttctgcgaaggcggcggttgattcttctgacactggatgggaaacaggtttctcttccctttttcatacaggaaattggccagaagatttccttgatgcaggaattgctgaacgaaaaggatcgggaacttttcgaatccatcctgacagaaacaatcagtggcaaactccgtaaccgcattgcggttagccacagatgggtgcacaccatgggcgaaattatgagcggtgtgaacacctcaatggggcttgtttttaatctttcatggaaagggaaatcccagcaagcagatggggaattggatacgaaaaagcttgtagagcttttaaatagagatatcgaaattttaagcgatgaagaccgccgcaaaattacagcgcattttcggactaaggtgaactctgcacgcagatatgcaacggaaaatgaccagtctgtcagctacgccgaccttatccgagacgctctggattttcgcaattggtttgaattcactctttcttttcaaagacggggtgaaaaggaaaaaaatcttaccaattccgagttcaataagttcagcggaggtgagaaagcaatggctatgtatgttcctctctttgccgcaatctccgcgcaatataaaagagccaccgtggaatgcccatatgtcatcgcattagatgaggcctttgcgggtgtggacgacaaaaatattgagagcatgtttgcccttgtggagacacttggctttggctatatcatgaattcacaggcattgtggggctgttatgcatctgtcccacaactcgaaattgcggatatgtaccgcccggctaattctcaggtagtcacgatccttctttatcagtgggacggttaccaaaaaacactcgacgaaggtgcgatgcttctatga

SEQ ID NO: 50117 - DNA, 1281 bp, Ethanoligenens harbinense YUAN-3
atgagtcaaactgactgtgttacctatttcctcgaaaaatcgggctggacccgccagatgaatcaaattttaaaaaagtacaagtcttatgggaataattccggaactgtttctcttccggacgcaacagaggaggagtgccgtgtagcgggtcttttcatgggtaaaacattttatccgccgttgcggtatcagctttcggacttcgagcaagcactaaaggccagtcgttttcaggacacttctttgcaagagctgttggagggttatttcggttaccctgtgtgtatgaataaagaagtgagtaaaacccaccaagaatgggttaaaaacctatttgcagaagcatacacgcaggctacatccaaagtaacccaaaactgggtacagagaatgttggaatcgaaggacagtgggtacaaactttttttgaaagctgccaacaaagacgaggcaatggcctgtacctctttaaaacaggcgtgtgctgcacttgatattttggcgacccaatcgctttcagagcgccgtctggcagttttcagcgcgggaataaccgcaaatccgcacagtttcgatatggaccgccttgccggtaagttacttctatacggaatttgcgattggcagcaaaggaaatatccccacactgccgagcagcgtgcggaaaccctttttttagtcaatcttttcgcggacgatatttccagctttaccacgcagttcggtcttctgctttacacggaagaaggggaacatcccgcattccaagcattccgtacccgcaatgaaagcgctgtagtgacactttccaatctgtcaacaattgttcgtgcggcaagtccgactgggaagatttatattgttgaaaatcaaatggttttttcccatctgtgtgagcaatctctaccgtcacattcccctattttatgtacatccggacaggttaaaaccgcatcactgatcctgcttgatttgttggctgcttcaagctgcatgatgtattactccggtgattttgacccagaaggcctgcgcatagccgaccgactggcattacgttaccccaaacaattctttttctggcatttggagaaagatgattattaccgttctttgtcggaagaatcaattccttcatcgcggcttacagcgttagcccagctacgtttgcccgatttgcaggcagtttcctcggagatacagaaaactcggcgcgcgggctatcaggaactgttgttggaacagctcctgaacgacctaaatgccgaagttcggtaa

SEQ ID NO: 50118 - DNA, 1575 bp, Ktedonobacter racemifer DSM 44963
atgaatacgactgaaggtcttcccacttctcccgcatttaatatcacagatcgcttgccgatctttagctatcttgtcagttccaatcgcattcgctggtatcgcacaattatgcgcaccttcctccaacagcatcgtgagttttatagctatcagctcacgatacaggagattcgtgacgcagtccgtgccgccttcgatcctgaatatacacttgaacaatgccagaatgacctggtggcactgaaagagtggggcaatataacgaccatctacgactccagtcgcgcctcctctatcgccagcttcctctcacccgccctgctctaccaggccacgcccgaggctatcgccatcgagacatttctcgatgagcaacatcgtgccagcgccgccagaggttcgctgcgccagggcgatcttccgcgcctgtgggcctctctccagtctatcgatgacgccctgcaaagctctggcctggatctggactcaacccgtggacgcgagctcgcagaggaatggcaacgcgcctttgaggtctggaacacgatggcacgcgaggccgcgcaatatcttgcgacgatgatcagtgccgctcaacaggctcgccctgacctggaagcatttcagctctataagtcggcggttgtcgcctacgtgcatggctttgctcaggccttaacccaatatagcagacgcatccgcgagcagctctctatgtggagagcaacgggtaaacaatcagcactgatcgatattgttgcccgctaccttgagccgcccacgccgaccgccgagagcaggcgtgcccccgaagagttgcggcaggaggccagcaaccaggtcgaggccttgcaaaactggttcgccgaggggaagaacgccgattccttccgccgcaacgccctcgccgaggttgataaggtcgtgcggcgcgcttcgacactggctgcaagcgctcgtcccaacgccaactacgccacgcacctggatacactggcacgacatttgctcacgacccgcgatggcgagacagcccagcaattgttctctgtcgccttcgccaatcacctgccagtccacctgcctgagagcttcgctggtgacccaagcgcgacctatgattcccagcagcccaacgtctggcaagaggctcctgccgtgaccctctacttgcggccggtgaatcgcagctttcgcggcaatccagccctggaagatcccatcatcgataaccagaccattatccgtgatctcgtgatacagcatgagacacggctacaagaacagcgagcacgcattgcccatctcttcgccaccgatacactggaccttggcgcgcttacccatgtgagcgtggatgaccgcactgtgctcaccgagatcattgatgcctgccaggggcatacctcccatcagtatcgcgccctcgatagctccatcattacactattgaatccagacgagcggatctacacgcttctccacgccgacgatggtaccctgttcctcccacgctatcgtctgtcacgccaacaagcaagtgtactgcaggcgcagagaaagctggtataa

SEQ ID NO: 50119 - DNA, 1383 bp, Ktedonobacter racemifer DSM 44963
atgcaagagactgaagttcagcaagacatcccgataggcgaaggcatagagccagcccagggagaacaacaccccgccaacgtggtaaatcaccgcattcgccgggcaaccatgacggcggatctgctcaaggcacacgtgacgttgatggagaaagaggttattcactcccatcaaggcgacctgttccgcctggtacaacatcactactataccttgcaggcatggcatgatcagcatacaggctggcgcattcagcgcaatagcagtgtgatccgcctggagcgccatctcaacgccctcactcctggctatctctacgaacggctgaaggagccaaaggattttgcttgcttaacctggctgctctggtactcggagaaccggcaattgacgggtcgcggcaatgagctacaatttctgctttcgcaactggccgagcaggttcaggaacagtcggctctcgggctcgatggtgaagagccattcgattttcgcaggacagccgaccgttatagcatgcagcgcgcgctccactacctggaggagctgggaggactacaactcgtcgatggacagacacgggaatgggtggagcaggccggaaatgccgatgtcctgtacgagtttacgcctgtggcacgctcactggtggccgcgctcaatccacagaccgttgagagcacggcagcacacctgtccgatccagctacggcgctccaaccagccttactcacggatatgacaaggtcgcccgccctcgtacgcgcctggcggacacttctgctcggccccacgctcttccgcttcgatgacccctccgccttcgccgagctgcttacgcacgccgacagcgttgccaatgagcttcttgatacctttggctggctgctggatatccagcgtgattatgcctgtgtcgtacgcgcgagtggcatggccctggggcctatcgcccccttttccctctatggcaccaatgatcagattacgctcctgctctgccaggctatccgcaagcaggtcgagatcagcgcgtggtccccgcccgatgcctttggttgcctgcatgtctccgtcgaagatatgagcgcgctcctgtatagtgtacgcgaacaatgtggcgagaactggggcaacgaggctcgcagcaaaagctcacgcgtgctactgcaagatgtgtacaagaagatgcgccaggtcggcctgctacgcggccccgacgaggaagggcaactgcttatcctgccaaccgccgcccgctatgccgccacctatgagaagccaggcccagaggccacgacaagcactcgcgggcgcgcaaaagccagctcgaagcgcgcccaaaaaacacgttccacgaccctacccggattggagtaa

SEQ ID NO: 50120 - DNA, 4347 bp, Ktedonobacter racemifer DSM 44963
atgcaagaaacattcgaccagctcaccgaatggacagcgacgctcgatgagaactcggaagatgcgcttacaaaccaggtcacacgctttgtcgagaccctccaggcacaagcaggcggtcccgagggctatcgcttgcgccgcatcatcctgaccaatttctggctctatggacgccaggaatttgaagtcccgcatggtcgcctctttctggcgggcgaaaatgccagcggcaaatccacagtgctgaccgccgcgctcccgctcgcgcttgagggcgacctgcgccccaaccgcctcgatacctttggtggtcgcgaacgccgcatcgaatactatgtacttggcgacagcaattcagccaccccctaccagcacgagcgccgcaccgcctatatcgccctggaatttgaatggtgcgataacgatagaccacccatcgccgacgaactacgccaacgctgggagaacggtgaccggacaagcacacgcttcctcaccatcggcttgagcatctctggcaacgccaacaccaccgagcgcattcgcgcactgcgcttcctgattaccgatggctcacgcctcggctacgagctcgatactatctatgacacgaaaaataaaggcgagaagcgcgcctatgaccacctgcgcttcaaacaactgctcgaagggcatggcatcatctgcgagacgcaggctgaatacgagcgccaggtcgcccgctacctcttcggctttcacgatagcaaggatttcgagaagctgatcaatctcctgctcatcctgcgccgcccaaatctgagcaccgagctcaacttctcgcgcgtccacgactatctaaaaatgtcgctgcgcaagatctccagcgaaaccacttcgcgcgtcatcggtaccatcgaacgcatcgactccatccagagcgagattgagcgcgtccagcaatcctatgacgccgccgagcgccttcaccgctcgcttcagcatctcgccagcgtccgcgcacaactggcggcctgcgaatatgagggggcacagttagtcgaggacgcggcccagagccgggcgagcaaccttcgtcgctccctggaacgcgccgataaagagcgcacggaggccaggcagcgttcacaattgctacaagaggagcagcaacaaatccacgggcagatcagggcgctagaagcaagcgaaggtctccaggtggcaacccagcttgccgcggtacgccagcgcgtccaggccgcgaccgcacagatgaacctgcaacaacagagcctcgacgccgcgcgccatgccagcaacgccagcgaacaaagcgtccaacgccagcagacacgcttcagccggatgaaggatgagagcgcggcccagttgcgtacactgcataccctcgccgccgagaaggcgctctgggaggctgccgcgatccaaatcgagagcgctatcgcgcaggtgaaggcctttgcaacaaatgcatccttcgcgcccgaaattccctccggcgtgaccacgcttctcggcgcaactgccgaggaacgtatagcctggctccagcgccttgaagccctgcaccagcaacgcacacaactggataacaaagtgcagaacgcacgtcagcttgagacgacacgctttcaagagcttgacgaggtacgcagccatctccaggcgctccacgacagctcccgccaggcacaacagcaggttgagcaggcccttgagacgttcaagcttaatgatgacacagcttcagtagcaacattcccagcagatgagatagagctcctcctggagagcgatgaggctcaggaaggcacgctggtcgagcgcttcgcggccctgctcagcggctaccaccagaccatcgcacgccttgagcgcgagatgagtgaggccgccgccgaggtacaggacgagatgcacgaattgcacctcctcatcggcggcaagacacacgaacgccaggtgctaaaagagctgtatgagcgtaaaaaggctgaaccagaataccagccagagcacgcagagaggcatatacgcgcccgcacccggctagcggaacagggcatcaccgccctcccgctctacaccctgctcgacttcgcccccggcagcgacgaacaggaaacgggacgtatcgagtccgcgttagaggacgcgggcctgctcaatgcgctcgtcgtccagccttcccagcaagacgccgccgccacgctccttgccagcgaagacctcagcgattgctggctcgatctcaggcgcttgcagccgcgcacacacgcatcgcagacaagaggtattctgtgttttgacaccgctctccaggcgcctactggacagtgggaaacgctcaccgcagacatcatcgccacgctgcattccagtgatatatacggcatggagagcagcggccagtggatacatgggttgctgagtggccacgccggtccaggccaggctcgctacatcgggcgcaagacacgcctgcgtacacggcagcgcgagctggaaacgttggagagccagcaggcccagctcgaagaggagtttcaatggttcaccaaccgcctcttcgcctatgagcaacagcttgagcaggtacaggagaagcaaacgcagttacgcaaggtactcccccagagtggcctggaagaggtttaccttgaactcgtgcagacccagaagacactcaacacagccagagaccggtatcagaaggcacgccagcacacacaagaggcgcggcaaagttataacaccatcaccgcgcagcttgagcgcgagagccagggcgtttcggcactcgccagcgatgctggccgcgtccaggccacgctcttcagcgttattgaactcaaaaaccaggccaactcgctgcaaacacacttccagagcctcgcccatagctgggaagaataccagcgggccagcgcaaccctggaacaggctcaggcgaacgaggtcaatagcacacacttatatgagcatgtacaccaacagatgctccaggcccgtgctgagatggaagagtttcagcgtgtggcctcgctcgcgaatgccgaggaacttagcgaacgactacgcgtgttgcgtgagcgcgatgacagcctcaccggtgagcttgatgaggcccggcaaaaacacacccgtgccgacgagcgctatcagaatctcgcaggcaacctcgtagagatcgaggcccacttgcaggaggcccaggaagagtgtgtacagagacaggcccgcttccttgagctcctgacagcctacccggtagaggcgctgttagccgccagccagactgaagcgctggccgccgcgcaccatctgctcgatggcgcgctctccgagagcgaggttccacaacgcaaagagcgactcgaaaacgcgtaccgggatgcctataacgacctggcgcggagattcaatcaagagcaatcgcaactcctcgaatatggaccagacctcgacaggcaggggcgtgtgcatttcctccatgagaaccaaagccgccctatcgaactactgaagatcctgagcgagcgcattgagatgcagagaaccctgctcgatgagcaggagcgccaactcttcgaggacttcttgctacaagagatcgccgaggccatccgcatgcatattctggaggccgaggaatgggtgcagcaaattaacactgtgctcagcaacctgcctatgattggcgagcactacgccctgcaatggaagccgcccgccgagtacgaccagacgcgcctgggcagccagctcgcacaacagcatcgcctcctgcgcaagccagcccaggccctcaccgacgaggagggcgacaccttgatgaacgcattccgccgcgagatagaggcggttcgcctgcgccagcaagagtctcccgatctaaactttatggaggccctggagcagatcttcgattatcgcgagtggttccacttcgacgtctgggtgacgcccattgggggccagcgccaacgcctgacggaccgcctggcaggcacacgtagcggtgccgaacagctcttcgcgctctatgtgccgctcttcgccgcgctgggcgcgctctatggcagcgccagccctggcgcccctcgcctcctcgcgctcgacgaggcctttgataaagtaagtgccagcaacacccagcgcatcatggagttcctggtagcgcagggcttccagtggatcatgactggcccacaggtcagtggcgctggctccaaaattcccgccagcgcgcgctacctgatgattcacgacaaaggctcagcgatagccacagcctccgcctcattctggagtgataaaacaggcatgcaggctgaataa

SEQ ID NO: 50121 - DNA, 1344 bp, Ktedonobacter racemifer DSM 44963
atggagcagaacaagcacgatcaggccaatgtccagagggcagttgccttctttacgcaggctggcctgtcgcgcctgctcgtcaggctacgcgacaaatatcttgagctggggcaggtcggagggcagatcatgctggaggagagcacgccccaggagcgccgcgagatcgccagttttctcggcaagcccccttcttcaggtcccacactcaaggtcagggcgagcgacgttgataacgcgctcaggcgtagcggcttcgcctgcaccctccccgagcttcttgcagccttcttccccgcctccgcgctggtgacgcgtcaccagcgccgtgccacccagaccgcccaccaacaggcctttcgagacgcactcgacacgcttcgcacatccttgccagaagcatcgcgaggtcgcacctggctcacagagggcacacatgggcaagaatggctcttctcacgctacaaaaatgccaggccagaagagcaggcgcgacaactggaggttattggctatattgcacacatcctcgaccagttaccgggtgaggccatgccgcaacgcctggcgcttttcgcccagcaaaccagtggcgacccacatatgcttgatcccaaccgggcggcgggacgactgctcttgctggcactcggcgacctcacacatacaccactccaacccggtctgaaccgcgaggatgtcctgcgcctctacatggaggtcggcttgcaagtcgataccatctcctcctatgttgtcgccttcaaccttgctagcgcatcttttcaggatggcacgcccgacccaatgatcgccgccgcgggagagcgtattctccccctgaccctgcgccaactgtgggattggggcagcgtccaggctgtcaccagagatatctatatcatcgagaatccccaggtctttgaggaggtcattgacaatctacctggcaccacacaggcccccaccatcatatgcaccgctggctggcccagcgtggcggccctgaccctgctcgacaagctcatcgcagccacgcccgattatcggtttcactacagtggcgacttcgatctcaaaggactccagatcgctgctcacttccttgaccgttatcctaaccactgcaccccctggcacatcgatccagaggcctatatgctcgccctccaggtcggtggcgtgctcgccccagctaacgagttagcccaactcaaggcgctccccaccatcttcaccacccttgtacaagcactacaaacacaccagcaatgggcctaccaggaaggcatcgcccacctcctcacagcattcaacgaacaagagcaagagcgagcatag

SEQ ID NO: 50122 - DNA, 1905 bp, Thermaerobacter subterraneus DSM 13965
atggcggacggaaacacgcgggtggagagggaagccggggtggagaggaaagccggcgggccagccccggccatcgacgggtgggcaggcggctcgtcggcaccgggaacggccgcggcacccccggatgacgccgacgctcccgcctccctcctgccctaccccacccgtcccgtggacgaggcccgctacctggtggcggaccatgccgtggcccgctaccggatcatcgtgcgctacttcttccggcagcacgagcgcagccggtactggctgaccgccgacgagatcgtcgagcacgtccggagcgtctacaggtccgattacacgctcgacgagtgcgagcgggacctcggccagctggtgcactggggcaacctccacgcggagcaggagcgctcgcgggcccgcaccgtggaggagttcatccgcagacggctgcggtatcgcctgacaccctataccgtcgagctcgaacggttgctggtgcgcctcgagcacccccagcggcagggtggctccctggatcccgcctacctggaagggctgtgggagcgcctgcgccagctggatcgcctgctctctaccagggagcgggcaacgggtgccatcaccgccgatctaccagggggcggcttcagtctgtacgcccgtgccggcggccacgccgaaccggccggcgcacagccggttcaaccggccctggcccggccgacggggaatggcatgggtccgatccacgtccatcccgccgatcgctcgttggcctcggaccggccggcgctccccgaggacacggccgatccccggcgggtgcgggcgctctggcgcgaagcagtggagtacttcaccaagacccgcgattttgccaatgactacctgtcgtcgctgagcgcggcccgtccccgggacctgcagcagttcgaggcattcctctcgtacaaggacttgctggtccagcacctgcgccggttcgtccagagtttgatcacccatgccgcccagatcgaagggcttttgcggcgctggcggcatgaaggcctccaccggcagctggcgcacctggccggcaccgccgacgcggaggaacccgatccggtcaccggccggccgcgggatctcgacgcctgtatccgccagcggctggaggagttggtctccctggagaactggttctgcgaccgcagtggcgtcgacgtgctgcagcgagccacggtcgacgccatcgagtggatcgtccggcagacccagcgctggatcgactaccggcggggcggcgccagtctccagcgcgacctggaggcactggcgatcgccttcggtcggtgccgggacgtggacgaggcccgccgtctggccggtctcgccttcggctccccgggcacccggcacatccacggggccgaaccccgctccgtgccggtcgatcgcgacgtctggcgggatgccgaaccggtgccggtggaactggtgcccatcgcccgcggccgccgggagcggggccgctccgaggcggtgcccgatcgccgcacggaacgggaggcggtgctgcatcgcgagcgcctgcgccagcaggaggaggcggcgttgtgggacgcgatcttctccgggcccgtcctcgacctgtccgaggtgcacctcgaacggcccgagctgcgggaacgcttgctagccgtgctggtacgctgcatgcagtcgcccgaccgggcaacggtcgcctccgacgggtcccggatcgagctggtgggctccgtccccggcgaggcgggccggctggtcgctcccgacggggttctgcacctgggccgctaccgcctgcggcgccttccgcctcgccggctccccccgcctcgccggctccccccgccgccgcgccggccgaaccgggaggccccgaccggatga

SEQ ID NO: 50123 - DNA, 1320 bp, Thermaerobacter subterraneus DSM 13965
atgacgagcccgaacccgaatgcggttggaagtggggcccgcagggaacgcggagaacgccaggcggccgccatcgatctcctcgaccgcccggcggtgcacctcgccgaggatccgatggccttccgacgcatccgcatgcacctgggcgagctccggcagtggttcgaccgccgctgccgctggccgctgctggccacccgcgagctgatccgcctggtcaagatcccggcctggacgagggtgggacacggcctccccgacctccagcaccccctggactatgagctcttcacctgggtgctgtggtacgcggccggcgatcactccgagcaattcctcctctccgagctggtcgtcgagatcgaggcccgtgccaacgccgcggccggagagcggcatgtcgacttcgacgactacgtgcaccgccaggccatggtgcgggcgctgcgagcccacgagcggctgggcacgctgcggcggatcgacggcgaccccaacgcctggatgaaccggggcgagggcggcaacgggctctacgagttcggccccctggcctaccgctggctggtgtccctccgccgcgagggactggagcggctgctcgcccgggacgacccggcgacggaggtcgccgtcgagacggacttgccgccgcgagtgcgcctctaccgcgggctgctgctcgacccggccgtgtaccgggcggatgacccggaggctttccggctgctgctcgaccgccacgagcggcggcgcatcgccgacgagctgttcgacgtgacgggctgggagctggaggtgacgggcgcctacgcctccctggtgcgtccgaacggttccgccggccgccacggcgagctcttccccgcccggcgggcccgcaccgatctggtgctcctgatctgcaccgccgtgcacgaggcggtaaacgggtccgaagatgtggaggctcccggtggtttcggccgatccgcccctgcgaagggcatcggcgcggcctggcggtgtggggaacccgataaccagggctgcgtcgtcctgacggaggcccaactggaacgcctcgtcgtcgccctggccgaccgctaccggacctactggggcaccaccctggccggccactccaccgcggggctgctgcgcgaggtcctggaggagatgcgcacctgggatctcctgcgcgggcccgatgcccacgggtgctaccgcatcctgcccctggcctcccgcttccgcggccagtacgcggaggaaccggcggagcccgaggacctagggcgagaaccggccgatccctcaggaggtggccgcccgtga

SEQ ID NO: 50124 - DNA, 1152 bp, Thermaerobacter subterraneus DSM 13965
gtgaccctcggcgtgcgcgacctcgccaccggcgaggagctactggtggaacgcctggaggagctcaatcgccgcagcggcgcagcgcgctggcggccgcggcgcctcatcctgatcaactggtggctcttcgacgagcaggtgttccacttcgcccagggccgcctggtcctccacggtcgcaacgcctcgggcaagtccaccgtgctggccgcggccatcaccctcgtcctcgacggcaacaagagccccgagcgcatggacaccttcggcgggcgcgggcgcagcgtgcgttactacctggtgggggatccggacgccaccccggaatcggccttctaccacgaaagccgcaccggttacgtggccctggagtttcagtacggtgcctccgcccgcaccctgacggtgggcgtcggcctgtacacccaccgcaaccggccgggcggcgaggtcgacttctggggcttcagcatcgaagacggccggcgcctgggcgtcgatcttgcgctctacgacgagcagcgggtcccgctatcctggcgcgccctcgcggagcgcatcggtatgggcggtcgcgtggtgcggagcgtagcggagtacaagcggctcgtcaaccggctggtcttcggcttccccgacgaagccgactacgacgacctgctgtccttgctgctgcagctacgcagccccaagctgaacaaggacgtgcgcccgtcggacgtctgcgagaccctgcgcaccgccctccctcccctcgaggaaggcctgctcgaccaggtctcgtccaccatcgagcggatcgacgactgcctggaccggctggcggagacggacgaacaggcccgggccgcccgcgcggtcgaccaggccctgggcaactacctgaactacgtggcgcaggaggcggcggtcaagttcgacgccgctcgggctcaccggcgggaggtcgaggcccggcgagacgttctggaagctcacctgaccaccgaacgagcccgtcatcgcagccgttcggccctgcacgagcgggtgcggcagcgactggcggtggtcgaggaggagttgcgcacccttcaagcccatgaggtcttccggaccgaagaggacctcggccgtgcccgggaggagctggcccgggcgcggcagtga

SEQ ID NO: 50125 - DNA, 1482 bp, Clostridium sp. HGF2
atggaactatatgataagcttttaaaaccgataaccgaggtgaattatctcagagccgagaatgtggaccgttaccgcattatcattcgctatttttatcaggagcatgaaaaaatacattactggatgtttaaagaggatatttatgacatgatatccgcattaccaggatatgaagactataccatggagaactgtcagaatgatttgcaggcactgtgcgactgggggaacctcgttgctacacaggatacctccgttcccaataccttacaggaatttaaaaataagaaatttcgctatcagctaagtgaatataccgttgtaattgaacgaatgacaatagacctggagcatcttgctgtagaaggggcatccttggaaccgacgctgctggagcggattcgtaaacagattctgcagctgcttgctgtaagggataaatcgaatatggaggtcgctgactggtggcgaagtctgaacgatgatttcattcgcttaaatcagaactatcaggattacataaagacattaaacagtgccaaagcagaacaaatgatgaagtccagagaatttctggtatttaaagataagctgatcacctatcttcagacatttgtaaaaagcctgcaggagcatggaatgatcatcgaggattatttgagcggtgtaaaggatgaagatatggcgctgattttcgataaggtcgcagaatatgaactatcgattccccgcatcaattcccatatcacaaagactgccgtactggaaaattgtcagggacggtggcagagtcttttcaactggtttgtcggagaaaatgataacaatgaggtaaaccgcctctttgaaattaccaatgaaatcatacggaaaatcacacggtatgcactgcagatcggtgagctgcacaatcagggggcaaaccgtaaggaggaataccggcgtatagcggaaatattcgcaaaatgcaatactatggatgaagcacatcgcttaagtgcactggtgtttggggcagatacctgtatgcatttgaaaaacatcgcatcaagggatacggacagcattcacagtggggtgtatcaggaagcttctgccttccttgcactggagccgcgcacaaaggtggcaaggaaaaagcatgagcgaaagcctgcgacggattatgcactggatcggcgaatacagcgtctggagtatgaggcacagcgcgaggctgaacagaagaagataaaggaattgagtaaaaacggagaaatcatcttttctcagcttcccttacttgacaaggccaccagaaaagccctgcttggctgggtatccaaggcacttgccgcaagtgatcggcgtgccaaaacagatcaggggcagcattatcatatagaaaaggaacgggaaggcgattgtatactgcattgtgaggatggaaatctggtaatgccttgcttcaaaatcctgtttgatgaggaacagttatga

SEQ ID NO: 50126 - DNA, 1131 bp, Clostridium sp. HGF2
atgagaataatagaagaattgatgaatcgccgctggattctgaaaagtcaggatccacagctgtattatgaaataaaggataatgccaaggaattgaaaaagaagctgcaggagaaattcggctatgcactcattatcaatccatatcttgtaaagctggaaaagattccaggcaaagcagaaggctggatggggattaccgaatttgaaacgcttatggaatatcagatgttctgttatctgcttatgcttctggaagacaaggaagcaggggaacgctttatcctgagtaatatctgtgaatttattcaggtgcagcttcctaaaggtgagctggaatggacaagtctgcgagcaagaagacagcttgtgcgtgtattgcaatatgctcttaaaatggggatgatcatttcccgggaaggtgatgaagattactttctaaaggatgagaccagcgatatattatatgaaaacaccggagtatcacgctatttcatacgtaacattcccaaagatattatggattttcatgagccggaggactttttacagagcgagtggtttgatatggaagaggatcgcggtattgtccgccggcagcgtatttatcgtagactcatgctctcctgcggtgtctatcatacagctgaagaggataaggatgatgatttcggctatattcgtaattaccgcagaaatatagaaaatgattttcagagtctgtttccctgtcagctgcatgtgcattcctccagcgcctttctggttctggaagaagactgctctatgggtaaagtctttccaaagacgcatgcctattatgatctgctgctgattgtccatgacgatctgcgtaaacgggtaaagtcttcccgtctttctctggatcagcacgagggaatcacactacggctggaagaatatcttgccatcgttcagcgtctgatcaagaaaaacaatgcgttactgccaaagaaatatcagattgaaaatcgcagggtggaagacagtgcaatggatgtatgcaatcttgcacagaccttgggctttgcacaggtgcagcaggagaatgtttatatctatccggttgccggaaaaataacaggaacatatgcggaggtaacagaatga

SEQ ID NO: 50127 - DNA, 4035 bp, Clostridium sp. HGF2
atgagcgaactaattagcaaatggcacatgcaccggctggggctggttgatttctggtattatgtaaacgaggaattttcctttaaagacgggcacatgctgctcagaggaagcaacggttccggtaaatctgtcacaatgcaaagctttataccactgctgttggatggaaataaaagcagtgagcgtctggatccttttggtacacgctcacgtaaaatagaaaactatctgttggaggaaggcggcgaacgaacagatcgcatcggctatctttatctggaatttaaacgctcggacagtgaggtttacaaaaccatagggatgggtatgcacgcgaaacagggacgtccgcttgtatcgtggtattttgtaattgaggataatctgagaatcaacagagaagtgcagctactggatcataacctggcaattacaaagcaggtgttgaaaaaccgtatcggtgacacgcaggtcatggattcgcaaaaagaatacatggacagagtgaatcaggcactgtttggttttgaaaccagcgaggaatataaggaagctatcacattgttgctgcagctgcgctcgcctaagctgagcaattccttaaaaccaaccatgatcaatgaaatcctgagtgaatccttacagccgttgagcgaagatgatcttcgcccaatgagtgaagcgatatccaatatggataatatcaaggatcagctggatgccttaaagcaaagctatgcttctgcaaaggcggtttatcaggtgttcgagcagtacagtcatgccgtattgtttgaaaaataccatatctatcagactgtcaggcagacagccgcaaatcttcatgaagcttatcaaaaatatgaggaggaattacagcggcatcaacaggaaacaaagcagaagcaggaaaaccgtacacagctagcacaggaacaggcgctgttaacagaagaaaagctttctctggcaacagacgaccttcagcggctggtggaggattgcacaagactggctgctgagaaagaagatactatacaaaagctccagcataaggaaacccaggaagaggaaaaaagtgatcgtcttcaggaacttagagtacagcataagacacagagtgaccgatgtgagcaagccttgtctgaaatgaaggaagcctttgaccaattagatgtactgcaggaggagctgctgctggaggatcatctcctattaaaagaggagatgtttcagcatccggacactccatatgattttacatatatcggaaagcggctggatgcaaagcttcgcttacttgaggaaggactgcagctgtttaactcctatgatgttgcaaagtcacaccacaagcagctggtggaagaattagagcagcagaagcagacgaatgagcagcaggaacatctggtggcgcagcttgatgaacaatgtgaccgcatcgtggaggaatataaagaaagaatcagtcagtggtccgcaaacaatcagcatctaaagctgacggatgaggaattccacaagatgatgcatcttcttatgcagtatgaggaacagccggacttttataagctgacggatatcattcaacaaagctatcagacactatataaggaaatcattcacctgcaaattgagcaaaaggaaatggcggaaacctgtaggatgaatttggaacagaagagcgcagagctgcacatgtggcagacacaaaaggatccatctcctgcaattgctggggaacaggagcaggcacgccagcttctgaaacagcatcagattgaaagccgcagcttttacacccttctggaatttgatgagcagatggatgaggaactgcgcgcattgtgtgaagaggcattgctgcgtctgggagtactggatgcacaggtggtgcatgcgagctcccgatcattgattgaaacccttgcatcaggaagcggggatatgtatttctttacacagcgaaacgtaagggatttacaaccgtattatctgaaggggacaactcctgagcagcttgcgggtgaaatcaataccgttctgacatcccttcatatcacgtatgacggtaaactgcagctgcatgatgccatgtttcaaaccgggattgtagagggaaagctttatcaatctgtatcggcaagatacatcggagaaaatgcaagacagaaatacagagaacaaatgattctgcagttacagaaagcatgtgacatgctgaaaaaggaatatgatcaggaaatgcagaaactcacggatctggacaaacgattggagcagctggaacaggaagcatccgcttttgtaaaagaagatgatctgcatcttgccctacagcagttaaatgaggggcgaagaatattgcagcacgatattgcctgctatcatcagatggaggaacgtctgcgaagacatttggaagcgatgcagggaattgaaaaacagctgcgggaaactgcaggtaaattatcgattacgttacgccgcaatgtgtttgaacaacagaaggatggttataacagctacagaaaactgttacagctggtacaaacaaaacagccgatattcatacaatctctcgactttgtgaaaagctgtgaaacgcaaatagaagatgcctttcgggatgtttcagaattcaaagcagaaatcgatacgttaagagaactgataaagaaacaaaaccttcttctgcagcaaaaggaaaaacagctgaaggatttggggtatgaggataaacagaaacggttacagcagatcgaagaacgattgcataagctgccggatcttatgcaggaactggatacacgtttgggacagctgcaaagtcttgtagccgcaacgtcacaggatctggaacgcacaaagcaggatatcgaacatcaggatgcactggtttcaacgtattttgatgttgtgaaaaacgaagctgcactcggatatacgaatattcctttatgtgaagatggacagctgatcaaggaaatacggaatctggaaaaacagacagaagtcctaaagaaaccggaagcattgaaaatggatcttcagacagcttattacaatcatagaagtaatctgcaggaatacaatctgaccttcacaacggatgatacatgggaagaactcacagatatcagtgccagactggatatcaatgcgcgatatcagggaacctctctttcctttccagaactgcttgactgtctgcaacgtgatgttgatttacagaacaatctgcttgtagactctgaccgtcacctgtttgaggatatcctggtaaatatcatcagcaaaaaggtacgtatccgtatacaaaacagccgtgcgtgggtggataccatgaatcgctatatgaacgcaatgaataccagcagcggactgcatctgaatctgcagtggaagagtaaaaaagcggaaagtgaagaagaaatggataccagacagctggtggaaatcctgcaaaaggatgtcaaagtcgtaaaggaaagtgatttaaaacgtctgtcttcccacttccggtcaaaaattgctgccgcaagaaatctgcaaaatattgaaaacaacaccttaagctttcatcagctgatgcgtcaggttatggattatcgaacatggtttgaattcaaaatcatggcacaaaaaaccggagaagctaaaaaagagcttacgaacaataccttctatgcttttagcggaggtgagaaagcaatggcgatgtacgtgcctctattctcagccgtagccgcaaaatttgaaagtgccagagaggatgcgccgttgctgattgccctggatgaggcatttgcaggagtggatgaaaagaacatttacaatatgttcgatttgatcagcaaatttaaatttgactatattatgaattctcaggttctatggggagactacgcttccgtaaaaggtcttgccatttatgaactgtttcgaccggaaaacgcccgttttgtaactgtgattccatatgaatgggatgggcatataaaacgcatgaagggagatttatcatga

SEQ ID NO: 50128 - DNA, 1284 bp, Clostridium sp. HGF2
atgatagaagatgcatttgcacaatatcttttacaggataccggctttcgacgtgtgacagatctatggattcgtcaatatcagaagctgcagcattttggaggaacaatatgtatcaaggatcctgaagatgatgagcgtgaggcaatcgggggcttactcggtaaggattactggggagtccgtgacatttccataccttattctgtctgggaaaaggcaatcgaggacagccggtttgccggaagtgattttcttcgtgtacttgaaatttataagggggaaagcatactgacgaacaaggaacagaaggaaataaaagctcaaaaggaacagcaggatatgcaatctctatccaaacgctatgcatgcacaaaagctggagagtggctaaactggatgcaggaaacaaatcataaaagctatggaaatatccgtcagctgctaaacaataataagtggcagacagtatgtttcatattggacgcaatcaatcagctgcctgtctggaagcaggaaatagaaactatggcagtattcgcctccgcagtgacccaggatccgcatttctttgataaaggcattgagaatacgctactgtttcaggggatctgttacttccttaatgtcgaggaacaggatatcagtctggcagagaagaacaagctgtattatgaagccggtttattaaaagatgatttatcaaacagctgtatgattgcgcatctgaatgcagaaggcagagatggaaaagtacatgaggcatggaaaggattctttgaccgctatgaggcatggacagtgtcgttgtacaatctgcagcaaatccataacatatctgacgctattaaggcagtttatattgtggagaatccgtcggtattccgttctttgtttttggagggaaaaaggctgggcaaggaacagatcggctttgtatgcacaaatggtcagctaaatctgtgcggctatgtattgctggatctcatacagaaaagtaacattcccatgtattatgcaggggactttgatcctgagggaattctgattgcggataggctaaagcagcgttataaagatgatctgcatttatggaaaagtacagtggaggattatcataggattatgtcaacctcatccatccgtgaaaagcgtctcttgtcattgcaaaactgcaggagtgaagaattacaggcactttgcagagaacttgaaaagcacgcatgcagtggttatcaggaggcattgctatccttatatattgaggaaataaaaaattcttaa

SEQ ID NO: 50129 - DNA, 1653 bp, Intrasporangium calvum DSM 43043
gtgttgcgacatgcccgcgcggctggcgtggctgtcggtgggggcgtctactctggcggcgtgacggaccagccctccgccgatgagcccggcggcacccaggtcgaccgggtgcggctcgaggcgttgcgctatgccgtgaacgaggagtcggcgacctacatcgcggtcatgcggctgttcaccgggggtctggccgggatgctgtcggaccagtcggccgctgaggtgagcgcgcggctggccgagcaaggcatcgcgctcgacgaggacaccgtggacgcgcggctggcctatctcgtcgagcacgggaacctcgctcggagcccgcgtgagtccgaggcgcgcagcctccaggactacctgcgcaaccgggcgcgctaccagctcacccagcgtggtgagctcgtccagcggcaggtcgacgagctgctcgggcacaccgagacggccaccgaggtgagcagcgagatgctcggtgccatcctcgcggggctgcgggacctggcccgtctgccggcggatgtcagagagctcgacccgcaggagctggcgcagcggatcggcacgatcttcgcccagttcgaccggttggtgcacagcacccgcgagttctacacctacctcacccaggtgctgagccgcttcgacctggagcgcggggagttccaggcgttcaagaccgccctcatcgactacctgcagcgcttcgtcgacgagatcgcccgccacctgccgcagatcgcggaggtcattgagcagctgcgtccgggcatcccgcagctgtgcgcccgcgccaacgccggccagcggctcgtcgacctcgaggggcgggccgccaagcgcgctcccggcctcgacccggccgactggaacggtctcatcgcctggttcaccggtagctccgaccgggcgagtgacgccgagggcgtccggcgcttggccactgaggcgatgcgctcgctgctcgccaacctgcggcggatcgtcacgagccatgagcgcgagcacggtcgccatgccgagctgctgcggttggcccgctggttcgacgacgcggacgacacgacggcgcacgcgatctgggccagcgctttcggcctctactcgagccgacacctcggctttcccgtgagcgagtcggaggacgcggtgcccccgacgatgtcatgggtccgcgctccccgggcggaggtgccgatcatgctccgctccaccggccagcgacgcagcgcgggggcctccggtcgaccggaggacttctcgcagacgaaggcccgtcgcctcgaggagcatgcccgagccgacgccgcgcgtcgacgcgccgtcgcggaggtcgccggtcaccggggccggctcgaccgcgtgcggctcagtgatgcgggccgcgaggccctcatggagctgtatgccgctgggctcgctctcgcgggcagcgacaacaccgggtcggctgggtcccgcaccggtgcggcggtgccgatcccgggtcacgacgcggtgctgctgatcacgtcgacgccgggcgcgggcactgtcgtcgtgagcccgtccggccggctccgactggtggaccgttccctcgcggtcgaggcgggcgccggacgacaggtccgcgacgaggcggccggagggaaggaggcggtgtcgtga

SEQ ID NO: 50130 - DNA, 1266 bp, Intrasporangium calvum DSM 43043
gtgagcgctgacgcgggtaccgccgatcgcctggcccggccaccccaggccgaggacgctcaggacacgcacgagcgtcgcctcgcggcccgggcgctgcttcggcggcccctcatgcccgtcgggcacggccacgacgacgagctgaggctcatccggcggcaccgggtgtccctgacccgcttcttcgccgaggcgctcggataccgcctcaccgtggatccggcgggggcccggctctacaagacgggcctcggccgtgacgggtcgcgcccgctgctccggggtcgggcgggggtgcccttcaccccgcgggcctacgcgatgctgacgctgacgatcgcggcgctcacccggaccaagtcccagctgctcgtggacgagctcgtcgcaggagtccgctcgacggccgtggaggccggggtggacgtggacctcgacgcgatcggggaccgccgggcgctgcacgccgcgctgctcgcgctcgtccggttcggggcgctcagcgagcgcgacggggacctcgagcactgggccgaggaacgcacccagtccctgctcgacgtccgccgcgacgtcctcggcctgctcgtcgccgccccactgtcgacgctcgagtcggtcgacgacctgctggcaccggccaaggttccctcggctgccggcggggcgcgcatcacgacccgccgtcgcctcgtcgagtcgccgatcctgacgaccagtgacctggcacccgaccacgctgagtggtgggcccgcaaccgcaaccgcgagcgcgagtggcacctcgaccagctcggcctggcgctcgagctgcgcgccgagggagccctcggcctggaccctgacgaggagctgaccgacgtcgagttccccggtcgaggccgcaccagccacctggcgctgctgctcctcgaggcgatggtcgaggatgtgcggccggcgcccgatccgctcgggcgcgccggcccgtcgtcctccgcgtggcaccgcatcggtcgcggaaggatcgacgccctggggcggccgctccttgcgacgtgggctgccggccttcgtcgggaccagcgcgaggacccgtcggccgccgtcgccgagagcctgcggctgctcgagtccgtcgggctcgtccggccggagcccgacggcgaccctggcgagtggcaggtccacgcggccgcccaccgctaccgacctgtcgccgagctggctgcagcgtcgggccgcggggaggcatcactgttcgacctggagggggagtcttga

SEQ ID NO: 50131 - DNA, 4152 bp, Intrasporangium calvum DSM 43043
ttgaacgacgaacgaccgcagcgcttctcgctgagccggggcggggtcctcaacgtgtggcagtacgacgaccaggtcttcgacttcggcggtggtcgactcctgcttcggggcaccaacggcgcgggcaagtcgaagacgctcgagatgctcctcccgttcgtcatcgatggcgacaaggccaagatcactgcgtcgggtcgccaccacacgagcctgctctggctcatgctcgacggatacaccggagcgaaccggaccggctacctctgggtcgagttcgcgcggcccactgccgacggcgggagcgagaccctgacctgcggcatcggtctgcgggccagcgactcggcccggaccgccacgacgtggtatttcacctcgccccggcgcgtcggagtcgacctgcacctcaccgacgcggccggccccctgtcgctgcagcggctgcgcgccgaggtcgagaccgacgggcacttcttcgaccccaacgcgacgcgccgctaccgcgagcacgtcggccagctgctgttcggcctccccctcgaccagtacgaagacctgctccggctcctctactggctgcgccagccccaggtcggcgaggacatcgaccccaaacggctcgcagagcagctggtccaggcactgccgcagatcgacgagtccgcgctccgctcagcgggggacaccttcgaccagctcgaggagttcggtgagcagatcgaccggcaggagcgcgcggctgcggcgattggctccttcctccagagctaccgcacctacgcccgcggcgtggtcgcggaacgcgcccaagcggtggtcgacgcggccgacgtcgagcgccgggcccgccgggaggtacgccggctggaacgtgcggtcgccgagaccctcgacgggctcgaccgcgcccgagcagctcagcaccgcgcggagtcggagctcgccgacgccgccgcccggatcacccagctcaaagccggacctgaggcccgcgcgcaggcgcagctgctcgccctcgacgatcatctgacaacgcgtctccagctcgccgaccaggccgagcgacgcctcgtcgagcagcagcagcgcgtgtcggaagcccagcgccgggcgaccgatgcggcggtggacctcgtcgccgccaccaccgagtgggtgagccgagcccggacggtgcgcgccgagggcgccgacgccggcatcgtcggcccgctcgcacgtgtcgcgcacctcgcgatagcggagcccgactggcgagcacctgactcggtcgtcgagctgcgggccgcgctggctgctgcgccggaggagctgctggacgtgagagaccgcgtcggtgtggcgagggctgcggtcaaggtcgtcgacgcggcgcgcgcccgggccgaggacctgcgcagcgacgccgtccgacgggaggaggacagcgcccgggccgagaccacgctcgcgggccggcaggcccgccacgacgaggccgtcaccgccacgatggacgccacggaacagttcgtggccgcgctcaccacgtggctcgagatgactgctgccgttcccgtcccgcgtccggagatctcggctgcggagctgggggccttcggagcagtcgttgccgacgcggttgccccggtccgcgccgaggccgagcagcaccgcgccgacgcccggacgcggctcgctgccgcagagggcgaccaggaacaggttcgggccgagcgggctgaggtcgccgccgagcgagaccctcgacccgcgcctccggtgtggcgccgggacgaccgaggtgcgctggaggccatcggaggtgcacccttctggcgcctcgtcgacttccgcgacgacatcgacgcgcccacgcgcgctgccatcgaagctgccctcgagggcagcggcctcctcgacgcctgggtcacagccgagggacgcgtcgtgcccgaagccgaggacgccttcctcatcgacgtttcccccgagccgcaggaggggaccggccgcagcctcgccgccgtcctgcgcgccgactcgcacctgcccggtgcggtccccagcgacgtggtcgacgccgtgctgtcccgggtggggctcgtcgacgatctgcggtccggagctgcgcccgacgacgactcgctcgccgggggaccacgtgcggatcacactctcgcccacgtgcggatcgggctcgacggctcgtggtggaccggccctctcgtgggtcgaacgaacaaggagagggcgcagttcatcggagcggccgctcgcgatgcggagcggtcacgacgcctcgcggctcttgacgggcgtctggacgagctgggtcgaaccatcgcggtcgcaggcgcccaggtgcagctccacaccgccacgctgcaatcgctcgacgcctggcaccgcgcccgcccctcccacgaaggcctcctcactgcctgggccgcggaacaggcgagcgccacggccgtcgacgaggctcgggcggagctcgccgctgccgcacgtctggcccaggccgcacgcgccgccgcggcggtggcccacgacgagctcgtcaggctcggccagatccacgacctgcccatcaccgctcagggcctgcacgctcgggatgagaggctccgcgccatcctcgaccagacccgcgacctcgacgaccgacgctcggtcctcgagcgggacctggccgagtgggaggagcgaggccggttcgcggtcgccgagcgggagcgcctggacgaggccgcggatgacgacgagcgcgctcggaccgaggccgcgaccgctgctgccgagctcgacgagctccgtgcgtctgccggtgcctccgtcgccgagctcgagcagcgcctcgacgagctcgccaagacccgagatcgggccgacgccgagcgtcgtgagcaggtgcgacaggtcgaacagctcgtgcgggcttcggccaccctcgagagcgagcatcgcaccgccgctcactcactcggcgaggcgactccccggctgggtgcggcccgtgaggggctcgtccgcctcgagcgcgctcccggcgtgatcgcctccgccacgacggaaggtcacgtggccgtggaagcgagctcagcggcatacgaccactggacgccagacgaaccacgcgccatcctcgccgccctcggtgaaggggggtgcagcgacgacacgccggtcatctccgccagccaagggctgctggccagcgcggccgccacgttggagccccggttggccaaggtcgaggacgtgtgggtggccttcgggctcggggagggcggcgagctgccgctcgtggccctcgagctccagctctccgccacggtccgggcgaaccgtgagctgctcagccagcgcgagcgccagatcttcgaggagcaggttctcgggtatctcggggacgcgctccgtggcgtgcgactcaaggccgaggagctcgtcgcggcgatgaactcacagctgcggggtgtgacgacgtcacagggcatccgcgtccgcctccgctggcggcagcgggacgacatcgccgccgacgcgaagcgcgccgtggagctgctcgggcagccggtcggggcgctcctgccgagcgagcggatcgagctgcgcgagtcgctccaccggctcatcgactcctcgcgcagtgaagcgcccgaggagtcctacgccgagcacctctcccgggccctggactaccgccggtggttcgcgttcagcgttcagtaccaccgaccggagaccggggagtggcgggacctgcaacgcaagtccgccctgtcccagggcgagcagaaggtgctgtgctacctgccgctctttgctgccgcatccgcgcacttcacctccctcgcgggcgcggcgccccatgcaccgcggttcgtcctgctcgatgacgcgttcccgaagatcgacgcgcgcacccacccgctgctcttcgggctgctcgtcgacctcgacctcgacttcgtcgtgacgagcgagcgactctggggcacccacgccacggtgccggagctggcgatctacgaggcgctgcgcagccccggggagcgcggcatcgcgcagttcgagcaccggtgggacggccagctgctgactgcggtgggggcccggggacccgcggcgtcgggctcggcagggggaggcgatggctga

SEQ ID NO: 50132 - DNA, 1419 bp, Intrasporangium calvum DSM 43043
atggctgaacccgcgccgcagtggttgcacggcgaccgcctgcggcgcgtctgggaccacgtcggggacgccctggagcgacgggcactccagccccgcggcacgctcgaggtggcagggctgtctcgggacgaacgacacgcgttgtccgacgtggtcggctcacccgtcaccggagcgaccgtccgactgcggctcgccgacctcgaccaccggttccgcgcccgcacggggcgtggagtcgccgaggtcgtgacgtgggtgaccggtcgtgtcctcgtcgaccgcgccgcgcaacgtcgcgatgcgatcgccctgcggcaggggccgttcgacgccgcgcgcgaatggttgctgaaggagctgcccggctcctcggggagcgggccgggtgcaccggtgagcgggccgggtgcaccggtgagcgggggccacgctgctggggcgccgcaggcgtccgtggggctgatcccagcggcggccaccggctgggtcgacgactggctggccgcgctgcgtcgtgacggggtgctgactgccgggtccgacagcacgtctgtcctcatcaccgcactgcgtgtgctcgagggctgcggggcgttcggcaacggcccagcgaaagcacacgcccggacggacctcgcggcccggatcacgggttcgtcgcacggtctggacgacggctcaaaggtggccctcgtggtgctgcgggcggcggctgcccggtccggcacccgtctcccgcggagcgcgtcagagcgtcgtcgcctgtgggaggcgcttggggtcgtcgtcgaccgcgtgtccgcgacctgcttggtctggaacatcacaccggccccgatgccggcggcgtcgacgccgaggttggctggacctggcctctcggggaccgccgcgcaccgcaccgacggcggcccacccgcgccgggggcggccgatgcccgcgttgctccccggcacctcacctggtgggacctggactcgggagtcgccttcctgaaagagcaacggatcctggtgtgtgagaacccccgcattctcgaggcgatcgccgagcggggcccgactgccgagcgaatcggcttggtgtgcaccatgggccgcgccaaccttgtcgtgcgggaggtgctgaggcggctcgtcacctccggggcggtcctgcgataccacggcgacttcgactgggccggagtggcgctcgcgaactcgtgtctggcggagttcggcgctgacccgtggctgatgggcccggacgactaccacggtgggcacggttcggaaccgttgagcggtcgcccgatcgaagcagactgggaccaggagctcgctgcggcgatgcgtgcccggggcgtggccgtgcacgaggaagcggtcctcgagtcgctggtcgagcggcttcccgagctgtggtcgtga

SEQ ID NO: 50133 - DNA, 1485 bp, Lachnospiraceae bacterium 8_1_57FAA
atgagaatacaggagacggtgaggaagccgatgacggaagcaaaatatctgaatgtggataatacagacaggtatcgtccgatcatccggcttttttatttgaaatatgaaaagctgaagtattggctgtatcaggaagaggtatatgaagaattaaaggaagatgcatactttagagaatatacgcctgagcagtgtcagcaggacttggcggctttgactgcatgggggaatctggtaacaattcaggatacgagaaaggttgcgactatcgaggagtttaagaataaaaagttccggtatcagttgtctgaagctacggtagaaattgagcgaatggttatccgggtagagaatctgtttattgaaagttcttcgttggaacctacattattggagagacttcgcatcaatctgcgcaagatttctgagattacagaagcagatcaggagcatatctatgcatggtggaatgatttgaataatgattttatacgattgaatcagaattatcaggattatatgcgggagttgaacagtgtaaaagcggaagaaatgatgaaaacgacagagtttcttgtgttcaaagaccgtttgatcgagtatttgagaagtttcgtgaggagtctgcaggtcaatgccgcatttatagaacaatgtctgaagaatacggacaggcaggttttgaggtgtttgctggaaaaaattatacagtatgaattgttgattccgagaatcgatgtggaagtgaaggaagatttgattgcagataaagtatatggccgttggcagagtctggaggaatggtttaccggaacagacggaaaggattctgaggcggcaaaggtatttgacacaacgaatgagatcatacgaaagattacaaggtatgcggcaagaatcagtgaaatgagcaatgcgggggcgaatcggcgggaagagtatcataaggttgcggtgatgttttcaaaatgtaagaatatttttgaggcgcacagattggccgctgttgtatttggcattgaaaagccgctgcatttaaaagggcttccgtggcgtcagaccgagagtatcaacagcggcgtgttcgaggaagaaccgtatatcgtgactgtgacgccgaggattcgtacatataaagaaaaagcaaaacgaagcgggattgttgatcgctcgaaagaaaaagaagaaatgtggcttgctacgattcagcgattagaggaagaacgcaggctcttgaaaagttatattcaggataatcgtctggagtttgcaaagcttcccgagatagagccgcatgtaagagatgtatttctgacatggctttccaaagcattggagaataaaagtcttcaggggaaaacagaggatgggcaggtttatcgtgtggaaaagtcggatacagaggaaatctgcattttgaaatcatcggacggtaatctgcaaatgccggcatatgtgattgtattcgagaaaaatgagtga

SEQ ID NO: 50134 - DNA, 3711 bp, Lachnospiraceae bacterium 8_1_57FAA
atgagagcattggaaattctgctggaacggcgttggattttgaagagtcgggaaaaagaattatattatcagataaaggatgaattaggaacggttaagaaattcttgatggaaaagctggggtatcaggtaatcgtgaatccttatcttgtaaaagtggaaaagatgccggcgacaccggagaactggatgggaattcaagaatttacccggaaaatagaatatgtttttttctgtatgattttaatgtttctggaagaaaaagaagccgaagagcaatttgtactttcagagctgacagaatatatacaggggcagtacagggaggagcagattgactggacagtatatcagtatcgaagacatttgatcaaggtgatcaagtattgtgtgaactgtggaatcctgaatttgaatgatggaagtgaagagaattttgcgagggatgatacgagtgaagtactctatgaaaatacaggtgtctccagatattttatgaaaaatttcacacaggatattatgggatatacgacgccggaagatcaggcggaaaaggaatcattgtctgacagcgatacggtcaaattaaagcagagggaagttgaaattaaaagtcaactagaaggattaaaaaagaatattacaggaaaacagaggcaggaagaggagaaaaaagaaaaatatcaggaaacagagcagaaaatacaacttcaatttcagaaaaatgaaatgctttgggaagaaattgaaaacagtctggagtatatggaagaagagatggcgggggttcctttcgatgaatttgcatttatgaagaaagagctgacagagcagaaaggagagcagtattcttttcaggctcattcagaattattaaaggattatatgacaaaggtccgtcttggaaaaacgacgctggaagaagaaaagggttgtcaggaaagatacagtagatttttgcaggaattggattcctatcaggaagaaaagaacaaagcggaacgagaagtccttcaatatgaaaatcagtttcatgaagtaaaacaggagacaatagaatcggtatatcgttgggaaaaggagaatgcggagctgcatctgcagtcagatctattgcaggaaatggcaagggaaattgagaagtatacaacggaaaccgattattggaatatccgcggattggcaaatggtgaatttgagcggaaaagtcaggaactttcgggaaaagtattacagcagagcagagaattgtccgacagacgattggagaaagacggaatttgcgaagaactggaacagtggaagaatcaaaaggagccggagccggaacgcagtgaagcagtggaaaagaatcgacggcttttgaaagaaaaaggaattccatatttgcagttatataaagtaattgattttgacggaaaattggatgaaacacagcgggcatatctggaagaagcgctattgcatatgggcatactggatgcgctgattgtgcctgaagaatatagagaacaggcgctggcgttggatgcgggggtatgtgaccgttatattttcagtgatgccgcatatgtaagaaataacattatggattttctggatgtagacaacgaagagggagatattcttctgtaccagaatgtttcccgtatattaacagcaatcggctggaaggaacaggacgaagagacgataagtgagtctatagaaaaaaacaggacatggatcgataaaagaggaaattatggaatcggaatcatagaaggaacggttacgaaaaattatacgccatgttttataggagcttatgcaagagagcagtatcgcataaagaagatacaggaactagaagcagagtgtcggaggctggaagataccattcaaatagcggaagacgaaattacacaattaaagcaaaggaaaagctgtctggaaacagagtggaaatcatttccgaaagaacaggatctgaaagtggcagcaaaagaattagaaaagaaaacgaatattctggaagaaatagagtgtaaagtacagatccagaaaggtattgtagaaaaagaacgaaaaagtctggatgcagttcggctgcgggtgcaggaagtatgtcagaagtgttatctgcccccgcgtctggatgtgtttacggaagcagaagaatccttgaccgagtataaagaagagttgatgaaagtacagatttcctatggaaattataggaatggaattagttctgcaaaggtgcagaaggaatatttggaaggaattgacgccgatttggatgatatccgctacgatttgaatcatatgatacgaaatgaacgggaaaagcggggaagtctgaattcagtgatggaacagcttgctttgacggattatgaggaaatcagggagcgattggaacattgcatagagcgattggagaaactgccgtcagagattgaggcgagtgttacacaaagctctcatttggaaacaaaagaaaaacaatttatagaaaaactgggagatatagaagtttcagttggaaagtacagacagcagaaagacagattttgcactgcttttgaaatggaatatcagcttggatatgtagagtgtccgtttgcggtaagcgacgatgcggaagaacgggcggagaagatatgcaggatgtttatggggagattcggaaataaaaggcacagtgagattttggagaatctgcaaaatgtatatcatatgaataggggatatctgttggaatatcaggttacgctgcagtcattatttgaagaactggatgaggagagcggagttttcgacacaagtatgagacgaatcgatatttctgctaagtatagaggaatcacgatcaagtttaaagaactgattgccagaatgaaagaagatgcagaggtacagcgtcggcttttgagtgataaggacagagagttatttgaagatattcttgccaatacgatcagtaagaaaattcgcggaaaaattcaggccagtaagcgatgggttgagaaaatgaacacattgatggagtctatgaagacttccagcggacttacgctgagtctgcgttggaaaaataagcgggcggagaaagaagaacagctggatacgagggaacttgtagaacttctgcaaaaagatgccgaaattatgcgtccggaagaggcgcagcagttatccggacattttcgatctaagatcgaagaggcaagaaaatctgcaaatgatctgggaaatgtgcagtcttttcatgcgattatgagaaatgtgctggattatcgtcaatggtttgagtttcaattggaatgtcaaaaaacaggagagaagaaaagggaactgacagaccgcgtattctttacttttagcggcggagaaaaggcgatgtcgatgtacgtgccgctattttcggcagtagtagcaaaatatgcaggggcaagacaggatgctccgtatttgatttccttggacgaggcattcgcgggagtagatgaaatgaatattcgggacatgttccggctgatggtgaagtttgactttaattttatgatcaactcacagattctctggggagattatgatacggttccggctttggcaatctatcagcttgtccgcccggagaatgcgaaatatgttacggttattcggtatgtctggaatggaaatataaaaagtatggtaacagaaaaggacttgagtcatggataa

SEQ ID NO: 50135 - DNA, 1296 bp, Lachnospiraceae bacterium 8_1_57FAA
atggataaaacagaaacaaacgatctgttagaagaatgcatgctgtatttcaaggcgcgtccggtatataaaaaactatttctgaaaatgcgggataaatatgccggtcttggccactttgggggaacggcgatgcttacgtcgctgagcagagaagagaaaagtcaattaggaggattttttcaaagggattatacaagtaataagacaataacaatttctgcggatttaatgaaaaaatgtttggaatccagtaaatttgcgggattaacctgggaattgattctggaaacttattttggagagccgctgcaggtaaaaaaggaaatcgaactggcagagtcgaaaaggcgagaagattattttgcggagatactggaaagtatttcggatgaaagcggacgagaatggctgcgcagcatattggaggaaaagaaagagggatatttgcttattacgcagttatacaaagaaagcccggaggaattgaggagcattctaacgtatgtaacgacagggattgcaaaattgaaagtgtttcaagataaaaagcagaaagaattgttagctgtgttttcggcaaatgtcacaggaaatccccattattttgatgaagggaagacaggggaaaaactactctttaattatcttggagaaaggaatttcgatttaaaacaagaaggactttccagagcagagtataaaaacagaatctattatgaggcagggattttgaaagatgaagtatcgaatgatgcgctggcatatgggattcacggatggaaaccggacggcggtttacatgaaggcattgaaggttttcttgagaatagagagcctgtaaaattgacgttacagacgattggaagattagagaaggtctgtggacagagtagtcaggtatacgttgtggaaaatccggcagtattttctgtattgataagggagtatccgcagcggactgtgatctgcgggaatgggcaattacgtctggcggtacttattcttatggataaattttcgtgcgacactgttttttggtatgcgggggattttgatccggaggggcttttgatcgcacagaaattaaagatccgatatggagagcggctgaaactttggaagtatgaggcggatttgtatgaaacatatttatcggaagtagaactaagcgacaggcggatgaaaaagctggagcaggtgtctgttcaagaactgcaggaaataagggaagcgatgtataagaaacgaagatcggcatatcaggaaagcatgatggaagcgctgaggaagtaa

SEQ ID NO: 50136 - DNA, 1485 bp, Thermoanaerobacterium xylanolyticum LX-11
atgactgataaaataaattttaatgtcataaagcctatagatgaggcaagataccttactgctgataatgcatcaaggtatcgcctcatcatgcggtatttttatcaaaattatgagaggcttagatattggctgactaaagaggatgtgtataattatgtaaaaagttttgatttgttttacgactatacattggataagtgtgagcaggatttaaagtcgctgactgagtggaaaaacttgattgctgagcaggacactggaagagctcaatctgcagaagaatttaaaaataaaaaatttagatacatgcttagcgagtattcgatagaaatagaaaggatgacaattaatctcgagaaaataaagggttatggtggttctttagagccatctttattccaaagattgtatgaaagcttaaagaaaattgacgatatatctaaaagtgacgacttagaagctgtatatagatggtggaaagattttacttcagattttgaaaatatttatcataacgctatagactacattgccagcttgcaaagttcaaatgcagatgaacttatgaagacagatgctttcttaatatacaaagacaagcttactgagtatttaagaggatatataaaggatttgcagagattttctcaagttatcgtatcgcttttaaataagcttgataaaaagtcattagaagatattgtagaaaaattgctgctttatgaggagaacataccgaggttggataaagattttgatattaatgatgtcaaagaaaatatattaagcaaatggcaaaacatagtattttggtttagaggaaacagcgatgaagatagtgaagcgtacaggcttcttgaaatatcaaatgagataataagaaagatcacgatgtatgcggccagaatttctgaaaacaggttaaagacggccagcaggaaaagtgagtatataaagctttcaaagatatttgcaaatactgatgatataaactatgcacataagctttcatcagttgtatttggagtttttcacacgagacatttatatggcgattttgacaaaaagactgaaagcataaatgaaagcgtgtgggatgatatgccatgtaaattcttaataagaccaaagacgagaaattatacacaatccacaaagacaaatgctataatagatagggtagaagaaaaagagatgtgcttaaaacagtaccttgaagaaagacacagtgagattgaagaaatatcaaagtatataattgacggcaagattgtactgagagagttgccagtaattaagccttttataaggacaacccttttaaattggataagcaaatccttaaatcagcctaaaaacatagcaaaatcagaagatggaaggacatacaaagtcagcatttcaaggaacaagacgatagttctaaaatgtacagatgggattcttgaaatgcctgatgtaacgatagagtttttaaattga

SEQ ID NO: 50137 - DNA, 1137 bp, Thermoanaerobacterium xylanolyticum LX-11
ttggaagaacttaaaatccttttagaaaacttttgggttacaaaagatgacacggaaatgtttaatagaatacgtgacaatgaaaagaaattaagatcatttgtagaggataagttaggatatcgtcttatcgtaaatccatttcttataaagctagaaaaaatacctggtgatgctgagaagtggatggggattgaagagtttcagagctcgatggattatgcgtttttatgtcttctccttgcgtttttagaggatatgggcataggtgatcaatttatactttcaaatataacggagtatattgagatgcagtacgaaggcatggaaagtgttgattggaccttgtttaagcatagaaaatcccttgtcagggtacttaattttgcagaaaaaatgaaaatgataaaagttgatgatggagagcatgaaagatttgccgatagtcgcgatgtagaggttttatatgaaaatacggggctttcaagatactttatgagaattatgagcagtgaaataaatgaagagatgacgttggaagattttataaaagacgacaggtatgaggacaacaaagtccttgagagaaggcatagagtttacagaaaattgcttctatctccagccgtctactatgagggaactgacgatcaagattttatttacataaaaaactacagaaatacattagaaaaagattttgatgattatctcgatgcacaactgcacatccataaaacatctgcatacataatttttgatgagaataaatatgcatcatcttatttcccggacaataaaaatatatctgacatagttcttcaaatagcttatgttttaagagatatgatggattccggcagtttaaatgtaggtatagatgaccgtattgaaattacagaagggcaatttatgaacatcgtatcttatgtaaagagtaggtttaaaagcggatggagcaagatttacactgatatgagtgatgaaaaattatttgatgagattacagagtttatgaaaagctggaaaatggcaatatacaatgaggatacccactcatatactttgatgccgatcttaggaaagtttattggtgaatatcgaaatgattttaaaggagcaattcaaaatgaatga

SEQ ID NO: 50138 - DNA, 4170 bp, Thermoanaerobacterium xylanolyticum LX-11
atgaatgatagatgggtaattaatagagctggtcttcttaacttttggtattatgatgatgaagtattcgaattttctggagggaggcttcttctaagaggttccaatggttcaggaaaatctgtaactatgcagagcttcatacctcttcttttagatggcaataaaagccctgaaagactggattcatttggctcaagggccaggaggcttgaggattatcttttaggtgaagaagatgtaaatggaattgacgagcgaactggctatctttatatggaatttaaaagggaaaataaagataattatatctctataggcataggtcttaaggcgaaaagacatcaaagcatggatttttggggatttgtcattaaagatggacggcgaataggcattgacatattgctttataaattagagacaggtattgatgggaaaagagtcaaaatacctttatccaaaaaagagcttaaaaattacattggaagtggcggagaagtagttgatacgcaaagagaatatatggaattagtaaacaagaatatatttggtttttcaaacattgatgactatgatgaacttataaagcttttaatacagcttaggagtccaaaactttccaatgatttaagaccaagtcgtatttacgacatattgaatgcctctctatcacctttgacagatgacgatttaaggtcgatgtctgagacgatagaaaatatggatcagataaagctgcatttagattcattaaataaaaatatgaaatctttaaagaagcttaaaaatgaatatgataggtacaataagtttatgctttattataaggcagacaaacttttggtgcagaaaagtgagctgtctaaggtacaaaaacaaagtgatgaattgctgcaaagcattgaaaaaaataatcaagatgttttccagggtgaagatagaatatcagaacttgaaagtgaacttcaggctttgaaaaataaagaaattcaactgagaaaaaatgatgcctttaatacacaaagagaacttgttgaagaagaaaatattttaaaacaatttagaaaagatagggatttaaaagaaattcagcttaaaaagaaaaaagagaaatgtttccaaatagaggaagagctaaaggagctttacagtagagaatatagcattgatgaaaaaataaaagaaaatcttttggatatggcttctatatctgaagaagtcaattttgatgagcatagcttctcagaagaagaattaaaaaagtcttatggtaaggattttgactttgatttttggagcaattcactaaaagagtatacaggaaaagtgaaaaaggcattagatgccattaatgacgaggtagacgcaaacaaaaaatacaatgacgcattgttagaagaagataggttgagaaaggcaaacgaggactggaaacgaaaagtcaacgaaattgagattttgcttgatgaagaaaaaaacaggtttattgataaaatttacgattggtcagatacgaatagatttttgaagcttaatagagaaaaaatcgaagaactttccagaatagttctatcatacgggaaaacaagtacttatgaagatcttatatcatttgtaaggaagccctacgaggatatcagagaaaagtttcagatggacttgattaaagttaaaaatgaattggacttaagaaattctaagctggatgaaaaagaagaggaattaagaaagtggagagagacatatgatccagaaccacctcgcaatgtggaagttatagaaaacagaaatagattggataaagcaggaattgcatatgtgccactttataaagcaattgactttaaaaatgatatagatgatgatacaaagggaaatattgaatcagctcttatggacatgggaatcttggatgcacttattgtgtcaagaagcgatattgatagagcaatgaaaatggataaggacatggcagataagtatatcattccagggacttttaacatgaaacttaatgtactgcagtattttgatgttgtcgattcaaatagcggtgtcggcttagatgaaatttcagatgctttaagcaatgtatttatttatgaggaagagaatgcaacatatgtgaatgatgatggcacgtatggaataggggttttaaaagggaaagctgtaggaaatgtaaagtcaaggtatataggttttgagtcgagacggcgctttagagatgaaatgatatcatcaatatctaaagaaatagacgccataaaaggtgaaataagagaactaaatgatagacaactgtcaataaaatctcagctaagtgatttagacgtagaatataaaaattttccagggaaagatgatttggaagaagcgctaaaggaattgaaagaagcgcaatcgaatcaaaaattcacggagattaaattgaatgatgcgacaattgctgctaagaagctttttgatgtgcttcaagaaaaaaaagcaattgttaggaagttgacgtctggaattggcattcatgcagatgccaaatcttacgaaagtgctttagaacagttagatgagtacaagaatctcctacagaaattacagataaattacaatagctatattactgtcttaagaagtgcagagactagaaaaatgcagaaacaagatattgagtatgacattgataattacaagtttgagattgatgtattagatgcgaagataaaaaacagcatagaaaagatcaatgtattaaaagaaaccattgaaaaacttggcatagaagatcttcaaaaagagcttttacagtgtataaaaaggattgacgacataccaaaagaaataaatgatttaactgctaaaactgctgcacttaaagagagagtagtcctgcaagaaaaagaatatgaaaggttaaaagaagaaataagaaaaaatcaggatattttaaacatataccataaagggttaaaagatgagataatatttggattcgttgatgagcttacagatatagatgatatgtataaagcagcgaagactattcaatcacagtacaaagagatgtttgcaaagtttgataaagacagtgccacagaaaaaataagaaatgcattttatgtctgtataaatgagcttgtagaatatgggctttcattagatgtggtagaaattgaacaaactgatacagatattgatacttatcaagaaatatataaagatttaagaagatatcagataacagcgaaagtaaatgacaaaaagatatccctttatgggctttataatatgatcgatgaagatataaaaataaacgaaaaccttatgaaagaaaaggataggcagctttttgaggatataatcatgcacaatgtagggcgtaaaataagaagcagaatctttaaagcagaagaatgggttaaaaagatgaatgagttaatgtctcagcgtgatacgtcaagcggtcttaagtttcaattggaatggaagccaaaggctgctacaaatgagcaagagctaaatacaagagagcttgtagagcttttaaagcttgatgcagacatgatgaaagaagaagattttaatttagtagtaaatcactttagatcaaaggttgaaagtgcaaagaaaatatatgaggaaaacagcaatactgatacattccaccagataatgaagagcattctcgactatagagattggtttgagtttaagttgtatttcaaaaaagaaggagaaaatcgcaaagaacttacaaacaatgccttttacaagtttagcggtggagagaaagctatggctatgtatatacctcttttctcagcagtgtactctatgtatcaatcggcgtcatcacaagctccaaagattatatcgcttgatgaagcttttgcaggagtggatgacaacaacataagagatatgtttaaacttatagaagacttgggattgaatttcatcatgaactcacaagtactgtggggcgattatgatacagtgccagagctatctatatacgagcttataaggcctaaaaatgcaagttatgtgtcgttggtaagatataaatgggatggaaagattaggcgtttagttactggaattgaaaaaagtgttgaagagatcgatgatttttcgtacgatgaggttgcatttacaaggagtaggtga

SEQ ID NO: 50139 - DNA, 1278 bp, Thermoanaerobacterium xylanolyticum LX-11
atgaaagccgatgatatagcattttttagaagaaataaagggtatgaaaggatatttaaagctattagggataaatataagagcataggaaggataggcggtgtaatcaaacttgatgatttaacggattctgagaaagtagtattatctaaccattttaaaaaagactttagcaagcgaaaatcagtaaatatcgatgtcaataaatttgcagagacatttttgaatacgagatttgaagagtacagtttgatggatatattagaatcgtattttgatgaaaagctgaccagcaaaaaagaagacatgtatcagtatgaaaatgaaaaagaaaagttctttaacaagtttttatctgagtatgaagggacaaagtgctggcagtggttgaaatctatttatgaaaataaagctattggtgtaaaaacgataaatcagagatatgatagtgatcgcactttgctcaaaaaagatataaaatacgtttgtgatgcattaaatagacttccggtttacgaaggaaagaaggtaaggctgccagtcttttcatcccatataactagagacccgcatggattcgatgtaaacactgactgtggtaaaatgcttataaatgcattggctacgatttttgggttcgatgaggtgaaaaattctgaggaggttgccgagcttttatataaagctggcatagtgattgatgagatatcgaattttgtgacgcttaaagggcttttggcatatagcaaagacgagtgtaataaggtgtttgaagctgcttatgaatgcaatgaagttttgcaaataccgctttacaatttgagcgtgttggataaggtcgagagcccatccaaaaaagtatttgtattggaaaatccaggtgtttttttatccgtatgtgattttattaggaagcctgttccacttgtatgcgcatatggccagcccagattatctctgcttgtccttttagatatgctatataaaaatggtacagatatatattattcaggtgattttgaccccgaaggattacagatagcacatagacttttcaagagatatcctgacagatttcatttttggagatatgatgttgaagattacataaaagctttatcagataagacattgactgaatcaaggcttaaaatgatagataaaatcgatatggctcaattaaagcctttagcagacaaaatgagattattgaaaaaagctggatatcaagagcttattcttgatgatatcattaaagatttattgtcaatgagttaa

SEQ ID NO: 50140 - DNA, 1488 bp, Thermoanaerobacter ethanolicus JW 200
atggaagataaacttgatttgaatgtgataaaaccgattgaagaggtaaagtatttgtctgcggaaaatgcttcgcgatatcgccttatcatgaggtatttttatgagcagtaccagaaatttaaatattggctgtacaaagaggatatatatgaatatgtaagtcaatttgatatgtttgctgactatacaatggaaaaatgtgagcaggacttaaaagcacttactgaatggaaaaaccttattgcgacacaagataccagtaaagcttctacgattgacgaatttaaaaacaaaaaattcaggtatcagctgagtccatattctattgagatagaaagaatgagcataaggctggaaagcatcgtcggttatggtgggtcactacagccggctttatttgaaaggatttaccgcaatttaataaagataaatgaaatggcgaaaaaagaggatttacaggaaataaacagatggtgggaagacctcaataccgactttgaaaatatatatcacaatgcgacagattacattgcaagtcttcaaagctctaacgctgatgaacttatgaagtcagagcagtttataatttacaaagacaaacttatagaatatttaagagattttataaaagaccttcagaggttttctgttgccatagagagctttttgaaaaaggtgagtccggaggttgtcaattccattgtagataagttatgccaatatgaaatgagtattccaagaatcgacagagttttaaatgaagaggaagtaaaagaggatttgatggataagtggaataacatatctttttggtttacaggtcataattttgaagacagcgaggcagtaaggcttcttaatatatcaaatgaaataatcagaaaaataacaatgtatgcggcgagaatagcagaaaacaggatgaaagctgccagcagaaagaatgaatatattgcactttctaaaatgtttgcaaaagcaggtagtataaaagaagcacaccttttatctgcggcggttttcggttgcttttacacaaggcacataaaaggtgattttgaaagaaagacagaaagtgtaaaccagagcgtatgggaagaaccgccctttaaagtaattataaagccaaaaacaaggagctacagtaattctgttaagacaaatgcgattattgataaaagtgctgacaagactgagatgctgatggactatctcaatcagaaaaatatagaagatgaaataatagcaagttgcattgttggcaatagaataaggataaaggatttacctgttgtaaaaccttttgtgagggcaacgatacttaaatggataggaaaagcgatagcaagaaatggctttacaggaaaaacagaagatggaagaacatacaggcttcatatgccaaagaatggcgagagagcaatactaaaatgcacggatggtaatcttgatatgcctgatattgtaattgagtttgtggattga

SEQ ID NO: 50141 - DNA, 1152 bp, Thermoanaerobacter ethanolicus JW 200
atggaagaacttcagatgcttcttgaaaatttttggatattgagagatgacagggaaaattttaacaaaatacgggatgcggagaataaaataaaaccttttgttgaagaaaaattaggatatagattgattataaacccatatattattaagttagaaaaagtgccgtcagatgttgaagagtggatggggatagatgcatttcaaatgcctatggattatgcatttttgtgtttgctcttagcttttttggaggataaaggaccagaagaccagtttgtgttgtctaatataacggaatacatagaggcgcagtatgatggacctgataaagtagattggacgctttttcagcacagaaagtcacttgtgcgggtgctcaattttgctgtagatattggcataattaaaatagatgatggtgaccatgagaggttttcagaaagtgaagatactgaggttctttacgaaaacacaggtatttcaaggtattttttgaggtcttttaacagagaaattacagaagacatgaagatcgaggattttttgcaggaggacttaaatctttcaaactccaaagatgcggttatacagagaaggcacagggcgtaccgaaaacttattctttcaccttctgtgtatagtgaaggacctgatgaccaagacttcatgtatataaaaaattacagaaatactatagcgaaagatttagaggagtatcttgatgcaaaacttcacctccacaaaacttctgcttttgtcctctttaatgacaacaaatatttaaggtcttattttcccgacaaaaacaaaaacatatctgatataatgctgcaggcaagtaaaattataagacaaatgattgaagatggaaaactcgcctataatcctgacgatactatagatataactgaagcagaatttataaatattattttgaaagtaaaggaaagatttagtgatggttggtataagtcttacagggagatgagtgaaaagcagcttatagaagaggtcattgaaaacatggaaagctttaagatgataaaaagagttgaggaattgcattctattaaaatactgcctatggcggcaaagctaattggggaatatcctccagattttgaaaaaggagaaggtgcagatgagtga

SEQ ID NO: 50142 - DNA, 4167 bp, Thermoanaerobacter ethanolicus JW 200
atgagtgaaaaattagccgaaagatggatgattaacaggattgggcttcttaatttttggtattatgatgatgaaatatttgagtttgcagatggaaggcttcttttaagaggtgctaatggttctggaaagtcagtgacaatgcagagtttcatacctttagtattagatggcaacaaaagtcctgaaagacttgatccctttggctcaaaggcgagaaagcttgaggactatcttcttggggaagaagaggtaagtgggcttgatgaaagaactggctatcttttcatggaatttaaaaaagagaaaaaagacagctacattacaataggcatgggactaaaggcgaaaaggcatcaaaatatggacttttggggctttgtaatacttgacggcaggcgtataggtatcgacttctttttatacaaaatggaaataggcgatgacggcaaaagagtaaaagtcccacttaccaaaaaagaacttaagaatagaataggtgaaggcggagaagtagttgaaagccaaaaagagtacatggaaatggtcaataaatacatttttggctttagttctatcgaggaatacgacgagctcataaaactgctggtacagcttagaagtccaaagctttccaaagacttcaggcctactgtgatatatgaaattatgaaagcttcactgccttctctcacagatgatgatttgaggcctctttcagaaaccatagaaaacatggaccagattaagatgcaccttgatgttctttacaggaatatggctgcagtaaaaaagcttaaaaatgagtacgacaactataacaaatacattctttatgaaaaggctggggatttagtaaaggcatacagcgatttatacgcatcaaaaaaagaatacgataatttaactaaagatattgaaaattacagaagtacaatagcaaacttaggaaatgacatcatttctcttgaaagtgaaagagaagctttaaagaaaaaggaagaacagctttcaagtggtgatgctaaaagaacccaaagggagttattagaagaagagaataggtataaacagtacttggaggataagtctaaaaaggaagaagaactccggaataaacaagataaatattatggcttagaaagaaagataaaaaacacggaggaacaaaaatacaaacttgataaagaactacaggataaattagaggatatatcttcaattgcacaggatatagatttcatggaacatgagttttctgtaagtgaacttaaaaaagtgtatggaaaagaatttgattttacttattggaaaaatgaattaaaaaagcataaagataaaataaagcgtgccatcaatgcattgagagaagaaatagaagcaaataaaaggtatgatgccgcacttaaagagcaggaaaggcttaaaaaagaaagagaagacagggctaaaaagttggaagaggcagaaaggctttttgacgaacaaaaaagagaatacgttgaaagagtttatagttggtcgcagggcaatgcagaacttaagcttttaagtagccaactggaaggcttaagccgtgtcatactggcgtatggagaggataaaggatttgacgatattttggcttttgtgagaaaaccctatgaggaaatactaaatggaattcagcaagaaattttaagattagaaaatcaaagagaggcaaaagaaaatcagcttcatgagaaagaaaagttattggaggaatggaaaaacaaaaaagatcctgagcctgaaagagatgaacaagtcataaacaacagaaaaaggcttaaagaagctggaattccttacattcctctttacatggcgattgattttaaagaggatgtggatgaagagacaagaggcaatatagaagctgcgatagaagacatggggcttttggatgctcttatcgtgccaaaagaatattttgaaaaagctcttcaaatggacagcaatatggcggataaatatgttatgcctggaagctttaatatgatgttaaatgtatctcaatattttagagtagttgacaatgaagaaggagtttcaccagaagatatttcagatgctttaagcaatatatttgtatcagaagaaggcgggacaacctatatcgattcaaatggcgcatatggaataggagtaataaaagggaaagcacgggatggagttaaatcaaagtacatcgggagtgagtctagaaagcgctacagagaagagcttattaaatctatacaagaagaaatacaggctataaaagctgaaatatctgcaatcgatgaggaaataaatgcaaaaaaattaaggatacagaggctggattacgaatattcggcatttcccgggaaagaagatattgaagaagcatatagatatttaaaaacggcaaaggctgattacgaatacacctctcataaactggatgaacagcttttcacagttaaaaactgttttgaggaccttcagaaaaagaaagctgttgtaagagaattgacatctggcataaacatacatccagatattgatacctattcttctgcgtatgaatatgcggaagaatacgcttcagggcttaatgaagtagaaatactatacaacaaatatgttttacacatttcaaacgaagaaatgttattgcagcaaaaacaagatttagaatacgatattgataacttaaagtacgaaatagacgtactggaaaacaaaatacagagttctgttaagaaaattgagatgctaaaagagacattaaaagaacttggacttgaagaaattgaaaaagaactggagatttgcctaaaaaggctggaggaaatacctaaagagattacaaataaatcagccgaaaaagcaaaacttgaggagcggctacagagaagcttaaaagaccttttaaacattgaagaagagattcatcttaaagagaaaatttacaatattgttgaagagggtttaaaaagggaattagcacttggctttgtcaagcaagacgttgaaatggaggatatgttaaaattaagtaaaagcattctttctgaatacaaaggcttttttgacaaggcgggctttgacagagaaaagtttacagagagacttcaaaatgtgtattttgaaactcgcaacgaacttttagaatatgggctttcaattggcaatatctttgatgaagtttatgagggagacaatgaaagaataaaagatgtaaggagtaagcagagaagacttaatattacggcaaatataaatggtaaagtcgtttcattatatacactttattctaatattgaagaggatataatggcgaatgaaagccttttaagagagactgataagattctttttgaagagattataatgcacaatgtgggaattaagataagagcaaagatttttaaagcagaagaatgggtaaagaaaatgaacaaacttatgtctgaaagggatacttccagcggacttaagttctctattgagtggagaagcattcctgcttctaatgaagaagaacttgatacaaaagagcttgtggatattttaaaatccgatgctgatatgctgaaaaaggaagtcttcgataaagtcgtaaatcattttaggtcaaaagtagaaagagccaggagggcaatggaggaaaaaaacaatacagaaacttttcacaagattatgaaagaaatattagattacagagattggtttgagtttaagctttactacagaaaagaaggggaaagccgcaaggagcttactgataatgcttttaataagttgagtggcggagaaaaagcgatggccatgtatatacctttattttccgcggtttactcaagatatgagggagcatcgccgactgcacctcgcataatatctctagatgaagcatttgcaggagttgatgacacaaacataagggatatgtttaaactgattgaggatttaagatttaattatataatgaattcgcaggttttgtggggagattatgacactgttcccaagctttcaatttatgaacttgtaaggccaaaaaatgcaaaggctgtattggtcatgaagtatttgtgggatggaaaagtaaagcatcttatacttcctgaaaaagaggaggttgccgctacagaagtgggtgctataaatgaataa

SEQ ID NO: 50143 - DNA, 1296 bp, Thermoanaerobacter ethanolicus JW 200
atgaataaagaagaacttaaatattttaaagaaaaaaagggatacaagaggatttttgaaggtatacgggaaaagtacagaagtttaggacgtcttggaggcgttgtaaagcttgataatcttacggaagatgaaaaagaagtacttacaaaccattttaaaaaagactataggacgaaaaaatctgcatccattgatgtggcaaagtttgaagagtcgctaaaaaatacgcgatttgaggagtatacgctaaaagacatactggaatactattttggcgaaaaactcaccagcaaaaaagaggatatggaaatatttgcaaaagaaagagaagagttctttaaagagctcttctctaaataccaggaatgtaagtgcattgattggctaaaaagtttgtatgagggaaccgctgtaggggtaaggacagtaaatcagaggtatttaaatgataaggccggattaaaaaaagatataatatacgtatgcgatgccataaacaatttgcctgtttataaaggggaaaagaaaagactgccggtgttttcttcccagattgcacgtaatcctcactattttgattcaaatacagaagctggaagtatgtttataaacgctttatgcactttaatggggctgaatgaagtaaaaggaagtgaagaaatatcagaactttattacaacgttggcattttgatagatgaaatatccaattatgtcacactcttaggacttttggcatatgagggcgatacggaaaatcaagtatttaaggctgcttatgaaagcaatcaagtcttgcaagttcctcttttaaatttgagtaaaattgagagggtcataagcccttctaagaaagtgtatgttgtagagaatccttcagtttttacatctttaatagatgctacaaataaagtatttcctcttgtatgcacatatggccagccaaaactttcttctctcctgctcttggacatgctttataaagaagggacagagatatattactcaggagattttgacccagaggggcttatgatagcagatagattgtacagaaggtataaagacaagtttcactttttaaggtacggcctagaagattatttaaaatctctttcaaatgaagtcataaatgatgtaaggcttagtaagctaaataagattgaatcacctttactctttgatgtggcaaaagagatgaaaataataaaaaaagcagggtatcaggagcttataatagatgatattataaatgatataaaattgattgaagaaggtaagggggagtggtaa

SEQ ID NO: 50144 - DNA, 1464 bp, Caldicellulosiruptor lactoaceticus 6A
atgataaatagttttcaagctccgcttttgggaaaactcaaatattttgagtacctcacagcacctaattcagaaagatacagaacaattatgagatactgttttttgtgccatttagagtacaaaaacaggcttacaaaagaggagatttttacatttttaaaaaattttccacagtttgcagactacacagagcagatgtgcgaacaggacttgaaaagtcttgttgagtgggggaacctcaactcaatccaggacacctcaaagaccaggactgttgaagagttcaaaaacaaaagatttttgtatgaacttacacctataggtctcaagattgaaaggtttttgtttgaacttgaaactcaagaagacacaaaagcagagctaaatcccaagcacattgaaaagatatatttcttgcttcagcaagtggacagtgtattacaagacccacaaaaaagagcagttgactggtgggatgagctaacaagagcttttgaggagattgaaaagagctattcagagtatatctcaatgttaaaatcgtatgaagctgaaaatctcatgataaaagaaaagtttttagattacaagtcaaagcttgtacagtacctttacaacttctatgtcatattccagaactatcttccgaaaataaggtctacctttttgtcattggaagctgctaaaatagaaaagcttttgaactacataatcgcccaggaaaaagagcatcccaaaaacatattcaaagacccagagagcatagaaaaaaacataaaagcaaggtttgataatataaaactttggtttgttgctcctcatggccaggcagaaaaactttctgaccagattcagggacttataagaaaagtgtctgaccttgcagcaaggctttcagagatgtcaagtgtcaaagtaaacagacaggaggagtacaagcatttagcaaaaatcttctcaaaccttgatttggcaacctgtcacaagctttctgcagttgtgtttggcgtgcttttgcctcggtacattgcagccgaggagaagagacagagtgagcttgcaagccttagcattcttgacgtgccaccaatgaagagtttgctacactcaagaggaaggcttgtgagggaaaagagcaaggttttgccggcatctgaattttctgaagacaagaagaaaaggtttgaagagtacaaaaagaagattgaagaggaagaaaagcttgttgctgagcttataaaagatggaaaaattgagtttgaaaatcttcctgttttgactccacaggtaaggaaaaaacttcttgtgtggctctcaagaggactttcgtcaggttttggtaatacagactcagggaaaagatttaaagttgtaagaccaaaagatggaaggtattgcgttctaaaatcaacagatggtgaacttgagatgccggcgtatgtaattgagtttgttgagtaa

SEQ ID NO: 50145 - DNA, 1182 bp, Caldicellulosiruptor lactoaceticus 6A
atgaaaagtgctcttttaaagctacttagcaacttttggattttgaaagaaaaagatgttgaaagctattatgagtgcaagaacattgacaaagagttaaaagactttatagttaccaagctgggacttaagttctatgccacatctgaaatggtcagacttgaaaaggtaccccttgttccaagagagtacatgggaattttggagtttgaagagccgaaagactatgtatttttctgtcttgttcttgcatttttagaggacaagggcagagacactcagtttttgcttgaggatatcacgcagtatatacgctcgaattatccttacgaggaaattgactggacaatgtattctgacagaaggtcgcttattagagtgctaaagttttgcgaaaagatggggcttattaagatagatgatggcaatcaagacctgtttgtggaaagagctgatgttgatgtactttatgaatcaacagggctatcaaaatattttatgagaacttttcctaaaagccttgttgagtattcgtcagttgaagagattttaaatagcgagtttgagtttacaaatggactttctgaccaaataactgacataaagagaataaaagcctacagagggcttttgatagatggcattgtggattttgagagtgaagcaccactttattacattaaaaaacaaaagacaacaatttcacaggaccttgaaaggtttgtgccagagcttgaacttcacctgttcaagtcgtttgcataccttggcgttgaaggtgactacgagtatacctatcctgacaattcaaacctgtgcgacgtattgcttttgtgctcaagagaacttcttgaaagggttgaaaaaggggagctgagactttcgcctgcccatgagatgcttgaaatttcgcttgaccattttaagctaattgtggaggatgtcaagaaaaaatacgggcatttttggaacaaggagtggagggaaaaatccactgataaaatatttgaagaacttttagaatttttgcaccttcacagttttgcaaagacaaatgacgatggatatcttgtcatatcccctatttttttaagagttgttggtgagtatcaggactttgttgcaaatggtgagctttctttgcaagatgatggtatagaagaaagagtcctgaagatataa

SEQ ID NO: 50146 - DNA, 4053 bp, Caldicellulosiruptor lactoaceticus 6A
atgagcaaggaaaatagatgggtgctaagcagagccggggttttcaactactggtactatgacgaggattattttgacttttacgatggcaggatgcttattcgcggtcctaacgcttcaggcaagtctgtcacaatgcaaagttttattaccctgcttttagatggcaactaccacccgtccaggcttgactcttttgggtcaaatgcgcgaaaacttgaagattatgttcttggcgaccagggcccgggtcagaaaaacgaggcaatagcttatctttttcttgagtttaaaaaacagaatatatttgtatccataggtatgggaataagggcaaaaagaggcacaagccctgatacatggtattttgttctaacagacgggagaaggtttggaattgacatcttcttttatgaaaagataggcgaccaaaagattccacttaccagaaaaaagtttgaaaacctcataggagacggcggcaaggtcttttcaagcagaaaagattatatggaggaagtcaacaaaattctgtttggttttgagaatatagaagactttgagaatttgatagaactgatagttcgaataagagcaccaaagctttctaaggatataaaacctgatactgtctacaagatgcttcaggagtctttaccagctctttctgagtcagaccttcgtgcactttctgactccatagagaacatggacagaattcaaacagagctgaaaaatcttgagattataaaaaacgtgctggaaaggttgaaaaaggtttatgatgagtacaacaagcatttgcttgcgaaaagtatatttagcgtgcttgagagcagcaaagaatatttaaacctcaaaaaagaggttgaaaaagataaagctgatgttgagaaaaatagagagttgaaagctcagatagaagaaaaaatagaagagcttaaaaaagaacaagagtctttgacattgaggcttgaaagtataaaagaaagtgacatattcaagcttcaaaaggagcttttaaatataaaagaagagctcagagaacttgaggagcagaaaaacaaaaagctttcccagataaattctgcttcacaaaaacttgaaaaggaaaggcagcagcttatagctttagaagaagagcttgagaagtataaaagaaaaataaaagatagcgtcgaagaaggcaaattgctaatcgaatctattggttttcaaagattctcagaaacgcttgatatgtatcttcttgagcagggtagccttgacattttaaaggatgagctttcatctttcttatctcaggttgagattgcactgaaaaactatgaaaagctgaatgaaatcaagaaggatttggatggtctttacagggagcttgatatgaacagagcagaatcacaaaaggtggaggaagagatacaaaatcttttgtttcagcttgaagaagtaaaaaatagtctgaagaatgctatttctatttactttgaacaaaatgaggttttcaaagctcaagatgagcagagaacagcaattttccaggcgataaatagttgtgagaagaaaggggattatggcagaatatattcaatcttagacgatatttataacttccattacctttctatctcagatacaataagaagacttgagtttgagatagaagttttgaacaaccagataaaagctaagaaagaagagattgagaggattaaaagccagaaagatgatgagattatactctcatctcagcaaaagaaggtaagagacaggcttttgcaaaagggggtaccatttatacctttttatatggctgtggattttaaagacggtgtggatgaaaaaaagaaagctattattgaagatgcgctgagctgtcttggaatcttgaatgctctgattgtgccagaaaagtacaaagatgttctttcggaccttttggatgatgaaaaagaaatgattttaatttcaaaacctgcgtatttttcgcacacactaaaccagtttttagaagtcgccaactttgatggacctattgagctaaaacaggaagtggcagctgtgattgacagtatattcgccaccgaaaaagatgaaggcgtctacatctgcgaggatggaaggtttggtaacggaattttaaaaggtaggacaaccacgtgcgaaaatgcaaggtttattggcattgaaaatagaagaaggtacaggcagatgttaatatcccagcttgaagatgaagtgcagaaactttcagttgaattagataacaaaaaacaggagagaaatgcacagaaaaatttggttgagaagcttaaaaacgagagagacagctttccttcattggttgaccttgacactgcatttgagatgattgaagaaagagaaaatcaaaagttaaaacttcaaaaagagatagaatttttagagaagaagacaagagagctattgagcaaggaaaatagcttgaagcatgagatttctgtcattgcaacaaaactttctgtcacagctgcaaaggataattttttgaaacttgctcaggaagcacaaaagcttaaaagtgtgctagttgatttagaaaacgaggtcgaaaaagaaaaattggtttcaagaacagtaacatcaaaaagagaacaaactctgcagatagaagaaagcctgcagaatttaagttttgaccttcagagcctgaagacaaggtgggagagcttaagtttaaagaaggctgaaattgaaaaaaggctttcaagcgatgatactcaaaagctttttgaagagcagcaaaaggcaattgagcgtcttgatagtattcctaaggagatagaaagctttaacagaaatcttcaggaagtaattgcaaaaatttcgcggcttgagacgctgattgagacaaaagctctgcagcttgagaaagccaaaatggagtacacaaattgccttgaagtattgaagattgaactttcttttggttttgtatggaaggaagaaaatcttgaggatgagaccaaacttttagagtttgcaaaggaaaaaagtagctttgctaatgaatttaaatctaaggacttaaaccaggttttgcaaaggctcatctctgcacactatgaagcccaagtgcagcttgcagagtttggagcaaatctgaacctcaaggaagataataaaactggctatgcaagatatttgtggacagcaaagaaggatggaagggtgctttcgctttatgagtttttagagagaatagattctgagataatcgagaagaaaaatcttattacccagcaggaaagagagctttttgaagaggttttggcaaaggacataggctttaaaatctcacgcaagataatgcttgcccaggactgggtaaagaggatgaatgagctaatggacggcatggacctttcaggaaatcttaaattcaggctttcgtgggagcagaaaaagcaggaacttgaagatgagctttcaacatcagaacttgtaaaacttatcagcaaagacccggcaacagcttcagatagcgacaggcaaaagattgtcaagcattttagagcacgtattgaaagagcaaaaaggcttcaggactcacccgacagttttcgcagtctttatgagataatgaaagagattttggattacaggcagtggtttgagtttcggctctacttccaaagaggtgcagaaaatagaagagagcttacaaacaacgcgtacgacaagttttctggcggcgaaaaagcactttccatttatgttcctcttttggcggcactgtgtgcaaagtaccagagcgctgcgagttttgcaccgcgcataattgcgcttgatgaggcgtttgccggcgttgatgagaacaacattgaaaagatgtttgaactcatagaaaatcttgaatttgactatatcatgaactcccagattctatggggagattataaaacagtgccaggactttgcatttatgaacttatttcagaccgaagcaaaggctgtgttctcaaggtaaaatacatctggaacgggtacaagaaggtgttggtggagctatga

SEQ ID NO: 50147 - DNA, 1263 bp, Caldicellulosiruptor lactoaceticus 6A
atgaaggaagacaggcttttgcaggagtgtatagaatacttttcacacaagggttttgcgcgtgtactggagctcatttacaacaaatacaggtcgcttggcaggttttcgggcaggattgtgctagaaaacctacagccagttgaaaaagagatgctttcgcgctatcttggaagaattgtcagcggagacagggtggttattaatgtaaaagagtttgcacaaaagaggtttgagcagaccaaattttcttcgcttgattttaaagatgtgctatcacacgtattgaaaaaagatgttttgacaaaaaaagaagaaaaagaaaacagagaaaagcagctttcaagctttcttgagaaattaaaaaaacaagtagaaagtgaaccggctgcggaaaaagtgtatctggttgtaaaagaaaatttcaaacaatttgaagggtatcttaaaaagtattctgaagaaaagtttttgggtattttaaacttatgcataaaagctgccgcaacaaagccagaaaaaatagaaagtcttgcagtgtttgcaaccaagatagcgcatgatcctcatttttttgacgaagaccgcgacagcggcaagatatttttaagaatcttaagcttgctcaaaaatgctgaatatccaaagtcttcagaggaaaaagctgaacttttatacatgcacaacatcatcatagacgagctttcaaactggtgtttggtgtatggcataggtgcaatatcagaagatgcagcagaagatgaagcgctcaaaagttttgctttgcaaagaaagccggtgattctgcctctttataccattaaggattacaagcagttttttggatattcaaaaaagattgtagtggtagaaaaccctgctgtgttttcaatgctgatgcaaacttgcagtgatatttctctcatttgtacaaacggacagctgagactttctacaaagattgtacttgagagcctttcaaaagaaggctttactatattttactcaggcgactttgacccagaagggcttttgatagctgacaggattattcaaaactatggtgctgttcccatttgcatggatgaagaaagctatcttttgtctttatctaaaaacaagatttctcaaaagaggcttgtgatgctccgaaacgtaaaaagcccagagctttttgatgtttgcagtaaaatgagagaattaaaactttcggggtatcaggagaagattgttgagaggatagttgagaggttaaaaagttaa

SEQ ID NO: 50148 - DNA, 1485 bp, Pseudonocardia dioxanivorans CB1190
atgagccgcaccgaggtcttcgcctacgtcaccgagagccccgactaccgctccatcctcgggatcttcgccgggaccttctttgccgagctcaccccggaggacgtggccgcacgcctcgccgcgaccggaatcgagctgccggtggatacggtggcggtgcgcctggagagcctgcggaactggggcaacctggaggtgtcggcgtcggtcggggcggtgagcaccgtcgccgactactacaagcgccgcaaccgctacctcatcacccgcgtcggccaggaggtgcacgagctcgtcgagaacgttctggcccaggtcgacgacgtgcgtgacgtctcgctcggccggctggacgtcttggccgccgctctggaggcgctgctgcggctggacgtgcgggcggcctcgccggccacgttggccgacgcggtgcgggcggtgttcgacccacaccgcgccttctccgccgagatcacccagttcttcgccgcgatcaaccaatggcaggcccgcttcgatctggacgagtcggagttcgcgttcttctccgaggtgcttgtcgggtacgtcggcgagcggttggagtcgttggagcgtaaggcccggccgatcgggaggctgctggcggagctggagcccctgatccccgtggtcgtcgcgagggcgcgtgacggcctggccgctcgggtggcggaggccggtctcacggacgtgcaggtccgctccgggcagggcggcaccccggccgactgggagaacctcggcaactggttccgggggcgtccgggcgtcccgagcagggtggcgaccctcggccgtgacgccgtcaacgccgtccggaccctgacacaaaacctcacccggctgtcgcgctccggcgtggccgggtcgtcgcggcgcgccgactacctccgcctggcctcgtggctcgacgccgcgccccgggaacggccccacgagctccatcggctcgccggagcggcgttcggcctgttcggcagccgacacctcgggggtacgcccggagaccaggacgatccggtgccgtcggtgacctcgtggtggacagcgccgaccgcggacatcccggtcagcctgcgggagcgaggggacaccaccaaccgtggccgctccgggcaggtcgcggaccggtcggtgcagcgcgcgcacctcctggcccggcgtcgtgccgaggaggaggcgaccgctgccgcgcgcgccgagctcctcgccgctgccgcatcggacggcaccctcgcgagcggcacggcgatgtcgacatcggcactgcgcgcgctgcagcggctcctcggtcctgcggtcgcggcgatgggcccgaccggggagaaaggcgaggcggaggccgacgggacgcggtgcatcgtcgaacgccgagcgggcgaggccactacggtcagcacgcccgccggcacgctggtcgtgcacgagctcgggatcgccgtgatggccgccgatgcgtga

SEQ ID NO: 50149 - DNA, 1125 bp, Pseudonocardia dioxanivorans CB1190
atgcgtgacgatccgcatcggcccgccgagcgcatcgccgccgctcgggcgttgctcgctgacccctggcggcccgctgagaccgacccgtcactcttccagctcatccgccggcatgccgaggtgctcgaccgctggttcacccaacggctcggctatcgcctcgtcgtcgacgccgacactgcgcggctgacgaagagcgggcacctgccgcacgatcgcccgctgcgcacgcggacgggccgcccgttcaccggtcgggagtacgtggcgctcaccctggtgctcgcggccaccgcagcgggcccggaccggatcagcctgcgtgacctcgtcctccagttccgctccgcggccgccgacgccgggatcaccctcgacggagggtccgcggagcggcgcacgctggtcaccgccctgcggtggctcatcgagcgtggcgtggtgcgcgagttggaccgatccgtcgcagcctacgagtccgacggccggtcggacgccctgctggagatccgcaacgatcggttgctcatgctgcatacccctgccctcgtcggcgccgagtcggctgccgagctgatcgagcggagcaccgacccgggtgggcgtgctgcgttgcgccgcaggctggtggaggacccggtgctctacgccgacgacgtcagcgccgaggactgggccgagctgcgcaggcgggtcggcgaggaggtccggttcctggacgagatgttcgggctccgcatcgaggctcgcgccgagggcctcgcggcgatcgacgtcgacggcggtctcagtgacatcgtcttccctcgctcgggaaccaccgcgcacgtcgccctgctcctcctcgccgcgctcagggaccaccatcgagacggcgccgaccagaaggcactcgacgacgaggtcgggcacctcgtcgggcgctacggacggttctggcgcaaggacgcggtcgccgaccccaccgccctgcggcaggaggcggtggagctcctccgggcgatggggctcgtcgccgtcgacgccgccgggatcgtccggccgaagcccgcggcggcgcgcttcgcccccgccgtggtcgtcgacgacgaggacgacgatccgccgatgatgttgctgtga

SEQ ID NO: 50150 - DNA, 4068 bp, Pseudonocardia dioxanivorans CB1190
atgacggtggtggccgacgctcgctggcgtccctcccgtgccgggatcctcaacgtctatcagtacgaggacgagaccctgcacttcgccggtggccggctgctgctgcgcggggtgaacgggtcgggcaagtcgacagcgatgaacatgctgctgcccttcctgctggaggcggacacccggcggatcgacgccgcgggcgagcagaccggggtgctgaagtcctggatgctcgccgacaacgacgagacgcaacgaaccggctatttgtggatcgagttcgcccggcccgatccggaggtggctggcggtacgcgccatcacacagtcggctgcgggatccgtgcgaaccgcagcaccgaccgcgcgacaacgtggtggttctccacgccgcgacgtgcgcggatcgacttcgcgctgaccaacggccgcgtgcccctcgccgtcgacgcgttgcgggccgagctggggagcgaggctgtgttcgcccagagccaggtcagggagtaccgggccgagatcgccaggcggttcttcggcggggcagacccgtcaggctacttcgccctgctgcaccaggtgcgcaacccgagggtcggcgaccggatcgacgcggacctgccccgcaggctgctggacgccctgccaccggtcccggaggacgccgtcgccgacgccgctcagcccctggaggacctggagagccatcggctcaacgtccgcgccctcgcccagaccgaccgggcgttgaacagcatgctcgagacctaccggcactacgcccgccgggtgctgcgtgcggcggaccagcgcacagccgcggcggtgacgaccgcgcgctccgcgctccagctccgcggcaggctgcgcgccgccagcgacgcagcggacgcgacagaggctcggctgcgtgacgaggtggggcagttggagcgagagcacgccaccgcggactccaccctcgccggtctgcttgactccgacgcgtacaagcagctcgccgcgctcctcgcccgtcgtgaccaggtgagaagcctcgagtcggaggcggacacggtcgaggaggttcgcaacgaggcagcgcgccgagtgcgcgctgccgttgacctcgtgcggtcccggcggggccgggtcgacggtgatctcaagatggtgagcgacgatctcgcggctgcggcccgacacggccgggccgccggtgtggtcgccccgctgcccgacgctcctgcgctccgcactcggaccctccgcggcggcgtcgaaggaccggaaccggacgcagagccgctcgcgcacgtgacgaccaccgtggtctctgacgcggtgcggcgccgacgagtggacgtcgcccgagttagtgacctgctcgcggagtcggagaagcagaccgaggcggcatcccgggcggagcgcgaggcgcgtgcggccgagcagatggctgacgaggcccgtactgcggccgcggagtcccgagccaccgctgaggcggcgggtgcagaccatcgagccgcggtcgccgcatggtgggggcggctgaccgagcacgtccgagcgatcccacccgccaaccccgccggcagcgcgagctggctgaccgtccccgcggccgtggatccgggaggtgacgagctgcgcgagtcggcgcggttgcggctcgccggggccgccgcggcggtcgccgagacggagactgagctggagccggcgctggccgcggcgtcgctgcgccgggaacgagccaccgcggacgtagccgcgctcaaccgggagcttgtggaggtgcgtgaggccagggagctcccactcacccggcctgtatggcagggcgcggagccgccggatgccgtcctgttcgcctcggtcgtcgacttcctccccggtctcgacgacggagcgcgggccgctcttgaggccgcctgcgaggcagcaggcctgctcaccgccacgatccgagccgacggcgagttgatcgccgcggacggggagctgctcctcgggcccggcccggccgtggagccgaacctcgccgaggtcctcggtgcggcaccgccggagggtgtggacccggcggcggtggcggcggcgctgaccaggatcgggctcggggcgtcctccgcggctgcgctgtgggtggcgcaggacggtcgcttcggcgcgggcccgctgcgcgggcgccacaggaagcccgccgcggagctcatcggggccggatcccgcgcggccgcccgcctccggcgtatcgcggagctggaggccgacctggcggtggcagtcgatgaacggcgcgcccaccagcaggtgcacgatgctctggtcgagtggcgccgtgtgttgcgcggcctgggtggcgagatccccgacgcgcggcgggtcgacgacaccgccgcggtcgccgcaggcgcggtgcaggatgcggtacgtgccggcgagcgtgccgcgcgggaccgcacgctggcgatcgaggccgaacgcacggccgagcgcgcatgggccaccgccgagaccggtgcggcggaggcaggcctgcggctggaggcggaggctctggacgagatccggggcgcgctcgtcgagacggacgcggtcctgcgcaggctccccgaccgggtcgacacggctcggcggtccttggaggactggacatcggccgtcgatgcgtgggaggccgagtccgagagactcgaagccgcgcaggaccgcgccgtcgaggcccgcgaccgagccacggcggcgcgtaccgcactctcggccaccgaggcttcgctgggcgaggagccggagcgggtcgcggcgcaggtcgaggccgccaaggcgcggcgcgacggcctcgccgaagagaccaaggcccgccgcgccgcgcacaaccaggccatcggcgccgccgcgaccgctcgcagtacggccctgtccgccgagggggaggtcgagcgctccgagcaggggtgcagagacgcgcgggcagctctgctcgaggtcactcgggtgccgggactgttctccgcagcccgcgcggacgataccgacgacctgcccgacctgccggacaccgtggaaggcgccgcccagctggtggcagcggtgcgggccgcggtccccgacccgcaacggccggtcgacgaggacgcgctggaccgctcgctccgcggtgtgcgggactcgctcggggccggctgggacgcaggcaccagccggttcggcgacggcgcgcccgtcgccatcgaggtctccggtccctacgggcggcgggtactgctcgccgcgaccgagcaggtcgcggccgacctccgccggtctcagggcctgctcaccgcccagcaggatcaggcgctgcgcaaccttctgcacggccgggtggcgcgggaggtggcccgggccctcttcgaggctgatgagctggtcaggggcatgaacaccatccttcgcgcggtgaccacgagcctagggatcggtgtccgactggactggcgtcaccgcggagacctcgacccggacaccgccacggcactgcggctgatggcgaaggatcccgacgcgcgcagcgacgaggaggacgccgccgtgcgcgtggcggtgtccgggctggtcgaggacgcccgcgccgccgacaccgacgcgtcctaccgggacgtcatcgggcgggttctcgactaccgcagctggcacgagctgcgggtctacctgcgccgcccgggccgtccggacgagctgctcagcaggcgctcgcggctgtcggagggggagaagaagctcgtcacctacctgcccatggccgcggcggcgtccgtgtcggccaccgcacacgacccgaacgggatcggtgcgccgcggctgatcatgctggacgacgcgttcgccaaggtgtccgaggacaaccacgagggcctcttcagcctgctcgtgggactggacctggacttcatcgtgacgagcgagcggctcttcggcacccacgcgagcgtcccggagctcgccatcaccgaggtcctgcgagacgcggacctgcgcaccatcgcgctgctgcactaccactgggacggtcgccagcgtacggagctggcgacggcatga

SEQ ID NO: 50151 - DNA, 1206 bp, Pseudonocardia dioxanivorans CB1190
gtgaccgacttcctcgccgtctcggagctgacgccgctgtgggaggccgtccgcgctgcgctcgaccgcaacggcctggagtggcgtggccgcctggccctgcccctcttgcccgccgaggggcgccggcgcctgggagtcctcctcgagcggccgatccccgcggatcggcgctcggttccgctcgccgagctcgctgccgccgtcgagaggctctcccggaccgatctcgtcagtgcgctgaccgacctcggccatcggccgtcggggcgtcgggaagcacgacttgctcatcaggaggccacccggctccgtcgcgcggccgtcgacaccgcggtcgaggccgccttcccggatgcgacatgggcggtcgggtggggcgactcggcctggaccgacgggttgttcgcgcgccagtcacccgaggaggtccggacgctgattatggataccgcgcgggtactccgccacgcagggacaggccgtagtcgcaccgagcttgcagcgctgctcctcggcaatgcgcacgcgctggactcctccgagcgcatcgccgtcctcgtgacgagggctctgatcgctcgggacggccccgagtccgagcgagtggtctgggagcgggccgggatgcctctcgacctggtgtccgcacccgtcctgacctggggactgccgctgctcggggagggcgccgtcgcgcagtcctcgcgcgcgatgcgtggcgcgggcctgcccttgcatctgtcgaccgtcgccttgcgcgccgaacctctgcgcgtgccggacgggactcgggtgctcgtcgtcgagaacccgcgcctggtcgaggccgcggctcagcgccgccttcctgccgcggtgatgtgcacgaatgggaatccgaccacggcgccgtccgagtgcatcgcaggtctgcgctcgtcgggcgccgacctgcgctaccacggcgacttcgacaccgcgggcctggcgatggcagcccgcgtggctgcatcgggctgtgctccgtttctcatgagcgcgaaggactatcgtgcggcgctcgtggtcgcgtcctcgaacggggtcgagctgccacgcgacggcggagtgactccggcgaccccatgggatgcggcgctcgcgacggccttcgaggcgtcacggctgatcgtccacgaagagcgggtgatggacgatgtgctggcctcgcatgcggcccgctga

SEQ ID NO: 50152 - DNA, 1515 bp, Rhodococcus equi 103S
gtgagcgattcaggtgacccgcgcgcgtccgccgcggacgtcgacttcgccgtgcgcgaggaccggttgcgactgttctccttcaccacggcggagaaacgcaccgactacctgtgggtgatgcgggcgttcgaccacgcgcgtgccaactacgttgtcctgctgcatgccggcgaggtcgccgacatcctcgcccgtatcgccgacgacgacccgtcgggcgctctcaccgccggtgagatcccgccactcctcgaccagttgcacacgtggggcgtgctcgaacgcagctacgacggcagccgcgccgcgacgctcgccgagtaccggaaccggcacttcgtgtaccagttcagccaggccggctacctcgcgttccgagcggtcgaggacctgctgggtgcacggctcgaggacgcgacgctctcccggctcgcgctgcccgacctgttgtccgacctcgaggaactcgcacaggcgaaccgctgcggcgacggtgatctcatctatcgcaagctcgcacggctggattcgacgctcaccgacatggcggcccgcgctgcccagttctatctgatgctgggcgatctggtgcgcacgacggagatcacgccggaggcgttcctctcgcacaaggacgcgctgctcagtcacatgcgcgagttcagttccgacctcgcgcggtacgcgccgaagctcggtgccgcgatcgagaacgtggaggcgaccggcatcgaatcgctgatcacccgtgccgccgcgagcgacgaccgggtgttcctctcccgcgaggagcgcgaatccgattggcgggcgcggtggtcgggcctggcgcagtggttcgtcgcggccgccgggccgagcgagtcggacaggctgcgcgagggcacgatgagcgcgatcgcggcagtgctctcgctgctgcgccgcgtcaccgagatcagacgcggcggcgtgagccgcgagagtcagttgcggcacctggccggctggttcgccgcgaccccggacgaggaatcggcccacgcgctgttccagctcgtcttcgacctgggtcgccctcgacacctgtcgatggtgcacccggacgcggacatcattcctgagtcccggtcgtggtgggacgccactccggtggagatctcccgcacgctcgccgagaccggccgggccgcccagcccggtatgccgtcgcgcatgcagcgcaacgaaggcagcatccgccgcctccgggaggaacaactcgccgcccagcgggcgcgggcgatcgcggcgtcgtcgctggcggcttccggcgcgtacgaccgggtgctcgacgagcaggagaccgacgtcctgctcagtctgctcaatgccgcactcaccgcccgggtgccggtcaccggatccgttcccagctccaccgggtcggagaacggcgtcaagctcacactgagcccgcacggggaatcgaccgtcgtgcacaccgctcgcggcaggctccacctggacggactgcgggtgagtgtccgatga

SEQ ID NO: 50153 - DNA, 1413 bp, Rhodococcus equi 103S
atgaggaaccgttccgtctccccactcgacctcgattcgtaccagcgagccgcgcgggtaatcctctcgaatcaccttgtgacgcagacgtatcctgatcgcctcgcgctgccgctgctgcgccggtgggccaccgagctgcgcgacgacctgctcgagttgttcggctaccgactcgaggtcaccgagaccaccgcgcgtctgttcacagtgacggaccggctcgaacccggcgcgcccgcccgcaccggcaccgatcgccccttcgaccggcatcgctacgcgtacctggcgctcgccctcgccgcgctcggccgcgccggcaaccaggtcaccctgtcggagctggccgatcacgtcgcatccgaggctacgcaggtcgccggagtgacactgtccaccgaccgcgcggcagaccgggacgcgttcgtcgacgccgtcggctggctcgccgcgcgcggcgcgatcgtcctcgccgacggtgacgcgggcggatgggcgtcgaatcccgatgcgggagaggcgctctacgacatcgaccgctcggtcgtggtggcgctgttccggccgccccgggcactgcagcacgtgacgtcggtgcgctcgctgctcaccggtgagccggcgcccctcgacgacgacatcaccgcctaccgacccaccgacgcgcgcgagactgcccggcggatgcggcgcgccctcgtcgagcgtccggtcgtgtacgccgacgccctcaccgacgacgagcgactgcagctggcgctgccgcgcaccgccgccgacgtcgaggatctcaccgggctcgtggccgagcgccgcgccgagggcatcgcgatgatcgatccgtccggtcggatgtccgacgtgcggttcccgagcaccggcaccatcgcacaggtcgcgttgctcctggccggcgagatggccgaccgggtcctcgatctcgatgctgccccgctcccccggcacccgctgccgaccaccgatcaggccgagctgatcgagcggctggactcggcgatcccccgatcggggatcttcgagcacttggccgacccgttcgagtcggccgagtcagcggagtcggcgggatacgccgccgacgaccgtgacgacccgatcgaacccgcccgctacgcgctcctcgacgacgactgggtgaccggggccgtcgacgaactggtactccggttcgggcgcaccttcgccgcgcagtggcaggcggaccgcaacggcttgcgccgcaacgccgtcgcgctcctcgatcggttgcagctcgtccgcagtgtcgacggcggcgtactcgtgctgccgccgatcgcccggttccgtggcgtcgtcgtcaacatccgcgaccggagcgcccagtccgagttgttccacggaccggtctccgccgagaagcactcctag

SEQ ID NO: 50154 - DNA, 4173 bp, Rhodococcus equi 103S
atggcatctgcgcgtttcaagccgacccgcgccgggatcatcaatctctgggactaccgcgaccaggagttctcgttcgcggacggccggctggtgctccggggcccgaacggttcgggcaagacgaaggcgctcgaggtgctgttcccgttcgtgttcgacggacgcatcgagccgcggcgactgaacccgttcgcgggcgaggaacggacgatgaagtccaatctgctgtatcggggccaggattcggcgcactcctacgtgtggatggagttcgcccgcgggccgcaggacgaccccgaggcggtcaccgtcggaatcggcatgcgcgcgagccggcagaacgacaaggtcacccggtggtacttcgtcgccgacggccgggtcggcgtggacttctcgctcctcggcgacgacgaccggccgttgacgaggaagcagctcgccgaacagctcggcagcgacgcgatcaccgaccgccccgtcgactaccgcgccgccatcgatgcgcggctgttcgggctcggcgccgaacgatacgaccagctgatcaacctgatcctgacgctgcggcgtccgcagctggcgaagaacctcgaccccaaggggctgtcgcaggccctcacggacggtctgcgcccgctcgacgagcagctcgtgctcgaagcggcccgctccttcagcgacatggaggaggtaggccgcgccctcgagggtctggccgccgcggatcaggcggcgcagagcttcgtgaccgtgtactcgaagtatctggcgcagcaggctcgcacggacgtcgaacaggtggcgcgacgcctcgaatcggtggaccgcgcccggtcggtgctcgacgcggcggtcgcgctgcaatcgtcgcgacaggaggagcgactgctcgccgaggaccgcttcacctccgccgagcgcgccctcgagcaggcccgcgccgacctcgacaccctgcaacgctcgggtgcctacgagggcaaacagcagctcgacgacctcgcggccgccgtcgcacagctgaagctgtcgaccgagcagcaggcagacaaggcccgcaaggcgcaggccacgctcgaacagcgcaccggcgaggcaacgcgcgccaccgaatcggtgcggaccgccaccgcggcactggtacgcgcggagaccgaactggccgaggccgccgagcaggccggcatcgcgtggaccccgctgccggagggctcgcgatcggatcagatcatcgccgcggtccgcgggcacgccgaggaacgcgacggcgacgtccgcgccgtgcgcgccgccctcgccaccgtcgagaaggcgaacaccgaacgcgaacgcgcggaccgggccgccgacaagggacgcgaactgctcgaggccgcacaggccgcggtcgccgaagccgaggcgacggtggagctggcccgggcggattgcgcggcggcgttgcgctcctggtggaccgagcattccgccgactacgccgcgatcggcgtgaccgcggaccttttcgcggcactggacaaggcgctcgcgcaggccggcgacgacgactcccccagtctgagcaccgtgctgcacgagcacgtcgaagccgcgctcgacgagcagcgggcccgccgccgcgaggccgccgccgcgcaggcggccgcgaccgcccggatcgcggaactgcagaccgaccgcaagcacgtcgccgccgagaaggacgacgcccctgcccgattcgcgtcccgcaccggggaccgcagcgaactgcccggagctccgctgtggcgtctcgtgcgcttcgccgacgacgtcgaacccgtcatcgctgcaggcgtcgagtccgcgctcgctgccgcgaacctcctcgacgggtgggtgcttcccaccgacgatgcgccggccgacatcgagtccgagcagttcctcgagccgctgccggaagaccgccgcccgcagggcgcgaccctcgccgacgtgctcgccgtggaaagcgataccggagtgcccgaagagcgggtccgggcgatcctcgactcggtctcgctggaccgcgacggcagcgcccgcgacacgcacgtcgggatcggagtcgacggacggttctggcagggcatagcgcggggccggcacgtcaaggccgacgccgagtacatcggcaccacggcgcgcgaacgtcgccgcgcccagcgcatcgacgaactcgacgccgagatcaccgcggcggaggacgcccggaccgccgcccgcgcggtcgaaggcgacgcgaaggcactgctcgacacgctcgcgggcgccgcgaagtctcttccgcgcaccggtgccgtcctcgccgcgctcaagaagctgaccgaggcggccggagcgctgcgaacccggtcggagtcgaccgagtcgtccggccaggaactcgaccaggccatctccgatcacacggcgaaggagaagcaacttcgggccgtcgcggtcgcgcatcgggtgtcgcaccacgcccgtgacgtcgatgccctcgccgcgtcgatccggcacttcgagagccagggcgaacagctgttgcgctgccgccgggagcacgagaaggaactggaactccaccgtgaggccgaggaccggctcgaggaggcccgcggcaacaccgaggagttcgtcgaggaggcagcggtcgccgaggagaactacgcgcagcaggtctcgcgcctcgagacgctgcgcgaggcgttgggagcgagcgccgaacagatcgatgccgatctcgaggaagcgcgggcgcggatcgaggtgtgcaagaccgaacagcgggcggcacgcaaggcctacgacgcggcggtcgagcagatcggcaaggccgagggtgcgcacaacgcagccgtcgaaggactgcgcagcgcgctcaccgagacccggaccgacgccgaccgactggcaccgtacgcgcgacgtgacctcctcgacctgctgcgggtcgagggcgagcacacctggccgcagagtgcggccgcgtggctcaccccggaccagctcgtctaccggatcgtcaccgagggcgatccggacgcaccgatcctgccggccgaggtcgcggcgctctatcgcgcgatggacgccgcgaccgcgtccgtccggaccagcgagaacgcgaagaagtcgacccggtcggcgctcaccgcggcactgcaggacttcgacgcgcaactggccgcggctggtcaggactaccgcctgcagtgggacgcgccggacgggctgaccgtcgtccgagtccaggacgatcagggctactcgtcgatcggcgagttctcgacgcggatcgcggcggcacgtcaggaccaggaggtcctgctcaccgactccgagcggcgcatcctcgaggacgcgctgctgaccggcctcgcccagcagatccacgagcgcaccgcggacgcccgtgacctgatcgcccagatgggtgccgagatgcgcgagcggcgcatgtcgtcgggcagcacgatcggcgtgcactgggtactcgccgacaacctcgacgacacctcccgtgcagtgtccaagctgttggaccgcgcgcccgcggcgttgagtgccgacgagctggcgaccatccgcgcccacttcgcggcgcaggtgcgcatcgcccgggccgcgcacccggagcgctcgtaccccgagatcctcgcgtcggcgctcgactaccgccggtggcgggtgttctcgttcacattgatcggcggggacggcagcgaggaccgtctcaccgtggcgcggcacagcgcgctgtccggtggcgagcagtcggtatccctgcaccttccgctgttcgctgccgcgcacgtgatgctctcgtcggccgatccgcactcgccccgcctgctgggcctcgacgaggccttcgctggtgtcgacgacaacgggcgcagcgaattgctgggtctgagtgtccagttcgatctcgacctgttcatgaccggctacgacctctggatcacgtacccgggcgttccggggtgcgcgcactacgacctggcgcactcgacagccgaacagagcgtcagcgcggcactgctcgtctggtccggcggcgacctgctcgccgagcacgacggcagcgatctcgcccgggccctggggtcaccgctgcgccgccgcgtccccgccacggcggacggtggtctggagttcgcggacgcgtag

SEQ ID NO: 50155 - DNA, 1485 bp, Lachnospiraceae bacterium 3_1_46FAA
atgagaatacaggagacggtgaggaagccgatgacggaagcaaaatatctgaatgtggataatacagacaggtatcgtccgatcatccggcttttttatttgaaatatgaaaagctgaagtattggctgtatcaggaagaggtatatgaagaattaaaggaagatgcatactttagagaatatacgcctgagcagtgtcagcaggacttggcggctttgactgcatgggggaatctggtaacaattcaggatacgagaaaggttgcgactatcgaggagtttaagaataaaaagttccggtatcagttgtctgaagctacggtagaaattgagcgaatggttatccgggtagagaatctgtttattgaaagttcttcgttggaacctacattattggagagacttcgcatcaatctgcgcaagatttctgagattacagaagcagatcaggagcatatctatgcatggtggaatgatttgaataatgattttatacgattgaatcagaattatcaggattatatgcgggagttgaacagtgtaaaagcggaagaaatgatgaaaacgacagagtttcttgtgttcaaagaccgtttgatcgagtatttgagaagtttcgtgaggagtctgcaggtcaatgccgcatttatagaacaatgtctgaagaatacggacaggcaggttttgaggtgtttgctggaaaaaattatacagtatgaattgttgattccgagaatcgatgtggaagtgaaggaagatttgattgcagataaagtatatggccgttggcagagtctggaggaatggtttaccggaacagacggaaaggattctgaggcggcaaaggtatttgacacaacgaatgagatcatacgaaagattacaaggtatgcggcaagaatcagtgaaatgagcaatgcgggggcgaatcggcgggaagagtatcataaggttgcggtgatgttttcaaaatgtaagaatatttttgaggcgcacagattggccgctgttgtatttggcattgaaaagccgctgcatttaaaagggcttccgtggcgtcagaccgagagtatcaacagcggcgtgttcgaggaagaaccgtatatcgtgactgtgacgccgaggattcgtacatataaagaaaaagcaaaacgaagcgggattgttgatcgctcgaaagaaaaagaagaaatgcggcttgctacgattcagcgattagaggaagaacgcaggctcttgaaaagttatattcaggataatcgtctggagtttgcaaagcttcccgagatagagccgcatgtaagagatgtatttctgacatggctttccaaagcattggagaataaaagtcttcaggggaaaacagaggatgggcaggtttatcgtgtggaaaagtcggatacagaggaaatctgcattttgaaatcatcggacggtaatctgcaaatgccggcatatgtgattgtattcgagaaaaatgagtga

SEQ ID NO: 50156 - DNA, 3711 bp, Lachnospiraceae bacterium 3_1_46FAA
atgagagcattggaaattctgctggaacggcgttggattttgaagagtcgggaaaaagaattatattatcagataaaggatgaattaggaacggttaagaaattcttgatggaaaagctggggtatcaggtaatcgtgaatccttatcttgtaaaagtggaaaagatgccggcgacaccggagaactggatgggaattcaagaatttacccggaaaatagaatatgtttttttctgtatgattttaatgtttctggaagaaaaagaagccgaagagcaatttgtactttcagagctgacagaatatatacaggggcagtacagggaggagcagattgactggacagtatatcagtatcgaagacatttgatcaaggtgatcaagtattgtgtgaactgtggaatcctgaatttgaatgatggaagtgaagagaattttgcgagggatgatacgagtgaagtactctatgaaaatacaggtgtctccagatattttatgaaaaatttcacacaggatattatgggatatacgacgccggaagatcaggcggaaaaggaatcattgtctgacagcgatacggtcaaattaaagcagagggaagttgaaattaaaagtcaactagaaggattaaaaaagaatattacaggaaaacagaggcaggaagaggagaaaaaagaaaaatatcaggaaacagagcagaaaatacaacttcaatttcagaaaaatgaaatgctttgggaagaaattgaaaacagtctggagtatatggaagaagagatggcgggggttcctttcgatgaatttgcatttatgaagaaagagctgacagagcagaaaggagagcagtattcttttcaggctcattcagaattattaaaggattatatgacaaaggtccgtcttggaaaaacgacgctggaagaagaaaagggttgtcaggaaagatacagtagatttttgcaggaattggattcctatcaggaagaaaagaacaaagcggaacgagaagtccttcaatatgaaaatcagtttcatgaagtaaaacaggagacaatagaatcggtatatcgttgggaaaaggagaatgcggagctgcatctgcagtcagatctattgcaggaaatggcaagggaaattgagaagtatacaacggaaaccgattattggaatatccgcggattggcaaatggtgaatttgagcggaaaagtcaggaactttcgggaaaagtattacagcagagcagagaattgtccgacagacgattggagaaagacggaatttgcgaagaactggaacagtggaagaatcaaaaggagccggagccggaacgcagtgaagcagtggaaaagaatcgacggcttttgaaagaaaaaggaattccatatttgcagttatataaagtaattgattttgacggaaaattggatgaaacacagcgggcatatctggaagaagcgctattgcatatgggcatactggatgcgctgattgtgcctgaagaatatagaaaacaggcgctggcgttggatgcgggggtatgtgaccgttatattttcagtgatgccgcatatgtaagaaataacattatggattttctggatgtagacaacgaagagggagatattcttctgtaccagaatgtttcccgtatattaacagcaatcggctggaaggaacaggacgaagagacgataagtgagtctatagaaaaaaacaggacatggatcgataaaagaggaaattatggaatcggaatcatagaaggaacggttacgaaaaattatacgccatgttttataggagcttatgcaagagagcagtatcgcataaagaagatacaggaactagaagcagagtgtcggaggctggaagataccattcaaatagcggaagacgaaattacacaattaaagcaaaggaaaagctgtctggaaacagagtggaaatcatttccgaaagaacaggatctgaaagtggcagcaaaagaattagaaaagaaaacgaatattctggaagaaatagagtgtaaagtacagatccagaaaggtattgtagaaaaagaacgaaaaagtctggatgcagttcggctgcgggtgcaggaagtatgtcagaagtgttatctgcccccgcgtctggatgtgtttacggaagcagaagaatccttgaccgagtataaagaagagttgatgaaagtacagatttcctatggaaattataggaatggaattagttctgcaaaggtgcagaaggaatatttggaaggaattgacgccgatttggatgatatccgctacgatttgaatcatatgatacgaaatgaacgggaaaagcggggaagtctgaattcagtgatggaacagcttgctttgacggattatgaggaaatcagggagcgattggaacattgcatagagcgattggagaaactgccgtcagagattgaggcgagtgttacacaaagctctcatttggaaacaaaagaaaaacaatttatagaaaaactgggagatatagaagtttcagttggaaagtacagacagcagaaagacagattttgcactgcttttgaaatggaatatcagcttggatatgtagagtgtccgtttgcggtaagcgacgatgcggaagaacgggcggagaagatatgcaggatgtttatggggagattcggaaataaaaggcacagtgagattttggagaatctgcaaaatgtatatcatatgaataggggatatctgttggaatatcaggttacgctgcagtcattatttgaagaactggatgaggagagcggagttttcgacacaagtatgagacgaatcgatatttctgctaagtatagaggaatcacgatcaagtttaaagaactgattgccagaatgaaagaagatgcagaggtacagcgtcggcttttgagtgataaggacagagagttatttgaagatattcttgccaatacgatcagtaagaaaattcgcggaaaaatccaggccagtaagcgatgggttgagaaaatgaacacattgatggagtctatgaagacttccagcggacttacgctgagtctgcgttggaaaaataagcgggcggagaaagaagaacagctggatacgagggaacttgtagaacttctgcaaaaagatgccgaaattatgcgtccggaagaggcgcagcagttatccggacattttcgatctaagatcgaagaggcaagaaaatctgcaaatgatctgggaaatgtgcagtcttttcatgcgattatgagaaatgtgctggattatcgtcaatggtttgagtttcaattggaatgtcaaaaaacaggagagaagaaaagggaactgacagaccgcgtattctttacttttagcggcggagaaaaggcgatgtcgatgtacgtgccgctattttcggcagtagtagcaaaatatgcaggggcaagacaggatgctccgtatttgatttccttggacgaggcattcgcgggagtagatgaaatgaatattcgggacatgttccggctgatggtgaagtttgactttaattttatgatcaactcacagattctctggggagattatgatacggttccggctttggcaatctatcagcttgtccgcccggagaatgcgaaatatgttacggttattcggtatgtctggaatggaaatataaaaagtatggtaacagaaaaggacttgagtcatggataa

SEQ ID NO: 50157 - DNA, 1296 bp, Lachnospiraceae bacterium 3_1_46FAA; identical to SEQ ID NO: 49971

SEQ ID NO: 50158 - DNA, 1476 bp, Lachnospiraceae oral taxon 107 str. F0167
atggaatattttgagcctattaatgaaacatcttatttatccgtacctaatgcaccggtatatcgaaagattatgcggtgcttttatcgtgaatatgagaagatgcatttccaaatatataaagaagatatttttacattgttaaaacaggatgaggcatttagggattatacaatcgagcagcttatggcagatcttgaagctttggttaagtggaaaaatcttacacccatacaggatcctgggagagtctatacaattgcggactataaaaataagcagtacagatatacaatgtccgagtatgctgttgagattgagcgtcttacagtgcgtttggaaaatatctttttagaatcgggcagtctgtctacaaacttttttgtgcgtctggaaaaaagtcttcaaaatgtaggagatataaaggatagtagtttaaaggaaattaatgaatggtggagtttacttcaggaggactttaagagactgaaccggaattatcaggactatcttagggatttttactcgggaaaaacacagcagcttatgaaatctgtggaatttgttcttcataaggacaaatttattaagtatttaaatgagtttgtgcaggaattgcagaggcattcaaaaagaattgagcaaatacttacggaaaatatcccgcttatcgaggaatatattgttgagagggtgattgagagtgaacttgatattccacatgcgatattgcagatgaacgggaatatagagccgagtataagagagaatgtacttggaaaatggagctctttaaaaaattggtttatagataatgccggaaatgaatgtgaatgtaagaaagtccttaaaatcacaaatgatgtaataagaaatattattcaaaatgcggctttgattgttcaactccaaaatggagggataagcaggaaggatgattatcgcaagtttttggaattgtttttaaaatgtgaaaatttggaagaggcacataaattgtcggctcatgtttttggtgtgcaaaaaatacagcattttaaagtattggagcctcgtgaaaaaaacagcataaatgacagtatttatagtgaagagccggcaacctttcttttaaagcctcatacaaggacttacagggagaaaaaggacaggagagggttcagtgataagtctttggaaaaatacatgcaaagggaaaaatatctgcaaaagattaaaagacaaaaagatattgtgatgtattatatcaaagataataagattaaattttcagaaatagaagagattatttccgaagaaacaaggatgatatttttacagtggattattgcagccaatatgaattctatgaaagtcggaaggactgaatacgggcaggagtatcatttaaaaaaagaaaaaggaaattgtgttttaaaatgtgaggacggagatttacatatgccggcatttgtattggagtttaaatctttatga

SEQ ID NO: 50159 - DNA, 1137 bp, Lachnospiraceae oral taxon 107 str. F0167
atgaatgaattcaggacattgttggaaaatttttggatttgtaaggatgcggataaggaattatattataaagtaaagagagatattccgaattttcaaaagtttgtaagagaacagcttggatggaagctggttcataccgaaaatttgttaaaacttgaaaaacgacctgcccgtggtgaggcgtttatgggtatcggagagtttttagatattagggattactgtattttatgtgcggtacttatgtatcttgaggacaaagaggagcatgagcagtttttattatctgaacttatagattatgttgagaccggattaaaaccctatatagctattgactggactttatttactcaaagaaaatctctggttcgtgttttacaatatatggagaaacttcagatgcttcgtgtatatgagggacgaagtgagggatttggattggagtccgggcaggaggttttgtatgaaaataccggatattcaaagtattttgccaccagtttttctgtagatatttcaggctttgaatcctttgaggattttgaaaaggctgaatttgaagaaattgaacaaaacagaggtagtctgcgtattaatcgtgtatacagacagctggcaatatgtccctgtatgtactgggaaagtgtggaggatgcggattcactgtatttaaaaaatcagcgtcagtgggttgcaaaacatatcagtgaaaatatgggaggaaatcttgacctttacaaaaatatggcatgtatatcactggatgcggatgattgttacggacttgtacatccaagagatgctatgttgccggagatcgttttgctggtatgtaatggtatacaaaaagagatcttaaatggacatctgttaaaaggggataatgaacttatttttactacatccgggcaaatgtccgatataatattacaatgcagaaaaaatcacagcgcaggatggagcaaggaatatcgtgaaatgaatgaagaactgcttgtagaaaatgtgcttgaatatatgaaaaattggatgatgattcgatttttggatgagcaaattataatacttcctgctgtaggaagaacggcaggagtttatcctgaagattttaacggaggtgaagaaaattga

SEQ ID NO: 50160 - DNA, 4062 bp, Lachnospiraceae oral taxon 107 str. F0167
ttgaaagaccgctttaaaatgaatcgcataggttttgtgaatttctggttatatgatgaagaatattttgaatttgtagacggtaaattattgcttagagggcagaatgcttcaggtaaatccattacaacccagagcattataccttttattttggatggtgatcgcactccgagcagacttgatcccttcggctcaagcgatagaagaatggaatattacttccttggagaagagggaagggaagaatccacaggatatttatttttggaatttaaaaaagaggaagataaatattgcacaatcggaatcggacaaagagccaaaaaaggtaagccgatggagttttggggctttgttgttttggacggaagaagaatcggatatgattttaaactttacaaggagatcggctcaagtaaaattccgcttgataaaagggaaataaaaacagtacttggagaggacaatttttttaccgcaaatcagagcgaatataaaaaggcggttaatcagtatattttcggatttagaaaaactgagcagtatgagcagtttataaagctgcttgtaaaggttcgtgcgccaaagctttcaaaggaatttaaacctacaaaggtatatgatattttgaatgattcattgcagacattgactgatgaagacctcagagcaatggtggatgccatggagaaaatggatgagattcaggacagtctggaacttttaaagagtgcctttgatgatgttaagattataagaaacgaatataacagatataatcaatatatgcttgctaaaaaggcaaatgcatatatcgaaataaagaaaaatgtagaaagtgaacagacaaggcttaatatacaggaagagaataaaagagaaatagaagaagacagtaaaaataagagtaaacgtctggaagaactggaagaatcaaaaaaattaaaagaagcggaaagatcgggactgttagatacaaatcttgaagagattgacagaaagcttgaaaaagctaagaatgataaaaatgaagccggaggaaaggtatcatattgggacagtaagatacttgattataaggaattacttttatcaggggataataaaataaagcatattaaaggaaatctttggaaagtacaggaggagataaaagagagaaagtttgaacttgatgaatatcaggaaagcattgactgggatggacatgcagaggctattttaataatagagaaagaagaatatgataaaaccggagatattgtaaaaaagcttgatttattaaaaaaattattatcggaatgtacaagagaaatatatgagtatgaaaagataaccgggcagtatgatgaagtggcggcggaacttgaaaagcttaaaattgaaaaggcaaaaaatcatcaagaactggaagcggcagttgaagaggtaataaaaagaacggatcagtggattgaaagtatctacggactaaaatatgaagctatgtattggaagcctgatggcgatatacttccaaagcttgaggagaaaatcagagaatataagtcggcattcgatgcagagggtatacaagaaattttgcgtaaagattatgagcatcagcgacttaatatacttgatataaaaagcggattggaatatcaacaaaaactcaaaaataaagaacttgaccgggaaaaagaagaacttatatatttacaaaacttagaagatctggagcctttgcgtgatgagaatacaaaaaattcaagagatgagttggaaaagttagggattaaggcattacctttttataaaacagtagaattttcaaaagatctggatgaaacagcttgtgcaagacttgaagcacagcttgaaaagatggggattttggatgcacttgtggtatcaaaagatgattttgatactgtaacaaagaaatgtcaaagctttttagatactatattgtatgtgaaagaggacggaaactcgaatttttcagatcttagagtcagtgaagatttagagccgggtttaaaagaaagtgtagaaaaaatccttggaaatatttatgaagacagagaatatgacagtggaatctatataggaaaagatggcagttttacacagggaattcttttaggaaagacaaaaaaaagcggggatgcggaatatgtcggaattttggcaagaaaaaggcgtaaggaacaaagaatttgtgagattaaaaaatatatttcagatattaaagaagatatttcaaacttagaaaaagagatagattccttggatgaaaatttgaaaaaattagaggaagaatataagcaaattcccgggtttttagaaatcaatcaggctttggagtttgaaaaaaattgtgagtacaagcttcaaaaaatatcggaggaatgtgataaaaaggaaattcaggagaattcattaaaatcaagaaagaatttacaatatcagacggtaattcaaaagtgtaaacctttcccatataagagaacacaggaggcttataatgaggtaatggatgcattggaagaatacagcactatctggcaggaagtcaggcagttattactgagattttgcacggaaaaggaaaatcttatatctgaaaaggaaagactgagtgtaaatgaaggtttgatggatgaggcttttgttgaaaaaagaggatggagcacaaaggaaaaggaatgtgatattcagataaaacagcttgaagagtttcttaatctccctgagatagtggagaaagcggacagattgaggcgaataaacaaggaacttggagagattggaagagaaaatgacagattaaaaacggatctggcaactttaaatgaaagatttcgtgttattttggaagcggagccgggattaagagaaagcttacagaaaaaaataacggaagaaacctgcttgaggaaatattttgaggaggaactggcattaaagttggtattttcagcagaaaatcagagtctttttgaatgtgcaaagagggcagtttcattacttagagagggtgataaaaacagagaacctacagatcttttgcagtcacttcatcaggtataccaaagacataatgcaagtctggttaattacggtacatcactggaggaatgctttgagagcgaagaagcggttaaaatagaggaagtacccggagcaatacgaaagagggttcgtgtagtttcttcatggaacggtaaaaaagtatatttggaagagttttacggtattttaaagcagggtattgaagaaacacagcttcttatcagaaagaaagacagggaattatttgaggatattttatctcagaccatcagcagacaacttacggacagaattgcggaaagcaggaaatgggttcttgatatgtcaaagcttatgaaggagatggagacttcaatggggttaagtttttcattggactggaaaccttgcaaggctgaaaatgatatggaacttgatacggcacagcttgaacagattttgcttagagatcatgcacttttgaccatggaagatattgagaaggttgctgagcattttagaagcagaatacgaatggaaaagctaaggattgaagaaaagaatgatataattaattatatggatcttgtcagggatgcactggattatcgtaagtggtttgaatttcacatgttttttaggcgtggagaaggtgagagaaagcttttaacaaatggtgcatttaatcgtttcagcggcggcgaaaaggcaatggcaatgtatgttccgctttttgcggcagtcaatgcacagtataagaaagcgggtgggaaggattatccgagaattattgcattggatgaggcatttgccggagtggatgataaaaatatcagcagtatgtttgaacttgtacataagctggattttgattatattatgaattcacagtcattgtggggctgttttgaaactgtaaagggacttagaattgccgatctttcaagacctcaggattcacagatcgtttcggtaattcgctatacatggaatggaagtgagaggatacttgatgtgcaataa

SEQ ID NO: 50161 - DNA, 1305 bp, Lachnospiraceae oral taxon 107 str. F0167
atgtgcaataacaaggaatgtgccgattactttaaaagccgacatgaatacaaaagatgctttgaagaatttagaaaaaagtggaaatcttatgggaaaccgggcggttttattactcttataaaaacctcaaaggaagaaagacaggcgataggcggaataatcggtaaagttttttttgaagaaactctcagattttcattttctgaatttgaacaggggcttcaaaagacaagatttgcacctgttgaaataaaggagctgcttgaggaatattttggtgaaactcttataagtactaaagagcaaaagaaagaggatgatgatagaaggagagaattttttgacggaatctgtcaatattttgaaaaaaatcatggcaaaggctcagatgcatttacatggataaataaaatgatttcctcaaaaaagtatggataccgtatacttataagagagtttgaaaagcaggaaaatgatgcaaggctgttggcaaaaaatatagggaatgcattgattaagctaaataaaatgagtgaggacgaagaagattaccctttagccgtatttgccgcatatataacggataatccgcattattttgataggggtaccacagccggattactttttatacatgcaatttgtgcggtaaaagagaaagagttgcctgaaagtgcacatcagtggagaaagcttttgatgcaggttttgatagttcccgacaatatatcatccatagttcacggatacggtctacaacttttaacaaaggagggaagacatccggcatatgaagcattttgtaaaagagatgaagcctatgtgattactatggagaatatgaaggggattaccggggtagagacaacgggggaaagggtatatgttgttgagaatgaaatggtattcggctatttgattcaaaatctaaaggaagtgaattgtacaattttatgtacttcaggtcaaccacgctctgtagcacagatattgttttcttatattttggaaggcggatttaaaatttattataatggtgatattgatcctgacggagtttgtattgccgacaggctttggaaaaaattcggtgaaaatttctatatatggagaatggaaccaaaagactatgaaaagagtatatcaaaagaaaaaataggagcaataggaagagcaaagcttgaaaatataagcaatccattattaagagaaacagcaaaatgtataaggaagaggggattgtcggcgtatcaggagaatatgttaaaagaactgctttttgatatagggagtaaaacttaa

SEQ ID NO: 50162 - DNA, 1512 bp, Roseburia intestinalis XB6B4
atgaataaaggagaacatgtcgcgttgcaggtatcagataaattattaaaaccactcacagaggcgaaatatttaaatgcggataatgtcagcaggtatcgttgcattatgcgcattttttttgagaattatgaaaagttaaaatactggctgtatttagaagaagtttatgaggaaatgttaaaagatccgttctggtcagagtataaaatcgagcagtgccagcaggatctgacgatgcttacggaatggaaaaatttaaacacgatacaggacacaagaagagtgtcttccatagaagaatttaaaaataagaagtaccgttaccagatgtcggaatacagtgtcgagatcgagagacttgtgatccgtcttgaaaatctttttattgaaggggcatcgttagaacctacgctgcttgagcggatacggagaaatatggaacgttttccagagatggcagggaaagataagaatgaagtttatacatggtggacggatttaaacaatgattttatgaggctgaatcagaattatcaggattatatcagggacttaaacagcgtaaaggcagaggaaatgatgcgcacaaaggaatttctggtgtttaaagacagactgattgagtatctgcgcagttttatcaaaggtctgcagcgcaatgtcggtgtgattgaggagtgtctgaaaacgcaggaaagtgatatgcgcgaggcggtatttgataagatcgtcgaatatgagcttttgattccgcgtatggaagtggaagtgtctgaaaaaatgatccggcagaaggcagagggacgttttaaaagtatttatgactggtttgtgggcagtgaaggacaggaaaatgaggcagcaaaactttttgacgtgacaaatgagatcatacggagaatcacgcggtatgcagcacaattgagtgaaaaaaatgcactcggtgcaaaccggaaagaggaatacagaaaagtcgctgaaatgtttatgagatgtgaaaatcttgaggaagcacacaaaatgtctgccatggtttttgggatggaaaaaacatttcatatcgcaggggatcaggtaagagagacggacagcatgaaccggggagtgtatgaagaaaagccgattcggatagaactgaaaccgagagtgcgcacataccgggaaaagacaaaaagaagttccatcatagaatcaaccgaaaaaaaattagaaacacgcaggaaaatgttagagcagcaaaaggaagaggaaaagaaaataaagatgttagaaaaagatggagccattgacttttctgcattgcccattttagagccgagaatccgggaaatacttttaaaatggatttcagatgcaatggagtcggttgatttttctgcaaggacggatgatggcagaagatatcgtttagacaaaagtaatatggcagaaaaatgtgtggtgcattgtgaggatggcaattttaccatgccaaagatgaggatcgtatttcaggaggagagcgtatga

SEQ ID NO: 50163 - DNA, 1146 bp, Roseburia intestinalis XB6B4
atgaaagagcttgaaattttgttaaacagacgctggatactgaaatcagaagataaggaactgtattacagggtcagggatgcagtcggggagatccggaaatatgtgacagataaattaggctgtcagatcatagataattctttgctgataaaactggaaaagataccggtcatcccggagcagtttatgggaattggccagttttcttcgaaagaagaatatgtgtatctgtgtattttattgatgtttctggaagataaagatgcacaggagcagtttatactgtcacagctgacggaatatatgacggcggtgatgcccggtgagatcacagactggacattgtacaacaaccggagaaaactcatccgggtactccgctatacggtggaacagggaatggtccgtgtgacggatggaacagatgatgtgtttatggatgatgccgggggcgaggtcttatatgaaaatacaggggcatccaaatattttatgagaaatttttcccgggatatcatggagtatacaaaaccggaagatttccgggaaagtgaatggtttgaagtggacgaggaccgcggattagccagaaggcacagagtatataagagactgttgtttgcaccggcagtgtacagggaagatggatccggggaggatttcgagtatttaaaatattacggatacaggctttctgaagaattagaacagctttttgaatgtcatgtacagattcatcggggaagtgcatttcttttatccggacaggactgccggatgggagctgcttttccggagaacaattccctggcagatattttaatgcttgcctttggaaagatcagagaaaaaatagaaggtaaggtgtggaaaataacgccggaagaaatgagtcttgttgataagattgagtttgaatctctgatcctggatgtgaaaaaggaatatggatctggttttgcgaaactttaccgggatatgccggaaggggagtttataaaaaacgtaacagatgaaatggaacgctggatgtttataaaaaaagtggatgatatgcatcagataaaaatctgtccgcttgtcggaaaaatacagggaagttatccgcaggattacacaggaggaaatgaaaatgaacagtag

SEQ ID NO: 50164 - DNA, 4116 bp, Roseburia intestinalis XB6B4
atgaaaatgaacagtagatggcaggcaaataaaattgggctgatcaatttctggtattatgatgaacaggaatttccttttgtaaaggggcggatgcttctccgtggttcaaacggttccggaaaatcggtaacgatgcagagtgttgtgccgttactattagacggaaatatgagtccggagagacttgatccgtttggttcaagggatcgtaaaatgagcagttatcttctcgaggaaaatgatggaagggaagagagaactggttatctttatcttgagttcaaaagaaaagacagtgaaacatatctgacgatcggaatgggaatccgcgcaaagcgaaataaaccgctcgataaatggtatttcagtctgacagatggaagacgcatcggcaaagactttttcttatacaaagatatgggtgagaaagtgaccctttccaaaaaagaactggaaaacagggtggcagaaggcggaagagtatttgatcgtcaggcagattacatggattatgtcaacagacagatatttggatttgagactgcagatgaatataaggaaatggtagatctgctgatccagcttcgaaccccaaagctgtcaaaggatttcaaaccgtctgtgatcaatgatatattgagtgattctctccagccgctttcggatgaggatctgcgtccgatgtcagaagccattgaaaatatggacatgatgaatatgaatttaaaggggcgcagggaggcgagaggggctgctgaaaagatcaatgcggttttccagaaatataataaacttctgctctgtgaaaaagcggacagatatgaacgtacaaagcagagattacaaaaagcggcagcagaacaaaaggcatatgaggataaatatgcagaatgtaaccggaagattgaggaacttgaaacagagattctgcagatgaatcagaagaaggaaaccttagaaaaagaaaaggagtccctcaataaaagtgatgcagttgcactaaagggcagagaggcacagcttaccaaagaacttgaggctcatgataaaatccttgcggataaaaagtcatttctggctgcaaaggaagtgcagtacagagatgtcacaaaccagatcaaagaggaagaaaacagaaagtatgaaaaagaaaaagaagtagagactctgttagaagatatgcgtgaggaagcagaccagatggcattccaggaatttgcatttatgagtgaggaactgtgcgctgatctggaaaatgattataaatttgatcttcacaggcagcagtttgaacatacacgtcaatatatcaatgatggagaaaaattgctcgcagaacttaaaagtcttgaccggcagaaggatgaaatgatccagaaaagggagaagcagatccgggaattagacgcactccagcgaaaaatatcggaatttgaaaacatgctgatccaggtagaaaatgagtggaaagaagcactttatcaatggaatgaaaacaatgtggaactgaaattggaaaaggaactattgagggagctcagtacattcgcagatacgtatgaggaaaattctgactacgcggtggtacgccagaaggctgcagatcaatggattaaaaagcagtctaaaatagaaacgcagatcaattccattcttctggagcaggaaacagcaaaaacagaactcgatgaagcaaaaacagagctgagtgagtgggaaaatcagaaagaaccacagccacagagatcagaagctgtgataagaaaccgccagagactggatgaagcagggattccatatcaggaattttataaagtgatagaatttggatcggagctggatgaagatgcctgtaaccatttagaagaagccctgctaaaaatgggaatactcgatgcaattgtggtggatgagcaatacagggaacaggttcttacaccggtaaaagggtgcgaagaccattatctttttgcaggaaaaacgcaggcagaaaagagtctgttggacgtactggaactaaacgaggaagtcaatgatattttttcaaaccagagactgacaaaaatcctttcaagtatcgcttatggcggtgaaaatgatgtgtcagtttctgaggatggttcctatcatatgggtgttctggctggaacagttaccggggaatatgaagcagggtatctgggcagtaaagcgagggaaagacacaggcttgcaaaaatagaagaatgtaaaaatctgatattggtgttagaggaaaagattgcaggtttagagagagaacgaaacaatttatcagaacggaaggaccggctgaaatcagaatatgatgcgcttccgggcgatacggatctgagggaggcaatgaagctgctcttagcggaagaacaaaagtatgaattgctgcggagtgaaaatgaaaagacgggggagcagctgacagcctttctggaagaaataaaggaaaagaaaaagggtgcgattgagatcgctgaaaaattgtatctcaactgtacttatgagacgttccagagtgcaaaaagtgcagcggaggaatatgacaaaaatctggtagagttaaagtcggcacatgaaatgattttaagaagcgcggcatacttaagggagcgcaaagttcatttagaagatttagatcttgatatggatcagatcagatatgacataagggagaccgaaaagcagatcagttcaaaacaggaagaaagaacatccattctggaacagcttgccctgacagattatgaagcggtcaaagacaggttagatgcctgcatttcgtggctgaatgcatttccgaaagagtttcagaaacgtgtgaccgaaaagacacaaaagacggatgaagcaaagctgatcgaagcgaatcgtatcagcaatgcggatacgataaaggtatatgaaaagaaagtggaattttaccggaaatgttatgaacaggagcggggacttttttatgtggctgtaccagaagagattacggatgatgcagggcatatttatgattatctgctgacagatatcaaagatatggaaaaaaacagtattatcgctgacctcaacagggtatattttgaaaacagaggttttctgaccgattatcagcttacgcagaatgaattatttgcagaatcggatgagagtgaaaaaatagatgattataccccaaagcggcttgatatcacagcaagatatcaggggacgaaggtaacgtttgcaagtctgctgacacatcttgatgaagacatcagtgagcttgaaaacctgatcaaagacggagaccgggaattattcgaagatattctggccaatactgtgagccgcaagatccggggaaagatcaatgcgtcgaatctgtgggtgcagaaaatgaatacgctgatgaatggcatggatacgtcaagcggtctgaaactgagtctcagatggaggagtaagacagccgaaaaagaggatcagcttgacaccagggaactggtagaactgttaaagaaagattaccgtctgatgagtgaagaagaggcggcaagactttctgcacatttcaggtcaaaggtcgacgaggcgagacgcaatgcgcgtgacagtgccggaatgatctccttttatcagatcatgaaagaaacacttgattatagaaaatggtttgaatttcagttgttctcccaaaaaagcggagagcgccagaaggaactgaccaatagtgtatttggtacgttcagtggaggagaaaaagcaatgtccatgtatgtaccgctcttttctgctgtcgttgcaaaatatcagggcggcagggcggatgcgccgagactgatctcgttagatgaggcatttgccggtgtcgacaaccggaatatcagagacatgttccgcctgatgacacagtttgaatttgattttattatcaattcacaggtattgtggggagactgtgatacgctggatgcgctggcaatttatcagctgatccgcccggaaaacgcgaaatttgttaccgtaatgccttatttatggaacggacacagtaaagaactgttagatgatgaagaaaaagtagaacaaagagggatagagattgaacaatttgacagggcatga

SEQ ID NO: 50165 - DNA, 1536 bp, Mycobacterium sinense
gtggaggacgacgaactgcccgacggcggtccggccgatcactgggcttcctacctgccgggccctgatctcgttcccgcgtacctggtggtgaagtacgcggcgcagtatcgcgcggtcgtcgacgtgttgctcgaggcacaggacaccagcttgaccgggctatcccatgacgatgtccgcacgcgcgtcgcggcgtatctggccgagcgcattcccgccgacgccgtcgaggagatggtggcccaggaccggttcaacctcgaagcgcgcctggagcgactggttcagtggggggtgctgacccggtggcaggagccggcgcgcaccggtgaggacttcctgcgaaagcgcgaccgctaccagctcacgcccaaagccgcacgactgcacaccttttggactgaggaactgcatgccgaggaggcgtcggccgccgacctcacactggcgccccgcgcaatccacgatcggctcgccacgttcggcgacgcgatcaaggaccggcgctaccgggatgccgcaacggaataccaggtcgtcatcagcctgcaccacggcatggcgaccgcggcgcggacctggcaacgcagtctggcgcacgccctgtccggcggtcccgacccggacaagcaggaagtgttgtggcgcacgctgcgctcctacatcggcatgtggggtgaacaggtcgacgtgcacagtccgcggatcgcggccttgatgacgcagtgcacgtcgctgctcaccgagtcggtgtggcgggcctgttgccgcgcggccctggaggacggcgatgacgagcagatcgcactgcaggccgagcgctggcagcggacgtgggctgcgctgacggcatggttcggaggcagcgagggtcaggcccggcggctgcggcgccagctgcgcgacctggtcacaccgtgggcgcgcaacatgcacatcctgatggacaccggcggcacggtgacccgccgcaccgagctgctgcggctggcgcgcgccatcgagcgggcgcccgacgacaaaaccgcttgtcggctctgggataccgccaccgggatgttcgcggcacggcacctattgttgccatccgacggggccgacgaccacacccgctcctgggctgatgcgccggcggccccggtgacggcccggttccgtgagcacggggtgcgcgccgcggtgggccggcgcgcccaggtacccgacttcggggcgggccgtgcggcggcgcgacgggccagagcggccgccgtggctgctcgcgccgaagccgaggcgacattgcggcaacgctccgggacccggttcgacgggtgggaccagttatcgcaggccgaactcgacctgctgctggaattcctcgccatcgcccgagccgccgacggcgcaacccgtaccggcgtgaccggtgacggacggtggcgggtgacgctgaccgcaccggccgacggaccgtcgacggtgtcgctgcccagcccgcgcgggcagctggcggcactcaactggcgattcgagctggagccactgcgatga

SEQ ID NO: 50166 - DNA, 1158 bp, Mycobacterium sinense
atgacacgcgacaccgttgagcgccagcgggccttcaccggcttactcgcccatccggtgctggatcgctggcgctatcccgaactgtttgcgctggtgcgtaatacccgtcaccgaacggtcctggtggactggttcaaagctcggctcgattacgacctggtggtcaccgagtcggcggctcgcctgttccggcggccgatcggcaagagcgtagtcgcgccaccacggtacggcgcgccgggacgccgcgtgctcaccctcgcagtcctgggggcagcggtcgccgaggacgccgaggatctcaccaccacccaggaactctccgaccgggttcgggttctcacccgccgcgacgacgtcggcctggcggagtatgacgcggaccgtttcgtcgaccggtcgcagttcgtcaaagccgtcggcttgctcgtggatgccggagtactgcggcccgtcgaccgcaatgacgaggaccggcgcgagggctgggcccaccacaaggacgccgtcggcggcgcgtatgaggtggtgcggcagctgctgcttcggctggttgatccagccgcgctggctgcggcgctgggcgagagtagcgatgacgtcgacgccgccgcggtgagcgatgccaccagccggcacctgatcatgcgcagactcgttgagttgccggtgtgcttgattgccgacctcggggaagccgagcgagcgtatctggtcaaccagcgccaccgcatcgtcagctggtgcgctgagatgaccggctggatcgtggagcagcgggcggaggggctggccctgatcgcgccggaggaggccgacacggacctgccgttcccccggctgcgggccgtcgatttcgccagcctgatggtgctcgacgagctccgaaccctggccgacgaacacgggcgggtgagcgaggatcagctcatggtggccgtcgccgaggtgcgcttccgctacccgaaagccatgaccaaggagttggagaccgatctcgcgacgcgcgaccgcgcggtcgaactgctacgcgcgctggatctgttgcgtcccgtgcacgacggcgggtggtggctgtcgccggcgtcggcccggttccgcaacccgtcggtggtgtcggtcaccgcgcgactcggcgacaatgaggcgccatga

SEQ ID NO: 50167 - DNA, 4212 bp, Mycobacterium sinense
atgaccgcttccggttggggacacgagtggctcgccgccgcgctcgagggtggtctacccgagccgcaccgcgaccgctggcagccgctgcgggtgggcatcatcgggctgtgggagtacgacgacgccgaattctggttcgccgacggtcggttggtgcttcggggcgggaacggcgccggcaagaccaaggtgcttgagctgaccaccctgatgttgctgcggggcgaggtcagtccctccgtgctcgacccgttcggctcccagcaccgcaccatgcggttcaacctgctgcccaccggggagggcgacgacccgcggccaccggccgattccgggctgggttatgcctgggcggagttcgggcggctggacggcgacggcgaggcccgcttctttgtctgcggcatggggatgagcgcacggcgaggcacgggcaccaccggcgtcaccacctggcagttcgtcaccgggctacggcccggcaaggagctgcagctgacggccggcggccgcgccctggagcagaaggagttacgcaagctcgacggcgtgtacctgccaggcagcgcggcggcttaccgagagcggctgggccatgagctgttcggccttgctgcggcctcgtacgacaacctcaccgatctgctcaagcagctgcgcaagccgaagctgggtgaacgcctcagcccggcgttactcgaagagacgctgcgggatgcactgccgccgttggcgactcacgaagtgacgcagctcgccgaagggtgggaccaccttgagacactgcgcggggcagtggagcagacgcagcaggcggcggcggccgtggcgcagttcgtccgcgaaggatggcggccatgggcgcgggcggtgttgcggcagcgcgccgacgaattcacccgagccaccaccgcgctggacaacaccacccgtgcccggaacgaggcgcagaagaccctggcggcggcggcgcagcaggttgcgaccgcgcagcatgagctcgccgagtccaagcggcgagagggtgactgcggcgcgcagctgcgggaactgctggaatccgctacctatttggacgccgtgtcggcgagtcagcgggtggagcgactgcgcgacacggttgcgaacctacgtgatcaggtggtcgccgctgacaggcgatccgacgccgcccagcaggggttcgccagcgcccaggagtggctgacgaaagtccagagtgaattcgaggacctcggcgatcgtgtggccgagcgggaagcttctgtacggaaggcagcgttgccggcgggactggcggcgtcggcggacacccacctgccgggacgcgacctggacgcgttgattgccgatcaccagacccggtcggagcgcttcgaacgactcagctcactgcacgatggccatgcgaccgcggaacggcgggccgacacctccggacagttggtgcgggcggccgaacaggacgtgacgaccgcccgggatgatgaagcccaggccgcgagacaagtggaccagggcgtcgaaacgctgcggcaacggattcgcgactgggccgaggccgctggtgtggcgggctgtccgccccggctgatcgaagattggtgcgatcagaccggcgagctgaccgtgatcgatgcgcagaccggtgtcgcgcaaccgggtgcctcggtggtggacaccatgcgagatcacgtgtcgggggtacggcgagagatcgaagagcgcacgggtgcgcttcgggtggagcgcgccccggtcgcgaccttgcgccacgaggtcgacgatgcactcgaacggatgcgcgcacgaagggaaagcccgccaccggcgccgacgctgtgggccaggcgcgagcgcccaggcgtcgatgacggacttggcgcgccgctgtggcggttggtcaaccccgtcgacggcctggacggtgatgtgctcgcccggctggaagccgccgctgccgcctccggcctgctcgacgcgtgggtgtccgcggacgggcaggtcgacaccggcgacggccggctgctggccgatgtgcagttgagcgccggcggagaggcgggtcggcgcagcctgctcgcggtgctcgaacccgatggcgcctgctcggtgaaaccggatgtcatccgcggtgttctggctggcatcgcgtggcatgacaccgcccccaccgacgatgacgatgactggctggccgccgacggcagctggcgagtcggtggtctgactgggcgagccgaaccgaccgggccggcctcctacctgggtgctgccgcgcgtgctgcggcacgagagcgcgaaatcgcccggctgcagggcgaactcgccgaactcgatgcgcgcctgagtgagttggaccggcgcatcgacgatctcgaaagggcgcagcagacgcttgaccgggaagcagcggcgatcccggtgcgggccgagcgcgaactcctcggccatgtcggtgggctggccgagcggtcgagacgtcggctggtcgccgagcagagcctcaccgctaaacgaacgcagcatcagcaggatctgacccgacgggaccaggcctgggcggcgttcgccggctacgccaccgagcaccagttcgaactgcgggaccttgcttcgcaaggcgccgcaatccgccagtacgggaccttgctggagcgactgtcgagtgcgctggagctgttggccgaacggctgaagaccgtcgacgaggcgacccgccgttgcactgagcagcaggcgagctggcaggccgcggtcgcggaaacaacgggattgactgaacagcatcggcaagccgagctgcgactggccacggccgaggacgcactcgacgtcgaacacgccgagcagctgcgccgcaaggatgccctcgacgaggaaatcgacaagctgcgcacccagatcgagcaactcaacggacagctgatgaaggccacggctgccgaaggagccgccaccgccaccctcgacagccatgagggcgcacgtgcgaacgctgaacaaagtcgcgacacggcgatggccgcgctgtgggccgccgtcgatcgcggcctcgccgagccgctgggtctcatcgctcccgaaagccgagccgtccagtcggcacgcgaattcgcaagcggtgcacgcaaagacatcacgctgcgggaacaggccgctgacgtggaccgagcgtggggtcgttgcacccggggggtcgagcagctccgccagcggctgttgcccaaccgggacgcccgggtggatgacgaagacagcggcgccctgccccggatcgaggtgctcgtcagccccgaccggggctggctggcgccgcccgctgcggccgatgccctggccgagcgcgtcagcgagcaacaagagcgctttgacgccgagcagcagcgtgtgttgaccaccctgttggggtcggcgttcatcgagcatctcaaggatcggctggactacaccgcgcacacttttcaacggatcaacgaccagcttgccgggcactccacccgccagggccatgtggtgcgaattcaatacgagcccgatcccaaggaccccgatgcgggcgctgtggtcaaagcgctacggcagggctaccaacagctcacccaggagcgccaggacatggtgcgcgacttcctgaggcggcagatcgagaccgcacgcgaggacgccgacacccaaggggccgctgactggaaggaccagttggcgcaggccctggactaccggcgctggctgcggttgacgctgcagtaccgacaggggatggctggaacctgggcgttgttcgacgccgccaagcacgctgcgaagtcgggtggtgagaaggtggtgctgttggcccagccgttgtttgcggccgccgtggtcgcctatgacgccgccgatagacgcgcgccgcgctgcgtgtggctggacgaggcgatgaccggcgtcgacgcgactgtcaaggcgtcattcatggggctggccgtcgacttcgagctcgacgtgatgttgaccgcccacgacgaatggtgcacgtacgcaacggtgcccgcggtggcgatctatgacctggctcgacagcccaatatcgccggtgtggacagccagccatatctgtggtgcggcggtgagcttcagcaggtcgccgtggacagactcggtgtcgcgcaacgttcgactaccgcgatatccgaaggtctgttcgccgaggaattcggtgactga

SEQ ID NO: 50168 - DNA, 846 bp, Mycobacterium sinense
ttggccctcgcccagcaggtcgcggtggtgtggggcaagctgcccgattcgggtcgttccatagcgctggcgcaactggcggccagcatcggcggccatgacgcgcacgcgcttgactacgaccggctgctgggtcgggcggtgtcccggttggtcgccgcacagcacaacgtcgcgcggccgcttcgcgccggccgtgagtggcggctggcctgggcacgtgtcggggtgacgtgcgacggcgtgtcgtcgcgggtactggtgctgaaccttccgctggaaggtgaggcgcccgccgtacgctggtgcgcggcaacccccggcgaacccgtgtggctcaccctgcggtcgatcaccggctcctggacggcgccgtcggcggcaacgatcttcgtgtgcgagaacgtcacggtactggaagcagcggctgaccgattcggcgccgagtgcccgccgatggtctgcaccgacggtaatcccgccaatgtcgcgctggatctgatcgcgggtctggccgatgccggctgtgcgatcaaggtgcgagccgactttgatcctgctggtttgagcatcgtcgaccgggtgtgttccgtcgcgccggcggccgccggctggcattacgacgcggcgacctatgccacccatctggcgctcgacctcgatttcgaggagtttgccggaagcgaactcgattccctacgtgtggtattcggccgtcatcgcgtcgtcgttcatgaggaggcaatcctcgagcagctgatgaccgatctcgatcggggctcgtctggcggtcagctgacacttcgaaaagagggtggctcgctggtgccgcgcaatcagagctag

SEQ ID NO: 50169 - DNA, 1488 bp, Desulfotomaculum nigrificans CO-1-SRB
atgcataacaacttattgaaaccaattgttgaattaagttatttaaacgctcaaaatgttgaccgttatcgttgtattatgagatgcttttacgaacaccaccagcgactacaatattggctgcggccggaagaagtatacagaggcgtcttatcttacgggctgctggaaaattatacaatggaacaatgccagcaggacctcaatcagttagtggagtggaaaaacctcgttccccaacacgatggcggccgctctaccactgtggaagaatacttgcgtaaaaaatttcgttatatgatgacaccttactccgtggaaattgaacgactggtagtaaacctggagaacatccggggctacggtggctcgctggaaccttcccttttcgagagcatcgccttgtcactgcagaaaatgaaagaactccccccggaaattactccccaagaagccctggccctgtgggaaaatatttacgaaacctttaccaagctcacggaaaacgctgccgactatattgccagcctgcagagcagcaaaaccgaagaactaatgcaaacggaagcctttttagcctacaaaaattctgttaccggatacttacagggttttgtccagggcctgcagcgccatgcctatcgcattgaaggactcctccccctgttccagccggaattcctcagggatttctttcataaagtacgggatgctctggcctctcgcccccaattggatgagccggtaaccccggaagaatacatgcaccgcttgcagacccagtggcacagcctgaaccgttggtttcttggtgaacccggcgaaaaaagtgacgtttattatttggagcaaaccaccaaggataccattgcccgcattgtgcgggccgccctgcggattcaggaaagacgccgttccggcatcagccggcggcgggaactggactacctgggacagtggtttttctccctgacttccatcgaggaggcccaccgactggcagcctacgcctttggcctgtaccgctgccgccacttccagggagaggatgataaggataccgaatctcccgatatctccatgtggcaggccggccccaacattcgcggtttgcgttcccgcagccggaaaaaaggccgtagctccggcccggacccggtgaaaagccagcacacccgacaacaaagggctagggcagaatacctggctcagcagcagcggcaggcagaattgctgcaaaaatttctggcccaggggactgtaaccatttccgacttagacactgtccccgctgccaccaggcaagtgctgcttagctggatcggcctgtgtctggccaataagtccaggcagatccgcacaccggacggcatcgaaatcagcctcctactgccggatcaccaacagcgcaccattttgcactgtgaagatggggagctggatatgcccgactataccctttacttccgcccaaccggcgaccaataa

SEQ ID NO: 50170 - DNA, 1179 bp, Desulfotomaculum nigrificans CO-1-SRB
atggcccgtatagcccggaataaccaggaagaaataaagaattgttttatcgccttgctcaaccgcccctgggtgaccaaggcggatgacccggaattataccagagcattcgcagtcattaccaggagctcagggactggtttcaagaatattgcggtttcagcctgctgttaaccaggcaactggccaggctggagaaatttcccggccaggcccatgcctggatgggattggaattattcagtgaccccttggactacgccctttttacctattgtctctggtacctggaaggtaagaatgaaacagaccaatttttgctcaccgaaatgatcgaagaaatcaaaaaccatttgatcggctcccaggtatcgctggattttaccatgtaccaccaccgtcagtccatgtatcgggccctcaaacagttaaaggcacttaaggtactggtggcggtggacggggatgaagcggaatgggcccgggtaggtaacgacaaaaacgttctctacgagtgctcccctttgtcccgctatgtactccggcattttccgcaggatttgaccacctatcaaactccgacatccctgggggaattagcttatcccgatgaccaggaaggacaagttcgccgacgccggcacagggtttaccgcaggctgctgcaggagccggtggtgcacgactgggaatggagccaggatgaacgctattacgtactgacccagcggcataccatcctggaacacctgtccgctcgctttggtctggaaggccagcgttaccgggaaggactgatctttttttaccccgaccactcggcagaaatagaacttttccccaccgccaaaaacatctccgatctggttttactgctggcaggagaaatccgtcgcctgctggaccagtcggataccggcatttatacggatgaacgcgggcgtatcccgctgaccctggcggagttggagggactgctgctgcgcctgagggaaagacacaaatcactatggagccagcaattgcgtcaagccaagagcaatgaactggcccaggaaatactggcgcacttaaccgattggggtctggctacggtaaattcagagcaaataattttacttaacccggccctgggccgttggaacggaaattatctaacagatgaggatgaggaatga

SEQ ID NO: 50171 - DNA, 4086 bp, Desulfotomaculum nigrificans CO-1-SRB
atgatgcgcaaccgctggcaaatgaatctggccggtatttttaatttctggtattacaccgatgaagttcagtttaagttaagcgatggccgcctggtcctgcggggggccaatggttccggcaaatccgtaaccatgcaaagttttttgccgctggtgctggacggcaataaacgcccttcccgtctggatccctttggttccaaggatcgcaagatcgactattacctgctgctggagccggatagcggtattcaagaccggattggttatctttatctggaattttatcacccggaacaacagcgctaccttactattggtattgggctgcgggcccgccgcaatgccaacaccggtttttggggctttgccatcacggataaccgtcgcatcggcaaagatattctgctttatgaaagggactacagccaaggacaagagcaaaagatccctctcacccgttcccagttggaggatgtcatcggcgaaggcggacaagtggtcaccgagcaaggtaaatatatggaaatggtcaacaaactgctctttggctacggcgatttacaatccttccaggagctgctggacttgctgattcaacttcgcagtccaaaattgtccaaggatttcaaacccaccaccatttatgaaatattaagtaacgccctgcctcctctgcaggatgatgaactgcgcccgctgtcggaagtcatggaggatatggaccagattaacgaccgcctggaggaggtctgcctgcaccgccgggaagcagaaaaactccagcaggtgtacaaccgctacaataaatacctgctctaccaccagtccagccaactgctgcaggccaaaaggcagtgggacaaccagcagagcagcacccaggaactggaggctaaactgcaagagatctcccgctctttacaggaacgaaacgagcgactaacagaacaatccaccaaactcctggaggttaatgcccggcaccaagtgcttgctgcctcggaggtgctggaaaaacggcatgaactaaaccggctgcgggaggaaaaagagagaaccaaccggcaggccgaacggctggccaaaagcctgatgtactggcaaggtaaacaaaaggaataccggcgggatcaagagaagtacaccgccgaagcggcggaatataccaccaggcagcaggcgaccctggctgatttagaagatattgcccgggaatttgatttttcccggcatgatgtgtaccaccgccagtgggatcgggatatgccccgggaattcaatcagtggcacaactggcagcaggatttgtccgaacaggagcggcaaattaaccaagcgctggaaatagcccgtcgggtggatcacaaaaagtatgagcgggatctggcggagcgggaagtgggtaatgcccgtcagcggcgggataccgctgaagaatcctaccgctttgaagaagaaaactgcgacctggtgcaaaaatcctaccaagaacaaatctttgcctggcgcaaaaatttactggaacttcatcttagcgatgaggaactacaaaaaactctgcaccgcctctccctgttcccggaagtctcctacgaatccatcaaggaaccaatgctggaggccttcgaccaccgttatttggatttgcaaaaacaaaaggtggcactggagcaacaaagagaccgacaccaggaagaacagaatcaactccgggcagcctggcaggaatggaaaaaccataaggacccggaaccgccccgttccgccgcccgggagctgtcccgccgccagcgcggcgaaggtgcccccctctatgcactatgcgagtttcgcgaaggggttagcgaagaacttaaagcctccctggaagcggccctgcagcaaagcgggttactggatgcctgggtcagcccccagggactgggtatcctggggactaatgaagaggaaatctggattgctcctaatccacaattctttggttacaccctggctgattacttgtaccccactcccccggaggatggctcgctgaaagctgaaatcattgaccaaatcctccgcaccatcagcctgggagacatcagcagcggggataatgtgggtgccgccgttaacgagcagggctattttcgcctgggagccctttgcggcaaggcggcggccaaggaacgggccgaattcatcggtaaagaaaccagacaccgcacccggctggccgaaatggcccggctggaggcgctgatggaacaagaacagcaaaatattgatgattgtaaccggcaaatccaccggattgaggaggcactgacccgactgacccaggaaaaatcctgcttccccgccggtgatgaactgcaagaagccttctccagattggcccaggccaggagagaaatggagtctgccctggaggaagaaagacaaaaggtggaacttttccgccaggcatcccaggcctatcaggagactgcagccgaactgcacaccttcatgcagggttggaccattcctaaaaataccgccggcctgaccgctgcccgggatcaactgcaaacctatcgccagctgcttggtgaactgcattcccactggtccagctaccgcatgagccaggcagctttagaccgggccctggctggattggccgaagcagcagaaaagattgccgaggaaaccgatgaactggcgtccctgcgagaaaccttacaccacattaacgcccaaatctcagcctttgaacaagcccttaaagatttgggtattgaggatatcgaccggcaactaagagaactggagcagcaacgggatgcattgcaaagggaaattaatgccctggataaagaaattcgtcagctagaaaaagagcagggcatcgaggaaagcaggctgtccgctgcccgggaactattaaaagaaaaagaagctgcccttaaccaagctcgagaggcctggctctgcgaatggaaccggcggttggtggcagattggtcagaagtcacagtttccgaagccaacctgcccggtttataccgtgtggctcagcaggtgctgcaacaatatcgggatgaaaagtaccttcagaagagcaaggatagcattaccaacgacctgtttctggccttccaggaatgccgcggcaatctgcacccctacggacctgaactgatgctggacgaagagcaccagcggaacctggtgctgtttatgcgggaccggcataatcccctgccaccccaggccctggtacaggaactgaaaaccactgaggaagagcagcgattgcttttaagccaaaaggaccgggaactgtatgagcagattatcatacacagtgtggggaaagccattcgctataaaatactgcgggccgaacaatgggtgcagcaaatgaaccggctgatggaacagcgggatacctccagcggcctgcgcttacacctcaagtgggaacccaggccggccgccaatgaaaaggaactggataccctccagctggttaatttattaaagaaagacccgcaaatgctgcgaaatcaggaaatagaacaaatgattgaacactttcgctcccgcatcacctgggccaaacaggaggcagaccagcatgataccctgcgccagtggatttaccgactgctggattaccgggagtggttccggtttaccctctattatgaaaagggcgagcagcctcgcagggaacttaccgacagccgtttcaatgctttaagcggcggtgaaaaggccctgtctatgtacatcccattgtttgccgccacctattcccgctacaacgactgtcgaccggaagcccccaaaattatttccctggacgaagccttcgccggtgttgatgatgaaaacatgcgggatatgttcgggctgttaacccaactggattttgattacatgatgaccagccaggttctgtggggttgttatgatacagtaccaaagctgtcggtttatgaaatctaccgtcccaaagatgccaggtttgtgaccttgattcagtattactggaacggtttccggcgtatgctggtggatgaaagtatggtggaggagaatgcttga

SEQ ID NO: 50172 - DNA, 1290 bp, Desulfotomaculum nigrificans CO-1-SRB
atgcttgactatttgcgccagccttgttttgagaagctgtttagcctggccaggaaaaagatccaatccttaaacggtctccggggtgcggttaccctggacaacctttccccggtggaccaggacctgatcagcggttttctgggcaagaactgtttggggcggaccaggctaaaaatccctttgcttgaaatagatgaggttctgaaaaacagccccctggaaatgggactataccctttcctggaactatattttaatgaaagaattctgaccaaccaggaaatttccgcaacccgggaacaccgttgggcccagttttttgcccaactgcaagaacaagcccaaaccccggtgacccaagactggttggcccaactttggcaagggaccggcagcggctaccgcaccctgctggccctataccaggataacccgcaggctgcccttgatgaggcttccatctgcgtaaaagcactggattacttagccacccatcccggtgagaatttacgcattcctgtttttgccgccaaattaaccggtgacccccatgccctggatctggaaaactcgttggggcggttactttattacggtctgctgcacttcttagacaaaccggaaacagactatactgccgaaggaaagcgcaccctgttccgggaggccgggcttttggacgatgatgtttcatccaatgtgctggtagccggcctgcgcgtatgccaggatgaccccaggttcaccatttttgatgtggccaatgccaccggcagccctttaattttacccctgcgctttctggcaatgcccacccgctggcaacccggacaaaaagtttatatgacggaaaacccggcggtattcagcaccatcctggatgtctaccccgccacttccttacccccaatcatctgcggcagcggccaacccagcgtggcggccctcaccctgttagaccagcttgtccaagccggatgcattatttactacagcggggactttgacctcaagggactggaaattgccatccgcctggcccagcgctataaacaaaactttcggccctggtgttatgataatgaaacctacctgagggtaccccacggcaaaccagcggctgccaatcaaataaataacctgagaaagcttgatgtcccttgggacaagcaattggttcaccgcatgttagagagaaagttgttcgtttaccaggaatcctttatagataaactgataaaccaattcaacaaccggcacccaaaactcgccatcaccaaagggtga

SEQ ID NO: 50173 - DNA, 1554 bp, Ralstonia solanacearum Po82
atgaacgacatgaaactccaaagtgaagctcaagccgatctgttccgccacatcagcgtcgaaaaagctacgctttatcgctgtgtgatggattgcttcgccgcggccaagcgccagttccggctgcacctgcgccccgatgaagttttgaacgaagccaattggaatcggatgccggaacatgctccaccgcgcatcgaagaagtccaggcggcgctcgcgcaactgaccgaatggggcaacctcgaatcgcagccggatacgacgcgagtagccagcatcagcgacttctaccgtgcacgtttcctgtatcggttgtcgcagggtggcgaggccgtggaagcagcactgaccactttcgagcgcacgctacgtcgccgggcggaactgcaaaccgtggcactggaagatatttcgaaccgcctgcaaaccctgctgtctttggcggatagcgccaccccggatacagcgaagatacacgagacactgcgcgatctcgtgcgcgtgttcgaaagcctcgcggacaacgcccaggctttcatggccggcatcggacgcagcatcgaactgcagcaggccgaggttacaacggtgctggcctacaagaagcgattgatcgattacctggagcgtttcatcggcggcctggtgggtcgttccggcggcatcgctcaacatctcgtagcactgtcgccccgcatcgactccctgctctggctggccgcacaacgcgaggcacgcgatagtgcgccggacgacgatccggaacagctcgacgctgtggcacgtggctggcaggcttggcgcgaacgctggaaagggctgcgcagctggttcgtgaccaccggccacgaacctccgcaagccgaactgctacgctcgaaggctcgcgctgcgatcccgcagttgttgattgccgtgtcggcgctcaacgagcggcgcagcggccgtagtgaccgttcggccgacttccgcatgctggcgggctggtttgccgcctgcgaagacgattcgcaagcccaccgtctggcacgtgccgccttcgcgctcaaccccgcacgccacttttcgctcaaccccgctccggcgcccggtatccaggacctgcccgccagcacgccctgggccgaagcaccgccgctgcacatccacccgcgcctgcgcgaatacggtgaagccgcgccgcgcggcgctctgccccgtgtgcagtcccgcgacgagcagcggcgcctgttggcagcgcaactggaagaagagcacgcgcagatcgaagctgcccgcttgcgcttggccaccggccgcgccaccctgctgtccgaacttggcgccctcggcacgcacgacttcgcactgttcctgaaactgctgggagaagcgctgaccgcgcaaatgtcgcccgacgtgccggtggaaacgcagagcggcgacggcctcctgcacatccggttgcagccgctgaccggtagcccccgggccatgatcaccacgcccgcaggcgtgttcagcggacgcgatcacactgtcatcatcacgcgaatggaagacctgccatga

SEQ ID NO: 50174 - DNA, 1251 bp, Ralstonia solanacearum Po82
atgagcaacgacagccacgacatcggccgccagcaaacgcggcaccgtgatgacgaacgcaaccaggccctgcgcgcgctgctgatggctccactgatgaccccggcccacgagagcttcgccgccgtgcgccgccacgccgatgaactgcgcgcctggttctcgcgcgaaaccggctggacactgcacatcgaacgcgactgtgcgcgtctgtacaagcgtcccgccgacctccaggacgccagccgtggccttcccggctacgaacgccggcgttacgtgctgctgtgcctggcctgcgcagtactggaacgcgccgaaccacagatcacgcttcgcgtgctgggcgatcggctgctggcactggcggcggatccagcgctggcctcgcgcgactttcacttcacgctcggcgccacgcatgagcggcgcgagctggtagccgtctgccgcagtctggtggagctgggtgtgctgcagcgcatcgcaggcgatgaagaaagctttgtgcgcagcacaggagacgctgcggagggcggcgatgctctgtacgacgtgcgccgccgcgtactcgccggcctgctggcggccgtgcggggcccgtccacatggcccgtcgaacagacacccgtgagcctggacgaacgcctggcatcgctggtagccgagcacatgcctgacagcgacgacgggctgcgcaccgccctgcgccatcatctcgcccgccggttgctggacgacccagtggtctacctgaacacgctggacgccgaactgcgcgcctatttcatcaatcagcgcggcgccatggcgacccgcctgtgcgatgccaccggtctcgtggccgagcagcgcgccgaaggtctggccctggtggacgaggacggcgaattgaccgatgtcaccatgccagccgagggtacggaagcccacgccacgctgctggtggccgaattccttgccggccgcagccgtgccgatgcgcaggcacccaccacgctggacgagatcagcgcctttctggccgacgccagaacgcgttatggcagctattggcgcaagtcagcgcgcgagcccggtgccgagcgcgaattgacgaatattgcgctggaacgcctgctcaagctgcaactcgtggcacgcacggctgaccgcattcagccgctaccggcactggcccgcttcgcgctcggcgagaccgacatccgcacgccgatccgcgctgcaacccaatccaatttgttcgaatga

SEQ ID NO: 50175 - DNA, 4131 bp, Ralstonia solanacearum Po82
atgaccgatacgcaatccccggcactaccgatcccgaccctagcgcgttggcagccgctgcggctggggctggtcgagcttttccactacgacagcgaagaattctggttccgcgacggccgcctgctgctgcggggcaacaacggcaccggcaaatcgaaagtgctgtcgctgaccctgccctttcttttcgatgcgtatctcaagccgtcgcgcatcgagcccgacggcgacgccagcaagaagatggcctggaatctgctgctgggtcgccatgagcggcgcatgggctacgcgtgggtagaattcggccgcgtaggcgaagatggaaggcatcgctatctcacgctgggcagcgggctctctgccgcggccgcgcgtgcacaggtggacacctggtttttcttgctggacgaacagcgcatcaaccaggacttttggctcatgagcccaacccgggtggtgctcacacgcgaccgcttgcgcgaagcactgcaggattgcggacagtttttcgacaccgcagccccctaccgccgcgccgtggacgagcggctgttccgcctgggttcgacacgatacgcagccttgatcgacacgctgatccagttgcgccaaccgcaattgtccaagaagcccgacgaggccagcctgtcgaaagcactcaccgaagccctgcccccgatctccaccgacctgttggccgacgttgccgatgcgctgaaccagttggaggagtaccgtcgagaactggaggaatacgaggcgctggagcgtgccgtcggccagttcaaccagcgctaccaacgctacgccgccacgcaggcccggcgtcaggcccgcaatttgcgcaccgcgcaaaccggattcgacaacgccagccgcgaattgaactcagcgcgcgacgcgctggagactgcccaagccgaagagaagcgtgccgaccaggcatggcaacaggccgacgccatgctggccgccaaccgcacccggctcgaggaactgcagaacgacccggcgatggccgatgccaagacgctggagaaggctgacgccgatttccggcagcgcgacaaggaagccaatgccgcacagcaaacgcgccatgacatgcaaacccgcctggagcgcgagcggcaggccacgcgcactcgtgcccagcgtgccgagcacgccgggcgcgcgctcgctgagtcgcgcgaagatgcggtgcaagccgccgagcgcgccggcctttcgcatgcctactcggcaaacccgttggccagtgccaacgcccgtctgctgcaaccgctcgcgttggacacagcacgccaggacctgcgccgcgccggcgtcgagcgacgcgcagaggtggcactgctgctgcgccactgcgacgaagccgaccacgcggcacaagcccatacgtacgcgcgaacccagcgcgacgaacgcgccgacgaggcggaagccgctgccgcacagcgagaagaggccgatgccgccgtcgatcggcagggccggacactgctcgatgcgtggcaacgccatctcgacggcctgcggcaattccagtgtcccgatggtgccaacgcactggaagcgctggcagcctggacagtcagcctgcagggcgacaacccggcccgcaccgcgctgcaccgcgcccagcagaccgcaagcctacgtctagcgcagcgccaggccgcactgcagaacgatcgtcatgcgctggaacaggaacacgacaccctgcaagacgagcggacgcgtcttgaacagggagaagatgccgtgccgcagcccccgcactggcgcgcgcccgacgtacgcgtcggccgcgccggtgcaccgctgtggcaattagtggacttccaccccggtacgtccgcagccgactgcgccggcctcgaagccgcgctgcaagcctcgggcctgctcgacgcctgggtgacaccaaatggcacgctgctggatagcgacggcggtgatgcgctgttgttgcacgacgcgcaatggctcacccgcgaacgccagccacagtcgctggccgcttggctacgccccgcagaagcagcaaacggcgcttcgccccgggtcgatcccgccgtggtgcagcacctgctcgagggcgtggcctgctgcgctgaggacaatctcgccgcagaagcctggatcgcccctaccggacgattccggctcggcgcgctggcgggcgcatggcacaagcccggcgccgagttcatcggctacgccgcccgcgctgcggcacgcgaacgccggcagcacgaaatcggcgcacgcctggacgcaatcgacgctgccctcgcgtcgctggcacgagacttcgttcaactcgatgccgatcagcgcgaagccgcccacgaatggcaattcgccccgtctgacgacagcctgcgcgccgcgcacattgcagctgtattgcatgcgcgcgaattcgacatggcgcggcagcgcctggagcacgcggatcggcaactgcgcgccgctgcccagcaatgggaacaggctcgcgaaatcctggcacgcgatgcagaagacctggctcttccccccgcgcgcgatgccctacgcgccatcgaccaggcgctgcaaacgtttggagactgcttgcacacgctagccgtcgacgcgcgcgagctgcgcgacgccctggccgaacacgccgagcaattgcagcgtgagcaacaggccgagtccgacaccctgcacgccgtcgagcaattcgccgagcgcgaggccctggccgaggaagcccacatccgcctggaaacgctgcgcacatctgtcggcgccagggtggaagagcttcaacaacgcctcagcgacgttcgcagcgccgtcacgagcggcgagaccgaactcaggcaacagaacggcacccggcgccaggccggcgaagcacgcgcccgagccgaacaaaaggtcgaagcggccgaagccacgcttgccgaacgcatagccgcacgccagtacgccgtggggcagatgcaaggcttttccgccaccggtctgctggtcacggccctgcccgatgccgagttgccgtctatgcacgcgccctggaccattgagccggcactggcgctggcacgacgtaccgaacaggcactgctcaacgtcaaggacgatgacgaagcatggacccgcgtgcaaagccaagtctcgcaggattacaccgaactcggccgcgcactggccgcgctgagccaccaagcccaggctgaaaccaacgacttcggcctggttgtcagcatcatctaccaaaaccggccagaacgtcccgaccagttgggtgcacgcctggccggagaaattgcccagcgccgcgagctcctcacggccggcgaacgtcaagtactggagaaccatctacaggcagagatcgccagtgcggtgcaaaagctgctgcgcgatgccgagcgtcaggtcaaggccatcaacgacgaactggacaagcgcccgacctccaccggagtgcgcttccgtctgcagtgggaaacgctgcccgaaggtgcggatggcgccccggtaggcctcgaggccgcacgccgccgcttgctcaacaccagcacggatctctggaccgccgaagaccgccgggtggtcggcgaaatgttgcagcagcgtgtcgccgcggagcgcagccgcgccgacgcggaccaaggcggcagccttctggatcaattggcccgagcgctggactaccggcgttggcatcgcttccgcgtgcagcgctgggacggccaatggcggccactgtccggtcccgcctccagcggcgaacgcgcgctgggcctgacagtgccgctattcgccgccgtctccagctactacacgcaggaaagctacgcccacgcgccgcgtcttgtgctgctggacgaggtttttgccggcatcgacgacgcagcgcgcgcgcactgctgggcactgatccgcgagttcgacctggacttcgttgtgaccagcgagcgcgagtgggcctgctccgccgaactgccgggcgtagccatcgcgcaactgcaacgccacgaaggcatcgacgccgtacatgtctcgcgttggacctgggacgggcgaacccggcggcgcgaagacgacccgaaccggaggttccccgacgcatga

SEQ ID NO: 50176 - DNA, 1680 bp, Ralstonia solanacearum Po82
atggcggccactgtccggtcccgcctccagcggcgaacgcgcgctgggcctgacagtgccgctattcgccgccgtctccagctactacacgcaggaaagctacgcccacgcgccgcgtcttgtgctgctggacgaggtttttgccggcatcgacgacgcagcgcgcgcgcactgctgggcactgatccgcgagttcgacctggacttcgttgtgaccagcgagcgcgagtgggcctgctccgccgaactgccgggcgtagccatcgcgcaactgcaacgccacgaaggcatcgacgccgtacatgtctcgcgttggacctgggacgggcgaacccggcggcgcgaagacgacccgaaccggaggttccccgacgcatgagttcctccgaagcgaaactccaacgcttgctcggcggtcctgcgctcttgtccttgcgccaacgcctgcgtcgccacttcgaacggcagagtgaaggcgagacccgagtgaccctgcaactgaccaaactcagcgccggcgagcatgaggccctggcgctgttaaccgggcgcacatcgcgaaccacacgctcaatgcgcatcgacatcacgcagatcgatgccgcattgcaggccgccggcatctgttgttcattgcgcgtggcactggagcgactcgatggcccgatccagaatcgagcggccgagcgtgccgcgattcaggctgcctggtccgaagcaacccaataccgggggggcgatgcgcgactgcaagcctggctggatacgccggccgccggcccccagctcaagcgcctcgcacggcaagacgctaccgcagcccaaaccctggtgaggcaggccgacgcagtcttgcgcggactgccagccccgggactcgcacgcgcccaactggcagcacaaacgctaggcaatgcacatgcgctcgatgcaggccaacctgtagcgagcatcgtgcttgctgcgtggcgctacgctgaagcaaccatggcgccatcccgacaagaggcgctgaccgatccggagggcgaattcgacggcgacgaagccgacgatcgcggcgaaggaactagccttgcccatgaacgcgcccgagacatctgggcacgagccggcatcctggtcaacgaactggcgcgaccggcactgatgctgaatctgccaatccttgagcaagtcacggcaagctggattgccggtgagcccgcttacctgtcactgcgtcaactcgtgcgtacgcccccagcctgggccgtcaaagatgcacccgtcttcgtctgcgagaatcccaacctcctggcaattgccgcagatcgactaggcgcgcgctgcgccccgctggtctgcaccgatggtatgcctgccgccgcacaacgcgcactgctgacgcaattgctgcacgctggcgcccgtctgtactatcacggcgatttcgactggcctggtctacggatcgctaaccatgtgattcgcacttggcgggccatcccttggcgcttggccgcgagcgactacgaggctgcagtgaaagctgcgccacacgtgcggcgcgaccttgacgaaactgacgctgtcgctgtgtgggatccgttgctgacccctgctatgcacggtcatggtctatccattgccgaggaggcggtagcggatggactgatcgaagatttacggcccacctga

SEQ ID NO: 50177 - DNA, 1386 bp, Bacillus coagulans 2-6
atgcgcgactttatttcgccggaggaagtgctcgaatatttgcgctcgctcccggcttttcacgattatgaagaagaacagctgcaccagcagttggcccagctggtaaaatggaataacctggttgcccgccaggatatgacaaatgccaaaaccatcgaagaatataagaaaaaaagattccgctaccagtgtacgccttacacagtggaaatcgagcggatgctgatccagcttgaaaaactgggggaccagttccagggatcgctcgaacgttcgcaatttgaccgtctgctcgcctctttggcaaaactggaagaagaactgaaacagccgttggacaaacctgcagcccactacatgcacatttgggatgacatttttcactttttcgggaccatccggacaaatacagcggattacatagcctatatcaatagcgaaaagacatcacaacggatgcagacggaagcctttctcgtatataaaaaccaattcacggcttatttgcgtgattttatcgtctcgttgcaaaaaacatcgctgcaaatccgggaaaggttgcgggaactggatacgcatatattggcgccgctttttgaaaaactcgtggaacacaggcgccaaattccccgcttggaagatacggctgcttccggacaagaatggctggaagaattccgggaatactgggagtctttgcggcggtggtttcttggggccagctcctcccaaagtgaactggaaatgctgcagatgcagacaaatgaaatgatccggaggatggcccgttatgttcagcggatcagtgaacgccagcaacatttccggagccggaaaaaagattatttgcacctttccaaatggtttgccgggtgccatagtttggaagaggcccatcaattgtcatccgtcgtgttcgggacgatgacggtacggcatttgcacctggaggaggcgacaacggacaatcttcatgccgagacatgggaagaacagccggagatgcgggaaatcaagccgcgaacgaaccggtaccgcgagaaaacaaagccaggcgctttccgttctaaccatgagcagaaagaaaagcagcggctcgcctatttaaaagagcgcgaacaggaaaagcagctgattgaaaaatatatgaaaaacggggagattcgccttgctgaaatcgggatagtggagccgtttgtccggaaagtgctgctcggctggatcggaaaatcgatggcagcgaaaaaccatgaagtaaaaacggattacgggatgtccgtaaaagttgtgattgacccggatcggatcatcacactggatgcagaagacgggaaactgatcatgccggatgctgtatttgaattatcgggaggagagcgctga

SEQ ID NO: 50178 - DNA, 1164 bp, Bacillus coagulans 2-6
atggatccgttacaagtttttgatgaaaaagcggtgcaggggatggacctgttattccatcattactggattttgcggtctgagcacccggactggtaccagctcatccgcgagcgcgaaaaagtgctgcgccgttacatcagcgagaaattcgggctcaggctgatcatccaccagcattttatcaaacttgaaaaaatcccggtggaaccggaaagctggatgggcatcccgcattttcaggagccgatggattatgcgattttttgctgcgcgctttcttttctggaaggaaaagcggtggatgaacagttcctcttgtcggagatgtgccaggagatccaaaacgattatcctgtggaagatgggctggactggacgctttatcttcaccggaagtcgctcattcgggcggtccgggcactgatggaattccatctgatccggacaatagacggcgatatttccaggtttgacacttacgaagaccaggaagtcctatatgaagcgaccgtttacagccgctattttctaagaagctttccggatgattttacaagttatgcggactggaccgggctccttgaagaagactggaaacagaatcaggaagatgaacggcgcaagcgggtgtaccggaaattgtttttctcccctggcctgcaccggaaagatacgcaggaccccgattttctttatatccgcaatttccgcaaccggctttttgaggacattgaagaacacagccgttataagctccatgtttttaaaaacacagcctttttatctgccgcagaaccgcggagttaccaccatgtttacccgaatgcaaaaggttctacggatctgatgctgcagttgtcaaagacgctgcatgaccacccggaaaaatacgttccgaatgaagcgggggaaattttgcttacggaaggcgaatttgaagcggtcattgacgagatgcgctcccgcctcgaacgcggatggccgaaacatttccgggacgccggcacaaaggcggtatgtgcggaattggtcgaaacgatgaaagaatggatgatggcggaaacggatgaagcggcggggctgatccggataaaaccgctgttgggcgtgcttgcaggcgagtatccagctgattttgagaaaggggttgagcaaccgtga

SEQ ID NO: 50179 - DNA, 4092 bp, Bacillus coagulans 2-6
atgaaccgcgccggcctgttaaatttttggtattatgacgatgaaatttttgaatttgcggacggaaagctgttgttgcgcggcacaaacggttcggggaaatcggtgacgatgcaaagcattttaccggttttgctggacggaaaaaagacgcctgaccggcttgatccgttcgggtcaaaagcaaggaagatggaagattacctgcttggggaaaaggaagtgtccggccatgacgagcggaccggctacttgtttctggaataccaaaagcaggggacaaaacagtatatcacaacgggcatcggcatgcaggcaaagcggcataaaacgttaaaatcatggtatttcgtcctgaccgacaaccgcaggatcggctacgattttgaactggcgcacacccgccagtcagagcggatcccgttgtctgcaaaagagcttgaaaaccggatcgggtccggggggtatctcgtccactcgcagaaagaatatatggaactggtgaacaaatatattttcggttttcagtcgatggaagcctttgaagatttaatcaagcttttgattcagctgagaagcccgaaactgtcaaaagatttcaagccgacggtcatttatgaaatcctcgagtccgcgctgccgcctttgacggatgacgagctccgccatttgtccgacacgattgaaagcatggacgaaacggagcagcagcttgagcagcttgaacgggagcacgaatcggcaaagaaactggtgcgccaatacgatctttacaatcaatatattttagcggaacgcgcccaaaaatggcgggaggccgaaagcaggctgcaggacgccaagcaggacgccggcacgttagaaacccgctctgaatcactgcgcggcatgattgaaaacctggaagaagagaaaaagcattacgaacaaaaacgcgacgttttaaaagcagaacaggaacggctgcagcaccatgaagtttggcgccttgagaaagaaaaaggggagaaacaggccagggctgaaaagttaaaaagtgaagcagcggatctggagaaaaagtgggaagcaaagaaaagccagcttttggacatccgcctggagcaggaccggttggaaacagaaaacagcaaggatgaatccagtatgcaggagacactggatgaactggcactggatgccggggatgcagcttttaccgggcacgggataaacgccggggatttttcgcggcatgagggggaagcttttgatttttcggtttggaagcgggaaactaaacagcacagcggacttttgcaaaagctgcggcaactggccggggaagcggagcggcttcacgaagcgcatctgaaactgcagcgccagtcatctgccaaaaagcaggaaattgacgaactccggaaacaactcgaccatttggaaaactggtttaccgaacaaaagcaggagctggaagatgccgtgtttttgtggattgaacagcatccggccctctcttttacagacgagcggctccggcgtattgccggcgcgctggacgggctgtacgaagaaaaccgttatgaagcggtcagggaagaaattgtggacgcggcaaatgattatattttgcaagtgcggacggaaatttcacgcgcggagcaggaacaaaaggcgaaagaacaggaattggccgaagccgaagaaacgcttgtgtattggcaaaacttgaaacttgccaacccggaacgccccgcagatacggaggctttccgtgcgcgtctccatgaatcagggaaacgctatctcccgttttatgccgcggtggaattccaggatcatgtggccgatgcccaaaaagccagaattgaagcggcactccggcagacggggattttggacagcctgattacggaagagccggttacgcctgtccacgaccgggtcatccgcccgaacccgcacattctcggatacacgcttgccgattacttaaagccggatccggatgacgatagcccggtttcagccgcgcgcattgacgaagtgctgcgcagcattccgcttgaaccatcggagagcggttttcacattgacgcggatggctctttttcaatcggctgcctcgttgggcatgccccggatgaagggccttccaaatttatcggcagaacgtcccggaaacggtaccagcaggaaaaaatcaaagaaacagagcaaaagattgctgaaatccgccttgctcttttgcaaatggaaaacagccttttagactgggccggcaaagtacaggaagcagaagattggaaagcgggcattccggatgacaaagatttgcgcgacattgaagaacagatggaaaaaacggcgcgcagcctgaagcaggaacaggaatttctgagcgacatcgaccgcgaatggaaacaagtataccaggatttgcaaaacatccggctgcaattgcatgagcaaggggccggcctgaatcttgcacttcaaagcggcccgctcgatgaagcgctggctgctgcgaaaagttatgaagaacatcttcacaatctggagctcacttttcaacggttgttttccaggcgcaaaatgctcgcgcgccttgctgcggacatccttgagaaagagcaggaactcgatgaaatccgcggtgaagagaacatccgccggtcagaatgggagaaaacagcggcagatatcgaagcgattgagcagcagctgaaattgcgggggattgaggaggtccgcgcccggattcaggcagtccagcatgaatatgcaagtacggacgaaaaaatcagggatatttacgaaacgaagccgaaaaaagaagcagaacttgaaaagtgcatagccgatttgtctcttgcgaaaacgcgcgccacattttgggcaaatatggccgcggaatgggagaaactcgtaaaagaagagctttcactcggcttcgtggaaagcggagatacggaaccggaaagcattttggcggcgttttccggcgtgctggaaaaatatgaccgcgcaaaattaaatgaaaacctgacaaaaatttttttcaacgaacaatcgaatttaacagagtaccgcatgtccgagtttacaaaagaagcggatccgccagaatggttcgctgaaaaactcgatgactattacgaaacgttcaaaaaggaatgggaaggtttgcggggccgccgcctcatccagatggaataccgcggccgcagggtgagcccgtatacggtactcgagtctcttgaaaaagaacttttaaacttgcaaagttatttggatgagcaggacagaaggctgtacgaggatattatcgtcaatacggttggtgtcatcttgcggaaccggatccagcgggcagccaagtgggtgaaagaaatggacgcaattatgagaaaccgggataattcgtccggacttactttttcgattgcctggaaggaaaagacggcggagtccgaagacgagctcgacacgaaagatcttgtcgcgttgctgcagcgcaacagcaagtttttaaacgaggacgatttaaaccggattacaaaacacttccgctcacggattgcggctgccaaagaactgattgaaatccgcaatgaagggtcgacgctccatcaagttttaaaagaagtgctcgattaccggaaatggttccaattcgtgctgtcatacaaacgtgccggcgagccgaaacgcgagctgagcaatactgcatttttcaaattcagcggcggggaaaaggcaatggccatgtatattccgctttttaccgcagcatattcgcgttatttggaggcaggaagtatggcgccgtatatcatttcgctggacgaagcgtttgccggggtggatgaaaacaatatccgcgacatgttcgaagtcgtcgagcagctcggattcaattatattatgaattcgcaggcgctttggggagactatgacaccatttccagccttgccatctgcgagcttgtccgcccgaaaaacgccaattatgtcacagtaatccgctaccggtgggacgggcataaacggtcaattgtggagaaccggaaagaagcattggcaggagctccggacctgctttga

SEQ ID NO: 50180 - DNA, 1296 bp, Bacillus coagulans 2-6
atgaatgatgcgatcgatctgttaaggaaggaaccagggatgatgaaactgttccgcctttttaaagaaaaataccgttcgctcggccatatcgggggaaccgtcagtcttgccggttttacgcgcactgaactggaggcgattgcaggtcttaccggcacgtcccctgatttgctcagagagaaaaacaaaatttcgctgcgggcatttgaaaaggcgctggcgccgactgttttcggcaagtacaccctggttgagctgcttgaagcggttttgagggaaaaaattttttccaaagcggaagaaggggaaatagagaaaaagaaagaggaacagtttttggcgcggctttcggagacgatgccgggcggaaactggtggtggcgccggattgccggtaaaacggctgacacgcgttttatctggcatgcgtacaagcaggatccggatacgttgtccgcacagctcacaaccgttttgaaagcttccacaatgctgccggaagaagggaaatatgaacgaattccgtttttttcccagcgtgtgacagggaacccgcatttttttgaccagaaccgtttcgaaggcaggctctttgtccattgtttgttcaccagccaattgttgaaagggctgatcgaagagatgccgaaaacgacggaagaattgaacgaactgtacgcaaatgccgggctgatgcgggatgacttatggagttttgtgacgtgccgcgcatttttggcggaaacggaaaacggcctgcacccggtctggcgagaagcagctgctctagggacggtcatgaatgtcccggtgaaagaattattgcagcttacgaacatttggccgcgggtgggaaaaaaagtctggatcattgagaattccggcgtggcttcggccgtgcttgatgaagtgcccgatgcgcctgtgatttgcacgcacggccagttccgcactgctgcctggatcatgctgcagcgtcttgcggaaaacgggtgtactttttattattcgggcgatctcgatccggaaggcgttgccatggcggagcgcctcagcaaccgttttcccgggcaaacggtattttggcggatggacccggatgcatactggcgggttctgtcggaagaggatatatccgcccggctttccaagctggatgcggttcaatcccctgaactgcttttagtggcagatgaaatgcggttgaagaaaaaagcggggtaccaggaaggccttgccgatttgcttgtagaagatttgaaaaaaagatgggcgggcggaaaagagatatga

SEQ ID NO: 50181 - DNA, 1485 bp, Lachnospiraceae bacterium 1_1_57FAA; identical to SEQ ID NO: 50133

SEQ ID NO: 50182 - DNA, 3711 bp, Lachnospiraceae bacterium 1_1_57FAA; identical to SEQ ID NO: 50134

SEQ ID NO: 50183 - DNA, 1296 bp, Lachnospiraceae bacterium 1_1_57FAA; identical to SEQ ID NO: 50135

SEQ ID NO: 50184 - DNA, 1491 bp, Lachnospiraceae bacterium 2_1_58FAA
atgaaaattcaagaaaaaatgagaaagccaatgttggaggcaagatatctgaatgtagagaatacagacagatatcgtcccatcattcggcttttttatttgaagtatgaaaaattaaaatattggatgtatcaggaggacgtctttgaggagttaaaagaagatccttattttcaggaatatacgatggaacagtgtcagcaggacctggcggcgcttgtatcctggggaaatctgcttacaattcaggatacccggaaagtgacaacgattgaggaatttaaaaacaagaagtttcgctatcagctttctgagacagcagttgaagtcgagcgaatggtgattcggattgaaaatctgttgatcgaaggctcttcgctggagcctactttattggagcggcttcggatcagccttggaaggctgggggagatgtcacaggcagaagcggaaaagcggtatggatggtggaatgatctgaacagtgattttattcggttgaatcagaattaccaggactatatgagggaattaaacagtgtaaaagcagaagagatgatgaaaacaaaagagtttcttgtgtttaaagaccggctgatcgagtaccttcgctcgtttgtaaagagcctccaggtaaatgtgactgcgatcgagcagcagctccgaagtgttgaccgggaggtcgtgaatcagattttgcagaaagtgacagagtatgagctctcgattccgagaatggatacagagattgatgagcagatgatttatgacaaaatgaaggggcgttgggaaagtatttccgagtggttttcaggaaaagacgggatggaatcggaagcgggaaaagtgtttgatacaacaaacgaaatcatccggaagattaccagatatgccacacgaatcagtgagatgagcaatcagggctcaaatcggcgggaggaatataaaaagctggcggacatatttggaaagtgcagggatatcaacgaggcacatcgactgtcagcggtcgtattcgggatcgagaagccgctccatctcaaaggagaattgagcagagagacagacagcattaacagtggtgtatatgaggaagaagcatatgccgtgacagtcactcccagagtgcgaacctacaaacaaaaagccagaagaagcggtatcgtcgaccggtcaaaagagaaggaagagatgcggctgctgatgatcaggaggctggaagaggagaggaaactgcttgggagctatatacacaacggacgacttgagtttgcaagtcttccggtgatcgaaccacctgtacgggatatgtttcttctgtggctttcaaaggctctggaaaggaagaatcatcgtgcaaaaacagaagacgggcagatgtattatattgaacgggcagatgtgaaagagtattgtatgttaaaatgtacagatggaacctttcagatgcctgcttatacaattgtgtttgaagatggggaatcaaaatga

SEQ ID NO: 50185 - DNA, 1146 bp, Lachnospiraceae bacterium 2_1_58FAA
atgagaacgttggaattattattaaaccgccggtggatcttaaaatccagagagagggagctttattatcaggtgaaagaagagctttcatcgggagaagagaagaaattcctgatggagaagctcgggtatcaggtggtcgtgaatccgtatatgatcaaggtagaaaagatgcctgcagttccggaaaactggatgggcattttagaatttaaagagccgatcgagtatgtgtttttctgtcttgtgctcatgtttctggaggataaagaggcagaagagcaatttgtattgtcagaattgacagaatacgtacagagccagtatcaggaggagcagatcgactggacagtttaccggtacagacgtcatatgatcaaggttatgaaatactgcgtagccgtcggaattctgaatgtggatgatggaagtgaagaaggatttgcgaaagatgataccagtgaggtattatacgaaaatacaggagcatcccggtattttatgaaaaacttcacgcaggacatcatgggttacacatctgcaaaggagtttgaaaaagaagagtggatcgatgtgaatgaagacagagggattgtgcgcaggcagagagtataccgaaagcttctgatgtcgatgggaatgtataaggatgcggaatcagaggaggattttgcctatctgagaaattacagaaatatgatacagggggacctggcagaattatttgactgtgaactgcatgtacacagcagcagtgcatttctcgtgctgggagaagagtgcagactggggaggtgttttccggaaggaaatacactttctgatgttgttcttttgacaaatcaactgatacagaaaagagtaacagagggaaggattaccgttccactggacgaacagatttgtattccaaaggaagtttttcgtgcaattgtggaagaatgcaaggaaaaattcggagaaggttttaataagacgtaccgggagatgacgtttgccgagttttatcgggaagtggaaagatatatggaagagctgatgctgatagaaattggagcagatcatgtgaaaatcagaccggcagcaggaaaaatctatggaaaatatccggaagattttttgaaaaacggaggaagagatgaatag

SEQ ID NO: 50186 - DNA, 4092 bp, Lachnospiraceae bacterium 2_1_58FAA
atgaatagtaaatggcagataaacagagttggattgctcgatttttggtattatgatgaggaagaatttgattttctggatggacgtatgctgcttcgaggggcgaatggttccggcaaatcggtaacaatgcagagctttattccgcttctgctggacggaaacatgcgtccggagcgtttggatccatttggttcccgcgccagaaagatggaaaactatcttctggaggagggagatgagagagaagagcgcacagggtatctttacatggagttaaaacgcctggaaagtgaagaatatctgacacttgggatcggacttcgtgcgagaaagaataaaaagctggaatcctggtatttctgtgtgacggacggcaggcgtgtgggaaaagatttgtttctgtataaagatgtggaaaataagattacctgctcgaagggagaactgaaataccggatcggtgagggcggcaaagtgatggaaacacagggagagtatgctcagtgcgtcaaccgcctcctttttggttttgagacacaagaggaatacaaagagcttctggagcttttgatccagctgcgtacaccgaagctttccaaagactttaagccgaccgtgattaatgagattttaagcagttcgcttcagacactttcggaagatgatctgcgtccgatgtccgaggcaatcgaaaacatggacaatctgaaaacaaatctggatacattaagcgaaagcattcacgcagcgcggcagattgaaaaggtatacgatcagtataatcagattgtgctttatgacaaggcgctgctgttttcagatgcagggaaagcatatgagaactgtatgaaaaatggaaaacagattacggaagatctggcgattcatatggaagaactcaggaaggaagaacagcattatgaagctctgaaacaggaagaggaaattttaaaagaggaaaaaacctctctggataaaagtgatgcggcacagttaaaagagcaggagagtaagttgaaagcagagcttctggagagagtaaaggagcagcagacaaaagaaaaacaggaacaggaaaagaaagaaaaacagatcgatacagaagaaaagataaaagcagaaacagaaaaaacagaacgtatctgggaagagattgaaagttgtctggaagagatggaaacagaactggaagaaattccgtttgatgagtttacatttttgaagaatgatatcttacaggatcgggaaaaagaacagagtttttcttcacatcaccagcttttgaatgactatacaaagaaagtagaacagggaaaagaggctcttttggaagaaaagaacagccaggaaaaatatgatcgctgtcttctggagttggatgtctgcagggaggaaagaaatcttgcagaaaaggaaatgcagcaatatgagaaccttctgcatgagacaaagtcagaattgacagagcagatgtatttatgggaaaaacaaaatcaggagcttcaccttcttccggagaccatgcaggaaatctcaaggaaaatagaaagctatgaaatgggaagcgattattcagaaatccgggaactggccaggccaaagctatatgaactggaacgacagttttctgagaatagaatggtactggagcgaaatctgcaggaagagcaggagaatctgtatcaggcagaaacagagttggaagagtggaaaaatcaaaaggatcctgaaccagaacagccggattgtgtaaaggcaaaccgagagctgctaaaggagaaaaaaattccgtatttccagttttataagaccatagaatttgaccagatattagaggaagagcgcagaaatcatctggaagaagcattgctagagatgggcgtactggatgcgctgattgttcctaaggagtatcgggaacaggtctatgctctggacaaaggagtatgcgatcgttatctgttcagcgatgtggcacatgtcagggaaagtctgcaggaagtgctggaagtggagaatggggaaaatgatattttgttttatcagaatatttcaaatattctttctgcgattggatttggtgatacacatgcagagcacggagattcctggattgatgccaatgggaattaccgcatcggcgttctggaaggaacgatcaccggggaatatcaggcgcgctttatcggggtgcgtgcaagggaaaagtaccggaaggaaaagatagaagaattgaccggactctgcgaacagctcagagccagtgttgaagatttagaaaaacaattggcagaaaacagagcgcggacagaaacattgcaggcagaatggaagtcattcccgggagaggaagatttaaagacagcggcaaaagaattttctgatcgcgaatataagttagaacgaaaaaataaaagactttgggagcatcaggaactggcagaaaaagaaagaaaagcactggatgaggtacgcatccgggtacgggagatctgtggaaaatgttatctttcgccaagattggatttgtttacacaggctcttttggcattgcacagatataaagaaattctttcccagcttcaggttgcgcatggcaagtatcaaaatagtctccggtatatcatgagccagagagactatctggaagaactggagcttgatctggatgatattcgttacgaattcaatcggatctgtctgaaagtcagagaagtggaaggatttcttgcgtccgttcaaaagcagctggagctgacagattatgaagaaattaaagaacgcctggatcattgtgtagaacgccttggaaaacttccgggagaacgagaggcctgtgtcaggaatcaggcggcacttcgaaaagagacggaagtactgcaggaaaaagaaagagaaaatgaactcagacaaaaggagctgtttgagaaaaaggaaaaatatcagaatgtatttgaacaggaatatcagcttcggtatgtagagagagcatttgttgttacggatgatatggaagatcaagcgaaaaaaatctgcagtcagtttgccggaagttttggaaacaagaagcagagtgatctgtttgggaatcttcaggaagcgtatcatcagaacagggggtatctgctggattaccagattacgctgcagtctctgtttgaagaactggatgcagagggcagttttctggatgtggcggtgaagcgaattgatattttggcaaaataccgtgggataccggtaaaattcaaagaactgatcgaaaaaatgaatgaggatgccgaagtactaaaacgccttttaagtgatcgagatagagaattgtttgaagatattctggcaaatacaatcagtaagaaaattcgtggaaaaatccaggccagcaagcgctgggtggaaaaaatgaatacacttatggaatccatgcagacatcaagtggattgaagctgagtctcaagtggaaaaataagcgggcagaaaaggaagaacagctggatacaagagcattggtagagttattgcaaaaagacgtagaaattatgcgtgaggaagaggtggaaagtgtctccaggcatttccgttccaaaattgaagaggcgagaaaaatttctggggatatgggatctgttcaatcgttccatgccacaatgcgagaagttctggattatcgaaaatggtttgaatttcagttggaatgtcagaaaacgggagagaaaaagaaagaactgacagaccgtgtattctttacgtttagtggcggtgagaaggcaatggcaatgtatgtcccgcttttttcggcagtggtggcaaaatatgcgggggcacgtccggatgcaccgaagctgatttcactggatgaagcgtttgccggtgttgatgagaccaatatcagggatatgttccgtctgatggtcgagtttgaattcaactttatgatcaattctcagattttatggggcgattacgatacagttccggggcttgcaatttatcagttgatccgtccggaaaatgcaaaattcgtatcggtaatccgttatatctggaatggaaaagtaaaggtgatgctcacaggagaggaatcgtga

SEQ ID NO: 50187 - DNA, 1320 bp, Lachnospiraceae bacterium 2_1_58FAA
gtgaaagcagaagagaagcagaagttaatgcaggagtgcttacagtattttcgtgaacgccctgtgtatgaaaaattattccgaaaaatgagagggaaatatgagagcctcggacatataggcgggaaagtggtattgaccgggttaagccctcaggataagagccaattgggcggatttttgcagaaggattacaccgagaatcagtctgttaccatatcagcggaagcttttgaaatctgtctgtcccaaagcagattttcggatatttctctggaggaattgctggatgcttattttgggaaaaagctgacggtgaaaaaagaagagaggcgaaagaaacaggaagaaagagatgccttttttgcggaagtccaaagtgggtatgaggacacgacaggaggaagatggcttcagaatacgttgaaagagcacacaacaggctatgaaattttgcagcagcaatacaacagtgctccggaaattctgcgggaaattctgaaatatgtgtttgaggcagtaaaacagcttccgcgaatggaagaaaaagaacttttaccggtatttgcggcaaagctgacaggagatcctcattattttgacgcaggcacagtggcggaaagattgctttttatcattctttctgcctgttggcaggaaacgaaagacagagaactctcagaagcggaaagaaaaaaccagattttttacagggcggggattttaaaagatgatctgtcaaatgatacgcttgtctatggaatccgagcatggaaacacaatggaaatcttcataaaggaatcgaaggattttttcgggaaagagaaccggcccgcctgacgcttcgaacgattgggacgtttggaggggtgcatgcagaaagagaaaaaatttatctttttgaaaatccggcagtattttctgtttttgttaaaaaatatccggattgtgcagcaatctgtggaaatggacagccaagacttgcaacacttcttctgcttgattttctaaaagaaaagcatagtttttattatcatggtgattttgatccggaggggcttctgattgcgcaaagattgaaagaacggtatggagaacgtctccgtctctggaattaccgggcagattggtatgaaagatatctgtcggatgtaaatttgagcgaagtgagaatgaggaaactggagaaagtatatctcccggaattgctggaagtaaaaatgcagatgcagaagagaaaaagagcggcgtatcaggaggcgatgctggatatgttggaacccgaaaaaaatgagtggatcacaaggagtgtgaagtga

SEQ ID NO: 50188 - DNA, 1533 bp, Streptomyces zinciresistens K42
gtgagtgacgagttcgacgtcccgctctccgtcgacgagggcgcgttcggtatcgacgcgttctccctcgacgaccggctgcggctgttccacttcgccgccggcgagaagcggcacgagtacctgtggctgctgcgggccttcgaccgcggacgcgccaactaccaagtgctgctgcacacttcggatgtggtgggactgctggagcggctcgccgccgaccaccccgccgcggccgtcatcggcggtaccgcaggcgttcagccgctgctcgacgcgctcgccgaatggcaggtgctggaccggtcgtacgacgggacgcgcgccgcgaacctcgccgaataccgcaaccggcactacgtgtaccagttcacccaggccggataccgggcctaccgggcggtggaggacgtgctcggtgcgagcctggaggacgcccagctctcccgcctcgtcttccccgacatcctcggcgacctgcgtgcgctggccgaggcgaacacggccggcgacggcgaggaggtgtaccgcaagctcggccggctcgactcggtgctgaacgagatggcgcagcgggccgcccgcttctacctgatgctgggcgacctggcgcgcaccaacgacacccggcccgaggtgttcctggcccacaaggacaccctcctcgggcacatgcgggagttcaccgccgaactcgggcgctacgccccgctgctcgccgaggcggtcgagaaggccgcggccaccggtgtggaccgcatgatcgagtacgcggccgaggccgacgaacggctcttccgcaaccccgccgagcgcctcgcggactggcggcaccggtgggacggcatcgtccactggttcgcggagcgcgagcacagcgaggccgagcggctgcaggacgccaccgtcaccgcgatccgctccgtcctcgccctgctgcgccgggtcaccgaggcccgccggggcggggtgagccgggagagccaacttcgccacctcgcacagtggttcacctcctgcgagagcgacgaggacgcgcacgccctgttccaggcggtcttcgggctcggcgcgccccgccacgtagccgtcccgtacgccgaccccgagcgcatcccgtcccgtacgtcgtggtgggaggccgaaccggtcgaactggcccgcaccctggtccagtccggccgtacccctgccctgcacggccccggccgcatcgaacgcgacgacgaccggcgggcccgactccgtgccgagcagctcaaggagcaggccgagcggcgcggtgccgcgaactccctcgcttcggacggtgtgtacggccggacgctcgacgagcccgagacgcgcgccctgctgggcctgctggacgtggccctcgccgcccgcgtgcccgccagtcgccgggtcaccgccgcctccggatccgcccacggggtacgtctcaccctcacgcccgccgagggttccacgaccgtcgacaccgtacgcggccgtctccatctcgacgggctgcgcctggaggtcaccgtatga

SEQ ID NO: 50189 - DNA, 1452 bp, Streptomyces zinciresistens K42
atgagccgggtcgccgagggcgtctccccgctcgaactcgccgactaccagaaggcggtacggctcgtcctgcggcaccccctggtcacgtccgggtacccggacagggcggcgctggcgaccgtgcgccgctgggccgaccagctgcgcaccgacctgatggaggtcctcggctaccggctcgtcaccaccgccgacaccgcccgtctccagcgcgcccaagacggcctggacgccacccgcccggccctcacccgcgcgggacgccccttcgaccgccgccgctacgcctacctcgtcctcacccttgcggccctcggccgccacggcgcgcaggtggcgctgggcgaactggccgacgcggtcgccgccgacgccgtgcgcatcgacggactcggcctcgacaccgcccgcaaacccgaccgggacgccttcgtcgacgccgtcacctggctcaccgaacgcggcgcgctgaccctcgccgacggttccgccaccgcctgggccggcgatcccgagcgcgccgaggccctgtacgacatcgaccgcgagatcctcctcgccgtccaccacccgacccgcgtgctccagcacctgacctcggtcaccgcgctcctcgactcctccggcgcgctgggactgtccgcgggccgcgccgcccagcgccgtgaccaggcacgccgggcccgccgcctcgtgctggagaacccggtcgcgtactacgccgacgccgacagcgaactcctgggccagctgcgggccccggctctcgccgaggacctggagcggctgaccgggctggcggtggagcggcgtgccgagggcgtcacgctcgtcgacacctccggcaggctgtccgacctccgcttccccggcggcggcaccgtcgcgcaggccgcgctgctcctcgccgcccggatcagtgccgccgtgcagcgctccggacggcacgccctcgaactgctgcccgcacccaccgccgccgaacgtctcgcggcccgcgcccggcggatcgacggcgcgctgccgtcgcgtgggacggtcgccgaactcaccgaactcaccgaactcaccgcgctcaccgaactcacggagcccgatgcggagtcggcgtacgagacggccgtcgacgcggatcacgagccgggggagacccgctaccccttcgtcacggactcctggctccggggccggctcaaggacatcatcggcgagtacggcgcgggcttcgccgccggtctgcgcggcgaccctgaccggctgctcgaccaggctctcgacctgctgggcgccatgtcgctgatcgtccgggtcgacggcggggccctcgcgctgcccctgctcgcccgttaccgaggggtcaccgcccgcgtgaagacccgtacgggcccccaaccacccgcgcagacacctctgttcgacgacgaaaccgccgaggacccgactccgtga

SEQ ID NO: 50190 - DNA, 831 bp, Streptomyces zinciresistens K42
gtgagcacttccgctcccacacccgcagcccgctacgtccccacccgtgccgggatcatcaacctgtgggactaccgggacgaggagttctccttcgcgggcggttggctggtgctgcgcggccccaacggctcgggcaagaccaaggcgctggaggtgctgttcccgttcgtcctcgacgggcgcatcgaccccaagcggctcaacccgttcgctgccgaggaccgcacgatgaagtccaacctgctcttccgcgggcaggacagcgcgctcggctatgtctggatcgagttcacccaccgggagaccggggaagccgtcacctgcggcatcgggctgcacgcccagcggcaccgcgacacacccgcccggtggcacttcgtcgccgaaggccgcgtgggcgaggacttctccctcctcacccctgacgaccggccgatgacgaggaaacaactcgccgccgaactcggacgcgaactgatcgcctccacggccgactaccgcgcggccgtcgaccggcgcctgttcggtctcggtccggagcgctacgagcagttgctcaccctgatcctcacgctgcgccgcccccagctcgccaagaacctcgacccggccaagctctccgacaccctcaccgccggtctgcgcccgctcgacgacgacctgatcgccgaggcggcccgctccttcgacgacatggagtccgtacagcgcaccctggagggcctggccgccgccgacgacgccacccgcgccttcctcacgagctactccacctacctgcgggtccacgcccgcgccgccgcggaccggctcaccgcccgccgcgcc

SEQ ID NO: 50191 - DNA, 1482 bp, Erysipelotrichaceae bacterium 2_2_44A
atggaactatatgataagcttttaaaaccgataaccgaggtgaattatctcagagccgagaatgtggaccgttaccgcattatcattcgctatttttatcaggagcatgaaaaaatacattactggatgtttaaagaggatatttatgacatgatatccgcattaccaggatatgaagactataccatggagaactgtcagaatgatttgcaggcactgtgcgactgggggaacctcgttgctacacaggatacctccgttcccaataccttacaggaatttaaaaataagaaatttcgctatcagctaagtgaatataccgttgtaattgaacgaatgacaatagagctggagcatcttgctgtggaaggggcatccttggaaccgacgctgctggagcggattcgtaaacagattctgcagctgcttgctgtaagggataaatcccatatggaggtcgctgactggtggcgaagtctgaacgatgatttcattcgtttgaatcagaactatcaggattacataaagacattaaacagtgccaaagcagaacaaatgatgaagtcaagagaatttctggtattcaaagataagctgatcacctatcttcagacatttgtaaaaagcctgcaggagcacggtatgatcatcgaggattatttgagcggtgtaaaggatgaagatatggcgctgattttcgataaggtcgcagaatatgaactatcgattccccgcatcaattcccatatcacaaagactgccgtactggaaaattgtcagggacggtggcagagtcttttcaactggtttgtcggagaaaatgataacaatgaggtaaaccgcctgtttgaaattaccaatgaaatcatacggaaaattacacggtatgcactgcagatcggtgagctgcacaatcagggggcaaaccgtaaggaggaataccggcgtatagcggaaatattcgcaaaatgcaattctatggatgaagcgcatcgcttaagtgcactggtgtttggggcagatacctgtatgcatttgaaaaacatcgcaccaagggatacggaaagcattcacagcggggtgtatcaggaagcttctgccttccttgcactggagccgcgtacaaaggtggcaagaaaaaagcatgagcgaaagcctgcggtggattacgcgctggaccggcgaatacagcgtctggagtatgaggcacagcgcgaggctgaacagaagaagataaaggaattgagtaaaaatggagaaatcatcttttctcagctacccttacttgacaaggccaccagaaaagcccttcttagctgggtatccaaggcacttgctgcaagtgagcggcgagccaaaacagatcaggggcagtattatcacatagagaaagagcgcgaaggggattgcgtgctgcaatgtgaggatggaaatctgataatgccatgcttcaaaatcctgtttgatgaggaattatcatga

SEQ ID NO: 50192 - DNA, 1131 bp, Erysipelotrichaceae bacterium 2_2_44A
atgaaaattatagaagaactgatgaatcatcgctggattctgaaaagtcaggatccgcagctgtattatgaaataaaggataatgcgaaggaattgaagaagaagctgcaggagaaattcggctatgcactcatcatcaatccatatcttgtaaagctggaaaaaatcccaggcaaagcggaaggctggatggggattactgaatttgaaacgctgatggaataccagatgttctgttatctgctcatgcttctggaagacaaggaagcaggggaacgctttatcctgagtaatatctgtgaatttattcaggtgcagtttccaaaaggcgagctggaatggacaagtctgcgagcaagaagacagcttgtgcgggtactgcaatatgctcttaaaatggggatgatcatttcccgtgagggtgatgaggattactttctaaaggatgaaaccagtgatatattatatgaaaacaccggggtatcacgctatttcatacgcaacatacccaaagatattatggattttcatgaaccggaggactttttacagagtgagtggtttgatatggaagaggatcgcggtattgtccgccggcagcgtatttatcgtagactcatgctttcctgcggtgtctatcatacagcaggagaggataaggatgatgatttcggctatattcgtaattaccgcagaaatatagaaaatgattttcagagtctgtttccctgtcagctgcatgtgcattcctccagcgcctttctggttctggaagaagactgctctatggggaaagtctttccaaagacgcatgcctattatgatttgctgttgattgtccatgacgatctgcgcaaacgggtaaagactttccgtctttctctggatcagcatgagggtatcacactgcggctggaagaatatcttgccatcgttcagcgtctgatcaagaaaaacaatgcgttactgccaaagaaatatcagattgaaaatcgcagagtggaagacagtgcagtggatgtatgcaatcttgcacagaccttgggctttgcacaggtacagcaggagaatatttatatctatccgattgccggaaaaataacaggaacatatgcggaggtaacagaatga

SEQ ID NO: 50193 - DNA, 1281 bp, Erysipelotrichaceae bacterium 2_2_44A
atgagtgaactaattagcaaatggcacatgcaccggctggggctggttgatttctggtattatgtaaacgaggaatttccctttaaagatggtcacatgctgctcagaggaagcaacggttccggtaaatctgtcacaatgcaaagctttataccactgctgctggatggaaataaaagcagtgagcgtctggatccttttggtacacgctcccgtaaaatagaaaactatctattggaggagggcggtgaacgaacagatcgcatcggctatctgtatctggaatttaaacgctcggacagtgaggtttacaaaaccatagggatgggtctgcacgcgaaacaggggcgaccgcttgtatcctggtattttgtaattgaggataatctgagaatcaacagggatgtgcagctgctggatcataacctggcaattacaaagccggtgttgaaaaaccgtatcggcgacacgcaggtcatggattcgcaaaaagaatatatggacagagtgaatcaggcactgtttggctttgaaaccagcgaggaatataaggaagctattacattgctgctgcagctgcgctcacctaagctgagcaattccttgaaaccaaccatgatcaatgaaatcctgagtgaatccttgcagccgttgagcgaggatgatcttcgtccaatgagtgaagcaatatccaatatggataatatcaaggatcagctggatgccttaaagcaaagctatgcttctgcaaaggcggtttatcaggtgtttgagcagtacagtcatgccgtattgtttgaaaaatatcatatctaccagactgtcaggcagacggccgtaaaactacacgaagcttatcaaaaacatgaggaggaattgcagcagcatcaacaggaaacaaaacagaagcaggaaaaccgtacgcagcttgcacaggaacagggactgttaacagaagaaaaactttctctggcaacagacgatctgcagcggctggtggaggattgcacaagactgactgctgagaaagaagataatttacagaagcttcagcataaggaaaaccaggaagaggaaaaaagtaatcgtcttcaggaacttagagtacagcataagacacagaatgatcgatgtgagcaagccttatctgaaatgaaggatgcctttgcccagctggatgaactgcaggaggagctgctgctggaggatcatctcctgttaaaagaggagctctttgagcacccggacactccatatgattttacatatatcggaaagtga

SEQ ID NO: 50194 - DNA, 1545 bp, Thioalkalivibrio paradoxus ARh 1
atgtcctacagcaccttcagtcacctggtcgccgacaaagccgcgttgtaccggcgcatcatggccgcctttgtcgacgccaaggcgcacttcaccgtgcacctgcgcccggaagacgtgcgcgagcgcaccggcatcgacacgctcgaggacgtgcaggcggcgctggcacaactggtcgcctggggcaacctggaggccgacccggacacctcgcgcgtgaccagcgtcgaggagttctaccgtgcccgcttcctctaccaactcacgcgcgccggcgaggcggccgagcaggcgctgcaggtgttcgaccgcgagctgggccgccgcggcgcgctgcaggcggtcgcgctcgacgacatccgcctgcgcctgcaatcgctgctcgaactctcgaggcaggcgcatcccgacgcgacccagacgcagttactgctgcgcgacctgacccacgtattctcggacctcgccgaaaacgcccgcgccttcatgagtgggctgtcgcgaaccctggaactgcgcggcgacgaccagcaggcgctgatcgcgtacaaggagcgcctgatcggatacatcgagcgcttcatcggcgacctggtgaccagttccgccgaaatcgccggcaccatccgcgcactcgaccgcgacgacgacggtcgccgcccgatcaccccgctgctgcggctggcggtcgaacgcgaactcgacgacctcgcccccgacctggccgatccgctcgacatcgacgcggcccgggacgcagagcgccggcgcgtgaacgcgcactgggaaggccactgggaaggactgaaggcatggttcctggaccggcccgagcgacgctctcaggccagcctgctgcgtgcccaggcccggcgctcgatctcgcagatgctcgaggccgtgcagcggctgaacgaacgccggctcggtcgcagcgaccgctccgccgacttccgcgcgctggcgcgctggttcctcgaatgcgagaacgacgaccaggcgcaccggctctggcgggccgcgttcggcctcggcccggcgcggcacctgggcgtcgatgcggaaacgctggcccagtggcgcgccgacccggtcccggcgagccagccctggcgcgatgccccgccgctgcggatcagcccccggctgcgcgcgaccggcagctaccagaagcgcggtgcgatgccccggctgcagcggcgcgaccgcgagcgggcgtttctcgcccagcagatgtcccgcgaggccgccgaaacgcgcgcagcccgggccgcgctcgcaaccggcgagatgctgcgcctgtccgaactcgaccggctcgaccccggcgcgttctccctgctgctgcaactgctcggcgacgcgctgagccacgccgcgcaccccgaccatgcggtcgccgcgaccaccggcgacggcagcctgcgcatcgagatggagcctctgggggccgacaccgaggcggcgatccgcaccgaagcgggtacgctgtcgggccgcgattaccggattcggatcaccgaactcgaggcggcgccctga

SEQ ID NO: 50195 - DNA, 1233 bp, Thioalkalivibrio paradoxus ARh 1
ctgcccgatgtgctcgaacgcgcccgagccgaagagcgccagcgggcattgcgtgcgttgctgatgcagccactgatggacgcccgccatccggcgttcgcgctggtgcgccggcaccaggcgccgctgcgcgaatggctcgccgccgaaaccggctggcacctgcaggtcgagtccgagttcgcccgcctgtacaagaggcccgcggagctgcgcgacgcgacccgcggtgcggccctcggcagcggaacccagaccacgccgttcagccgccggcgttacgcgctcctgtgcctgatcctggccgatctcgaacgcggcgatcagcagatcacgctggcgcgcctgggcaccggcctgattcaggccgccgccgacccggcgctggaagccgccggcctgcgttttcggctggaccatcaggacgagcgccgcgacctggtcgcgacggtgcgcctgttgctggactacggcgtactggcccgcgtcgccggcgacgaggaggccttcgtgcgcgaccagaccggcagcgacgcgctctacgacatcaaccgccgcatgctggccgcgctgctggtcagcgtgcgcggcccctcgctggtcgagatggaggggccgacgagcgatctcgaaaagcgcctgcaggccctgaccgaatcctttgtgccggacacccaggaagggcgcaaccgcgcgctgcgccacgcactgaccgcgcgcctgctcgacgacccggtggtgtactgggacgaactgccggacgacgcccgccagtacctcaccagccagcgcgcggcgatcacccggcgcatcgccgacgccaccgacctggtcccggaaattcgtgccgagggcgtcgcgatggtcgacccggcccagaacctgagcgaccagtcgctgcccagcgaggggaccgaaggccacgtaacgctgctgatcgcggcccatctggcggaggcgccggagggcagccgttttacgctcgacgcgctcgccgagcgggtcgcccgctggcgcccgcaataccgcggctactggcgccgctcggcactcgccgccggctccgagcgggcactggctcggcaggcggtcgaacagctccgccgtctgcgcctggtcgcgctcggagccgacgagcagatccaccccctgcccgcactcgcccgcttcgcggtcgagcccgcgcgcagcccgcagggcaagcccctcgccgaggccgccgatgcaagctga

SEQ ID NO: 50196 - DNA, 4128 bp, Thioalkalivibrio paradoxus ARh 1
atgagcgatctcccgcaaccgggcaagacgcgctggcaaccactgcgcgcggggctgatcgaactcttctactacgaccacgaggagttccgcttccacgacgggcgcctgttgctgcgcggcaacaacggcaccggcaagtccaaggtgatggcgctgacgctgccgttcctgctcgacggccgactgagcccctcccgggtcgaacccgacggcgacggcagcaagcgcatggagtggaacctgctgatgggcgaaaccggcgagcgccagggctacgcctggatcgagttcggccgccagggcgacaacggccccgagttcctgaccctcggctgcggtctgaaggcggtcgcccagcgcggcgtgcgttcctggttcttcatcacgccgcagcgtgtcggcgactcgctgttcctggtcgaggatggccgcacgctcagtcgggaccggctgatccaggcgctcggatccagcggccgcccctacgaccaggccaccgcctaccgctcggcggtcgaccagcagttgtttcaactcggcaccgagcgctacgaagcgctgctcgacctcttgctgcagctgcgccaaccgcaactgtccaagcgcccggacgagtcgcggctgtcgaacgcgctgaccgaagcgctgccgcctctggactccgcggtgatcgccgacgtcgccgaggcctaccgcaacctggaggccgaggcggacgaaacccgcgggctggaagaagcccatcacgcagtcaccgaattcctgcaccactaccgccgctacgccggcatcgcggcccggcgccgcgccggcgaagtgcgccgccgccatcgcgagtacgaggacacgcgcgcccgggtcggccaccagcgcaagaccctggacgcagcccgggagcgcgacgaagcgctggaggaacgcgaaacgcggaacgaacgcgcggtgcaggaagccgagcaacaacgccagacattgcgcgacagcccggcgatgcgttccgcccaggccctgcacgcggccgaggacaccgcccgcgagcgccgcgcgttcgcccagtcgcgggccacgctgcaggcacagaccgaacagacccgccagcggctcgaacaacaggcgcaggagcaggaagccgcggcggcggaaacggcgcacgaagccgcgaccacgctgcaggggctggccaccgcggcagaggtcggcggcatcgccgagccgcatggcgccgcactcgcccggctcggcctgccggattcccgcgacgtgccgctggatcaggtcgagcggcaattgcagaacctgcacgaccggcgccgggactcgatccggctgctacagcagcacaaccgcgaactcgccgacgccgaacggcgcgtcgactcggcccgcgagcactggcagcaccaggtcgacgaacacgaccgcctgaccctgcggcaccaggacgcccgctcggccgccgaagctgcggccgagcgcctgctcgacgcctggcgcgactgcctcgccggcctgcgcgaactgcgcctcgacgacaccgaagagacgctcgccgatctcgccgcctggctgcgcggcctcgagggcgcgaatcccgcccagcagcaactggaagcgcgccgtgaccagcgcgttcgcgagatcgccgccgagcgcagccggcatcagcacgacacgatgcagcaggcgctggacgcactggaggccgaacgcctgcaccttgaaaccggcgccgagatcgcgccgcccgtgccgcatgtgcgcgacgacgcgctgcgcatatcccgggccggcgcgccgctctggaagctcgtcgatttccacgccgaagtgcccgacgagacccgcgccgggatcgaggccgcgctggaatccgccggcctgctggacgcctggatcctgcccgatggccagttgctcgatccctacacctgggacacctggctcgccgccgacctccccatcccggagcaatccctcgaccgcatcctgcaccccgcggtcgactggcaggatccggcgcaacagccggtcggggctgccgaggtcgcggcgattctcgcccggatcggcctcggcgagcagcccgatcaggcgcactggatcggcgaggacgggcgctggcggctcggaccggcgcgcggcgcctggggcaagggcgaagcgcagtacatcggccacgccgcccgcgaagcggcacgccaggcgcggctccggcagatcgccagcgaagcgcaggcctgtcgcgacgcgatcgacgccgcaatgcaagcgctgcaacgcctggaccagcgcgagcgccggctccgcgaggaatggcggacacagcccgaggacggcccgctgcgcaccgcctatgccgaggaagcctctgcgctgcgcacgctggagagccagaccgaacgcaccgaggcagcgcgcagggcgctcgaggcgcgcagccacgaagccgccgagcagcgccagcagcgcgacgaactggccgccgacctggcgcttccgagcgccgacgagccactcgccgcggtagcccgggcggtcgaaacctatggcgcgggcattcgcgaactgacccgggcgctgcgcgaccagcgccgggaacaactccggctcgaacgcatgctgcaggacctggaacaagcccgggccgaagcgcaacaggccaccgccgacgccgccaccgccgagagcaacgcccgcaatgcggaaacccagcgcgatacgctgcgcgagaccatcggcgccgatgtcgcggaactcgagcagcggctcgccgaggtcgaacggcgccaggccgcgttgaagtcggaacgccagtcactcggccaggagcgcactcggatcgcccgcgagatcggccgcctcgaggccgacatctcgaacggcgagcagcaactggtggcgatcggcgaccaacgcgcggtggcaatcacgcgcctgcgcgaactcgccgatgccgggctggtgccaatggccaccgccgaccgggtaaccgtcgacccggaactgtcgtgggcgccggaaccggcggtgctgctcagccggcgcatggaacaggcactggccgaggtcgacgaaagcgacaccgcatggcaacgccaccaaaagggcctgcaccagcatttcgcggtgctccagggcgcgctcggccgtcacggccacgatgcgcacatcgagcaacaggacgacctgctgctggtgcgcatcatcttccagggccgccaccacggcccggacgcgctcgccgcgcaactggcacgcgagatcgaacgccgccgcgagctgctgaccgcgcgcgagcgcgaactggtcgagaactacctgctcgacgaagtcgcgagccatctgcagctgcggctgatggaaaccgaacggcaggtccggcagatcaacgacgaactcgccgaacgcccgaccagcaccggcatgcgcctgcgcatccagtggcaaccgctcgccgaaggccagcaggccgcgggcctgaccgcaccggccgggctcgacatcacccgcaaccggctgctgcgccagagcatggacgcctggtccgccgacgaccgacgcgcagtgggcgagttcatccagggccggatccgcgaggcacgcgaaaccgatagcgccggcgccctcacggacgtgctggaacgcgcgctggactatcggcactggcatcgcttcgtcgtcgaacgctggcagaacggccgctggcgacccgcctacggcccggcctccggtggcgaacgcgcgctggtgatcaccctgcccctgtttgccgccgccgccagccattacgagagcgcccagcctgccgccccgcggctgatcatgctcgacgaggtctttgccggcgtcgacgacgacgcgcgcgccaagagcatgggcctgctcgcgcagttcgatctcgacgcgatgatgacctccgaacgcgagtggggctgctaccccgaggtgcccgggcttgcgatcgcgcaactgatccggcgcgagggcatcgacgcggtctacgtttcgcgctggcgctgggacggcgcccaccggatccgcgaatccgacccgcagacgccgatggaagccaccgccggaccggagaaggccgcggaggggcccgccaccgaggagctgttttga

SEQ ID NO: 50197 - DNA, 1263 bp, Thioalkalivibrio paradoxus ARh 1
ttgagcctcgaccgcgagcgcctgcagcggctcctgggcggccctggtaccgaacgcctccgccggcgtctgcgcgaacgcctcgggcgcggcggcggcgacacgctgacgctcacccgcagcaccccggaagaacgcgcggcggtcgagcggctgctcggccgtgcgccacgcagcggcagcagcctgcgcgtgtcgctgccggaaatcgacgcgacgctggcacgcgccggaatcgcgcccggcctgcgcgcggcgctggaggcgctcgacggcccgatccgcgaccagcaggcggaacagcaggccgaaacccggcgctggcaggcactgttcgaagcggtgcgcgagcgcgccgcgcctctcgggctggaagcctggctcgacgaactcgcggcgcgcggactgctgaagcggctggcgcgacgggatccggcgcgcgccgccgcgctgctcgaccagagtctcacggtactcgaagcgctccccgatccgggcctgaaccgcagtaccctcgccgcccgctgtctcggcgacgcgcatggtctcgacccgggccagcccgccgccgcactggtacgccgggcgctgcaccgccactggcgcggcggcatcggcgacgaccggcccgacgagcgcacgatctgggcgcatgccggcatcctggtcggcggcgacatcaccagcaccgtgctggtctaccaactgccggtgcagggcgacacccccggctcgcggatgctgcggattcagaatcaggtcggcgagccggcctacctcacgctgcgccagctgctgcggcacccgccgcgctgggattgcgcggaccgcgacgtgttcgtctgcgagaaccccaccgtggtcgcggaagcggcggaacgcctgggcaccgaatgcgccccgctgatcagcaccggcggccgacccggtgccgcggtgtggctgctgctggaacaattgcgcgacgccggcgcgcgcctgcagtaccgcgccgatttcgactgggcgggattgtcgatcatgaacagtgtgctcgcgcgcttcgaggcgcgcccctggcgcatggatgccgcgacgctgcagcgccacgcggaggttcccggcccgcccctggaggggccggccgcggccgctccgtgggaccccgacctcgcccccacgctcgccgcccgcggcaccgcactccacgaggagcggctcctggacgagctgctggcagacctttctcgatctccggcgaacgcctgcgcagtatccccctga

SEQ ID NO: 50198 - DNA, 1539 bp, Thermobacillus composti KWC4
atggatctgccgctgtccggccgcttgacgcgcaacatccccgaactcaagtatgtcaacgcggacaacgtcgcccgttaccgcgtgatcatgcgatttttctacgaggaatacaagcgtctgcgctactggatgaagcccgaggacgtgtacaacggggtcatgcggtggggcgcgctgcccgattacacgctggagcagtgcatggccgatctcgcgcagctcgaggagtggggcaacctcgcttcccggcacgacgcggggcgcgccacaacgcttgaagagtacatgcgcaagaagctgcaatatctgctcacgccgtattcaatcgagatcgagcggctgctggaatcgctcgagaaagtgacgggatacggcggctcgctggagccgacgctgttcgactcgattgcggagaaacttttcgccatccggcggatggactgggacaaggagccgggagccgcgcttgaactgtggacgtcgctccatgacgcgttcaagcgactgcacgagaacgcggccgactacatcgcgagcatgcagacggccaaggccgaggaaatgatggtaaccgaatcgttcctcgtctacaaggaccggctcacccattacctgcagaatttcgttcaggcgctgcagcggagcgcctacaagatcgaaggcaatctcgagcagatatcggccaatctgcgcgacatgttcctggagcgtgtcgccgacgaagaactggacaggccccggcttgaggacgtgccggacaaggcgtcgatggtcggcgagttgcggcagggctggagcaatctggaccgatggttccgcggagacgggcgcgccccgtccgagctggcgctgctcgagcgggcgacgaaggacacgatcgcgcgcgtcgtgcgcagcgtcatccgcctgcaagaaagaaaacgctccggcgtcagccgcaagaaggaactggaacatctcgccggctggttcgcgcggatggagcggctggaggacgcgcacaggttggccgggctcgtgttcggcttgtttcggacacgccatctgcaaggtgaagatttgcggttgaccgaccgggccgaccagtcgatgtgggacgaggagccgacggtacgcgccttgcgctcccgcagccggaagcgcatcgggcggcaggagacggagccggtgcccgagcatgccgaacggaagcggcgcgagcgggaggcgtaccggcggcgccaggcggaggaatgggcggtcatgcaggatctgctgcggcgtggaaagctcgtcgtatccgaactcggcgtcgtgccgtccgccgtgcgcttgcggctcttgcactggatcggaagatgcaacgcgtcgcctcggcattcgttcatgacgccggaaggcgtcgtcatcgccatgacgaatccccggacggcgcggcggaccatcctccgatcggaagacggcgacctggagctgccggattacgagttcgtcttcgcgatggaagacgcggcccggatggcggccgcggcggcggaaggaggacggggcgaatga

SEQ ID NO: 50199 - DNA, 1242 bp, Thermobacillus composti KWC4
atgagcggcggcaacgcgggcatgagcgcgatcgcgcgggcgaagcgggcggcccgcacggaggcggcttcggcgcaggcgctggagcgcaagcgggaatgcgtccacgcgctgctgaaccggccatggatcctgaaggaagacgatccggacctctacttcgcgatccgggatgactacgaggagctgcgggactggttcatggatcaggcgggtcttcccctcatcgtcacgcgcagtctcgccaagctggaaaagacgccggccataccgcacccgtggatggggttcgaggagttccgcgaggtcagcgactacgtttttttcacctatgtgctgtggtatctggaagacaagaccgagatggaccagtttcttctgtcggagctggtggaagaagtgcgcgaacagatgaacgcggcgggcctggaagcggactggaagatctatcatcaccggatgtcgatggcccgggcgctgcgcaagctgacgtcgctcggcgtgctgatcgcggtcgacggggacgaaagcggctgggcgcagagcgaggaacggaacgcgctctacgaatgttcgtcccatgcccgctatgtgctccgccggttcccgcaggatctgacgatgtacgtccggatggaggaactgacggatccgatccgatacgcggacacgccggacggcgagaacatgcgccggcgccatcgcgtctaccggcggttcttgatggagccggccgtgcttgaccgggattgggaagcggatttgctgccctatgtgctgacgcagcgcaggtcgatcatggaccatctgcagcggatgctcggatgggaaggccgaagataccgcgagggacttctgttcttccatcccgaactgacgagcgaggcggagctgttcccgacgctggccggtgtgtcggatctcgtcctgctgctggccggtgagctgcgccgccgtctcggcatggaagacggcggcttgcggccggaaccggacggaacgatcctgctcgaacggtcggagctggaagggatgcttctgcgcctgcaggaacagcatcagacttattggagcaaggaataccgcggaatgtcctcggcccagctggcggaggaatgcacccgccacatggcggagtggcggctgggcgagtgggaggacgggcaccgcttcagaatctttcctgtgctgtcgcgctggagcggggaatacgacatcgcgggcacggatgacgaaccatag

SEQ ID NO: 50200 - DNA, 4131 bp, Thermobacillus composti KWC4
atgacggtctatacggggaacgcggacggcagatggcggatggggcgcgtcggcatcctcaatttttggcattacgatgaagaagtgttcgaactggaggatggacggctcattctgcgtggggcgaacggatcgggcaagtcggtgacgatgcaaagttttctcccgctcgtcctcgacggcgacaagcgtccgcaccgcctcgatccgttcggttcgcgcgaccggcgcatcgagtattatctgctcggcgagccggacagcggcaagacggacgtcacgggctatttgtggatggaattcgtccatcccgcgagggggctgacgaagacgatcggcatcggtcttcgcgcgcggcggggagcggcccaggtgcagttctggggatttctgctcgacgacgggcggaggatcgggatcgatttctggctgtacgatcggaatcactggctcgaacaccatacccggattccgctcggccggcaggagctggagaaggcgatcggcgccggtggccaggtggtgcacgatcaggcgtcctatcgcgatctggtgaatcggcagttgttcggtttcgcggacgcggagagctatcaggatcttctgcatctgatgatccagctgcgcagcccgaagctgtcgaaggaattcaagccgtcggcgatctatgacattctgcacagcgcgctcccgccgctgcaggaggatgagctcaggccgctctccgaagtgctggaggacatggatcagatagccgaccggctggacgagctgcgtctccatatgcgggaactcggcaggctgcaggagacgtacgagcgctacaaccggcggacgctgtacgacgaatcggcgcggttgctggaggcgagcgcggaacatcgcgggcaggagacgcggcttcgcgagagcgaggcgaacctgaagcaggcggaagaggacaaacgggccgcgatggcggacatttcgcgtctggaagcggcgatcgggcaggccgagagcgagctggacgtgctggagaaccacgaggcgatcggcaagcagcgggagctggaagcggcggcggccgcgctcacggatgcggagaaacatctggaactggcgcatgaacgattgcgcaggaaccgcgaccgtcttctggcggtcgaacgcgaccttgaggaagccgaactgcatagcggccggttgcgcgcggaacaacaggagttgttgaaagagctcgaatcaatcgcgcaagagatcgaattcgccgatcacgcggtccatcatcggctgtgggagcgcggcgaacccgcggatgatgtgtggagggaaccttggcggcgcgatctgaagcggcacagggaacggttggaaatggcgcttgcgaaggcgcgcgaggagcaggccgccgcccgggcggtgcgggagttggaagcggacctgggcgaagcgcgcaagggaagggacgaacgggagcgggagcgcaatgaatgcgcgcgggcgcttgaagaaggcaaggacgcgctgcgcgaaacaatcgtcatgtggcgcgatgcgctcgtcgaattgccgttcggcgaggatcgggtccgcgagacgttcgaggcggtgtcggcgttcggcgtgaacacccggtccgccgaagcgatccgcgcgccgatgcgggaagcgctggccgcaagacgggaacaactggccgccgagcggctgcggctggagcatgaacggcggatgctggagttggagcgggagcggctcgcggaggagaagcggacatgggaagcggagcgcgagcccgagccgccccggggcgatgcgcgcgcgcgccggcgcgagcgctgcgcgcccggaagcggtgcgccgctgtacgccgcttgcgatttccgcgcggatgtggacgatgcgcggcgggcgcggatcgaggaagcgctggagcgcgcggggctgctggacgcctggatttcgccggacggacggatcggcgcggcgggcgacgatgaagaggaggcctggattgttccgcagccgatcgagttcggttacacgctggccgatgtgctcgttccgtcgcccccggcggaatccggactctcaaatgagacgattgacgcggtattgcggacggtgctgtgggtcgatgacggaggggcgtacggacttgacgcgcagggggccgccctgtcgggcgccggagcctggcggatcggtccgctcgccggccagacggccggcaaggcgcgcgccgagtatatcggcaaggagacgcggcgccggactcggctgctggagatcgcgcgcctgcagcgggaactggaggcgctggccgaacggatcgccgatctcgaccgcgggctggccgacctgtccgccagagagcggcaggtgattgaggagagcggcggtttcccggacacggccaatcttgagcagcggctgcaggacctgaacgatgcggcttccaggttggaggccgcactcggtcaggagcatcgcgcgctcgagcggttcaaggcgaagtcggccgaatggcgcgaactgcagcgggagttgaccgaactgacacaatcctggtcgcggctgaagcgggaacgggacctcgaagaggcgctggccgcggcgagggactatgaggcggcgctctcggacctgcattccgcctggcggcggcaggccgatctggagcggcggacagacgacttgcgtcatgcgcggcaagccgcggaagacgcgatcggacaggacgaacagctgacggatgaactggaggatcgccgccgcgtgctgcgcgcccaggtggacgcattgcgcaggctgatggatgatctcgggctggccgatatttcccgccgcatcgagacgttgaagcgggagcgggagcggctgctgctggaacggaaggcggcgtccgcgaggctggcggatgccaccgaggcggcgggcaaggcggcagcaagcgtggaactggtgcgggagcgggaagccgagtgccggcggctgctggaagacgctctggagcgctggcggcgcgagatcggcaggcggcttctggacgaatggcgggacgcggcggccgaagccgcatccgcgggcgcggaacgggcggcagagctggcccatgcgatccggcagcgctacgacgcggcgttctccggccggaacgcggacacggtcaagaacacgctgttggagcagttcaatgaagtgcggagcgttctgaccgactacgtgctcgagctggacatcgaggaagacacaggacggatcgtgctggcctcgaaaagggaccgcgcgcatccgcagccgccttcgttgctgctcgaggaactgaagcgtgacgaggaacagcagagcgcgctgctcagcgagaaggaccgcgaattgtacgaggagatcatcttgcgcagcgtcggcaaggcgatccgccagcgcatccaccgcgcggaaagctgggtggaccgcatgaaccgtctcatggaagagcgcaacacgtcgagcggcctgcggctgaagctggaatggcgggagaaggcggcggcgaacgaacagcagctggacacggcggtgctcgtcgagctgctcaagcgggacgcccaccggctgcgcgaagacgagattgacgccatgatccggcatttccgctcgcagatcggctacgcgaagcagaacgccctgagcgagaaggagtcgctgcgcaagcatctgtacgaggtgcttgactaccgcaactggttccagttcgagctgaagtatcgcaaaggggaacagaccgggtaccggccgctcaccgattcgcgcttcaatgtgctgagcggcggcgagaaggcgatggcgatgtacattccgctgttcgccgcggcctggtcgaggtattccgacgcccgtcccgacgcgccgcggatcatctcgctcgacgaggcgttcgccggggtcgacgaagagaacatgcgcgacatgtttcaactgctcaccgaaatgggcttcgactacatgatgacatcgcaggtgttgtggggctgttacgacacggtgccccggctggccatctatgaaatccaccgcccaaaggacgccgatttcatcacgctgttccgctaccggtggaacgggcgcgtcagggaatatgtgccggacgaggcggatgcgtcatga

SEQ ID NO: 50201 - DNA, 1383 bp, Thermobacillus composti KWC4
atgaggacggacgagcagcggggcgatggtccgcggagggcggcccaatattttggccggccagccttccggcgcatgctggccgctgtctggaggaagtatgcatcgctcgggcggatcggcggcaaggcggtcgtgccggatctgtcgccggacgaatgcgaggcgatcggcgagttcttcggctggaacttaaggcccggggacacggccgagatcccgctcaccctgttcgaaacggagctgcgcgactcggcgttcgcgatcggcatcctggatttgcatcaggtgctggaaggccggccgctgctggccaagagcgagcaacggtcgctgcgggacgaagcatggcggcggtttctgctggcggcccgggaatccgcgggagcggtggtatcttcggttgccgccgaatggctgtcccggttggaacagggttgcggggccggactgcccgcgctgcgggaactgtacaaggccgatccggaagaggccctgtcgtcgcttcgggttgtcgtgcgcgtgctggacttcctgttcgcgggtgcgggtcggccgatccggctcccggtgttggctgcccggatcagcggcgatgcccacgcgctggatgccggacatcccgccggccggatgctgctggcggtgctcagggaactggcggatatggaggacggcgtcgcctcgacgggcggcggcgatgccgcctccgagttgggtgccggagattcgcgggaagaggaagacggttccgggacgttgaagctgcgggaactgtaccgccgatttggcatcctggatgacgacctgtcttctatcgttcactggtatgtcccggttccggacgagccggcgatgccgcgggtgtggacgttgcggcaggtggaggcggccgaacggattccgcgttgttcttcgctctatgtcgtcgagaatcccgccgtattttcaacgattgtggatgcggccggaccggtggtgatggacggcgatcctcccgcgctgatctgcacgagcggaccggccagcgcggcggcgatccgctggatgcagcgagtgctggagcattcgggtgatggctgcaagctgtattattccggtgatttcgacatcaagggattgtccatggcccggacattggccggtctgtttccggagcggtttgcgccatggcggtttgacagcgagtcttatctgacggcgatccggtctttgccgggcccggcgttcgacggaggcgaactttcaaggctggcgaatatggtggtggaatgggatcgctcattgtgcgccgtgatgcgggaagcggggcggaaggttcatcaggaagcgcttgtggaagatttggtcagcgatttctgtgagacaggcgggtttgcgtga

SEQ ID NO: 50202 - DNA, 1542 bp, Saccharomonospora azurea NA-128
atggagcggatccccccggaattgttccggttcagcgtcggcgagaacgccgacacctacacagcgattctgcgcgcattcgcggaggccaacgaacggctggagacctcgctgagcctcgacgaagtgcaacagcggttgcgcacggtgggctggttcggcgccctgaccaacgacgacctcgctcgcgatttacagaagctgcgggactggcaactcgtcgacgtcatccagaaccacgcggagaactaccgtacagccgaggaatacgagcgccgtaacctgcagtactccctcaccaaacgtggtgaggctgccttcgccggtgtccagcacgcgttaaccgtgctggcctccaccggggcgttgcaaacagccgtgctggatgccattgccgaccgactggcagagctgcacaagctactcacggacgctgcggcgagtgatcggaagatattcaccacgctcaccgagctggagaaccacctggacgccctgcgcaccaacacgaagcagttcaacagcgagctgcaacggctgctgcgggcggaaagcgccgacctcacgaccttccgcgaggtcaagaccgccacagtggcttatctggaggagttcctgaccaatttggagcggcgagcacaggcgatcgcggatggtataggccacctcgagaaacacggtctgaacaccctgcacgagcgcgcactgacaggggccgacctgcccccatcacccgggaatgaggtccgagcaagctggctggcactccgacgcagccgttgggccggcctgcgtgcatggttcctgcccgaggacgacacacccccgcgagtggagcagctccatgtggtcgcgcgacgggctatcgtgaccctgctgcaggtactcgaccggatcgcggaatcgcgccaccgggccggcagtgcggtcgctgatttccgggaactggcccgttggttcaccctggcgccgacggagaacgacctgcatcggctgttctcagcggcgttcgggctcggctccgcccgccacgcacacctggcccaaccagatccggagctcgtcagttcgtcgacctcctggcacgagggcccaccggttccggtatcacctctgctgcgaaccgcaggccggactgaaaaggtcgcccgcaccggcagggtacgcgatgtcgccgcgctcaaacgcgagagagcagaacgcgcccgcgctcaacggatgcagctgcgccgcgcctggcgacaactcgccacaggagggccggttaggctctccaccttcgccgagctcgaccacgatacgttcgaacggctgctcgacctgctcggccgggcactggccacgcgaccggacacctccggtgcgcgccgcgctgctaccaccgacggcagggtggagatcgtgctgcgtccgccgcacgacggagcacgagcctcgctccgcacacctcgaggtgtgttcaccgggcccgactacctcgtcgacgtcagtacctccgtcgccgacgacagcgacgacaccgtggaggaagcgacggcatga

SEQ ID NO: 50203 - DNA, 1227 bp, Saccharomonospora azurea NA-128
atgagcaatcttgccaaccagcttgtcatctcagagaaacaggatgtcgcgagaggagtccggttgctgctggcgacaccgctgatcagcgtgagaacagcaccggacgcattcgatctggtccgcagacgacatggtcccatcgcgaagtggttcgactacacgtgcggatggcgactggtggtggaaccgaggttcggttatgcccgccttgccaaggtgaccagcgagcacgatcacacccggcctgcacgccgctcacggtccggccgagtcccattcgaccgcagacggtacacgttgctgtgtgtgatcgcggccgaactactgtccgggcccgtcacgacaatcgggttgctcgccgatcgcgtgaagtacgcgactgccaccgatccggtgttggaaacctttgacaccgcggcgcggtccgaacgcatggcctatgtcgacgcactccggctattggagtcctatggcgtgctcgacactgtcgatggcagtacggatacgttcgtggattcccgtgaggccaaggtgctctaccgggtcgacaccacgttgctactgcggttgttgtccgcaccgagaggtccttcacagcttgccccctcgccggacgaggtcgtgcagcgctgggcggagctgctcacggggttgactcgggaaacccgttacggtgacggggaaatgtcggcctccgatgtgcaacgcaatctatggttacggcactcgatctgtcggagattgttcgacgagccagttctctaccggtgtgaactcagtgaggaacagagccactatctggcctctctcaccgggcggcaggtggtgcaacgcgcagccgagcaggcggggttcgtgctggaggagcgtgccgagggttatctgctcgtcgatcctgacgcgatcgcgacggaccgcaagttccccgacgactcgggcacggcaaacgtcgcgggtctgctgctcctcgacacactcgtcagcgctcccctaggtctgaccgtggagcagcttcacgccgaggcggcaaggttgctgacccggttcccgcggtgggcaaaaacgtaccgaggtgaggacggcaccgaacgactcgtgcacgacgcgctcgacgtgctggcatcgttccggctcgttgagcacaccggaagccaggtacgtgcgctgcctgcagccgcgcgctattccgtcaccgagatccgaaccagcaaggagagctcgtga

SEQ ID NO: 50204 - DNA, 4016 bp, Saccharomonospora azurea NA-128
gtgaccatcgccgaactgcccaccaaagccgccgcggaagccggtcgctggcagcccacgcgagccggcatcctcaatgtctggcgctactacgacgaggtattcgaattccacaacggtcggctgctgttacgggggccgaacggcagcggcaaatcgaaggtgctcgaactgttgttgccgtacctgttcgacgcgagccttcgccccaaccgcctgtccacgttcggcacctccgagcggaccatgcactggaacctcatgggagagggcgcctcgggtaccacccgggtcggctacgtgtggctcgagttcgcccggaattctgaccacgacgagtacgtcacctgcggagctagactgcaagccaccacccgcaccaccggcgtcaccgctgactacttcacgacctcgctgcggatcggcacggatctctcgctgaccaacgcctccggccagccgttgaccaaggctgtactggccgaacaattgcacggccgtggaacggtccattcgaacgcgtcggaatatcgcgccgcggtgcggcagctgctgtttcccgggctgtcggagcaacgctacgaagcgttgatcaccgcgttgctgcaactacgcacaccgaaactgtcgcagcgtctcgaccctggcctgctgtcctcgctgctgtcccgggcgttgccgccgctggatcaggaggacatcacggagctggcggagggctttgaacgccttgaccagcaaggcgagcgattgaagaagctggacgaggaggtggaggctgcacggaagatctccgcccggcagcgctcctacgcccaacgcgtgctgcgcgcggcgtcggccgacctgatagctgccaccacgagaatgaccgaggtaacccgggccgcccggcaatcggaaaccgaacaccaggaggctgtcgtcgcgaggacggctgcccaacaacaacgcaaggatcttgctgcggcgatccggcaaaccgatgccagcatcgagggtttgacgaaacacgacctgtacgaaaaaggcgaagagctcgacgacctacgccgccgcactggaaaagctcaacgagcggctcgcgagcaggccgcggtagccgagcggaagtccacggccgccgccaccgaccgcgacgcggccgacgatgcggcgcaggccgtagaacagtgggtggaacgagtccgtgtagcggcggaggagtgcgctggtgttgccaggcgtgcgggactcgactccgcctacggcgagttggtcgacacgctggaacagccgaacgcccacagcaggcaactgctgcgggcagcagtacggggccggcggaaggcgatcgagtcggtgcgccgagcgctggacgagcacgagcgggccgtcgacgcgcgcacggaggcggagcacgggctggaagccgcccggacggagctgtcccgagcgaacaacctcaaggacacgctggccgaccggtacgacgacgtgctgaaggagcacgagcgagcgctcctggagtgggcgagtgcgtgcagggaactggttttcgacgacaccacagtactggtggggatcgctgactccgaggcagcgattctgactcgtatcgccgaggcggccgagcggcgtcagcacgacctcacggtcgaggagaccaccctcgctgggcgacggcaacaggtcgaaaccacgcgagccgagctggtgatgcgccttgagaagctgcagaaggaggttgacctcccgccgaaggctccgccgcaccgcaccgccgaccgcacccggatggcgggcgcgccgctgtggcggcttgtcgctttcgccgaccacgtcacggccccggtccaggcggccgtcgaggccgctctgcaggcagcgggcctgctggatgcctggatgagtccgtcgggggtgctggtggtcgacggccacgacacattcgttgacggcaccctgctcaaaccggcaccaggccgttccctgcgtgaggttctagttgccgaagcgggcggccccgtgcctgtcgagcggatcgaggagttgctgacgaggatcgcgttcggggacacactaccggatgagcaccccgcggcatgtggagccgacggacggtggcggctgggtgcagccaccggtagctgggccaaaaacgacgtcgaacacatcggcgccgcggcccgcgagcggagcaggcaacgtcgtatcaccgaactgaccgagcagctcgacgacgcggatcgggagcttgccggcttgaaggcatggtccgagcgactcgcgcagcgccgccgcacactggccgtcgaacgcgaacgccggcctccgcacacccgggtcgatcaggtccggaaggaactgaatgacgcagaaagcgcagtggccaccgccgacagcctggtccatgcggcctcgcaacgcctgcacgatcacgaggagtccgtgcggcacgcccaacatgcactacacctcgcgggcacggaatacggcatgccgaccgggcgggaggccctggagaagctcggtcacgcgttggaggcgttccacgagcgtgcccaaatctggttcgaccagcacaccagtctggtcaccgcccggtcgcgtgccgaactgctcctcgatgcggcgggacggtcggaggccgaggccgccgagcaccaagccactgccgaacgcaccgccgaggacgcggagatcctcgctggaaagcttcgcactctggaacgcctggtcgatgccgacgatctacggcagatcgtggaggagctggagcaacagcggtgcctgcggcagcaactcgtcgaacaggacgagcaggcgggtgagcaactcatgaagctgcacgggcggatcggcggcctcgaagcacgcctcgcacaggacgctgagcgccggaacgaggctgtcctggcacgcgacaacgccgctgatcggttccaccggctggccacgagcactctgatcgatgatgccgaccttgaagccgacttcacaggttccggcgcagtcaccgcggcgctggaagccgcgcgagcggtgcatcgaagtggcccacccttccgcatgagccgaaacacatcaacgatgctctacaccggttgaacgagaccgtgtatgcgtgccgggacgtgctcagtggtcgtgccgacctcgagttggaagcggacaacgaagtgcgggtgttcaccgctgtcctggacggcacgcgagtgggtgcgcacgagctgctcgagaccttgcgtgccgaggccgaacgcagtcgcgacgacctcaccgaagcggagcgggagctgttcgaccgaaccctcaccggtgacacgcggcgtcaactggccgaccgaatccggcaggcaggcgagctagtcgacgcgatgaacgcgcggctcgaacgggtccgcaccgcttcccgggtggccgtgcgactggtgtggcaggtcgatcaggatcttcccgccggcaccaaggacgcccggcaactactgctcaaggacccggtgtggctctcggaaaccgaccgggaatctctgcaccggttcttccgggaacgaatcgaagcggccagggccgacaacacctcgtcgaactggcgggaacaactcgcgcaggtcttcgactacaccgcctggcatcggttcgtggtgaagctcgaccgtgccgacggcaaaggatggcagccgctgacgaagaaactgcatggcgccctgtccggtggtgagaaggcgatcgcgctgcacctgccgctattcgccgctgtggcggcgcactaccaggcggtgccgtccgcgccgaggctgattctgctggacgaggtgttcgtcggcgtcgattccagcaaccgcggccaggtgttcgagctgctcgcttccctcgacctcgacctggtgctgacctccgaccacgaatggtgcgcctaccgggagctaccgggtatcgccatccaccagctcgtgaccgacgacgacgatgatgccgtgaccacggcgcgatttgtctggaccggcatggattgggcgggtgaagaacgttga

SEQ ID NO: 50205 - DNA, 1197 bp, Saccharomonospora azurea NA-128
gtgcacacgcggctctcgtcgggtcgcgccgtcacgcgtgtccgcatcggaccgctgaatcgcgagcagcgcgcggctgtggccgacctgttggggctggaccggacgccggacgagcactacacggtgtcgatgacagcgctgaaaacggtgctggccgaggctggcacggacatctccacggtcgtcaccgcgctggtcggcccgatcgccgaccgagccgcggaacgcgcccgtgccgaggctcgccgcgcggagttgtgggactggctggacacccatcccgagatacggcgccaacccacactgtcgagttgggctgcacaagtgcgccgcgcgggactgatcaacggatccgtcgacagaacacgcgagatcctttcgacggtgctgagtgtgctggcccggcttcccgccgaggggcaaccgctgcccaccttcgcgagtgaggtcacgggcgatccgcacgcgctggacgacggcacccgcctcggcaatctcgtcctgcgtgcgttggccacgatcttcgacgccccggtccccgacaccgcctacgagcgccgggtgttgtgggagcgggcgggcgtagccgcggacgagctgtccagcgtcgccctgacggccggcttgcgactgggtggacgtggcgtggtctgcgacctcgtgaggtgctgcaccgaggccgggcacgccgtgacgctcaccctggcacagcttcgcgcgaccgaactacacgcggcaccgaagcgagtgtgggtggtggaaaatcccagcattatcgcgatggcgcttcgcgaattcggcactacctgtccgccgatcgtgtgcacatcgggctggcccaacaccgcggtggtgctgctcctgcgcggtatgacggctctcggcacccggctgcactaccacggggacttcgacggcgagggcctgcgcatcgccgcgtatgtcatggagaagacgggcgcgcggccgtggcggatgaccaccggcgactacctgcgcggtctccgcccgggtgcccaggcccctgccccaggacgcgtcaccgaagcaccgtgggatcccgatctcgcgggcaccattctcgcccacgaccaagcggtggttgaggagagtgtggccaccgacctcctggccgatctggcgcgccacgcggcatccgggaacacttccggacactccaccgacgaaccgtga

SEQ ID NO: 50206 - DNA, 1482 bp, Desulfotomaculum gibsoniae DSM 7213
atgaacgacagtttattaaagcccatactcgaaacaaactatttgaacgcccaaaatgtcgaccgctatcgctgcctaatgcgctgcttttatgagcatcaccagcgtttgcaatactggctgcggcccgaggaagtatataggggcgtcatggcttacgggctgctgccaaactatactatcgaacaatgccagcaggatttaaaccagctggtggaatggagaaatcttgtcccccagcacgatggcgggcgttccaccactgttgaagaatatctgcgcaaaaagtttcgctatatgatgaccccttactcggtggagatagaacgcatggtggtggggctggaaaatatccacggctacggcggctcactggaaccgtctttatttgaaaatattgctttaactttacaaaaaataatcgagcttccccaggatgcccctgctgctgaggctttgctcctctgggatgaagtttatgataactttgttaaactgaccgaaaatgccgctgactatatcgccagcctgcaaagcagcaaaaccgaggagttaatgcaaacggaggcttttttggcctacaaaaattcggttaccgattacttgcagggctttgtccagggtctgcagcgccatgcttatcgcatcgaagggattcttccccagtttgatcaaaaggctcagcaaaattttttattaaaggtgcaaagtgctatactggcccggccccagctcgatgagccaccgaccccggaagaagttttgcagcagctgcaggaccgctggcaaagcctaaagcgctggtttttaggggaggccggcgaaaacagcgatgtttattatttggagcaaaccaccaagaacaccattgcccgcattgtgcgctccgcgctgcgcattcaagaaaaacgccgctggggcatcagccgcaggcgggagctggattacctgggccagtggttttatgccctgcccaccgcgagtgaagcgcaccgcctggcagcctacgccttcggactgtaccgctgccgccactttcagggggaagatgaaaaggacaccgagtcgccggatatttccatgtggcagtccggccccaatattcgctctttgcgctcccgcagcagaaaaagattgcgcagctccggccccgagccggtgcaaaaccaaagccaccggcagcacaaagccaaagccgagtacctggcccaccagaggcagcaggccgccttgctgggtaaatttatcgagcggggcgctgtgaccatatctgcattagataccatcccggctttgaccagacagcagctgctgcagtggatcggtatgtgtctggcaaacaaatcccggcacatgcgcaccccggaaggtattgaaattaaactctcgcttccggcaaacgggcggcgtactgttttacactgtgaggacggggaactcgacatgcccgattatactttgacttttaagcgtaaagtctaa

SEQ ID NO: 50207 - DNA, 1176 bp, Desulfotomaculum gibsoniae DSM 7213
atggcccgtgcggcccgcaataaccaggtggacaaggtaaactgctttatcagcctgttaaaccgaccctgggtaagtaaagccgatgatcccgagctataccagaatattcggagctattaccaggaattaaaggactggttccaggaatactgcggtttcagcctgctcttaaccaggcaaatagcccggctggaaaaaataccggggcgggcccacgattggatgggcctggagttacttaatgagcctctggattatgccctttttacatattgtctatggtttctcgaaggtaaaagcgaaacagatcagtttttactaaccgaaatgattgaagaaataaaaaatcaccttacgggcagctcgatgtccctggattttaccctataccagcaccggcaatccatgtaccgggcgcttaaacaaatgagggaactcaaagtgctggtggcggtggacggggatgaaatggaatgggcccgtacgggcagcgatagaaatgtcctttacgaatgttccatgctctcccgctacgtgttaaggcactttcccagggatttgactacttatgattccttggagtcactaggtgaactggcttaccctgataaccaggaaggacagctgcgccgccgcaggcacagggtttaccgccggctgctgcaggagccggtggtccacgactgggagtggagccaggacgagcgctactatgtgctcacccaacggcacaccattttagagcacctcgccacccgtttcggcctggaaggccagcgttaccgggaagggctaatcttcttttacccggaccattcggcggaaactgagctttttcccaccgccaaaaacatatctgatattgctttgctgctggcgggggaaatccggcgcctattgcataaacaagacaccagcatttataccgatgagcaggggtgtgtaccactgaccctggctgagctggaggtcattttgctaggcctgcgggaaaagcataaatctttgtggagccagcagctgcgccaggtcaaaagcaacgagctggcccgggaattactggagcacttaacaggctgggggctggccacagtaaacgagcaaataatactgttgcacccggccctgggccgctggaacggccattatcttaataatgaggatgaagaataa

SEQ ID NO: 50208 - DNA, 4167 bp, Desulfotomaculum gibsoniae DSM 7213
atgcgtaaccgctggcaaatgaatttagccggtatttttaatttctggtattacaccgatgaggtgcagtatcacctacgggacggtcggttgatcctgcgggggaccaacggctcgggcaagtcggtaaccatgcaaagctttttgcccctggtgctggacggcaataaacgccccgcccgcctggacccttttggctccagggaccgcaaaatcgactattacctgctgctggagcccaacagcggcattcatgaccgcatcggttacctttacctggaattttttcacccggcccagaaccgctatttaaccattggcatcggactgcgggcgcgccgcaatgcacccgtgaacttctggggctttgccattacggacaaccgccgcattggccgggaaatattgctttacaaccaggactacagccaggggcaggaacaaaaaatacccctcacccgctcgcagctggaaaacatcatcggtgagggcgggcaggtggtcaccgagcagggcaaatatatggaaatggtcaataagctgctctttggctataacgatttacattccttccaggaattgctggacttgctgctgcagctccgtagccccaagctttccaaggatttcaaaccaaccacaatttatgagattttaagcaatgccctgcccccgctgcaggatgaagagctgcgccccctatcggaagtattggaggatatggatcaaatcaacgaccacctggaagaggtctgcctgcaccgcagagaagcggaaaagctgtggcaagtctacaaccgatacaacaaatacctgctctatagccgttccagccagttgctgcaggctaaaaagcagtgggacaaccagcaaagcaccgtccgggaactggatgaaaagctgcaggaaatcagagaggcactgcaggagcacaaccaaaagctggaggaacatactgcgcagctgctggaaaccaaagcccgccatgaggtgctggccgcctccgaagcgctggaaatacgggataagcttaacctgctgcgccaggaaaaagaaagaaccgaccagcaggctgcgcggataactagaagcctggattactggcgggccaagcaggatgagtacgagcgggaccgggaaagatatgcgggcgatgtgctggaatatgcagcattacaaaaagatgcccttgatgaactggaagctgcagcccgggaatgtgattttgcccggcatgatgtctaccaccgctattgggaccgggacatacccgaggactttagccagtggcccaattggctaaatgatttggattcccagcacaagcgtatcagtcaggccctggagatggccaaacaagtggatcaaaagaagtatgcccgggacctggcggaaagggaagtaggccaggcccgccagagacgggataccgccgaggacagctaccgctttgaagaagaaaactttgagctggtacaaaaatcttaccaggagcaaatctttgcctggcgcaaagaactgcaggaactgcagctcagtgatacagagctgcaaacaattttacaccgcctggccttgttcccggacgcttcctacgaggcggtaaaagagcccgtgctggaagcctataaccgctgccatctgcatttgcatgagcaaatcgtgcaaatcacccagcaaaaaaaccagcaccaggcagagtacgagcgtctgcagaaccagtggcaggaatggaaaaaccttaaagacccggagccgccccgctccgaggcccgggaacggtcccgccgcctgcgcggtaaaggtgccggaggtgcgcccctctatgcggtttgtgagtttaaggcacaggtcagcgaggagcaaaaagccaacctggaagcagccctgcagcaaagcggccttttggatgcctgggtgagcaaccagggtctggccgccctgggcgcggaggaagaagaaatctggatcaccccccaacccgtactgctgggcaataccctggcggattacctgcgccccacgcccccggaggacggctccgttaaagcggaaataatagatgagattctgcgcaccatcaggctgggcaacaccggcggggataacgtggcagcatcggttaacgcccgtggctacttccagctgggagccctgtgcggcaaggcggcccccaaagagcgggccgaatatatcggtaaagaaacccggcaccgcacccggctggctgaaatggcccgcctggaagcactgatggatgaagagcagcgtattattgacgagtgcaccagccaaatcacaggtattgaagaatcgttaacccggctggcccagcaaaaagccctcttcccgggaggtgcagacctgcaggacgcctatacccggctggcccaggccaaaagggaaatggggctggccctggaggaagaaaagcaaaaagtagaactgctgcgcgaaacctcccgggccttccaggaagcactggcggagctgcatgattttacacagggctggaccatcccccccaatacacggggcctgaacggtgccctggagcaaatcaactggtaccgccagcacctgggggaattgcgctcccactggtccagccaccgctccagcttgcaaaacctgaagcggtgcgaggccgacttgctggaagctgcggaaaagatggccgaagaaaccggagacatggaaaacctgcaggcagcgctgctggagattaacgtgcaaatcaaggccctggaaaaagcgctgcaggatctgggcattgaagatatcgaccggcagctgagcgagctggagcaaaagcgcaggctgctggaaaaagccattgcttcgctaaacaacgccttaagcgatctcaaagtaaagcaaggggttgaacaaactaaactggccgctgctcaagagcttttaacagaaaaggaaactgctttaagccaggcccgcgccgcctggctggccgagtgggaccggtatttgctggacgactggacggagatcaaagccagccagaaagaactgcccgggctgtaccatgtggcccagcaggtgctgcacaggtaccgggacgaaaaatatattcaaaaaagcaaagacagcatcaccaatgatttactcatcgtattccaggaatgccggggcaacctgcatacctacgggccggaactggtacccgatgacgagcaccagcgcaacctggtgctgttcatgcgcgaccgtcataacccgctgccgccccatgccctggtgcaggagctaaaagccaccgaagaggagcagaaactactcttaagccagaaagaccgggagctttacgagcaaatcattattcacagcgtgggcaaggccattcgccatagaattttacgggccgagcagtgggtcaaacaaatgaacattttaatggagcaaagggatacttccagcggcctgcgcctgcacctcaaatgggagcccaaaccggcggccaatgaaaaagaaatggacacgctgcaactggtcagcttattgaaaaaggattcccaaatgctgcgttaccaggaaatcgagcaaatgatagaacacttcaggtcccggattaactgggccaagcaggaggccgaccagcatgacaccctacgccagtggatttaccggctgctggattaccgggagtggttccggtttaccctgtactttgaaaagggtgaacagccccgccgggagctaaccgacagccgctttaacgccatgagcggcggtgaaaaagcgctgtccatgtatataccgctgtttgccgccacttactcccgctacaacgactgccgccccgaagcgcctaaaattatttccctggacgaggcttttgccggggtggacgatgaaaatatgcgggatatgttcgggcttttgacccaactggattttgactacatgatgacgagccagctgttgtggggctgttacgacacggtgccccggctgtcggtttacgaaatctaccgccccaaggatactgattttgtgaccttattccagtattattggaacggttataagcggatattggtggatgagagcctgggggacggggatttggcggaggatgtagaggtaagcggagatgctgcggaggaagatgtcggaggacaacccaacaatgaaggaagaaatgcttaa

SEQ ID NO: 50209 - DNA, 1320 bp, Desulfotomaculum gibsoniae DSM 7213
atgaaggaagaaatgcttaattacctgaggcagccttgttttaagaggctattcgccctgactaaaaacaaaatacaatcactaaacggcctgcgcggcaccgtggtcctggataatctcactacggaggagcaggacctgatcggcggatttctgggcaaaaattgcctgggtttgaccaaagtaaaaatttcactggcggaactggacgagctgctcaagaacagccccctggaaaccggtctgcatgcttttctggaggtttactggaaggaaaaaattgttacaaaccaagagaaaacgcaacatgccaagcgcctgtggttacaattttttgagcagctgcgggaaaaagcccaaactccggtcagccgggattggctggaccggctgtttcaaggaagcgggaacggctaccgcacccttttagccctgtaccggcaaaactgcaaaaaagctgcaaatgatgcctccataaccgtaaaggcactggattacctggccggccaccggggacaaagcatacgtatacccgtatttgccaccttgctgaccggggacccccatgccctggacagcgacaatgccatcggcaggctactttttcacgggctgctgcattacctggacatacccgaaactgattacaccgccgaaggcaaacgcgccctgttccgggaggctgggcttttggacgatgatatttcatccagcgtggctgtggccggtttgcaggtacgcccggaggatctccgatttgccgtattcgactgtgccaacgctgcggccagccctttgatcctgcccctgcgttttctggaaacaaaaactctctggcagcccggacggaatatttatgtggtcgaaaacccggcggtattcagcaccttcttggacacctgccccgccgcctccctgcccccgctggtctgcggcagcggccagcccagcgtggccgccctcaccttgtttgaccagcttgtcgaggccggctgcaccatctattacagcggggattttgatgttaaggggctggaaatcgccacccgcctggcccagcgctaccatataaactttcgggcctggtgttatgacagcgagacatacttgagtgtggccagcggtaaaaggataccagcaaaggaaataaacagcctgctaaaactggctgttccctgggatgagcatttaacggccaggatggtggaaaggaaactgtatgtttaccaggaagcatttattgggaagctgcttagcgtgacgaaggaaggtagttttattaaagcatttccatatcgggatacagaacccgacaaataa

SEQ ID NO: 50210 - DNA, 1476 bp, Clostridium clostridioforme 2_1_49FAA
atggaatattttgaaccaattaatgagacatcttatttatccgttcccaatgcaccggtataccgtaaaattatgcggtgtttttaccgtgaatatgagaagatgcatttccagatatataaagaagatattttccagctgcttaaacaggatgagacgtttacgggatataccatggaacagttgatgacagatctggaagctttggtcaagtggaaaaatcttactccgatccaggaccctggaagggtttataccatagcggattacaagaataagcagtatcgctataccatgtcagagtatgcggttgagattgaacgtctcacggtgcgtcttgaaaatctttttttggaatccggcaatttatccacgaatttttttgttcggctggaaaaaagcctgcaaaaggcagaagaaataaaagatagcagtctgaaggagatcaatgagtggtggggattgctccaggaggattttaaaaggcttaaccagaattatcaggattatctgcgggatttctattccggaaaaacggaacagctcatgaagtcagtggaatttgtagtacataaggacaagtttattaagtatttgaatgaatttgtgcaggaattgcagcgtcattccaagcggatcgagcaaattttgtcagataatatgccggtgattgaagaatatattctgtcaaaagtgatacagagtgaattggatattccacatgcggttttgcagcttcatggaaatgcagagccaggcatacgtgaaaatgtgatggggaaatggaattctctgaaaaactggtttatagattcacagggaaatgagtgtgagtgcaaaaaagttttgaaaatcacgaatgatgtaataagaagtattattcagaatgcagcgctgatcgttcagctccagaatggcggaatcagcaggaaggatgattaccgcaagtttttggaactgtttttgaaatgtgaggatttggaagaggctcagaagctatcggctcatgtttttggagtacagaaaatacagcattttaagacattggaacctcgcgagggggagggtatcaatgacagtatttataaggacgagcctgctgtttttttgctgaaacctcatacaagagcttatcgggagaaaaaagaccggagaggatttacagataagtctttggagaaatacatgcagagggagaagtatctgcagaagatcaaacggcagaaagagattgttatgtattacatcaaggataacaagatcacattttcagaaatagaagaggttatttcggaggagacaaggattacatttttgcagtggatcacgcaggccaatatgaattcccggaaaacaggaaggacggaatatgggcaggaatatcgtttgacgcagacgaagggaaattgtgtgttaaggtgcgaggatggagatctggttatgcctgcgtttgtattggagtttataacattatga

SEQ ID NO: 50211 - DNA, 1137 bp, Clostridium clostridioforme 2_1_49FAA
atgaatgaattcagaacactattagagaatttctggatctgtaaggatacagataaggaaacgtattacaaagtgaagagggatattccgaattttcagcgatttatcagggagcagctgggctggaagcttgttcatacggaaaatttgttaaaactagagaaaagaccggctcatgcggaagggtttatgggaatcggggaatttatggagatcagggactactgtattttgtgtgtagtgctgatgtatctggaggataaagaggaacaggagcagttccttttgtcagagctgattgattatgttgaagcgcagctgaaatcttatgtatccatagattggacttcttttacacagagaaaatccctggttcgtgttctgcaatatatggagaaactacagatgctccgggtatatgagggacgcagcgaggcctttggctcggaggcaggacaggaagttttgtatgaaaataccggatattcaaagtattttgcaaccagctttccaactggtatctctatatttgaatcctgggaggattttgaaaagacagattttgaagaatttcaggaaaacagaggagcattgcgcatcaaccgtgtgtataggcagttggcggtgtgtccgtctatgtactgggagaacagtgaggacgcagattcgctgtatttaaaaaatcagcgtcagtgggttgcaaaatatatcaatgataacatgggaggaaatctggatctatacaaaaatatggcatgtatctcattggacggggacgattgctatggttctgttcacccaagagacgccatgcttccggagattgttcttatggtctgtgggaggatacaaaaagaggtttcagaggggaatttagaaaagcaggaaaatgaatgtatttacatgacaagggaacgcatttcagacgtgattttgtcctgccgcagagagtggagcagcgggtggagcaaagaatatcgggaaatggatgaggagctgcttgtggagcatgtgttaaaatatatgaaaacctggctgatgattcgaaatgacggaacgcagattaccatatttccgtctgtgggaaggacagcaggagtttatccggaggattttaagggaggtaccggggagtga

SEQ ID NO: 50212 - DNA, 4068 bp, Clostridium clostridioforme 2_1_49FAA
gtgaaagaccgctttaaaatgaaccgtatagggttcgtgaatttctggttatatgatgaagaagagtttgaatttgtggatggaaagcttctcctgcgtgggcaaaatgcgtctggtaaatccattacaacccagagcttcattccctttatattggacggtgaccgtacgccgagccggttggatccctttgggtccagcgaccggagaatggaatattatttcctgggggaagaagggaaggatgaatccacaggatatttatttttggaattcaaaaaagagaggtcggaagaatatcgcaccattgccattggacagagggcaaaaaaaggaaaacccatggacttttggggttttattattttggacgggcgaaggattggctatgatctgaagctgtacaaggagattggttcaagcaaaatcccttatgacagaagggaaatgaaaacagagcttggagatgacaatttttttacgacgagccagagtgaatataaaaaagcggtcaatcagtacatttttggattccggaaagcggagcagtatgagcagtttattaaattgcttgtgaaggtccgcgctcccaaactttccaaggaatttaaacccaccaaggtatatgagatcttgaatgattctttgcagacgctgacagatgaagatctgcgcgctatggtggatgctatggaaaaaatggatgagattcaggaaagcctggagattttgaagcgagcctttgatgatgtgaaaatcatacggaatgaatataccaggtataatcaatatatgcttgcgaaaaaggcacaggcttatattgcaatgaagcagaagatagagacagaacagtgccagcttgacatacaggagcagaagcggcaggagacagaggaggccagaaacagcaagagccggcgtctggctgacttagaggagcaaaaaaagctaaaaggaattgagcgggctggacttctggatgcggatctggagggaatcgaccgtaagttagagcaggccaggggagagaaagaagaagctgccgggaaggttgccgattgggagagtaagatccgggattatcaggaaatgatctggcggggagaacgcagagtgaaggagatcatggcctgcctggaacaaatacagcaggagattggggaagccaagttggaactgggagagcagcaggagattattcagtgggatcagcacgaggcggctcttcagatgatagacagaggcgatcatgagaaaagcggtgaaattgtaaaaagccttgattcgctgaaaaaactgctggctgaatgtaaaagggaaatacatgagtatgaggagcgatccagacagtatgatgaacttgcggcgcagctggagaaacttcatactgaaaaagcagaggctcagcagaactttaaggctgcacaggaagatgttgtccgctgtgtggatcagtggatcacagatatctatgcagcagagaaaaaatcctctcagtggagtcctgacagcgggattcttccaatactggtggagaaaattcgggagtatcagtcggcagcagatgcagaaacagtacaggcgcttttgcgcaccgattatgagcgccagcgccagggactcatggatctaaaaagcagtctggaatatcagaagaaaatccaggaggaagaactggatcaggaaaaagaaaagcttacatgcctgcggaattcaggggaattggagccggagagggacgagagtatagagcgttcaagaaaggcgcttaagagggctggtatcaaagcagtacctttttataaaactgtggaattttctaagaatctggatgagacgtactgtgcaaggctggaggctcagttccagaaaatgggaattttagatgcacttgtagtatctgcggatgattttgagaatatcagaaagcggtgtcccggttttttggatacggttttgtatgtgaaagggaatggaggttccggcttttccggtctgactgtcagcgaagagctggaacctgctctgaaagagaccgttcagaggattctcagcaatatttatgaagataaagaggatggacaaggaatttaccttgggaaagacgggactttcaaacaggggattctggctggtaaagcaggcaaaaccggcagtgctgagtttgtgggagttctggcgagaaaaagacggaaggaacagaaaatccgcgagctggaaggccggatttctgaaattacagaaataattgtaagcttggaaaaagagattacagcggtgcaggagcatttggaaaagctgcaggaagaatatcagaagctccctggcttttcagagattaacgctgccttagaccaggaaagggaatgtgaatacaagctgcaaaggacatgtgaggaatgtgggaagaaagaggcgcaggagcggcagctgatatttaaaaagaaccagcaataccagacaatgctgcaaaagtgcaagccatttccctatggcagaacagaagaagcctatgaggaagcctataatgcgctggaagaatatagccgcatctggcaggagatcaggcaggcaatgctgcagctacggacggatcaggagaatctcagtacagagaaggacaggaacgttcaaagtgaacagctgatggatgatgcttttgcagagaaacgcagctggagtgcgaaagaaaaagagagcgagattcagattcggcagtttgaggagtacctaaaccgtccggaaattgcaaaaaaggctggccgcttaaagcagctgaagaaagagctggaagaaattggaaccgagtgtgatactttaaaaaaagatttggttattctgggggaaaggctacgggtgattctggaagatgagccaaaactaaaggaaagcctgcgccagaaaattatagcagaaacctgcctgaggaattattttgaagaggagcttgcgctaaaactggtatttgacagagaaagccagggaatctttgaatgtgctaagagagcggtgtcggtattgcgggaaagcgataagaacagagagccaacggacctgctgcaggcgctgcatcaggtatatcagcgccataacggaagtctggtcaattacggtacatctttggaggaatgttttgacacgccggtggaggcagctctggaaacagaggctgctggcgcaatacgaaagcgggtgcgggtcgtttcctcatggaatgggaaaagggtatatctggaggaattttacggcatcttgaaacagggcattgatgagacggagctgctgatccagaagaaggacagggaactgtttgaggatattttgtcccagaccatcagccggcagcttacggaccggattgcagaaagccggaaatgggtttcggatatgtcgcagctcatgcgggagatggatacctctatgggtctgatcttttcactggactggaaaccccgtaaagcagagaatgatatggagttagacaccgcggagcttgaacagattctgctcagagatcatatgcttctgaccatagaggatatagagagggttgcggcgcattttagaagccgaatccgcatggagaagctgaaactggaagaaaaaggcgacatgatcaattacatggatcttgtcagggatgcgctggattatcgcaaatggtttgaatttcacatgtatttcaggcgtggagaaggagagcggaggctgttgaccaatgcggcgtttaaccgtttcagcggtggagaaaaggctatggccatgtatgttcctctttttgcagcagtcaacgcacagtataaaaaagcggagcaggaagaccatccgcgaatcattgctttggatgaggcatttgcaggagtggatgacaaaaatatcagtagtatgtttgaacttgtgcataagctggattttgattatatcatgaattcccaggctttatggggatgttttgagacggtaaaaggacttcggattgcagaactttcaaggccccaggattcgcagattgtttcagtgatccgttatacatggaatggacgtgagaagatattagatgtgcaataa

SEQ ID NO: 50213 - DNA, 1299 bp, Clostridium clostridioforme 2_1_49FAA
atgtgcaataataaagaatgtgcaaattactttaaaagtcagcgggcatatcacagatgctttgaagaatttagaaaaaaatggaaatcttacggaaaagctgcgggaagaattacgcttaaacagacttcggaggaagagcggcgggcagtgggcggcataatcggcaaagtattttatgagggaacaattcggttttctttcttggaatttgaacagggactgcaaaaaacacgtttcgcgccggtggatatgaaagcggtgctggaggaatatttcggggagccgctgattaccactcaggggcggcagagagaagagcaggagagaagaaaaaagtttctggacagaagctgcggatattttgaagaaaatgccggaagagaagctgcggcgcttgtatggttgcggaaaatgatctctgagaaaaaatatggatatcagctgttgatgagggagtacgcaaaagatgaaaagcaggcggaactgctggtgcggaatgtagggaacgcagtgatgaagctaaaagagctgacggataaggaagatgaatatccgttagccgtgctggctgctgagataacagataatccccattactttgaccgcagcacaacagccggattgctttttgtacatgcaatctgctgctgcgaaaatatggaattgcccgaagacgcacatcagtggcggaaaatgctgacgcaggtttcgattgttccggacaatatatcctccatggttcatggttatggactccggctgcttactaaacagggatggcatggggcctatgatacgttctgtgagcgaaaggaaccctatgttattaccatggagaatatgaaagggattatcggtgtacaggcagtgggggagaaggcgtatatagttgagaatgagatggtcttcagctatttgattcataatttgaaaaattcggactatacccttctgtgtacttccggtcagccccgttctgtggcacaggtgctgattacctatattctggccagtgggtcaaaaatctactataatggagatattgatccggatgggatctgtattgcggatagactatggaagaaattcggggatcgtattcatatatggagaatgtcgccggaggattatgataaaagcctctcaaaagaaagaataggggatattggaagagcaaagctcgaaaatataggtcatcctatattgaagaaaacggcagagtgtatgaaagaaaagcagctggccggatatcaggaaaatatgctgaaagagttgctggaggatatgcaaaactga

SEQ ID NO: 50214 - DNA, 1452 bp, Rhodococcus opacus PD630
ttgaaattgttcgccttcaccacggcggagaagcgcgcggagtacctgtgggtgctgcgggccttcgaccacgcccgcgccaactacgtcgtcctgctgcacgccgccgacgtcgcccgcattctggacggcctcgccggcgacgatccggccggacaactcggcgccggagacgtcactcccctactcgagcaactgcacgtctgggaagtgctcgaacgcagctacgacggaacacgcgccgcgacgctggccgaataccggaaccggcacttcgtctatcaattcagccaggccggctaccaggtgttccgagcagtcgaggacgctctggcggcccggctcgacgacgcgtcgctgtcccggctggcactgcccgacctcctcgccgacatgaacgacctggccgcggcgaaccgcgcggccgacaacgacctggtgtaccggaaactcaaccgtctcgatgcgacgctgtcggacatggccggacgcgccgcccagttctacctgaccctgggcgacctcgtccgcaccacggagatcacgccggagacgttcatgtcccacaaggacgctctcctcacgcacatgcgcgagttcagctccgacctctcgcgctatgcaccgaaactcgcggcggcgatcgcgctcgtggaagacaccggcgtcgagacgatggtggcgcgagccgcagccagcgacgagcgggtgttcctcagcatcgaagagcgcgaagccgattggcgcgcgcggtgggcaggcctgacgcattggttcgtcgggagcgaggccggtctcagcgagtcggaacgcctgcgcgagggcacgatgagcgccatcgccgccgtcctgtcgctgctgcgccgcgtcaccgaaacccgcaagggtggtgtcagcagggagagccaattgcgccacctcgcaggctggttcgccgccactccgaccgaggacgccgcgcatgcgctgttccgagccgtgttcgacctcgggcgtccgcgccatctgtcgatggtgcatccggacgccgacatcattcccgacacgcggtcgtggtgggaggcccagcccgtggagatctcccgcacgctggccgagacgggacgtcccccgtcgcccggcctgcccgcacgggtgcagcgcaatgagggcagcgtgcgccgcctgcgggaggaacagctgaccgcacaacgacttcgcgcctccgccgcccagtcgctcgcccggggcggagtctacgagcgggaactcgacgaggccgaaaccgacgtgctgctgagtttgctcaacgccgcactgacggcgcgggtaccggtcagcggccgcgtgaagagcagcacaggatcggagaacggcgtgaaactgaccctcagcccgcacagcgaatcgacggtggtgcgcaccgcccgaggacgtctgcacctcgacggacttcaggtgagcgttcggtga

SEQ ID NO: 50215 - DNA, 1395 bp, Rhodococcus opacus PD630
gtgaaggcgcgggagatctcgccgctcgccctcgattcgtatcagcgcgccgcccgtgtcatcctgtcgaatcacctggtgacacagacctatccggatcgcatcgctcttcccctgctccgccggtgggcgaccgaactacgcgacgatctgatgacgctcttcgggtaccgactcgacgtcaccgagacgaccgcccggctgttcacggtgagcgaccgactcgacgccgggacgccggccaagacggccaccgaccgcacgttcgaccggtaccgctacgcctacctcgcgttggcgctggccgcgctcggccgcgccggaaaccagatcaccctgtccgaactcgccgatcacgtagccgccgacgccgcacaggtcgacggtgtggatctgtccacggaacgcgcgtccgaccgggacgccttcgtcgacgccgtcggctggctcgccgcccgcggcgcgatcgcactcgccgacggcgacgcgggaggctgggccgccaatcccgatgcaggagaagcgctgtacgacatcgacaggtccgtcgtcatcgccctgttccggccgccgcgcgcactacagcatctccggtccatccgcggactgcttgccggtgcggactccgtgaccgaggacgacacctcggagttcgggacggcccggccggtggacgtgaaggagacggcgcggcgagtgcggcgtgccctcgtcgaacggcccgtggtctacgccgccgacctggacgatgacgaactggtgcaactcgcactcccccgcaccgcagccgatgtcgagttgctcaccggactggtcgcggaacggcgggaggagggcgtcgcgatgatcgactcctccggacgtctctccgacgtccggttccccgggacgggaacggtcgcgcaggtcgcacttctgctcgccggggagatcgccgatcgcgtactggatcccgatgccccggagaccgcccggatgccgctgccgcggggccggttcgacgacctgatcgaacaggtcgacagcgccattccgcagtccgggatcttcgacagcctcgccggccacgacggattcgagcccgaagaccccgcccccgcggaccggctgttcccggtcgtcgaggacgagtggatcgccggcaccgtccgcacactgaccgaacggttcgggcgcacattcgccgccgggtggcaggcggaccccgacggtctgggacgcgcggcgctggcgctgctcgagcggctacgcctcaccgcggcggtaccgggtggtgtgctcgcactcccggcactcgcccgctaccggggtgtggtggtcacgatccgcgaccgcacacccgagatcgacctgttccagagctcagcgaacgacagcgaggaagtcacagcatga

SEQ ID NO: 50216 - DNA, 4158 bp, Rhodococcus opacus PD630
atgacgagtgcgcgtttccggcccacccgcgccgggatcatcaacctctgggactaccgcgatcaggagttctccttcgccgacggtcgcctcgttctccgcggtcccaacggatccggcaagacgaaggccctcgaagtgctgttcccgttcgtattcgacggcaggatcgaaccccggcggctcaatccgttcgccggcgaggaacgcaccatgaagtcgaacctcctgtaccgcgggcaggagagcgcgtactcgtacgtctggatggaattctgccgcggcgcgaaggacgaccccgaggccgtcaccgtgggcatcggcatgcgcgccacccgcaccaacgacaaagtcacacgctggtacttcgtggccgacggtcgcgtcggcgtcgacttctccctgctcggcagcgacgaccgtccgctcacgaagaagcaactgggcgaacagatcggcaccgactccatcaccgaccggccgctcgactaccgcgccgccatcgacgcccggatgttcgggctcggcgtccagcgctacgaccagctgatcaacctcatcctcacgctccggcggccccagctcgcgaagaacctcgaccccaagggactgtcgcaggcactcaccgacggtctgcgaccgctcgacgagcaactggttctcgaggccgcccgctcgttcagcgacatggaggaggtcggccgagcgctcgaggggctggccgcggcggaccaggcggcacagagcttcgtcggcgtgtacgcgaaataccttcgccagcaggcgcgtacggacgtcgaccacctcgcgacccgcctggaggccgtccgatccggtatcgccgccctccatggggcggcagcggaccgggcgcgcagccaggagagccgagcggccgcagaggaacgcttcaccgccgccgaacgcgcactcgaccaggccaatgccaccctggacgcgctgaagcggtcgacggcatacgagggacggacacaactcgacgacctcgcgcaggccgtctcgacactcgagaaatcgaccgaactgcaggccgagaaggcacgcaaggccaaggcgaccctcgaacagcgagccgaggaacacgacaaggccggtgacgccgtcgcccgcgccgtcgaggcgctcacccacgccgaagacgaacttcacctcgccgccgaggacgcgggaatcacctggaccgcactccccgagaacgcgcgcaccgaccagctgaccgcggcgctgcgcgggcacaccgaagaacgggacggcgacatccgcgcggtccgggccgcactcgccaccgtcgagagggccgccaccgaacggaccagggccgacgaggcggcacgccgcggccaggagcaactcgacaccgcgaaggtggccgttctcgaagccgagacggcggtcgaatcggcccgcagccggtgcgccaccgaactccggtcctggtggacggaacagtcgtccctctacgccgagatcgacacgcccgcttcactgttcgaggccctggacaccgccctcggcctgataggcgacgacgacgccgccaccctgtcggagacgctgaccgaacagacgacggacgccgtcgacgcgctccggctgcgtcgtcagcagtacgaccgcgacgtcgccgccgccgaggaggcgatcgccgaacacgaatccgcccgtgcggccatcgaatccgagcacgacgacgccccgccgctctcggccgcccggcaggacgcccggtcccggctgaccggtgcaccgctgtggcgtctggtccgcttcaccgacagtgtcgacgctgccgcggcggcaggaatcgaggccgcactgcaggccgcgaatctcctcgacggctgggtgcccgtcgacgacgcactccccgacgtcgaatccgaacagttcctcgtggcccttccggccgaggatcggcccaccggcaagaccctcgccgacgttctcgaggtcgaacaagacacgggcgttcccgacgatcgcgtacgcgggatcctcgaatccatcgccctcgaatccctcgacctgcccgaaggtccggtcggtgtcgccgaagacggtgcgtaccggcagggaatccagcggggacgccacacgaaatcggacgccgagtacatcggaaccaccgcacgggcccgcaggcgcgccgcccgtatcgccgaactcgacaggatcctcgaggaaacccgggcgactctcgacgagacccgtgcggccgcggatgcggcagcggcgctgctgtcgcggaccaccgcggcggcgcaggccctgccccgcaccggatcgatcctcacggcgctgaagaaggtcaccgaatccgcaggcgcactccgcagccgctccgacacggcgacagcggtcggtcgcgaactcgaccaggccatcgccgacctgtccgcgaaggagaagcagctccgggccactgcgtccacgcaccggactccccacgtcgcccgcgagatcgactcgctcgccgcgtccgtccggcatttcgagaagcagggcgagatggtgcagcggtgcaggcgcgaacacgccaaggaggtggagcacacccgcgagtccgaagaccgactgcacgaggcgcgcggcagcgcggaggagttcgcggaagaagctgccatcgccgaagaggttctcgcgcaacaggtccaacgcctcgagacgctgcgcgacacgctgggagcgggggccgagcagttggaccggcaactcgaggaggcgcacgcgcggatcgaggcgtgcaagaaggagcagcgcgacgcccgcaaggcggacaaggacgcgggtgaggccatcggtaaggccgagggcgcgtacaacaccgccgtccagacgctccggctggcgctcaccgaaacgcacgccgacgccgcccgcctcgcgccgtacgcccggcgcgacctactcgaactcctcggcgtcgacggcggccacacctggccggcgagctcggcggcgtggatgagtgccgaacagctggtgtatcgcatccagaacgccgaaggcgacaccccgatcctgccgcccgaagtggatgcgctgttccacgcactggacggcgccaccgaatcggtgcgggtcagcgactcggcgcgcaagtcgacgcgcaccgcgctcaccaccgcgctgcaggacttcgacgcacaattggcggccgccggccaggactaccggttgcagtgggacgccccggacggcgtgaccgtggtgcaggtgcaggacgacgagggttactcgtcgatcggcgagttcgccgcccgcatcgcgtccgctcgctccgatcaggaactgctgctcaccgaatccgagcgtcgcatcctggaggacgcgctgctcacgggtctcgcacagcagatccacgaacggaccgtcgacgcccgcgaactcatcgccaggatgggcaccgagatgcgggagcggcggatgtcgtccggcaacaccatcggtgtccactgggtgctcgccgacaacctcgacgacagtgcgaaggcgatctccaaactgctcgagcgcgacacctcggcgctggggccggacgagctcgccacgatgcgcgcccacttcgcccaccagatcaggaccgcccgcgccgcgcacccggagcgttcgtacccggagatcctggcgtccgccctcgactaccggcggtggcgggtgttctcgttcaccctgatcagcggcaacggcaacgaggaccggctgaccgtcgcccggcacagcgcactctccggcggcgagcagtccgtctcgctgcacctgccgttgttcgccgcagcgcacgtcatgctcgattcggcagacccccatgcaccgcgactgctggcgctggacgaggcgttcgccggcgtcgacgacaacggccgcgccgaactgctcggcctcagcgtgcaattcgacctcgacctgttcatgaccgggttcgacctgtggatcacgtacggcggcgtgccggggtgtgcgcactacgatctggcgcactcgacggccgagcagagtgtcagcgccacgctgctcgtgtggtcggatggcgaactgctcgccgaacacgacggcaccgacctggcgcaggcgctcggttcgcccctgcgccggcgcgtcccgacgcccgcggagggtgccttcgagttcgcctga

SEQ ID NO: 50217 - DNA, 1491 bp, Geobacillus thermoleovorans CCB_US3_UF5
atggacgccacgtggttgaagcccattgtcgaaacaaaatatttatcgacggaaaacgcgcaccgctaccgggcgattttgcgctatttctacattcagcacgagcggatgcggcaatatttgtttccggaagaagtgtacgcctttttaaagcagcacgaggagtttgccgattacactgaggaagagctgcagcaagacctcgaccagctcgtcaaatggaacaacttgatcgcccgtcaagagacttctcacgtgcggacgattgaagagtttaagaaaaagcggttccgctatcaatgcagcccgtacacggtcgaaatcgaacggatgatccgcacgctcgagcagcttggggattcatttggggggtcgctcgagagaacgcggtttgaccgtttgtatgcctctctttctcgcatggaaacgatcatcgcctctgattttcaagagcagccggatgaaatgcatcaagtatgggaagagacgttcgattatttcaaaaaaatcatccaaaattccgccgactatatcgcttatttgcacggtgaaaatttggaagagcggatgacatcggagtcgtttctcgtttataaagagcagtttactgcttatttgcgcgattttatcgtcgccttgcaaaaaacgtcgatgcagattgagcaattgcttgaagacttgccggaagacggggttcggcagttcatcgagcatgtcgtcgactatgagaggtccatccctcgctttgccgatgcgctgccgccgcgcgctgtccagattgaagaaaaatgggagacgtggcgcagcctgtgcgaatggtttttaggccgcgatgggcgcgagagcgagctttcgtttttgcaataccagacgaatgaggcgattcgccgcctgacgcgcgtcgtgcaacggcttggcgagcggcatcaccattttcgcagccgcaaaggcgactacttgcatttggcccgttggttttcccgccttgaatcgattgaagaggcgcactgcctgtcagcggtcgtgttcggttgcttccatacgaaacatctcgtcgccgatttcggggcgacagacaacatataccgcgacgtatgggacgagccgccagccgagtgggtgacgaaaccgcgcgtccgccattatggggaaaagaaaaagccgcaggcgattgaagacaaagaacgggagaaagaagaagcgcgtcttcgctatttggaagaaaaagcgcgcgaggaagccgagctgaagcaatttgtgaccgacgggaaaatcgtgcttgccgaccttcctgaggtgaccccatacgtacggaaaacgctgctcggctggatcgccaaagcgatggggcgcgaggggcaagcaatgaagacggaaaacgggtgggttgtcaacgtggtgaacaaagaggggacgatttgccttcgcgcagaagatggagaactcgtaatgccgaactacgaaattcatgtgctttcgcgaggtgagtga

SEQ ID NO: 50218 - DNA, 1197 bp, Geobacillus thermoleovorans CCB_US3_UF5
atggaaacggcgtttgacgacaaggcgaaagaggcgctcgccgcgctgttcgaacaattttggatcattcgcgacaaagagccggatttgtatcagctcgtccgtgagcgcgaacatgtgttgaaaaagtatgtggaggagaagtttggctatcggctcatcgttcaccgctattttgccaagctcgagaaaattcccgccgaaccggagccgtggatgggcatcgagtcgtttcaagagccgcttgactatgcgttgttttgctgtttgatggcgtatttggaaggaaaagcagtggaagaaaagtttttgctttctgacgtatgtgaagaaatccgcgccatgtacccgggtgatctaccggtcgattggacgaactattcgcatcggcgcgcgctcatccgcgtgttgaaaacggcggaacaaatcggactcgtccgccggatggatggggagattgaggcgttcgcccagcatgtggaggaagaggcgttgtacgaagtgccagtgttggctcgttattttatgcgcacgtatccgaaagatttgttgcaatatgaatcgatcgacgaattgctcgccgaggagtggaaagcatcaccgcaagattatcggcgccatcgcctgtatcgaaagctgtttttatccccggcggtgcaccggacggaaggggacgagcaagacttttactacttgcgcaacttccgccatcggctgcgggatgatatcgaagcgcatacgccgtttcggtatgaattgtacaaaaacgccgccatgttgacgcttcccgaacggcaggcgccgtacaccgtatttcctgatcagaaaggaacgtcggaggtcatccttcattttgccgccttggtgcgcgagcggcttggggaatatccgccggatgaatacggccgcatacgattgacgcctgaacaattttccgcctggcttgccgattgccggcgccgctacggggctgggtgggggaaaacgtaccgcgacatgtcggctgccgagcttgtccgcgaagtgctttcggcgctcaacgaatggcgcatggccgatgtggagcacgacaccggaatgatcgtcctttatcccctcctcgggcggatgtcgggacggtatccggatgattttgacgcgaaagagggaggagaacatggcgaatccatgggtgcttcatcgtgcggggctgattaa

SEQ ID NO: 50219 - DNA, 4122 bp, Geobacillus thermoleovorans CCB_US3_UF5
atggcgaatccatgggtgcttcatcgtgcggggctgattaatttttggtattacgacgagcagtattttcatttcgctgacggtaagctgctcttgcggggaagcaacggggcgggcaagtcggtgacgatgcaaagcttgatcccggtgcttttagacggcaagaagacgcccgatcgcctcgatccgttcggttcacgggcgcggcgcatggaagactacttgcttggggaaaaagatgtcgtcaatcgcgatgagcggaccgggtatttgtttttggaatataaacggaaagaatccgaccaatacgtcacaacgggcatcggcctgcgcgcgaagcggcaaaaaagcctcgatttctgggggtttgtcctctttgacaaccgccgcatcggctatgaccttcagttgtataaacaagaaaaaacaggtgaaaaaatcccgctgaccaagcgggagctggccacagcgctcggcgcgggcgggacggtcgtcgagacgcaaaaagactatatggagctcgtcaataagcatgtgtttcgctttgaatcgcttgaggcgtttcaagaattgatcgagctgctcattcaactgcgcagcccgaagctgtccaaagactttaagccgaccgtgatttatgaaattttggaaagctcgctgcctccgttgaccgacgacgagctccgccatttatcggacacgatcgaaaacatggaccaggcgaagcagcagcttgagcagctcgaacgcgacgagcgggcgttgaagcgtctttgcgatcaataccgcctttacaacgaatatatgatcgccgaaaaggcgacagaatacgtaaaagcggtcaagcaagccgaacagctcgctgctgcacaacaccgccttcacgatgaagaagagcaggcgcgaaagacgcttgatgagcttgatgagtccatcacccgcctccgccgtgaagaagacgtgctgcgttcacgcgaaatcgacttggctggccacgaagtgttccagcaagcggagaagtatgaacagttgaaatcggagagggagcgtctgcaggagcggtgggagcggcacgagcagacgatcgcggaaaaagaacggctggaacgccaacatcgccgccgcctcgatgaatcggaagcgcggctggatgaccttgaacggaaacttgaagacgagttggcgcagctgcgagcggatgcggaagaaggagccttttctttgcatgaaacgaacgaagacgattttcaccgccatcgccaaaagcaacaagagttttcgtttgccgcttggaaacaggaagctgaccgccatatcgagcagctcgaggagttggcgcgcctttggcgcaggcatgacgatgtgaaacgacgctatgaagaagcgagcaccgaagcgggcgagcggcggcgggaaatggacgaatggcgtcatcagcaacagaaatgggaagagctgctcgagcaggagaaagagcggtttgaacaagccgtgcttgcctgggtcgagcaaggaggaatcgacgtttccgaagcggacattcaggcgtttttgcgacaaatgggcgccctctatgagctgtattcgctcgatgatctgaagcgcccgttcgttcaagcgtattacgatgccgtcggtaagaaaaaggatgagaaatggcggctcgaacatgacatccgtctgttggaagagaaacgggcagaacgtgaggccgaactgcgtcaatggcgggaacaacgcgaccctgaacccgaacgggatgaacaaacgacagccgcccgcttggcattggaacgggaagggattccgtttgtcccgttttatgccgcggtcgaatttgtcgacgatgtgcctgacgatgtgcgcgagcggatcgaatcggcgctttcgcacgctgggttgcttgacgccctcattgcggcccgcgatgtcgacgtcgactgcgaccgtgtgctcatcccgaaaccggttcatatggtgcatacgttggccgattatttgcgcccagatgcggatgcccctgtgtcggcggagcggattgacgaagtgctccgaagcatcgtgatcaccgatgcggaacaagaaggcggcatgacgatcgacgaaacaggacgctattcgctcggccttgtccgtggccatgcgccgcggagagcgcgggcgatgttcatcggccgtgcggcgcgggagcggtggcggcttgagaacatcgcggcgctggaagccgagatcgccgctgtgggacaagagatcgaccgtctacgtcgtgagcatcaggcggtgggagcggccatccaagcgctcgccgactggttggcgtccttcccggcggaccgcgatgtgcgcaccgcgtttgaggaagggcaagaagcccgccgccaagcggaaagcaaagagcgggaatggaagcggcaagaagaaaaagcggccctccttgcgcgcgaatggaaacaaatcaaacagcagcttcgtgacgaatcggctgagcttgatttagccttcaccttggacggctgcgaacaagcccagctcgccatgaaatcgtacgtccgccatttgcacgaactcgaagtgctttaccgcgaaacgcgccataccgaggccatgatcgcccaacagcgcgagcggctcgcggcgctggaaacggagatcgacgaagcgaaaggcgaacgaaatcggattcgggatgaaaaagagcggatctccttggagatcgttgagatggaacggacgctcgcacaaatgggagcggatgacattcgcgccgaaatcgcccgcattcaagaacggttggcgtctttgcgccgcgaaattccgcgccttgtcaacgaacgggcgcggacggaacagcagctcatgcgcctggccgaagaacgggaaaaagaggcgcggcgggaagcgttcgcccgcgagctcgccgcgatgtgggaaaagtcgtttgcccgtgaagcggcgcttgggcttgtggatcttgatcgttcccgctccctcctggagcaggcgaaagaagcgaaacaacggtacgaagcagtgttaaaagagacgcgttcctcgcttctggcgcggctgaacaccgtctttttccaagagtcgtccaacttgaccgaatatcgggcgtccttcgagccgctggaagaacaaacgaagcccgaatggaccgccgctgccccagacgatgagatggccatgaaagccgcggactggcgggagaaacaagaacggcacgtcatttacctcgactacaaaggcgagcgcgccacgccgtttgcggtgctggcggaagtggagcgcgacatcgtcttgcagcacgagtatatgaaagaacaagaccgcgagctgtatgaggacgtcatcttaaaatcagtcggccgcattttgcgcagccgcattcagcgcgccgaacggtgggtgaatgatatgaataaactgatgggcggcctcgacacatcatcagggcttgtgctgtccattcaatggaagccgaaaacggcggagacggaagcggagctcgatacgaaagaattggtgcgcctgttgcggctcgatccgcggctgcttagagaggaagatttacagcgagtgacgaaccatttccgctcgaaaatcgcccgcgcccgcgaattgcttgaagagcgcggccaaggcagcacgctccatcaaatcattaaagaagtgctcgactatcggaaatggttttccttcactttgtactatgaaaaaacaaacgagccgaaacgcgagctgacgaaccaccgcttttaccaattcagcggtggggaaaaggcgatggcgatgtacattccgcttttcgccgcggcgtattcgcgctaccaagaagcgggcgatgatgccccgtacatcatttcgctcgacgaggcgttcgccggcgtcgatgaaaacaacatccgcaatctgttcggccttgtcgaacagcttggctttaactatatcatgaactcgcaggcgctttggggcgactacgacaccgtgcccgcgttgtccatttgcgaactcgtccgcccgcgcaatgcgtcgtttgtgaccgtcattcattaccgttggaacggccgcgtcaaacagctcatggtcaatgataaagaatgggagacgatcgagacgtga

SEQ ID NO: 50220 - DNA, 1221 bp, Geobacillus thermoleovorans CCB_US3_UF5
gtgagcacggccaaggaggcggctgcctttttccgctctgaaccgggcttccgccgtctgtttatcgagatgaagcacaagtacgagtcgctcggccgcgtcggcggcgcggtgtctttagaggcgttcaccgatgaagagcgggaggcggtggccgcctttttcggcaaagacgtctcccgcgtctcccttatcgcgtttgaaaaacagctcggacagacgaggtttgcgggcgttgggcttgtcgagctgcttgaacagtacttcggcgccccgcttgtctcaaacaaagaacggcgccaggcggaggaagaggaacgggatcgtttttttgcgcgtctgaccgaggagcatcattgggttgagtcggtccgccctcagcgcttcgtccaaacggcgtacgaaaccgaccgccgcagcctggaggaggccatccgccttgtcagcgcggctctcggccgcctcccgctcccgtcatacatgcgcctcccgctctttgcccagcaagtggcgggcgacccgcatgcgttcgatttgtccacgctaccggggagattgttgctttcggcgttgcaagcgaccgtgcccggggattgggacatggcatctgtagagagcgtcaacgagttgctccagtccgtcggcttgctccgtgaggatatcctgaactttgtcacatgcgccaacattcttgctgaaaccaaggacggaccgcatcctgttttctccgctgcctgggaggcgaacacggcgctgaacatgccgcttagagatgtgctgtcgcttgtccgcgcccgccctgcccatggggggacggtgtacattgtcgaaaacgcgggcgtcttttcgacgctgcttgacacccgcgccccgcttgtcagcacgaacgggcaaatgaacttggcgacgatgaagctgctcgatcttctcgcctcttcaggcgccaagctgtattattccggtgacttcgatccggaaggattggccatggcagagcggctgcttgaacggtatggacaggccgtcacgctctggcgcttttccttggacgattatgcggccgccaacccagtcgttgaactcacacccgagcgcctcgccaaactcgcatccgtcacatcggaaccattgcggccggtgaaagaagccatcgggcgaaagaaaaaagccgggtatcaagaggcgatcattgggaggttgacaggggatatcaacgggtag

SEQ ID NO: 50221 - DNA, 1491 bp, Rhodococcus pyridinivorans AK37
atggaggacgcgttggtgcgggacgaccgcctgcgcctgttctcgttcgcgacggccgagaaaagggtgcactacctgtgggttctgcgcgcattcgatcacgcgcgcggcaactactcggtgctgttgcacgccggcgacgtcgagaacgtcctcacccgactgcccggcgcgagcggcgacgacgtgcccgattcctccgagatcccggcgctgctcgagcagctgcacgcgtggggtgtgctcgaacgcagctacgacggatcccgggcagcgacgctcgccgagtaccgcaaccggcactacgtctaccagttcgggcaggcgggctaccgggtgttccgcgccgtggaggacgtgttgtcctcccgcggggaggacgtctcgctgtcacgtctggcccttcccgatctgcttgccgatctcaacgatctcgccgacgcgaacgccgccggcgacggcgagctggtctaccggaagttgagccgcctcgacgcgacgttgtcggacatggccgagcgcgccgcccgtttctatctcgtcctcggcgagctggtgcgcaccaccgaggtcaccccggagaccttcctcgcccacaaggacgcgctgctcacccatatgcgcgagttcagcaccgacctggcccgctacgccccgaagctctccacggcgctcgaccgggtacagaccaccggggttcagaagctcaccgcggccgcggcccggcacgacgagcgggtgctgctctcgttcgaggaacgcgaagcggactgggcgcagcgctggtggggcgtcgaacactggttcgtcggtgtgggctccgaaccgagcgaatccgaacgcctgcgcggcgcgaccatcaacgcgatctccgcggtgctcgggctgctgcgccggctcaccgagcagcgtcgcgggggtgtcagccgcgagtcgcagctgcggcatctcgcgggctggttcgctgccgcgccgtccgaggaggccgcgcacgcactgttcgatgcggtgttcgacctgggccggccccgacacttctccgtcgcccatcccgatgccgacatcgtgccggtcacccgctcgtggtgggaagcgcctcccgtggagatcgcccgcaccctcgccgagaccggccggcgccccgcagcgggagcgccggggcggatccagcgcaacgacgccggagtacggcggctgcgcgaggcgcaactcgagaagcagcgtcgccgggccgaagcggcgcgttccctcgccgccggaggggtgcgcgaacggaagctgagcgaaacggaagcagaggtgctgttgagcctgctcgacgccgcactgtcggcccgcgtgcccgtgagcgggcgggtgcgcagcgacgatgcgtcctctggtacgcagaacggcgtcaagctcaccctccgaccgagcggcgagtcgacggtggtgcacaccgcgcgcgggcgcctgtatctcgacggtctgtcggtggaggtgcgatga

SEQ ID NO: 50222 - DNA, 1395 bp, Rhodococcus pyridinivorans AK37
atgagggcgcgttcgattccgtccgtcgagctggattcgtatcagcgcgccgcgcggctggtgctcacccaccacctcgtcaccgcgacctttcccgaccggtcggcgctggcgacggtgcgccgctgggccaccgagctgcgggaggatctgctcgccaccttcggataccggctcgaggtcaccgagaccaccgcgcggctgttcaccgtcgccgatcgcctcgacgcgggggcgggcacgtcgacgcacaccggccggccgttcgaccggcgccgctatgcctatctcgcgttggcgatcgcggcgctcggtcgcggcgccgggcagatcacgctgtccgaactcgccgagcacgtcgcgtccgaggcgagccgggtggacggtgtcgagctcgacaccgaacgtgccgccgatcgcgatgccttcgtcgatgccgtgacctggctcggcgtgcgcggggcgatcaccctcgccgacggtgatgcgggcaggtgggcgagcgatcccgacagtggtgaggcgctctacgacgtcgaccgcgcggtcgtgcatgccctgttccggccaccgcgggcgttgcagcacctcgaatcggtgcgcggtctgctcggcaatgccggtgccccgcaatcggatacggcggaggtccggaggcgggtgcgacgcgcactggtgcagcgtcccgtggtgtacgccgacgatctcgacgacgacgaagcgctgcagttggcgttgccgcgcaccaccgacgaagtaaagttgctcaccggcctggtgtgtgagcgtcgcgccgaaggtgttgcgctggtggatacctcgggacgactgtcagatgtacggtttccgaacacggggacggtcgcgcaggtcgcgctgttgctggccggggagatgtgcgatcgcgtcctcgatcccgacgcccctgccccaccccggatacccgtacctgcacagacacaggacgctctcctcgcggccgtcgattccgcgatcccgaggtcgacggtgttcaccccgctcgcggcgtccgacaccccgatccccgacgagctggagcaggacgacgccgctcgtgccccgctcgagcatcccttgctcgaggattcgtggctggcgggcacggtcgggcgcctcgtcgacatctacggccggaccttcgccgcgcagtggcaggccgaccccgcgggactcgccgaggccgcggtggacatgctcgaccggctgcggctggtggcccgggtacccggcggggtgctcgtcctgcccgcgatcgcgcgcttccgcggcgtgacggtcagtgtgcgcgaacgtgatccggaaatcgacctgttccccgagaccaccccgccgacagtccccgcacccgatacgaacccgacggagatctcatga

SEQ ID NO: 50223 - DNA, 4161 bp, Rhodococcus pyridinivorans AK37
atgagcagcgcccgattccgccccacgcgtgccgggatcatcaacctgtgggactaccgcgaccaggagttctcgttcgccgacggacgactggtgctgcgcggaccgaacgggtcgggcaagacgaaggcgctcgaggtgctgttcccgttcgtgctcgacggccggatcgaaccgcgacgtctgaacccgttcgccggcgaggagcgcaccatgcgctcgaacctgctgtaccgggggcaggacagcgcccactcgtacgtgtggatggagttctgccgcggccgcgccgacgacccggaggccgtcaccatcggcatcgggatgcgcgccacccgcggcaacgacaaggtcacccgctggcatttcgtcgtcgacggccgtgtgggagtcgacttctcgctgctcgacgacgaggaccgaccgctcacccgcaaacaactggtcgatcagatcggggccgacgcgatcgccgatcgtcccgtcgactaccgggcggcgatcgacgcgcgcatgttcggtctgggcgcacaacgctacgaccagctgatcaacctgatcctcacgctgcgccgcccccagctcgccaagaacctcgacccgaagggcctctcgcaggcgctgaccgacggtcttcgtcccctcgacgacgatctcctcgtcgaggccgcccgctcgttctccgcgatcgaggaggtcgaacgcaccctcgaatccctcgcggccgccgacgatgcggcgcagcagttcgtcaaggtgtattcgaagtacatccggcagcaggcccgtaccgccgtcgacaaggtcgccacccgtctcggggtggtggacaccgcggtgcggtcgctgcgtgaggcggccgaggcccgcaccgaggccgccaccgcacgcacggcctcggaggaacagctcctggtggccgaacgtgaccacgaacaggcacgcaccaccctcgaggcactgcaccgctccagcgcctacgagggcaaacagcaactcgacgacctcgcctcggcggtgaagaacctcgagcgcaccaccgccgcgcaggccgagcaggcgaaccgcgcccaggccgtcgtggccgaccggctccgcgaccacgacagtgcccgcgacgcgctcgagacggcgacggcggcacgtcgtcgcgccgaggacggcctgagtgcggcggccgaggacgccggcatcacatggaccggtctcgacggcatcgaacggaccgagcagctcagcgcggcgatcgacgcgctcgccgaggaacgcgacgccgacgtgcgcgtggtgcgcagcgcactgtcccagctcgacggtgccgccgctgcgcggtcgcgggccgaggctgccgcggtgcgtgctcgcgcgcaacgcgacaccgcgtcggccgcggtggaggccggcgagaccatggtcgagctgtcccgcagcgaggtcgccgccgagctgggccggtggtggtccgatcgcgccgagaccttcgcggctgtgggcctgtccaccccggtcttcgaggcgctcgacaccgccttcggcaccgtcggtcaggacgatgccccgtccccggcggcggtgttcgccgagcacaccgggcccgtgctcgacgacctgcggttccggcgtcgcgtgtgcggcgcggagatcgaatcgctcggcacccggatcgccgaactcgaggccgaacgcaccgccgtcgcagccgaaagtgacgacgctcccccgacctccccggcccgcaccggcaaccgcgacgatctcgtcggcgcgccgctgtggcagctcgtccgcttccgcgacgacgcctcggcgcaggacgccgccggtatcgaagcggccctgcagggcgcgaacctgctcgacgggtggatcaccgacggcgtcggcgacctgccggacatcgagtcggagcaattgttggtgccgctggcacccgggcaccggccgagcggtcccacgctcgccgatgtactcgttcccgaaaccgacacggccgtccccgaggaacgggtcgccgcggtgctgtcgtcgatcgcatgggccaccgatcccggcccggacgcgcgggtgtcggtcgatgcgcacggtaggttccggcagggagtgcagctcggtcgccacgtcaaggagcaggccgagttcatcggagccaccgcccgcgcccggcggcggcagcgtcgcatcgtcgaactcgagaccaccatcgccgagtgccgagccgacgtggcgtcgctgcgcgagcaggatcgcgagatcggcgaccggctcaccgcactcgacgaggccgtgaagtcgttgccgcgcaccggatccgtgctcgccgcgctacgcaaggtcaccgaatgcgccggcgcgctgcggaccgcatccgaatccgcatccgccgccgaccgcgatctggaccaagcgatcgccgcggtcgccaccaaagaacagcacctgcggtcgacggccggccgacaccgggcaccgctcaccgcgacggaactcgacagtctcgatgcggccgtgcggcacttccgttcgcagggccaggccttgcagcgcgcgctgcgcgagcaggtcacctgcggtgatcgcctccgcgacaacgacgttcgcctcgacgaggcgcgggtctccgccgagaatgcggccgaactcgcggcggagaacgccgagacgctggccaacgagcagcagaagctcgagacgctacgcgagtcgatcggggcgagcgccgaccgaatcgatgcccagctcgacgaggcccggcgccgaatcgaggcggcgaagaccgccgagcggaccgcacgtaaggcccacgagtcggcgctcgagcggatcggcaaggccgaggccgcccacacgggcgccgagcagacactgcggtcggcgctcaccgaggcccgcgccgacgccgatgctctggctcccttcgcccgccgcgacctgctgaccctgctaggcgcggagagcgagcacatgtggccgtccagcgccgccgcgtggctcgacgccgatcagctgacctatcggatccggcagtcccccgacgacaccgtcgacgtgctgcccaccgaggttgtcgcgttgttccgggcactcgacgccgccaccgactcggtcacggcctccgagtcgacccgcaagtccaccgcgtctgcactgacctccgcgctgcaggagttcgacgccgaactcgcccggggtcgcgactaccgcctgcattgggacgctgccgacggcatcaccgtcgtgcaggtacaggacgaacagggctacacgtccgtcgcggcgttcgcgcagcgcatcgcgcgggcgcggcaggaacaggagaccctgctcaccgactccgaacggcgcatcctcgaggacgcgctgctcaccggtctcgcgcagcagatccacgagcgcaccgtcgacgcccgcgacctcatcgcccggatgggtaccgagatgcggcaacggcacatgtcctcgggcaacaccatcggggtgcactgggtgctcgccgaccatctcgacgagccggcccgggcggtgtgcaaactcctcgaccgcgacgcgtcgatgctggcaccggacgatctcgcggggatccgcgcgcatttcgcctcgcggatccgcgcggagcgggccgcgcatccggaacggtcgtacccggagatcctcgccgcgacgctggattaccgccggtggcgggtgttctcgttcagtctcgtcggtgcggacggcagcgaggaccgcctcaccccggcccggcactcggcgttgtccggtggcgaacagtccgtctccctgcacctgccgttgttcgcggcggcgcacgtgatgctcgattccgccgacccgcatgcgccgcgcctgctcgccctcgacgaggccttcgccggcgtcgacgacaccggtcgcagcgaactgctcggcctgtccgtgcaattcgacctcgacctgttcatgaccggtttcgacctgtggatcacctatgccggtgtgcctggctgtgcgcactacgacctgtcgcattcggtggccgagcacaccgtcgccaccacgctgctggtgtggtccggtggcgaactgctcgccgagcacgacgggtcggatctggagagcgcgctcggatccccgcgcacccgacggatcacacgcccggtggaaggagccctcgagttcgcctga

SEQ ID NO: 50224 - DNA, 1530 bp, Rhodococcus pyridinivorans AK37
atgggcgaacacatcggtcgcgacctgttccgtcatctcgtcgccgacgaagcgaacgagtacctcgcggtgatggactgcttcaccgacctcctgctcgccgatctgtccgccgacgatatcgcggtctcgtgtgcgcggcgcggggtggcgctcgacatcgcggtcgtcgatgcccggtgtcgcagcctggtccggtggggcaatctcgcactcaccagcggcggaaccgacggtggcggctcccaccggcggagcgctcccgagaccgcctcgaccgaggtccgtgcccgataccggccgacaccggccgggctgcgggtgcaccgcgagaccggcaggcttctctccacctccgacgacgtgcgcggcgtggcacgcgtgtcgctccgttgtgtcgcggacgggctcgcccgcatcgaggagctgctggtggacgacgggaacgtgcccgatcgggacgagctggccgcccacgtcaccgccctgttcgcgcaccaccggatgttcaccgacagcgtcgccgatttctattcgcacctcgccgagatcctgagccgtctcgagcactccggccgtcccgaacactcatccgatcgcgaacgcgccggggcggtcgacgattacgcggagaccaagaacctgctcctcgactacgtcgacgtcatcggttcggacgtcgagcgcctcgcccctctcgtcgccggcaggctcgaccggatcaggccgcgtctggactccctgctcgccgcgttgcgcgagtccggcctgccgaacaccgtgcccgggtcccccggtcgccgtcgcaccgactgggacgaactggcgcagtggtacgccgaggacgccggcccgcgccgcatgcgcgaggcagcggcggaggcgctgaaccggctgctcgtgcgcactcggcggatcatggcgagcacaccgggcttctcgcaccgcgcagatctcctgcgcctggcccggtggttcaccgagtcctccgacgagcagggccaccggttgttcgccgcgaccttcggtgccttcccgagccggcacctgctgctcggccccgacgagaccgacccgcgagtgggtgcaggcacgtcgtggtggcgggccgatcccgtcgtcgtgcccgtgtcgttgcgcgaacgcggcgaccacacgtccctcggggccgtcggccgactccccgattcgatgcccggccgggtccgggccgacgaactcgcccggcgagagtcgcgccgccgctccgacgccgtcgccgaactgagtgcggcgggcgatctgcacggagcggacctgtcggcggaggcgcgcgacgtcctgctcgacgtcctcgccgccgcgctcgcgggccacctcaccaccgacggtccggtgcaggtggacgatcccgatctcgggttgtcgctgacggcggagcccggcgccgacaccgtggtgcactcccccgacggcgatctcaccgtgcacggtttctcgttgcgcacgtcggtcacggcatcggtcgatcacagtgcggcggcgccatga

SEQ ID NO: 50225 - DNA, 855 bp, Rhodococcus pyridinivorans AK37
atgagcacctcgcacgcgagcacggtgtccggggacgtctccggtcggcgggacgcggcgcgggcgctgctgcaacagccgatcgtcaccgccgcgagcgaacgggagaccttcgacctcgttcggcgccacgccccggccctgaagtcgatgttcgccgaccgcctcggataccggctcgtcgtcgaaccgaccttcgcccgtctgatcaaggcaccgctcgagcccacctcaccgcaccgggcgctccgccacgccgacggcaccgagttcggcgcgatcacctacgcgtgtctcgcgctggtgtgcgcggcactgctcgaacccgggaccggcgagagggtgtccgtcgacgacctgctcgagcaggtgcgcgccgatgcgcgcgagaacgggatcgtgttcggcgacccggtgtccgaggagcggaacctcgctgcggccctgcgcgtcctcgaggaatggggcgtgatcgccgagtccggtcacggggacgaggtgagcggcgacgaggtgaggggcgacgagccgcatctcgacgtccaccgcgacctgctctcccagctgctcgacactcccctccatgggatgcccggtcccgcagcggcactcacacgtcacgagcacgaacccgccgctctccgcctgtaccgcaggctcgtcgaggacccgttcgtcgcgcgcgacgaactggacgacgagtcggcgacgatcctcgcccgcgaccggcacgagctcgcccggatgctggagaacgacttcggcctcgtgctcgaggtgcgtgccgagggcgcgctcgcgtacgacccggccggcgtgctcaccgacgaggcgttcccggggtcggcaccctga

SEQ ID NO: 50226 - DNA, 4227 bp, Rhodococcus pyridinivorans AK37
atgacccactcgtccgacccgtccgccctcgacgagaactctccaccccgtttcccggatcgctggcgtctccaccgcgccggcatcgtgaacgtgtggcactacctggacgtcgagttcgtcctgtccggtgggcggatgatcctgcgcggcaccaacggatcggggaagtcccgcgccctcgagatgttgctgcccttcctgctcgacgccgaccgcaggcgcatggacgcgacgggcgccgcgaaggtcgatctcgacgaactcatgcgtaccggggcctcggacaccaccgaccgtgtcggctatctctggctcgaactggcgcgccccagcggacatctcaccgtcggggcgcaggtccggcaccgcgccgacgcccgtcgcagcgacgtgcacttcttcacgacacctttgcgtgtcggcaccgagttgcacctcatcgatgacgcccgcatcccgctctcgcgggagcgactcgccgaactcgtcggtgccgacaacctcacccgtgatccggagcggcatcgcgagaccgtgcggaagtcggtgttcggcctgcacgcggagacgggacgcgaacgctacgacggcttgttgcaactgctgcacaccctgcgctcacccgatgtcggccaccgcatcgacgagggacgcctccctcagatcctgtcggatgcgctgccaccgctgacggagaacatgctcgccgaagcgggaggtcgcctcgacctgctcggtgacacccgccaggaacaggtccgtctcgaagcggcgcacgcacacgtgctgcggttccacgaggtgtaccggcagtacgctgcggatctgctgcgcgccggcgccgagaccgcgcgcgacctcgcgcagcgggtcgtcgagacgcgacgcgcactcaccgtcgcggaagccgaggcggccgacctcgacgcgcaggccgccgccgtggacacccgcctgaaggagcgccgcgaccaggtcgccgaactcgaccgcgcgatccgcggactggagacccacgagatgttccggtccgcggacgatctcgcgcagcgccagctcgccgtcgatgcgctccgccgcgccgccgagcacgcgaccgccgccgccgatcgcagccgcctgcaggaacggcgccacaccgaccacgcggcccgcctcctcgacgaactgacctgctcggtcacgcgtgccgcgagacggcttgcgacggtaggtcgcgacctgctgtcggtgggtcttccgcacgacaccgcgccgaccacgctgcacttctccgccgaccgtccacccgctgtgctcgagcccgtgcgcaccggcatcgacgacaccaccgagccggtggtgcggccggtggtcgcgacggtctccctcgacgccgggcacgtcgacgaggtccggggcgcgatcctgcgtgccgccgaggcgacccgtcgccggcgggaccaggcgggtcggcgactgctcgaggcgcgtcgactcgacgccgccgcgcatgcggtccgggaagccgaggcggcggccgaccgcgcggcccgcgacgccgagcagcgtgccgtcgaggccgccgagacggatgccggtgtcggtgcggccgccgccggtctgcagcaccggtggcgcgagtggatcaccgccgaccgcacgacggctctgctgccggaactcgatcgggatcgggtcatcctgatgcgccgactgtccacgcgactcgacgcactgatcgactcgtcccccaccgacgccggcgacacggactccgaggacgtcgacgtcgattcggcactcgccgagctggattcgctgcccgcggctgccgctcggtccgctctgagcgacctcgtcggcgccccggccgatcgcgagcgccgcgaacgtgaggcgcggaccgcgcgcgaggacctcgtccgggaacaggcggcactcgacgcgatcggcgagggaccggaacaggcaccctggcacgtgcgcaccgacggtgtcccgctgtggcgggcggtcgagttcgtcgacaccctcggggacgacgatcgcgccggaatcgaggcggcgttgctctccgcgggtttcctcaccgccacggtcgacggcgagggccgcttgcgtgcactgggcggccaggtcctcgtctcgccgcgcggtgaaccaccggcgcagcccctgtcgacggtcctgcgtcccgaccccgaggccgacgtgccgcgcccggcggtcgaggcggtcctcaacacgatcggattcgaggacgccaccgcggtggcctccgtctcgcgggacggccgctggcacaacggcgttctgcgtgggcgccacaccgccgagaccccgggctgcatcggcaggccggcccgggaggccgcgaccgcggcacggcgggtgcgtctcgacgagatccgcgccgaactcacccggatcgacctggcggtggaacagctgcgcgtcgactatcccgacgcggcgcaccggcgggcgaagatcgacgcgcacctgtcgaccgcgccgacctcgcacgccctgcgctccgcgctcgaacgacgtcggcacgcgtacgcgcatgtgcggtccgcagcgaacaccgcggtggaactgcgtgagcgggcgacgacactgcgtgctcgctggaccgccgagctcgacgcccaccgcacggcgtgcgagcacttcggcgtgcccggcgatgttccggaactcgaggcgctggtcgccggatgcgcctccgcagagacactgtgcaccgagctggcacgcgatctcggtgacgtccttgctgcccacgtccggttcacggatgccgccgaacggtgcgtgcaggccaccgccgagcggatcgactcggaggagatcgccgaatcgtgccgctacgaatggcacgcgaaggccgcggtggtcgctgcccagaccgccgctgtcgacgtcgacgccgccgacctggcgcaggaactgcgtgactcggaggccgaacgggcacgcgccgacgaacagttccggcgcacggtcgcccatcgcgaccatctcggccgtgccgtcgccgaggtgctgcagcgatgtgctgccgcacgcgaacggctcgaccgcgaccgtcgcgaactcgccgcggccgccgaactgctcgccgctcacctgcagctgcccgaactacgcggcgcactcgaggaggatccggagtcggactccgcctctgcccggacggttctgcctcccgtccacctcgaggatccggatcacgtgctctccgtggcccgcaccctgctggccacgttgccgccacgcacgggagtcgacgagaacgcgatgctcgtcgcgctgcaacagttcgaccgcgacctcacggcccggttcgacatcgagcacacggtgacgcacggcgcccatcgcgtccggatcgccggggcgggtgacgacaccacgcccgcgggtctctcagtcaccctgacccggcaggtcgaggacggccggcgggcactgtcgcaacgcgaacacgacgtgttcacgggattcgtgctcggcggtgtggccgacgaactgcgccggcggatcgagcgggcacgacaggtgatcgccgcgatgaacgacagtctcgccgacagccgcacgacgcacgggatcggcgtgaggatcgagtggcgccccggtggcgaggacgccgacgcggcgcggctgacgcagctgctcaccgccaccgagcggtcacccgaggatgcgtccgaactggtcggggtgctgcggcgccgggtggaatccgcccacaccgccgatccgtccgccggctacgcgcagcacctgtcgcaggcactggactaccggcgctggcacgaggtcgaggtgaccatcctcggccccgaaccggaccgggagaggcggatctccgcgcgcgccaagatatcccagggtgagacccgattcgtgtcgtacgtggcgctgttcgcggcggcggacgcctatctctcgggcctacccgacaccggcaccgcactgcggctcgtgctgctcgacgacgcgttcgccaagatcgacgacccgacgatcggtgaactcatgggtctgctcgtacggcaggatatcgacttcgtcatgaccgggcacgcactgtggggttgtgtgccggaggtgcccgagctcgacgtctacgaggtccggcgactcgccgacggcgcggccgtgacgacccgcgtgcactgggacgggcgcgtccggcaactccgaccgctcaccgagctgcagacatga

SEQ ID NO: 50227 - DNA, 1572 bp, Actinoplanes sp. SE50/110
atgcgggtgcggccggacagttccgaggacgatgacgacgaacgtcccgctgcgggcctcgacctgtggcagctcgccggcctccccggcggcctgctgcaggcaagctatctgaccagccggtttgcggcgcagtaccggctgatcgtggacgtgctgctggccgagcaggaacacacgctgaccggcgtcgccgccaccgaactgcccgatctgctgcgcaggcgcctgcgccacctcggcgtcgacacggccctgctcgatgatcccggcttccggctcaaggaacggatggcccggctcgaacgctggggtgtggtgtacacgttccaggacaaagccgtccgggacgctgaattcgtcctcgaccgagaccggtaccagctgaccgagaccgtcgcccagctgcaccgggcaatcacctcgctcggggatgacagcgcggccgaagccgccgccactctcgcccccggcatcctgaccgcgaacctgaacctgctgtacgagtacgcccgcaccgacccggccgcagccgccgcagcctggtcggtgatcgccaccacgcatcagtcgatggtgaaagccgccgccggctggcaggcccgcctcgccggggccctggccggggccccgacgccggaaaagatcaccaccgtgcaggagacgctgcgccgctacgtcgacatgtggggcgccggcatcgacacccactccgacacgatcaccacccgtgccgggaaactcgccctgctcccggctggggtgtggcggcgcatcgccgtacacaccctcggcaccaacgccgacaacccggcgatcgacgccttggtcgacactcaccagcacaccctgcaaacgctgcggcgctggttcgacggcccggactgccaggcccgcaaactacgccggcagatgcgcgacacgatcgggccgctcctgcgcgggcagcgcacccttgccgcggtcggcgggcacgtctcccggcgtgccgaactgctcgccctggcggcacgcctggaatcagccgccgacgaccacgccgcctggcgactgtggtgcgccgccaccgggcttttctccgcccggcacctaccgggcgagacgaacccgccggccggcagcgccggcgcggtgtcgttctgggaagccgacccggtcccgatcgaagcacggctgcgtaaacaaggccccaaagccgtgaccggcaccgcagcccgcatcgccgaccgcacgggcgccaaacgcgccgcccgggaacgtgctgcccgcatggcagcgcacgccgcgctcaccgaagccgcgatcctcgcccggtccgggcagcgactctcgcaatggcgcaacgtaagcgccgatgagctgcagatgctgctcgttctgctggccacgatcgccgcagcccgccccgacccgaccggcatcaggtcggcgaccaccggcgacgcgcgctggctgctgcacgccgacccgccaccagacggcgcacccgccgcgatcgtgcacacccccgacggacgcctggtccaccccgacatcgccctgcacatcaccccggccgggagccgcccgtga

SEQ ID NO: 50228 - DNA, 1164 bp, Actinoplanes sp. SE50/110
gtgaacaccgcgacctccgccgtcgaaaagcaggcccagcaggcattcctcggtctgctcgcccaacccctgatcaccccggccaccaaccggatcctgcaccggcacgtgctgcgccaccaacgccagatcaccgaccacgctcgccgcgccggctaccgcatccaacgcgtcggccgcgccgtccgtctcatccgggtaccgatcggcggacaggtcaccgcaccaccacgccccgccggcgcgcccggccggcgactgctggcactggcgtgctgcctcgccgcctgctgtgaagaagtctcgaccaccgtcaccctgcagcagctgtccgacatggtccgcgacctgaccggcgccgccgggtccaccgtcaccggctacgacccggaactgaaaccgcaacggcggctgctgcgtgacgccgccaccctgctcgccgactggggagtgctacgccgccgcaccagcgacgaaatgctgctcgactggaccgaagacggtgccgggcccggcgccggctatgacgtcgaccgggacgccctgctgctgatgaccagccccgacgtcctggccgcggccctgcacaccgccgcggccgatgctgagcagctggccgcgacccgcaccgtgcggcagctgcgagagctgctggaaacccccgccgtcgtctacgccgacctcgacgaacacgacgccgacgcgctgcgcaaagcccgcggcctgcgcaccgccgatctggcgcagatgaccggcggcacggtggaagcgcgcgccgagggcctgctcctcgtcctaccggatgatcccgaccggcagccgagcgtcgtcgactggccccgcgcccgcgccgcggactgggtcgcgctgctgatggccgacctcgccggccgccacggcgcccggacctccaccggcacggtccgactgaccggcacacaggtcgacgaggtcgtcgacgaccttgtggcatggcgcggcgactacatgtcgaaagaccagaaaaccgtgcccggcagcgtgcgcgccgacgccgaaacgatcctgaccgaactcggcctgctccaggtcggcgccgacggctcgtggacgttgtcaccggtcgcagggcgttaccgggaccccgacatcaccctgatcgacaccacggagcccacccgatga

SEQ ID NO: 50229 - DNA, 3177 bp, Actinoplanes sp. SE50/110
atgacgatgatcgacctgcccgcgccggggccggccgccaccgacgagcaactggccgcctggcgtgacgccgtgaccaccgccggactccccgccccgtcccgcagccgctggcaggtcctgcgcgcaggcgtgatcggactgtgggaattcgacgtcgccgagtactggttcgctgacggccgggcccagttcgtcggccagaaccagtccggcaagtccaccatgatggccttgaccacgctgctcatgctcgccggcagcctcgaccgcaagtacgtcgacaccttcggcgagtccgagaaggaataccggtactacgtcgaacccgtcaccgacgaccgggaccggcgtgacgcctccacctcgaccaaccggggctgggcctgggtcgaatacggccgcgtcggcccgctcggcgcccccgaattcttcaccaccatgctctacacccagaccaaacgcggcgtgaagcagatgacccgggcctgggtcgtctgccgcggcaccgcccgcgtccgcgacggcctggacctggccgtcggacaggcggtcaccgagcccagggaactcgagggcgtcgacgggctcactgtctacccgaagggcgcggactacaccgagcggctcgccaccgacctgttcggcttcgacgacaccgaacgctatgcgaccgtgatcgagatgctgaaggtgctgcgtaccccacacctggggcagaaactcgacccggcctggttcacctcccagatccgttccgcgcttccgccggtcgcgaaaagcgaggtgaccgagctggccaacggctggcaggaactcgaacagctggcccacgaccgtgaccacgccgacgaagcccgcaaggcgatcaccgtctacctcaaccgggcgtggcggccctgggccgatgccgtcctgcggctgcacgccgacacactgatcgccgctgacgctgcgttcatcaaggccggcgacgacgccaccgcggcggaaaggaagcttgagcaggcgcgcgcccgcctcaacgaggagactcagaacaccatcgacctggagaaggccctcggacggacccgcgccgacctgatgcagctgctgcgctcatcggcgtacacgaccgccgttgaccgcgccgacgacgcgaaacgcctgcgcgccgacgccaacgccgctgctgagcgcgcccgcaaggccaccgcccaactggccacgacccgcgttgacctgcagaaggcaaccggccgtcgcgacacgacccgggcagagctcggcgttgcccgagacgaggtcgagatcgcgggcgggcacgctgtcgaggccgccaccgccgccgggctcggcgaacacgcaccggcctgggcagccgccggcgacgtggaccggttcgacgccgcaatcgccaaccgccgcgggcaagtcgccgctctccgcaaactcatccgcgccgccagcaccgccgccgcgacctggaacaccctcgacgacctggcgcagaaggcgcaaaccgaactccacaatcggacggccgcagccaccgccaccgagaatgctctgcagcaagcggtgcagacgctgtcggacgacctggaacgctgggcttcggcactcgacgaatgggcgccaccgaccgagatccgcacccagtggatcaccgccgtcaccgaccagacccgcgtcgagcggccccgggaactgctcaccgccctgctgacccaccagtggctcgaaccggtcaccgtaccgctgatcacccgcgccgccgacctgcgcgccgccgcgaaaacggccacccaccaagcagccgcggcggacgccgaagctgaccggctcgccgccgccggcgaccccatcccgagcccgccggcccgctggacccgccgtgaacgccccgccttccccacagcggcgggcgccccgctgtggcgactgctcgatccggtcgacgatctcgaccccgccgtcctcgaccatgtcgaggcggccctggccgccgcgggcctgctcgacacctgggtcactcccgacggcaccttcaaccccgagcacggtgccgacgtcgtcatcaccaccggcaccctgcctgccgcgacaacctcgctggccgccgttctccaacccgccgaagacgccgccaccctcaccgaggccgtcacgaaggtcctccacggcatcggctacacccctgacggcccgctcaccacgaccgtgtgcctcgccgccgacggacgctggcaaaccaccgccgcagccggccgggcagcgcccgccgaacacggcgctgcattgatcggcaccgccgcccgcgccgcgacccgccgccgcaacatcgcagaactacgcgcacgggccaccgcgttccgcgacgaagcgcagcgcctcgccggtgaagcagacaccgtcagcacccgcgtcaccagcctgcgcgccatcgccggacaggcacccaccgacgccgacgtggtcgctgccgccgccgctcacactgccgcgaccgccgaagccgagaaggccggcaccgcccaccgcgacgcccgcagccgcgaggcgcatgcccgcaccctgtcgcaggagaagtcagcagaggtcacccgctacggcaccgacaaccggctgcccaccggagaagaacaccttgacgcacttgccgcggccctcgacaccaccgccaccgccgccggcaccctgaggctggcactgcgcgggctcaccgccgccaccgctgccgcaaccgatgccgccgaccggttcatcaccgaagaggatcgggtcagcgccgctaccaccctcgccgaggacgaagcggcagccgccgaactggccgacacgaacgcgaccctggccgaacaattcgtggacgccgacgctcaacagctgttcgcccaggccgaggaactcgaacgcagagtcgaggaatacggcccgtcgatctcagccagccgacgcgaaggcctggcccgctccaaagaggcaggcgaagccgagaacgcctggaagagcgcctgcaaggaccacaccgcagccggtgaacaccgcgacgtcgcagccaccgcctggtggacccccgtcgacgccggtctcaccaccgcccgcaacctgcccaccccggacagccgcgacctgcccgccgcgctagctgtactgaccacggacgttggtgacggggagatcttgaaatag

SEQ ID NO: 50230 - DNA, 1587 bp, Streptomyces cattleya NRRL 8057 = DSM 46488
gtgtccgacgctccgccgccccagccgttcgcttatctgcaggcgccgaacgccgccctctacggccaggtcctggccgtgttcgcgcaggcacgggagcggttcatcgtccatctgcggccggaggacgtggccgcggagctgcgccagggctccggcggcacggcggcggtgccggtcgggaccgaggcggtcggcgcggcgctggagaagctggtcgagtggggcaacctccgtgcggacgccgacaccggccgggtgacatcggtcgaggacttccaccgggcgcgctacctgtaccagctcacccgccacggccaggccgcgctgcgcgcgatggccgtgtacgagcaggcgctgggccggcgcggcgagttgcagtcggtcgcgctggcggacatcgccgagcagctgggctcgctgctggtcctcgcgcaggcggaggatcccgatccggccaagacccacctgctgctgctccagatcgccgagcggttcgggagcctggcggacaacgcccaggcgttcatggcctcgctgcgccgcaccatcgacttccaggacggcgacgaggaggcgttcatcgcgtacaaggaccggctggtcgagtacatcgagcgtttcatcgccgacctggcgggccgcggcgcgcagatcgcggacctgctcacccggctgaacgcggccggcgtggggcgcctgctcctggcggccgcccgccgggaggccggtgacgccgtacccgactcggacgaaccggaggcggagctggcccgcgcggaggcggcgcagtcggcgctcgtcgcatgggagaaccgctggcggggcctggccgactggttcctgagccggtcgccgcgtcagccctcccaggcgaagctgctgcgcggtgctgcggtcagcgcgatcaccggtctgatcaacaccgtggcagcgctgaacgagcggcgcggcgggcgctcggatcggtcggccgacttccgggcgctggcccggttcttcgcgcaggccgcggacgacgcggccgcccaccgcctgtggcgggcggccttcgccctcaccccggcccggcatctgacggtcgacgccgctacccaggcggcctggcaggaggcggatctcgctgccaccacgccgtgggccgaggccccgccgctggagatcagcccgcggctgcgtgagaccggttcgtacgagcggcgcggtaggccgaaccgggtcgcggaccgcaccgcggcgcggcaggtgctggccgagcaggtcgagcgggaggccgcccagaccaccgccgcccgggctcggctggccaccgacggcccggtgctgctctccgagctggccggcccggacgggctcgacccgcacgcgttccgcttgttcctcgcggtactcggcgacgcgctgtcggcccgggtgccgggggagagcgagtcctcggccctcaccggggacggcacgatggaggtccggctgaagctggtcgacccggacacgacggtgcggatcccgaccgcggacggcgtgctctgcgggccggagcacatcatcgagatcatcgacctggcgccgacgggagatgtggtatga

SEQ ID NO: 50231 - DNA, 1191 bp, Streptomyces cattleya NRRL 8057 = DSM 46488
atgaccgacgcggacgttcaggccgagcggcgccgggccgcccgcgcgctgctcgcctcaccgctgatgaccagcggaagcgaggccaaaagaagtgaggactttcggctggtccgcaagcacgcgggcgagctggcgtcctggttcacccaggagaccggttggcggctggtggtcgacgcgggggccgcgcggctgtacaagacgcccgcccggccggatgacgcgacccggcccgcccgggcgccgcggaccagggtgccgttcacccgccgccgctatgtgctgctctgcctggcgctggccgtactggaacgggccgacgcccagatcaccctgggccggctggccgacggtgtgctgacggcgaccggcgacccggtgctggtggcggcggggatcgagttccggatggaccgccgtgaggagcgctccgacttggtggccgccgtgcggctgctgctggagtggggtgtcctgcaccgggtggcgggcgacgaggaggcgtacctgtcagaggcgtcgaacgacgtgctctacgacgtgcggcggcgcgtcctggccgccctgccggccgcgacccgtggcccgtccaccgtcgaggccgccgccccggaccagcggctgaccctgctcacctccgacgtcgcgcccgacaccgaggagttgcggctgcgtgcgctgcgccaccggctcacccgcagactgctggacgatccggtggtgtactacgccgagctgccggaggacgagcgcgcctacctggtctcccagcgccacgcgatcacccgccggatcaccgaactcaccggcctggtcgcggagatgcgtgccgaggggatcgccatggtcgacccggaggacgagctgaccgacctgcggatgcccgagcagggcaccgacggccacgccaccttgctggtcgccgcccacctcgccaccgccgacggcccccgcaccgagccgcaactcgtcgagctggtacggcaactggccgcgcaacaccgctcgtactggcgcaagggcgccgccgagcccgccgcggcggccgagttgctgtcccaggctctcgaccggctcaccgccctcgacctggtgacccgcgagggcggccacgtcaccgccaagccggcgctggtccgctacgccctggccgccccgaccatccgaaaggcccgttcccgcgcatga

SEQ ID NO: 50232 - DNA, 4104 bp, Streptomyces cattleya NRRL 8057 = DSM 46488
atgaccgctcctctgcccgagccgacccgcacccgctggcagccgttgcgcgccgggctggtcgacctgttctactacgacgccgaggagttccgcttccacgacgggcggctgctgctgcgcggcaacaacggcaccggcaagtccaaggtgctcgcgctcaccctgccgttcctcctggacggcgagctcgccgcgcaccgggtcgaaccggacggcgaccgcgccaagcggatggagtggaacctgctgctcggcggcaagcacccgcacgacgagcgcaccggctacacctggctggagttcggacggatcggcgaggacggcaagccgcagtaccggacggtcggctgcggcctgaaagcggtcaagggccggggcatcgccaagcactggttcttcaccacctcgctgcgcgtcggcgctcagctgccgctgatgtccgccacccgcgtcccgtacacccgggagcggctgcgcgaggcgctggagggccacggactggtccacgacacggccgccgagtaccgcagggcggtggacgagcagctgttcggcctcggcccgggccgttacgaggcgctggtcaacctgctgatccagctgcgccagccgcagctgtccaagaagcccgacgagaagctgctgtccaaggcgctcaccgaggccctgccgccgctcgaccccgccctggtcggcgaggtggcggaggcgttccgcggcctggacgaggagcggcacgccctccaggcgctcgccgaggcatccggcgccgccgccgacttcctgacgcactaccgccgttacgcgcagacagcggccaagcggcaggctgcggtgctgcgcgtcgcgcacagccggtacgagcacctgggccgcgacctcggcgaggccgagagcgaacacaccgccgccgaggagcggctggggcaggcggaggcgcgtctggcggaactggaggacgcccgggagaccctggccgccgcccgggacgcgctcacccgcagccccgagatggacgccgcccgtgagctggaacaggcggggaagacctccgaggccctgcgcgccgtcgccgacgaccgcaccggtgcctgccgcaccgcgcgccgccaggccgacgactggcagcgccgcgccgccgccgcccacgcccagcacgagaccgaccgggccgccctcgccgcggccgacgacgccgcacgccacgccgccgaagcggctggaatcgaccacgcgccggtggccgggacgctggagggtgaccacgcaccgttccaggacacccgccgggcgggtgagcgggcggtcgaacgccgccgccaggccgtcaccggcctggccgcgctgctcgccgcggccgagcgggcgcacgagcggtcccgtacggcgcagaccgaagccacgcgccgctccgccgacctggaggccgcccgcgagcggtccgccgaggccgcgcggtccgtcgccgagcagggcgcggccctgaccgcggcctggcgtgcctgggccgtcggcacgaccgagctgcgcctgcccgaccccgaccaggccctggccgccctggaagcctggacggacaccctggccgggcccgacccggtggccgaggccgccgccgcggcgtaccacgcggccgtgggcgcgctcacccgccgcgaggccggactcgacgccgagcacgccgcggtacggcgtgaactcgccgccgtggaggaggagatcgcccgcctggaatccggcggccacgacgccccgcccctggcgcacacccgcgatccgggtgcccgcgccggccgtccgggtgcgccgctgtggcgggccgtggacttcgccgacgcggtaccggccgagcaccgtgccgggatcgaggccgcgctggaggccgccgggttgctggatgcctgggtcaccccggacggcactctgctcgacgccgacgacgccgtcctgctgcccggcaccggggctcccggcaccagtctcgctgccgtgctgcgcccggccgtcgatcgcgccgacccgtcggccgccgccctcgacgacgccgccgtccgggccgccctggcgtcgatcgccctcggcgcggacaccgaccaccacacctgggtcgccacctgcggccggtaccggatcggcgccctgaccggccgctggaccaagcccgccgcccactacatcggcgaaggcgcccgcgaggccgcccgccgcgcccggctcgccgagctggccgacaagcgcggtgaactcgcctttcggctcaacgaggtgagcgagcagctcgccgccgtccgtgaccgggccaccgcgctcgccgccgagcagcagaaccagccctccgaccacgccctgcgcgaggcacacgcccgcgccggacacgaggccgaagccgtacaccgcctgacggaccggctgaccgacgccgagcgcgaggccgccacccgtcaggaggacgcggaccgcgccgaccgggaagtccacgagtacgcccaggacaccggcctgcccaccacccgcgaggagctcgaacaggtccgcgacgcggtgtccggctacgccgccgccctcgccgcgctgcttccggccgccgccgcccgggctcgctccgccaccctcgcggccgagaccgccgccgaggccgaggccgccgccaccgctctcgccgaggccgaggaggccgagaccgccgcccgccgtacggccgacgcggcggccgagcgccaccgggtgctggccgagacggtcggggcgagcgtcgaggagctgtaccggcggctggccgaggccgacgcggcgatcgccgcccgggacgccgaggagaagaccactcgccgcaggcgggacgaggccatgaccgcccgtgcccgcgccgagggccggtgcagcgagatccgcgcccggatcgaggaggccaccgccgagcgcgaccgggccgtggccgccctgcgggccttcgccgccaccggcctgctcgccgcggccctgccggaactcgccgtcccgcccctggacgagccctgggcccccacgccggccgtggccctggcccgcacgatcaaccaggaactcgacggcaccgacgactccgaccggcgctgggaactgatccagcagcggatctccgccgaacacaagacgctcaccgacgccctcggccgccacggccactcggtcggcatgaccctgcacgacggcatcatgatcgtcgacgtggtcttccagggccgcacccacgacgtgcccgccctcgccgcctcgctgcgcgaggaggtcgcgcagcgtacccggctgctgtccgccaaggaacgcgaactgctggagaaccacctcgtcggtgaggtcgcgggagccctccaggaactgatcgccaccgccgaggaacaggtgcaggcgatgaacgaggacctggccgcccggcccacctccaccggcatgaccctgcgcctggtctggcagcccgccaaggacgcgcctcccggtctggaggccgtccgcgcccgcctgctgcgccagtcctccgacgcctggactccggccgaccgggcgacggtcggcgagttcctccaggcccgcatcgcgcaggaccgcgagaacaaccccggcgactcctgggccgaccagctcacccgcgccctggactaccgcacctggcacgcgttcaccatccagcgccgccaggacggccagtggcgcccggcgaccggtcctgcctccggtggcgaacgcgtgctcgccgcctcggtcccgttgttcgccgcggcctcctcgcactactcctccggcagcccgcacgctccacgcctgatcgccctggacgaggcgttcgccggtgtcgacgacgactcccgggccaagtgcctcggcctgctggcctcgttcgacctggacgtggtgatgaccagcgaacgcgaatgggcctgctacccgaccgttcccggcatcgccatcgcacagctgagccgccgcgagggcatcgacgccgtcctggtcaccccgtggcgctgggacggtgtcgcgcgcacccgcgagacccgggccgttccgtacgttcccgtccaggccgcggccgccggacagacgcatccgtccctcctcgaacagtga

SEQ ID NO: 50233 - DNA, 1302 bp, Streptomyces cattleya NRRL 8057 = DSM 46488
atgacggatctgccgcggctgcgtcgcctgctcggcggtcccgagaccgcctggctgctggaccgcgcccgcgaccggatggccaccgggcggcccctggacacccccgccacgctcaaggccgccacccccgaacaacgccgcgcgatcgaactgctgctcggccgccgactgcgctcgggcagctccctgaccgtgccactggccgatgtcgaccgcgtgctgcgcgcatcgcaggcctgcccgaacggcctcgccgcggcggtggtcgcgctgaccggcccggtgaccgaccggcgggcccaggacaccgccctcgcggccgcctggcgacaggcgctggccgaactcgaccaccccgcaatcgccgcccgggccgaactcgcgccctggcgagccaagatggaagccaccggcctgctcaaacgcctctccggaggcgacccggcaaccgcgcggcggctcgccgtcgacgtcgtacgggtgctctccgcgctccccgccgacggcctcaccctccccgtcctcgccgcccgtaccctcggcgacgcccacgccctggacgacggccgcccgctggccgcgctcgtcctgtccgctgtccgcgcgctcgccgcgctgcccgccgagacggccgccggcgccgagggccgccgagccgcctgggccgccgtcggagtggcgctggacgacctctcctcccgggtcctcgtcctcggcctgcccggctccaccggggacaccaccggccgcatcctcgccgccgcccgcgaaggcggcgaaccctgcgtcctgacgctccgccagatcgccgcggggccgctcgaactcggactgaccgaccacaccaccgtccacgcctgtgagaaccccgccgtcctcgccgccgcggccgacgagctgggccccggctgcccaccgctggtctgcgtggaaggcaacccgtccgccgccgcccgcaccctgctcagccacatcgccgaccagggctacccgatcgcctaccacggcgacttcgactggggcggcatccgcatcgccaccggcatcctgcgcctgccgaccgccgcaccctggcgctacgacgccccttcctacctcaccgccgtcgaccgcggcctcggtaccccgctcaccaccggcatcccagcccctaccccctgggaccccggcctcgcactcgccctcacccaccacgccgtccgcgtcgaggaggaacagctcctcgaccagctgctcgccgacctccacagccgctgcacacgcgccgacggcggcgcgaggcggcgtcatcgcggatga

SEQ ID NO: 50234 - DNA, 1587 bp, Streptomyces cattleya NRRL 8057 = DSM 46488; identical to SEQ ID NO: 50230

SEQ ID NO: 50235 - DNA, 1191 bp, Streptomyces cattleya NRRL 8057 = DSM 46488; identical to SEQ ID NO: 50231

SEQ ID NO: 50236 - DNA, 4104 bp, Streptomyces cattleya NRRL 8057 = DSM 46488; identical to SEQ ID NO: 50232

SEQ ID NO: 50237 - DNA, 1302 bp, Streptomyces cattleya NRRL 8057 = DSM 46488; identical to SEQ ID NO: 50233

SEQ ID NO: 50238 - DNA, 1482 bp, Erysipelotrichaceae bacterium 6_1_45
atggaactatatgataagcttttaaaaccgataactgaggtgaattatctcagagccgagaatgtggatcgttaccgcattatcattcgctatttttatcaggagcatgaaaaaatacattactggatgtttaaagaggatatttatgacatgatatccgcattaccaggatatgaagactataccatggagaactgtcagaatgatttgcaggcactgtgcgactgggggaacctcgttgctacacaggatacctccgttcccaataccttacaggaatttaaaaataagaaatttcgctatcagctaagtgaatataccgttgtaattgaacgaatgacaatagagctggagcatcttgctgtggaagggtcatccttggaaccgacgctgctggagcggattcgtaaacagattctgcagctgcttgctgtaagggataaatcccatatggaggtcgctgactggtggcgaagtctgaacgatgatttcattcgcttaaatcagaattatcaggattacataaagacattaaacagtgccaaagcagaacaaatgatgaagtccagagaatttctggtatttaaagataagctgatcacctatcttcagacatttgtaaaaagcctgcaggagcacagtatgatcatcgaggattatttgagcggtgtaaaggacgaagatatggcgctgattttcgataaggtcgcagaatatgaactatcgattccccgcatcaattcccatatcacaaagactgccgtactggaaaattgtcagggacggtggaagagtcttttcaactggtttgtcggagaaaatgataacaatgaggtaaaccgcctctttgaaatcaccaatgaaatcatacggaaaatcacacggtatgcactgcagatcggtgagctgcacaatcagggggcaaaccgtaaggaggaataccggcgtatagcggaaatattcgcaaaatgcaatactatggatgaagcacatcgcttaagtgcactggtgtttggggcagatacctgtatgcatttgaaaaacatcgcaccaagggatacggacagcattcacagtggggtgtatcaggaagcctcagccttccttgcactggagccgcgcacaaaggtggcaaggaaaaagcatgagcgaaagcctgcgacggattatgcactggatcggcgaatacagcgtctggagtatgaggcacagcgcgaggctgaacagaagaagataaaggaattgagtaaaaacggagaaatcatcttttctcagctttccttacttgacaaggccaccagaaaagccctgcttggctgggtatccaaggcacttgccgcaagtgaccggcgtgccaaaacagatcaggggcagcattatcatatagaaaaggaacgggaaggcgactgtatactgcattgtgaggatggaaatctggtaatcccttgcttcaaaatcctgtttgatgaggaacagttatga

SEQ ID NO: 50239 - DNA, 1131 bp, Erysipelotrichaceae bacterium 6_1_45
atgagaataatagaagaattgatgaatcgccgctggattctgaaaagtcaggatccacagctgtattatgaaataaaggataatgccaaggaattgaaaaagaagctgcaggagaaatttggttatgcactcattatcaatccatatcttgtaaagctggaaaagattccaggcaaagcagaaggctggatggggattaccgaatttgaaacgcttatggaatatcagatgttctgttatctgcttatgcttctggaagacaaggaagcaggggaacgctttatcctgagcaatatctgtgaatttattcaggtgcagtttcccaaaggtgagctggaatggacaagtctgcgagcaagaagacagcttgtgcgtgtattgcaatatgctcttaaaatggggatgatcatttcccgggaaggtgatgaggattactttctaaaggatgagaccagcgatatattatatgaaaacaccggagtatcacgctatttcatacgtaacattcccaaagatattatggattttcatgagccggaggactttttacagagcgagtggtttgatatggaagaggatcgcggtattgtccgccggcagcgtatttatcgtagactcatgctctcttgcggtgtctatcatacagctggagaggataaggatgatgatttcggctatattcgtaattaccgcagaaatatagaaaatgattttcagagtctgtttccctgtcagctgcatgtgcattcctccagcgcctttctggttctggaagaagactgctctatgggtaaagtctttccaaagacgcatgcctattatgatctgctgctgattgtccatgacgatctgcgtaaacgggtaaagacttcccgtctttctctggatcagcacgagggaatcacattacggctggaagaatatcttgccatcgttcagcgtctgatcaagaaaaacaatgcgttactgccaaagaaatatcagattgaaaatcgcagggtggaagacagtgcaatggatgtatgcaatcttgcacagaccttgggctttgcacaggtgcagcaggagaatgtttatatctatccggttgccggaaaaataacaggaacatatgcggaggtaacagaatga

SEQ ID NO: 50240 - DNA, 4035 bp, Erysipelotrichaceae bacterium 6_1_45
atgagcgaactaattagcaaatggcacatgcaccggctggggctggttgatttctggtattatgtaaacaaggaattttcctttaaagacgggcacatgctgctcagaggaagcaacggttccggtaaatctgtcacaatgcaaagctttataccactgctgttggatggaaataaaagcagtgagcgtctggatccttttggtacacgctcacgtaaaatagaaaactatctgttggaggaaggcggcgaacgaacagatcgcatcggctatctttatctggaatttaaacgctcggacagtgaggtttacaaaaccatagggatgggtatgcacgcgaaacagggacgtccgcttgtatcgtggtattttgtaattgaggataatctgagaatcaacagagaagtgcagctactggatcataacctggcaattacaaagcaggtgttgaaaaaccgtatcggtgacacgcaggtcatggattcgcaaaaagaatacatggacagagtgaatcaggcactgtttggttttgaaaccagcgaggaatataaggaagctatcacattgttgctgcagctgcgctcgcctaagctgagcaattccttaaaaccaaccatgatcaatgaaatcctgagtgaatccttacagccgttgagcgaagatgatcttcgcccaatgagtgaagcgatatccaatatggataatatcaaggatcagctggatgccttaaagcaaagctatgcttctgcaaaggcggtttatcaggtgttcgagcagtacagtcatgccgtattgtttgaaaaataccatatctatcagactgtcaggcagacagccgcaaatcttcatgaagcttatcaaaaatatgaggaggaattacagcggcatcaacaggaaacaaagcagaagcaggaaaaccgtacacagctagcacaggaacaggcgctgttaacagaagaaaagctttctctggcaacagacgaccttcagcggctggtggaggattgcacaagactggctgctgagaaagaagatactatacaaaagctccagcataaggaaacccaggaagaggaaaaaagtgatcgtcttcaggaacttagagtacagcataagacacagagtgaccgatgtgagcaagccttgtctgaaatgaaggaagcctttgaccaattagatgtactgcaggaggagctgctgctggaggatcatctcctattaaaagaggagatgtttcagcatccggacactccatatgattttacatatatcggaaagcggctggatgcaaagcttcgcttacttgaggaaggactgcagctgtttaactcctatgatgttgcaaagtcacaccacaagcagctggtggaagaattagagcagcagaagcagacgaatgagcagcaggaacatctggtggcgcagcttgatgaacaatgtgaccgcatcgtggaggaatataaagaaagaatcagtcagtggtccgcaaacaatcagcatctaaagctgacggatgaggaattccacaagatgatgcatcttcttatgcagtatgaggaacagccggacttttataagctgacggatatcattcaacaaagctatcagacactatataaggaaatcattcacctgcaaattgagcaaaaggaaatggcggaaacctgtaggatgaatttggaacagaagagcgcagagctgcacatgtggcagacacaaaaggatccatctcctgcaattgctggggaacaggagcaggcacgccagcttctgaaacagcatcagattgaaagccgcagcttttacacccttctggaatttgatgagcagatggatgaggaactgcgcgcattgtgtgaagaggcattgctgcgtctgggagtactggatgcacaggtggtgcatgcgagctcccgatcattgattgaaacccttgcatcaggaagcggggatatgtatttctttacacagcgaaacgtaagggatttacaaccgtattatctgaaggggacaactcctgagcagcttgcgggtgaaatcaataccgttctgacatcccttcatatcacgtatgacggtaaactgcagctgcatgatgccatgtttcaaaccgggattgtagagggaaagctttatcaatctgtatcggcaagatacatcggagaaaatgcaagacagaaatacagagaacaaatgattctgcagttacagaaagcatgtgacatgctgaaaaaggaatatgatcaggaaatgcagaaactcacggatctggacaaacgattggagcagctggaacaggaagcatccgcttttgtaaaagaagatgatctgcatcttgccctacagcagttaaatgaggggcgaagaatattgcagcacgatattgcctgctatcatcagatggaggaacgtctgcgaagacatttggaagcgatgcagggaattgaaaaacagctgcgggaaactgcaggtaaattatcgattacgttacgccgcaatgtgtttgaacaacagaaggatggttataacagctacagaaaactgttacagctggtacaaacaaaacagccgatattcatacaatctctcgactttgtgaaaagctgtgaaacgcaaatagaagatgcctttcgggatgtttcagaattcaaagcagaaatcgatacgttaagagaactgataaagaaacaaaaccttcttctgcagcaaaaggaaaaacagctgaaggatttggggtatgaggataaacagaaacggttacagcagatcgaagaacgattgcataagctgccggatcttatgcaggaactggatacacgtttgggacagctgcaaagtcttgtagccgcaacgtcacaggatctggaacgcacaaagcaggatatcgaacatcaggatgcactggtttcaacgtattttgatgttgtgaaaaacgaagctgcactcggatatacgaatattcctttatgtgaagatggacagctgatcaaggaaatacggaatctggaaaaacagacagaagtcctaaagaaaccggaagcattgaaaatggatcttcagacagcttattacaatcatagaagtaatctgcaggaatacaatctgaccttcacaacggatgatacatgggaagaactcacagatatcagtgccagactggatatcaatgcgcgatatcagggaacctctctttcctttccagaactgcttgactgtctgcaacgtgatgttgatttacagaacaatctgcttgtagactctgaccgtcacctgtttgaggatatcctggtaaatatcatcagcaaaaaggtacgtatccgtatacaaaacagccgtgcgtgggtggataccatgaatcgctatatgaacgcaatgaataccagcagcggactgcatctgaatctgcagtggaagagtaaaaaagcggaaagtgaagaagaaatggataccagacagctggtggaaatcctgcaaaaggatgtcaaagtcgtaaaggaaagtgatttaaaacgtctgtcttcccacttccggtcaaaaattgctgccgcaagaaatctgcaaaatattgaaaacaacaccttaagctttcatcagctgatgcgtcaggttatggattatcgaacatggtttgaattcaaaatcatggcacaaaaaaccggagaagctaaaaaagagcttacgaacaataccttctatgcttttagcggaggtgagaaagcaatggcgatgtacgtgcctctattctcagccgtagccgcaaaatttgaaagtgccagagaggatgcgccgttgctgattgccctggatgaggcatttgcaggagtggatgaaaagaacatttacaatatgttcgatttgatcagcaaatttaaatttgactatattatgaattctcaggttctatggggagactacgcttccgtaaaaggtcttgccatttatgaactgtttcgaccggaaaacgcccgttttgtaactgtgattccatatgaatgggatgggcatataaaacgcatgaagggagatttatcatga

SEQ ID NO: 50241 - DNA, 1284 bp, Erysipelotrichaceae bacterium 6_1_45; identical to SEQ ID NO: 50128

SEQ ID NO: 50242 - DNA, 1482 bp, Erysipelotrichaceae bacterium 21_3
atggaactatatgataagcttttaaaaccgataaccgaggtgaattatctcagagccgagaatgtggatcgttaccgcattatcattcgctatttttatcaggagcatgaaaaaatacactactggatgtttaaagaggatatttatgacatgatatccgcattaccaggatatgaagactataccatggagaactgtcagaatgatttgcaggcactgtgcgactgggggaacctcgttgctacacaggatacctccgttcccaataccttacaggaatttaaaaataagaaatttcgctatcagctaagtgaatataccgttgtaattgaacgaatgacaatagagctggagcatcttgctgtagaaggggcatccttggaaccgacgctgctggagcggattcgtaaacagattctgcagctgcttgctgtaagggataaatcgaatatggaggtcgctgactggtggcgaagtctgaacgatgatttcattcgcttaaatcagaactatcaggattacataaagacattaaacagtgccaaagcagaacaaatgatgaagtccagagaatttctggtatttaaagataagctgatcacctatcttcagacatttgtaaaaagcctgcaggagcatggaatgatcatcgaggattatttgagcggtgtaaaggatgaagatatggcgctgattttcgataaggtcgcagaatatgaactatcgattccccgcatcaattcccatatcacaaagactgccgtactggaaaattgtcagggacggtggcagagtcttttcaactggtttgtcggagaaaatgataacaatgaggtaaaccgcctctttgaaattaccaatgaaatcatacggaaaatcacacggtatgcactgcagatcggtgagttgcacaatcagggggcaaaccgtaaggaggaataccggcgtatagcggaaatattcgcaaaatgcaatactatggatgaagcacatcgcttaagtgcactggtgtttggggcagatacctgtatgcatttgaaaaacatcgcatcaagggatacggacagcattcacagtggggtgtatcaggaagcttctgccttccttgcactggagccgcgcacaaaggtggcaaggaaaaagcatgagcgaaagcctgcgacggattatgcactggatcggcgaatacagcgtctggagtatgaggcacagcgcgaggctgaacagaagaagataaaggaattgagtaaaaacggagaaatcatcttttctcagcttcccttacttgacaaggccaccagaaaagccctgcttggctgggtatccaaggcacttgccgcaagtgatcggcgtgccaaaacagatcaggggcagcattatcatatagaaaaggaacgggaaggcgattgtatactgcattgtgaggatggaaatctggtaatgccttgcttcaaaatcctgtttgatgaggaacagttatga

SEQ ID NO: 50243 - DNA, 1131 bp, Erysipelotrichaceae bacterium 21_3
atgagaataatagaagaattgatgaatcgccgctggattctgaaaagtcaggatccacagctgtattatgaaataaaggataatgccaaggaattgaaaaagaagctgcaggagaaattcggctatgcactcattatcaatccatatcttgtaaagctggaaaagattccaggcaaagcagaaggctggatggggattaccgaatttgaaacgcttatggaatatcagatgttctgttatctgcttatgcttctggaagacaaggaagcaggggaacgctttatcctgagtaatatctgtgaatttattcaggtgcagcttcctaaaggtgagctggaatggacaagtctgcgagcaagaagacagcttgtgcgtgtattgcaatatgctcttaaaatggggatgatcatttcccgggaaggtgatgaagattactttctaaaggatgagaccagcgatatattatatgaaaacaccggagtatcacgctatttcatacgtaacattcccaaagatattatggattttcatgagccggaggactttttacagagcgagtggtttgatatggaagaggatcgcggtattgtccgccggcagcgtatttatcgtagactcatgctctcctgcggtgtctatcatacagctgaagaggataaggatgatgatttcggctatattcgtaattaccgcagaaatatagaaaatgattttcagagtctgtttccctgtcagctgcatgtgcattcctccagcgcctttctggttctggaagaagactgctctatgggtaaagtctttccaaagacgcatgcctattatgatctgctgctgattgtccatgacgatctgcgtaaacgggtaaagtcttcccgtctttctctggatcagcacgagggaatcacactacggctggaagaatatcttgccatcgttcagcgtctgatcaagaaaaacaatgcgttactgccaaagaaatatcagattgaaaatcgcagggtggaagacagtgcaatggatgtatgcaatcttgcacagaccttgggctttgcacaggtgcagcaggagaatatttatatctatccggttgccggaaaaataacaggaacatatgcggaggtaacagaatga

SEQ ID NO: 50244 - DNA, 4035 bp, Erysipelotrichaceae bacterium 21_3
atgagcgaactaattagcaaatggcacatgcaccggctggggctggttgatttctggtattatgtaaacgaggaattttcctttaaagacgggcacatgctgctcagaggaagcaacggttccggtaaatctgtcacaatgcaaagctttataccactgctgctggatggaaataaaagcagtgagcgtctggatccttttggtacacgctcacgtaaaatagaaaactatctgttggaggaaggcggcgaacgaacagatcgcatcggctatctttatctggaatttaaacgctcggacagtgaggtttacaaaaccatagggatgggtatgcacgcgaaacagggacgtccgcttgtatcgtggtattttgtaattgaggataatctgagaatcaacagagaagtgcagctactggatcataacctggcaattacaaagcaggtgttgaaaaaccgtatcggtgacacgcaggtcatggattcgcaaaaagaatacatggacagagtgaatcaggcactgtttggttttgaaaccagcgaggaatataaggaagctatcacattgttgctgcagctgcgctcgcctaagctgagcaattccttaaaaccaaccatgatcaatgaaatcctgagtgaatccttacagccgttgagcgaagatgatcttcgcccaatgagtgaagcgatatccaatatggataatatcaaggatcagctggatgccttaaagcaaagctatgcttctgcaaaggcggtttatcaggtgttcgagcagtacagtcatgccgtattgtttgaaaaataccatatctatcagactgtcaggcagacagccgcaaatcttcatgaagcttatcaaaaatatgaggaggaattacagcggcatcaacaggaaacaaagcagaagcaggaaaaccgtacacagctagcacaggaacaggcgctgttaacagaagaaaagctttctctggcaacagacgaccttcagcggctggtggaggattgcacaagactggctgctgagaaagaagatactatacaaaagctccagcataaggaaacccaggaagaggaaaaaagtgatcgtcttcaggaacttagagtacagcataagacacagagtgaccgatgtgagcaagccttgtctgaaatgaaggaagcctttgaccaattagatgtactgcaggaggagctgctgctggaggatcatctcctattaaaagaggagatgtttcagcatccggacactccatatgattttacatatatcggaaagcggctggatgcaaagcttcgcttacttgaggaaggactgcagctgtttaactcctatgatgttgcaaagtcacaccacaagcagctggtggaagaattagagcagcagaagcagacgaatgagcagcaggaacatctggtggcgcagcttgatgaacaatgtgaccgcatcgtggaggaatataaagaaagaatcagtcagtggtccgcaaacaatcagcatctaaagctgacggatgaggaattccacaagatgatgcatcttcttatgcagtatgaggaacagccggacttttataagctgacggatatcattcaacaaagctatcagacactatataaggaaatcattcacctgcaaattgagcaaaaggaaatggcggaaacctgtaggatgaatttggaacagaagagcgcagagctgcacatgtggcagacacaaaaggatccatctcctgcaattgctggggaacaggagcaggcacgccagcttctgaaacagcatcagattgaaagccgcagcttttacacccttctggaatttgatgagcagatggatgaggaactgcgcgcattgtgtgaagaggcattgctgcgtctgggagtactggatgcacaggtggtgcatgcgagctcccgatcattgattgaaacccttgcatcaggaagcggggatatgtatttctttacacagcgaaacgtaagggatttacaaccgtattatctgaaggggacaactcctgagcagcttgcgggtgaaatcaataccgttctgacatcccttcatatcacgtatgacggtaaactgcagctgcatgatgccatgtttcaaaccgggattgtagagggaaagctttatcaatctgtatcggcaagatacatcggagaaaatgcaagacagaaatacagagaacaaatgattctgcagttacagaaagcatgtgacatgctgaaaaaggaatatgatcaggaaatgcagaaactcacggatctggacaaacgattggagcagctggaacaggaagcatccgcttttgtaaaagaagatgatctgcatcttgccctacagcagttaaatgaggggcgaagaatattgcagcacgatattgcctgctatcatcagatggaggaacgtctgcgaagacatttggaagcgatgcagggaattgaaaaacagctgcgggaaactgcaggtaaattatcgattacgttacgccgcaatgtgtttgaacaacagaaggatggttataacagctacagaaaactgttacagctggtacaaacaaaacagccgatattcatacaatctctcgactttgtgaaaagctgtgaaacgcaaatagaagatgcctttcgggatgtttcagaattcaaagcagaaatcgatacgttaagagaactgataaagaaacaaaaccttcttctgcagcaaaaggaaaaacagctgaaggatttggggtatgaggataaacagaaacggttacagcagatcgaagaacgattgcataagctgccggatcttatgcaggaactggatacacgtttgggacagctgcaaagtcttgtagccgcaacgtcacaggatctggaacgcacaaagcaggatatcgaacatcaggatgcactggtttcaacgtattttgatgttgtgaaaaacgaagctgcactcggatatacgaatattcctttatgtgaagatggacagctgatcaaggaaatacggaatctggaaaaacagacagaagtcctaaagaaaccggaagcattgaaaatggatcttcagacagcttattacaatcatagaagtaatctgcaggaatacaatctgaccttcacaacggatgatacatgggaagaactcacagatatcagtgccagactggatatcaatgcgcgatatcagggaacctctctttcctttccagaactgcttgactgtctgcaacgtgatgttgatttacagaacaatctgcttgtagactctgaccgtcacctgtttgaggatatcctggtaaatatcatcagcaaaaaggtacgtatccgtatacaaaacagccgtgcgtgggtggataccatgaatcgctatatgaacgcaatgaataccagcagcggactgcatctgaatctgcagtggaagagtaaaaaagcggaaagtgaagaagaaatggataccagacagctggtggaaatcctgcaaaaggatgtcaaagtcgtaaaggaaagtgatttaaaacgtctgtcttcccacttccggtcaaaaattgctgccgcaagaaatctgcaaaatattgaaaacaacaccttaagctttcatcagctgatgcgtcaggttatggattatcgaaaatggtttgaattcaaaatcatggcacaaaaaaccggagaagctaaaaaagagcttacgaacaataccttctatgcttttagcggaggtgagaaagcaatggcgatgtacgtgcctctattctcagccgtagccgcaaaatttgaaagtgccagagaggatgcgccgttgctgattgccctggatgaggcatttgcaggagtggatgaaaagaacatttacaatatgttcgatttgatcagcaaatttaaatttgactatattatgaattctcaggttctatggggagactacgcttccgtaaaaggtcttgccatttatgaactgtttcgaccggaaaacgcccgttttgtaactgtgattccatatgaatgggatgggcatataaaacgcatgaagggagatttatcatga

SEQ ID NO: 50245 - DNA, 1284 bp, Erysipelotrichaceae bacterium 21_3; identical to SEQ ID NO: 50128

SEQ ID NO: 50246 - DNA, 1665 bp, Desulfosporosinus youngiae DSM 17734
atgattgattatttgacaaagaaagtttcggtctactctgtcacggaaaggaaacccggcacggtgaatttttttgtgaataaagtagggtttcagcaaaattcggcgaaattaagagaagcattacttattttgatctatgaggtaatttcgatgaacgaacaactttttaaaccgattcaagaagcaacctacttgacggtgccgaacgcctggcgctaccgttcaattttacgttatgtctatcaacagcacgagcgcttgcgtcactacattgttcttgaagagattttccagcatttgcagcaggacgctcatttccgggagcttacagaggagcaatttcagcaggatctggatcagctcgtggcctggaaaaacctgatcccccgtcaagataccggccgcgtctccagtattgccgaatttaagaaacggaaatttcgttatcagttgacaccctacaccattgaaattgaacggatggttttgagtcttgagcagttaggagaagggttcggcggctctttggaacgaactatttttgaccgtctgcttggcaacctcaaggaccttacccaagcctgggaagcaaatgaagctatctttcataagaccaatgaggaaatgtatctcctttggcaagatttatacgagaattttcacaaactaacggataacgccgctgattatttggctcatctgcacagtgaaaaagtcgaggaacaaatgatgactgaggcttttctggtgtataaagaggccttaacagagtacctgcgcaatttcatgaccagtttgcagaaaacctcgttccggatcgaaggcttgcttatggaaatcccggagttgttttcccgcaaacttacccaatgcgttgcggagtacgagctatcgattccacgcttggatgtgcgccctccccaggaacaattgatggaacgctttcaaactgaatgggagagcttgagaacctggtttctgggcgatggagggcgggaaagtgatctgatctatctccagaatgccacgaatgagacgatccggcgtctgacccgctttgcccaacgtctgggggaaactcatcacaacctgcgcaaccgccgtctggattatttacatatctccaagtggtttgcttctctggagacccttcaagaggctcacgaactctcagcctgtgtgtttggggtctttcacacccggcatttatgggttgactctcctaagcagacagaaagttttgaagtggaagtttgggatgaacccccctccgaacttcagattcggcccaaagtgcgcagctataaggaaaaaagccggccgaatgccgtggtggatcagtcggaacgaagaaaagctgccttggaggcctacctcaaagaaaaggagattgaacaacaacttctggaaaatctcatccaggataaccggattgtcctgcgcagcctgccggagctgacgacctttatccgtaaaaccctgcttacttggatcagtaaatgtatggcaagtccggatcgtcaaggaaaaacggaaaccggacgcttattttccctgaaacgtatcagtgatcgtcccatccaactgaattgtgaggatgggctgctggaaatgccggattacgttttagtgtttgaaaaaaaagcggaggcggcccgatga

SEQ ID NO: 50247 - DNA, 1224 bp, Desulfosporosinus youngiae DSM 17734
atgagtgaaaagaaaggttttgacgaggtagccagagagggattgatcgcccttttagagaacttttggattctccgcgagcaagacccggagacttatcaaatcatacgcgatcgggaaaacgctctcaaggattatgtcctggataaactgggctatcatctgatcgttcaccggcatttcgccaagctggaaaaaatcccggcccagcccgaagggtggatgggaattgagcttttccaacaacccagagattatgctctgctgtgctgtgtgctggcttacttggagagtatcacaggatatgagcagtttctgctctcggatctctgtactgaagtgcaagcactctatccgggagaactggcccttgattggcgcagctatgagcatcgcaaatctttagtacgagttctccagctgatgattgagttaagaatcctgactgtggtcgatggagaaacctccacctttggtcagaacgaatcgaacgaggttctctatgaggtttcggtggtggcgcgctatttcatgcgttcctatcccaaggacctcttccaatttcaatccaaagaagatattctggcggctgaggtcttcgagggagaagacgaactcctgggagcgcgccgacgctataggatttatcggcagctcttgctttcaccgtccatgtaccgcagcactgctgaggatggggattttctctatttgcgcaactatcgtgcccgtctgcaggatgacctggaaaaacacaccggcttacagttggaactctatcgcaacacggctctgctggttgccccggaacccaaatctgccctgactctcttccccaatcagaaggggatctcggatatcgctttgcagtttggctccatcctgaggacgcaagtgcaggaaggactccactccttggattcctttggccgggttgccttaactctccttgagtttgagcaaactgtgaagctttgcaaagaggggttcgggttcggctggagtaagcaattccgtgaaggtctgattcgaaatacggctgaagaactgttggactttctcctggattggacctttgcccagcgcagtgaggaagccaacgtcatcctcctgcaaccggctctgggccgcttagcaggagattatcctccggaattcaggaacaaacagcaagccaaagccgggagcttggacgaagagcacgaagaaattaaggatatttaa

SEQ ID NO: 50248 - DNA, 4230 bp, Desulfosporosinus youngiae DSM 17734
atgcgctggcagctaaaccgagcgggcttgttcaatttttggtattacgatgaagaagaatttcactttgccgatggcaaattgcttttgcgcgggtccaatggttcaggaaaatctgtcaccatgcaaagtctgatccccgtcttgctggacggccgcaaatctcccgatcggctggatccctttggctcccgcgctcgtcgcatggaagattacctgttgggagagaaagatgtttcagatctcgatgaacggacgggatacctctacctggaatatcatcgaccgggtactcaggaatatctgacgacgggaatcggtttaaaagccaaacgccaaggcactctggacttttggggatttatcctctgggataatcgccggattggacgggatttccaactctttaaaacagaacgggccttaaacgggactttagaaaaaatccctttgacccgccgggaactggagcatcgtttggctgacggcggtgaggtggtcaagactcagaaagactacatggaacgcgtcaaccgttacctcttcgggtttaaagctgttgaggattatgatgatctcattaagctgctgattcaattgcgcagccccaaactctcgaaagattttcgaccgacggtggtctatgagatcttgaacgcagcattgccctccttatccgatgatgagctacggcccctttccgacaccatcgaaaccatggatcagatcaaaagccagctggatcagcttcagaaggaagaacaagcgctaaaacgcttggttcgctactacgatcaatacaatcataaagtccgaggggaaaaggcggaaggcttcctgcaagctcatcagcgtctgctggcggcggctcagactttgaaacgtctgcacctggagcgggaagagacagaaagcgccctaagcaaacggaaggaagacgagatgtccctcaaacgggaacaacttgttttgggtcaggaacgtgaagccttagaagagcatgatgtctttaaagcagaaaaagagaggtcagaccttcagcaaaagcaacggatcaaccaggaaaatctggttgctaaacagaaacagctggccggcaatgtctctcaggaagggaagctcaaggagcaaatcggtgggctggaacttaaggagcagcggactttagacaggatccatgaggagcttgaagaactcgagggtttggcagaggagagcgactttctgaaccatgaggtggcggctcatgaattcgagaagaacttggagcaactgttttcctttgcactttggaagaaagaggctcgggactaccagagtttgttggagagggtgagcaaagcccttcgccaggaggcagcagggcgggaaaaatatcaagaagcggagctgatgctgggtgagagtaagaaagcttgggatgaggctcagcatcaggaaaagaagtgggccgatgtcctccatgaggagcagtccaaatgggtagagaatctatttgcctggcagcccttgaatcaagaattatggttagaggatatcgagctccagaccttggcccagcgtgcccgatcctttccggaatccgtcagcacgaatagtttgcgtgaaccccttcagaatgcggccaatcgggctcgggataagattcgtacggagatactccaagcccgtcaccagcaggaccaacttcaaagggacgtgaaggcgaaaattcaggagatcgagagctggcggcagcgcaaggaccccgagccgtcacggcatgatctgacgaatcaggctcgtcaaagcctgcaaggggcaggtattccctttgttcctttctacgctgccgtggaattccatgatcaggttcctcaggagactagagaacgactggagagtgcccttaaagagatgggcattctcgatgccctgattctcccggaactctttgctccccaaacggctgaacagaagcaggtgctgcaaagcaccccggtacatgaccgtgtcctcaagccggaccctcagatccttgcccataccctggcggattatctttatccaacccctgcagcgggcagtcaggtgatggcggaggacatcgataaccttctgcgcacgatcctggttgaagaaggccgggcagaggggaatggcagcaccactctaaccacggccggctcttaccggattggtgctctgcaaggacatgctcctcaggaggaatccgccttatatataggaaaggaagctcgcctgcagctgcgcctgcggagaattaagcagcttgaggctgagcgtgaagtacttgatcaacaagttcaggaactcgaaggtcgtctgcagactttaaagcagagaagtgaaatcctggaagcagaataccggggatttcccggggaaacagccatccaggaggcctgggatatcatctatacggttcgcaaagaggcggcgctgctggaaaaagatgtgcagcgcaaaaatgaaaccctgcttaaaaccttagaggcctggagaaatctcaaggctcaagtgaaagaactgagcaagaccttgactctgcccttggatgagcttgcttatgaaaaggctctggaggctgtgggaagctacaaagatgagctgaataccctggaatctcggcatcagcagctgcattccctgcgcagggaacggagtgcagttctatctcatcaccaggatgttgccgaggctgtggacgaacttcgcggcgacattaacgagctcgaagaccagtccctgaccttgagagatttattgaggcgggtagaacagcgcctgcaggatctgggggccgacgagattcgtaggcgcattcaaatcgttattcgccgcctcagtgatcttcccggcgaaatagaaacctgtatcaaacaaatcacgatgctcacgaagaatctggaggacttcactcagaagattctggagcaggagcgggattgttcgctggcggaaaatctgcatcaaggctgggccaaggtgtttcaagcggaggaaacccttcagacttcgttttaccatgatttagagggcgagttgaaacccgattcccatgccaaagtccccgctctgagcagtgcccccctgcacgaaagtcacttaggggatctcaggcaacgtgccgaagaatttctgcgttctcaagataccaggaactccaattccccggatcgggaaaccttgcgtgaacggattaatgacgcctttaccaaggaaatgggtaatttggtggaataccgcttgacccagaacaccttgtttgaagcccttgatgagttaagtcggcaaagggaagaaggtcccgagttgtggcttaagctctgggaagaacttcgtcagaaggccagacgcctgcagctgatgctggagtacgatggcaagcgggtgaatccctattatttacaggctcagttagggaaaaatatgaccttgcagcgtcagcttctcaatgagaaggaccgggaactgtatgaagaaattattatgaatagtgttggccggattattcgggggcgaattcagcgtgccgaacactgggtcgaggaaatgaaccggctcatggacgagcgggatacgtccagcgggcttcgctttcgtatccgctggaagccgcgaaccgccgagcaagaggatgagattgatactcaggacctggttgagctgctgaaatctgatccgcgactcctcaaggaaacggatatgtcgcggatcaccaaccatttccgggccaaaattgagcgggccaagcagcaattagaaataaaaggcttcggagaaagcttccatcaaatcattaaggagatgctggattatcgccactggtttgagttccgcttgttttaccagaaagaaggggagaattggcgtgaattgacggatcgggccttctatcagttcagtggaggagagaaagccatggccatgtatattccgctcttttcagcggcctactctcgctattccgatgcccgccccgatgcgccgcgcatcatttctcttgatgaagcctttgccggagtggatgaaaataatatccgggatatgtttgatttgctggagaagctgggctttaactacattatgaattctcaggccctctggggtgactatgatacagtctcaaaattggccatagcagaactggttcgccctaaaaatgcctccttcgtgaccgtgatccgctaccgctgggatgggaaagtcaggtgcttggacgtttga

SEQ ID NO: 50249 - DNA, 1380 bp, Desulfosporosinus youngiae DSM 17734
ttgcagtccgacgaactggaaaaagctaaagcatattttacctcgaccaagggatttgccaggctttttaaggctatggctcaaaaatatcagagcttggggcgctggggtggatctgtaaccctgacatctcccaaagatgaggaacgagaggctttttctgcattattccgagcagatttttcccgccaaaagtcaattacgatctctctggaacgctttgctaaggccttagaattcacaaaattcagcagtgtctcccctgtcagcttgcttgaagagattcaaggagaatctttgatttctaatgccgaacgaacagccggcaaagagcggatgaaggcaggattttttggcgatctgttgtctcgatacccacaaccctactgtcagcgctggcttcaagcaattatcgctaagaaatcgggaacccgtccggttcatacggcctatgagactcacccggagctgctcagggttcaaatggatcacgtcctcaaggctttatcggatatgaaccggcagctccctgacaaaattgagcgcttgccgatttttgcccggcgaatcaccaaagaccctcacgggtttgacgccaacagcgacaccggccggcttctgattcaggctatgaagattttggacagcgaggtacgtggacgtgatcctctgaccttccccttaaccgggaccgaggaattgacggagctctattactcctttggtcttttgcgggatgacctgtggaattttgtcacctgcacagggataacggctgctgcagtggatcatgagaacaaggacctgagctatttagcagaggcttaccggcagcaggtcaccttaaatctgcctttaagagaagttgtccgcatggggaatgcttacgctggagcacgatctcccaatgaatcggccaaggtcgtttttgtagtcgagaattcgggtgtcttttcggctcttttggatcgtttccgcggatatagtgaggatgaagggcttgcggaaagcccaaatccgccattcctatgtagtcacggacaatttaaactggctagtttgcttttattggataaattagccgctagtggggcaatgatttattactccggtgactttgatccggaaggactattaatgatggaacgtctcctattgcgttatcccagccaggcaaagccctggcattacaccgttgctgactaccaacttgcccaatcggagcaggttataagtcctcagcgtttaaaacagcttgaccgggtggtttcctcggagctggtgcccttggcagaggaaattctgagagccgaacgagcaggatatcaggaggggattcttagcgagctatggagagatataaaggcgcatgaaagatag

SEQ ID NO: 50250 - DNA, 1491 bp, Acetobacterium woodii DSM 1030
atgaagttcgaagttaccggaaaattaacaaaacaaattgacgagatgcgctacctgacggtcgaaaatgcctggcgttaccggagtattttacgctatttttatatccaatacgaaaaaatgaattattggttatacaaagaagaagtttatgaagttttaaaagaaaatcaggaatttaaagaatacacaatggatatgtgcaagcaggatctggatatgttattgtcgtggaaaaatctgtcagcgattcaagatgcggcgaaggtgtctaccgtcgaggaatttaagaacaagcagttccgctatcagctttctgaatacagtgtcgaaattgaacgcctgacactgcggctggaaaacctttttgtggaatcggcctccctggaaccgacgctgttagaacggctacgggaagaactcaaaaaattaccccaggtggcaaaacaaagtgaaaaagaagtggggagctggtggagcagccttaatagcgattttaaacgattgaatcagaactatcaggattatatccgggatttatattccatcaaagccgaggaaatgatgaaaacccaggagtttatggtttttaaggataaatttattgaataccttcgagattttgtcaaagggcttcaaaaccacgccaatgcgatcgaatatagcttgaaaaatcttagtttagccgatatcgatcaggttctgaaaaaagccatcgcttatgaggtatcaatccccagaattgaaaccgagattgatgaggctggaatcagcgaaaatatttacgggcgctgggacagtctcaatgcctggtttttaggcgccaagggaaacgagagcgaggcgacccggttaatggatatcactaatgatattattagaaagattacccgctatgcttcacaaatctcagaaagcagaaatagtgccatcaaccggaaggaagaataccgtaaactggcagaactttttgatcagtgtcaggatatcaaggaagctcatcggttatccagtttatcctttggcatttttcagatgaaacacattaagtctgaccattttcgggaaacggagagtatcaacagtcaggtattcgaagagattccggcaatcacaacccttaaaccaagggtccgcggctatcaggaaaaagctcagcggacgccgatccatagcaatagcgaccgaaaagaagcgatgatgaagcagatccgtcgggaacggcaaatggaagaaaaaacgatcgaaaactatgtggttgacgacggtatcgattttgcaacgctgccggtgattgaacggcatgtccgaacaacattgctgaaatggttgagcaagggtcttgccggatttgaaaaaaaaggaaaaaccgaagacggccgtgtctatcaggtcgagttgccaaaagaatcagatcgtcgttgtttgttgcgatgtgaagatggggatttggaaatgcctgcctatgtgattcggtttttggataattaa

SEQ ID NO: 50251 - DNA, 1146 bp, Acetobacterium woodii DSM 1030
atgaaagagcttgaaatacttctggaccaatactgggttgtgaaggacaatgataaggatttattttatcgggtcaaggacagcattccgcaatttaaatcttttcttagtgataagctgggttatggtatcattatgaatcagcatttaatcaagctggagaaaattcccggttcagccgagagctttatgggaattcaggaatttaatcatcccctcgaatatgtgttgttatgtctgctgctgatgtttctggaagaccgttcccgggatgaacagtttgtgctgtcggaagttaccgaattcatttccgggaacaatatcggcaaagaaaaaattgactggactttatatagtcatcgcaagcattttatcaaagtattgcgttttgcccaaacgctgggattgttaaaaattaatgatggggatgatcagaaatttgcctatcacgatgacaccgaggttttgtatgaaagcaccggtttgtcgcgttattttgtccgccattttactgctgatatcatggattttggcaattatcaggatcttgaaaatgccgaatggggagatctgaatgccgatcggggagttatccgacgacagcgggtttaccgaaagctactaatggaaccggtggtttattcccaaggggcggatgatgtggattatgactacattaaaaagcaacggggattgatggaaagtgattttcagaaatatctggaataccgccttcatgttcataaaaacgggacgatgttggttgtgccggctgaaaaaaatattcaggacggctttcccaatactaaagcgatctgcgatattacccttttattgatggcgatgatgcgggaggcgcttcaggaaaagaaactccggattaattcgagcggtgggatgaccatgtctcgggtcgcttttgacgaatgggtggtaaaactaaaagaaaaaatgggacagcattggagcaaggaatttcgggaaatgacagcagccgggttggccgaaaatctggtagcgtatatggaaaactttaaaatgttacgggaatggtatgatggccgggaaatagagatcctgccgctggcggggaaactgatcggaacttatccggaagatgttatcgaaagaaaggagaagaaataa

SEQ ID NO: 50252 - DNA, 4089 bp, Acetobacterium woodii DSM 1030
atgcaagataatcgctgggtaatcaatcgggcggggctggtaaatttctggtattatgatgaggagatctttgatttttcacaaggacggctgttattacgtggttccaatggatcgggaaaatcggttaccatgcagagttttattccattgctgctggacggcaataaaagtccagaacggctggacccttttggatcaaaagcgcgaaagatcgaaaattatattcttggagatgatgaaaatggtaaggacgaatcgattgggtatctttttatggaatttaaaaagaaaaactccaataatcgggtcaccattggaatggggtttaaggctagtcgcggaaaacagatgaagtcctgggggttttccattaccgatggccgacagatcggtgaggacttttttttatataaacagatgggtgaaaaaataccattaacgatgaaagagttggaaaatcggatcggcgagggcggtcaagtggttgaaggacaaaaaaactacatgaagttggtgaacgacctgatttttggctttgatgatctggacgaatatgatgaactggtaaaattactggtgcagcttcgcagccccaaattgtccaaggattttaaaccaacggttatttatgagatcatggaaaattcactacagccgctatctgaggacgatcttagaccgatgtccgaagcgattgaaaatatggataatatcaaaagccgtttggaggttttgaaggaatgtaagggtgcggctgatcggatcaggcaggcttttgatcgctataataaatttattataggagataaagccaagcagtttcatgatcatcagcttcgacttgagcaggaaaaaaaacagaagctaaaaaaaataaaagccatcgatacagcggaaaaagagatcatcgcgctgaccgaaaaaatcagtgagctggaaatggtgattgatacccaacagcaaaaaaagctggaactggaaagccacgatagtgtcaaggtccgggagaagatcattcaaatcgaaaaagaaattcaggaactacttaaacaacgatccgataaagataaccagcatcaaacaaaaaggcagcaggaacggggtctggatgatcaggtaaaccgttgctgccaggaaattgaagctgccaaacgagatattatcaagcagcttgaagagatggatggtttggctgaaacctttgcttttgatgagcatgattttatgcgggatgaagtcaaaaaagatatcaccgagccgtttgattttaattatgttaccaataacttgaaaaatcacaccgaagttctggggcaggccgttaaagctctggagcaggaaaagcaggtttcggaaagttatgaaaaattagtgatggagctggatatactcaaaaaagaactggccgaaaaagaacgattgcgggaacaggcgactcgtcaattgaccgaaattcaggatgagaccctggaaaagttatatcagaaaaatcaggctaatcaggaatacattatttcggatgatggtttgagtcaactcgcccgggaaattcgacaatttggggcagaaagtaatttcaatgtcatcgctcagacattgcgcagtgagtatatcggattggaagagctaaagcggagccggctctacgatgaaaaagccacctggtcaaaaataaataccgaaaaaaatgaaaaagaaattgagttgaataactggaaaaacatcaaagatcccgaacctttccggaccgaaaaagttataaatagccgagcaaagctagtggaactggggattcctcatattcctctttataaggcactggattatcaggaaggggttgatgatttgactcaggctgccattgaagcagcaatgaccacgatggggatcttggatgctctgattattcccgcggattatcgcaagaaacttgggtcaatgccggagttgagcggggataaatttatttttccagctccccagtatatggtgcatagcatgaaccagtatctgaaagtagaagactcattagggaagattgcacctgaagaggtggcaaatatcttgaccagtattctgattgatgaaaatcaccacacccacatggatgaaaaagggaattatagcctgggaattttaagagggcaggtcagtgatccggaaacagcaaaatttattggctcttctgcccgaagaaagtatcgggaaaaacagcaaaagcaactggaagctgaactggaagttattattgagcgtttggcaatcagacaaaaagtgctgaataaaatcgaacaggaaattgaaaccttgaaacaggaattttccgaagggttagatcaggaggatctggtaacggcagccaacgtccttaaacaggccatttttgatgatgatatgtgctcaaaagcagtcgaaaagaaaaatggcgaagaaaaaattctgtatgaaacagtaaaaaaattaaaggaagcagtttaccatatcacccgcagaatcaccctaccggtgaatctggaaagttatcgagaggctcagagtgcggcgtcggcttatcgcgaggagcttcacgggttggaaaaacaaaaactgcaacttaatcattttagcacgagtttaaagatagccgaaaaccgctacgaggaagtgttacaggaaattgatgaagtgctttatgaaatcaatgccctgaacacaaaacgcagcacccaggaactaaccctgaacaatttgaatgaacagttaaaactgaccgattatgaggccattaagaccgaattggagcaatgtctgacggcgttaaaggaatttcctaaagaaaaagaagaagcggttaaacggctggaaagagaaagattgggggctgaacggctggccgaagagctggaaaagctggaacgggaactggaacagcagcagcgaatttttgtgattgtgaccgatgcttttaaggaagaattgaatctgggttatgtggtcaaatccatcgaaaatgatttattacaaatagcaaaggatctgcttgaaaaaaatcccgttgctgacaaacaaaataaagagcagatgaccattaaattggtggaaaatttaaataacaatggccagtaccttcgcgattatgcggtaaatagccaatatgtttttgaacaagagggcaacgttggtaccgatgaagcggtggcgaaagctcacgaaatgagaaaacggatgaatattacggccaaggttacaggcaaggtggttaacttctacgatttatctgattatctcaaagatagtctggaggaaaccgaaaagctgctaaaagaaagcgatcgggaattgtttgaagacattttggttaaaaatatcagtaaaaaaataagtgcccggattttccatagtgaaaaatgggttgataatatgaaccatctgatgagtaaaatggatacctccatgggtttgagttttagtctgaaatggaccagtaaaaaagccgaaaccgaagaacagatggacacccggaagctagtgaacttacttaaaatggatggcaatctgttaagagacgaagacctcaacgcgctttctgaacatttccgttcgaaaataactttggctagacgaacattggaggaaaaggatgtcaacctgacttttcattcgattatgaaggatattctggattatcgaaaatggtttgagtttaaattgttctttaaaaaaaccgggcaactaagcaaagaactgacgaataacggcttttttaaattcagtggcggtgaaaaagcgatggcgatgtatgtgcccttgttttccgcggttaacgcccgctatgaggcggctggtaaagaaagtgcccggattctctcgctcgatgaggctttcgccggggtggatgaacaaaatatccgggatatgttcaggttgctgaatgagttggacttaaattatattattaattcccaaatcctctggggcgattacgataccgttgattcattggcgatcagtgagctaatccggccggacaacgccgattttgtgacggtgttgcgctatcattggaatggcaaggtgcgaaagctggtggtcgatgatgcctcatga

SEQ ID NO: 50253 - DNA, 1275 bp, Acetobacterium woodii DSM 1030
atgatgcctcatgaatttgcggcttatctgaaagcgaatcccggttatcagcggatcatgaagcaaatccgggaaaaatatgaatcgctgggtcatctgggtggcgtgattcgtttggataagctgaccgaaaacgagcgggaagtccttcgaagtctctttaaaaaaaactatctccagaaaagtgccacttttacggtgggaaaatttgtcggggcttttgctaaaaccagatatgaaggggtcgattttgaagccatgttgagctgctattttggtgaaaagttgaactggaaaaaagagctgaaaaatcagtatcaagaggaaaaaagtcgctattttaacgaaatcataaaaacttttaaagcaactccagcagcatcgtggttaatggaaagcctgacaaaccggaataatgcctatgcaatcctgaatatcaagtataatgaagatcccgaaaaccttaaaaaattgttgacccaggtttgcacggggttgaatcaatgtgtggtcgaacctcaaaagttgcggttggcactttttgcttctaaaatcaccaaagatccccatgcctttgatatgaatcgggatggcgggcgcttgctgctttatggattatgcgcttattatcagctcaattatcctaaaaatgccgaagcacaaatggaagttttataccaggctggactcatttatgatgaagtttccaattatacgatcggcagagggatcaaggcgacagctaaagaccgaagccatccgggatgggctggatttgccgaaacgggagaaccactacacatttcgctttggaatattagtttgattgacggcgttaactgtgttaaaaaccgggtttttgtttttgaaaatcccactgtttttagtgaaattgccggtttgttggaagatcagcccggttcactcatttgttcagccggaaatgttaaggtcgcaaccttattattgcttgataaaattgttctaggtggcggtgagatttattatggtggggacttcgatcccgaaggactaattattgcggataagcttaaaaagagatatcgtgaaaaattgatcttatggcattttacgccggaagactatcagaagatcttatcaaaaaagaagatttcggaagcacgattaaaaaagatggcgaaggtagtttcaccggaattaaaaataatggctgaaataattaaaaaaactggctacagtgcctatcaggaattgatggtggatgtctatctgaaagatattaaaagctgttaa

SEQ ID NO: 50254 - DNA, 1533 bp, Saccharomonospora xinjiangensis XJ-54
gtggaacggattcccccggagttgttccggttcagcgtcggcgagaacgccgacacctacacagcgattctgcgcgcgttcgcggaggccaacgaacggctggagacctcgctgagcctggacgaggtgcaacagcggttgcgcacagtgggctggttcggtgccctgcccaacgacgacctcgctcgcgcgctgcagaagctacgggactggcagctcatcgacgtcatccagaaccatgcggagaactaccgcacggccgaggaatacgagcgtcgcaacctgcagtactccctcaccaaacggggtgaggctgccttcgccggtgtccagcacgcgttgaccgtgctggcctccaccggcgcattgcagacggccgtgctggacgccatcgccgaccgcctggcggaactgcaccggctgctcacggacccgacggcgattgatcgcaagatcttcaccacactcaccgagctggaaaaccacctggacgcgctgcgtaccaacaccaagcagttcaacggtgagctgcaacggctgctccgggcggaaagcgccgacctcatgaccttccgcgaggtcaagaccgccaccgtggcttacctggaagagttcctcaccaacctggaccagcgggcacacgccatcgcggcgggtatcacccacctcgagagtgacggttcggacgtcctgcacaagcgcgcactggccggggccgacctgcccccgtcgcccggaaacgacattcgggcgagctggctggcactgcgtcgtagccgctgggcgggcctgcgggcgtggttcctgcccgaggacgacacacccccacgggtggagcagctccacgtggtcgcgcggcgagccatcgtgaccctgctgcaggtactggaccgaatcgcggagtcacgccaccgggccggcagcgcggtcgctgatttccgggaactggcccgctggttcgccctggccccgacggagaacgatctgcaccggctgttctcggcggcgttcgggctcggctccgcccgccacgcacacctggctcaccccgacccggaactggtcagcgcgtcggccccctggcaggaggccccgccggttccggtgtcgccgctgctgcggaccgccggccggatcgagaaagtcgcccgcaccggcaaggtgcgcgatgtcgccgcgctgaaacagcagagggcggaacgcgctcgcgcccagcggaggcagctgcgccgcgcctggcgacagctcgtcaccggaggccccgtcaggctctccgcgttcgccgagctcgaccacgacccgttcgaacggctgctcgacctgctcggccgggcgctggccacgcaaccggacacctccggcacgcgccgcgctgctaccaccgacggcagggtggagatcgtgctgctgccgccgcccgacgaagcacaagctgtgctccgcacccctcggggtgtgttcaccggccccgactacatcgtcgacgtcagtacccccgacaccgacgacgccgcagaggaagcgacagcatga

SEQ ID NO: 50255 - DNA, 1227 bp, Saccharomonospora xinjiangensis XJ-54
atgagcaacctcgccaaccagcttgtcatcgccgagcaacaggacgtcgccaaaggaatccggctgctgctggcaacgccgctgatcagcgcgagaacggcaccggaagcgttcgatctgatccgcagacggcatggccccatcgcaaagtggttcgactacacgtgtggttggcgactagtagtggaaccgaggttcggctacgcccgcctggccaaagtgaccagcgaacacgatcacacccgccccgcacgccggtcacggtccggccgaactccgttcgaccgcagacgctacacgttgctgtgcgtgatagcggccgaactgctggccgggcccgtcacgacgatcgggttcctcgccgatcgcgtgaagtacgcgacggccaccgatccggtactggaggtgttcgacaccgcggcgcgctccgaacgcatggcctatgtcgacgcgctccggctcttggagtcctacggtgtgctcgacaccgtcgacggaagcgccgaagcgttcgtggattcccgtgaggccaaggtgctttaccgggtcgacaccacgttgctgcttcggttgttgtccgcacccacaggaccttcccagctcgccacctccccggacgaggtcgcacatcgctggccggagctgctcgcggggctgacccgcgaaagccgctacggggacggggagaattcgacctccgacgtgcaacgcaatctgtggttacggcactcgatctgccgccggttgttcgacgaaccggtcctctaccgacgtgagctcagcgaggagcagcgcggctatctggcctctctcacgggacggcaggtggtgcagcgcgcggccgagcgggcggggttcgtgctggaagagcgggccgaaggttatttgctcgtcgaccccgaggcaatcgccaccgaccgcaagttcccggacgattccggcacggcgaatgtcgcgggtctgctgctcctcgacacgctcgtgacctccgcaccaggcctcaccgtcgagcagcttcgcgccgaggtgacccggttgctggcccggttcccacgatgggccaagacgtatcgaggtgaggacggcaccgagcgcctcgtgcacgacgcgctcgacgcgctggcggcgttccggctcgtcgagcacaccggtggccgggtacatgcgttgcccgcggccgcgcgctattccgtcgccgagatccgaaccagcaaggagaattcgtga

SEQ ID NO: 50256 - DNA, 4029 bp, Saccharomonospora xinjiangensis XJ-54
gtgaccatcgccgaattgcccaacagagccgacgcggaagccggtcgcgcggcagctcgctggcagcccacgcgagccgggatcctcaatgtctggcgctactacgacgaggtcttcgaattccacaacggacggctgctgctacggggtccgaacggcagcggcaagtcgaaggtgctcgaactgttactgccgtacctgttcgacgcgagccttcgccccaaccggctgtccacattcggcacctccgaacggaccatgcactggaacctcatgggagagggcgcctcgggcacaacccgggtcggctacgtgtggctcgagttcgcccggatgcccggcctcgacgagtacgtcacgtgcggagcgaggctgcaagccaccacccgcaccaccgacgtcaccgccgactacttcacgacctcgctacgggtcggcacggatctctcgctgaccaacgcctccggccagccactgacaaaagccgtgctgaccgaacagttggatggtcacggaacagtccacccgaaccgggcggaatatcgcgccacggtgcggcaactgctgtttcccgggctgtcggaacaacgctacgaagcgttgatcaccgcgctgctgcaactacgcacgccgaagctgtcgcaacgtctcgatcccggactgctgtcctcgctgctctcccgcgcgctgccaccactggatcaggaggacatcgcggagctggcggagggcttcgaacgacttgaccaacagggcgagcggttgaaggaactggacgaagaggtggaggccgcccggaaggtcgccacccggcaacgctcctatgcccaacgggtgctgcgcgcggcatcagccgacctgatcactgccaccaagcgaatgaccgagtcggcccaggccacccgccagtcggaaaccgaacatcaggaggctgtcgccgcgaggacagccacggaacaacaacgcaagaagcttgccgcagcgatccgccgagccgacgccagcatcgaaggactgaccaaacacgacctgtacgaaaaaggcagcgagctcgacgacctgcgccgccgcaccggggacgctcagcgagcagcgcgcgaacaggccgcggtggccgagcggaagtccacggccgccgctaccgaccgcaaagcggccgaggatgcggcgcatgccgcagaacagtgggtggaacaaatccgtgtagcggcggaggaatgcgccggcgccgctcggcgcgcgggactcgactccacctacggcgagctgatttatgcgctggaacagccgaacgaccacagcagacaactgctccgggcagcggtacagggccggcagcaggcgatcgagctggtacgccgcgcgctggaagcacacgaccgggccgtcgatgcccgcacggaagccgaacaccggctggaggacgctcggaccgagctgtcccaggccaatgaccgcagggacgccctggccgaccagtacgacgaggtgctgcgagagcacgagcaagcattgctcgcatgggcgtctgcgtgcgaggaactggtcttcgacgatcctgcggcgttcgtcgagatcgcggactccgaggcagcggttctcgctcgtgtcgccgaggcggctgagcgccgccagcacgacatcaccgtcgaggagaccaccctcagtgcgcgatgggaacaggccgaaaccacgcgaaccgatctggtggagagcctggagaagctgcgcgggaaggtggatctcccaccgcacgctccgccgcaccgcaccgccgaccgcacccgcatggcgggtgcgccgctgtggcggcttgttactttcgccgaccacgtcactcctgcggtccaggtggctgtcgaggcggctctgcaggcagccgggctgctggacgcctgggtgaacccgtccggcgcgctggtggtcgacggccacgacacattcctcgacggcgctctactcgaaccagcgccaggtcgttccctccgggaggtgctggtcgccgaaccggacagccccgtgccggtcgagcgggtcgaggagttgctggcggcgatcgcgttcggggacacgctgccggctgagcaccccgcggcgtgcggggccgacggacgctggcggctgggagcggccaccggaagctgggcaaaaaacgaggtcgaacacatcggcgccgtggcacgtgagcagagcaggctgcgtcgtatcgcggagctgaccgagcagctcgacgacgtggaccgagagctcgacgacctgagcgcgtgggccgatcgactcgcgcaacgccgtcggacactggccgtcgaacgggaacgtcgcccatcgcacacccgggtcaaacagacctggacggaactcgaccgcgcggagaacgcggtctctgccgccgacagctcagtccgcgcggaatcaggacgcttgcacgagcgcgaggagtccgtgcggcgggcccagcatgcgttgcacctcgcgggcacggagcacggcataccgaccgcgcgggaagctttggacaagctcggtcatgcggtggaggcgttccgcgagcgcgcccagatctggttcgagcagcacaccaatctggccaccgcccggtcacgggcggaactgctccaagatacggcaggacgatcggcggccgatgccgccgagttccaggccaccgctgaacgcatcgccgaggacgcgcaagcactcgacgaggagcttcgcactctggagcgcctggtcgatgccgacgacctacggcagatcgtggaggagctggagcaacagcggcgtctgcgccggcaactcctcgaccaggacagacaggcaggtaagcagctcaacgagctgcacgagcggatcgggcggctcggagaacgcctcgcgcaggactccgaacgacgcaacgaagctgttctggcccgcgacaacgccgctgaccggttccgcaagctgaccacgagtaccctggtcaaggatgctgcactcgaggtggagctcacgagttccggtggggtcaccgcggtcttggaggcggcgcggacggtggcgtcgaagtggcccacccttccacacgagccgaaacacatcaacgatgccctgcaccggctgaacgagacggtgtacgcgtgccgggacgtgctcagtggtcgcgccgacctggaactggcgacggacgacgagatacgggtgttcaccgctgtcctggacggcacgcgagtgggtgcgcaccagctgctcgagaccttgcgtgccgaggccgaacgcagccgcgacgatctcacggagtcggagcgggagttgttcgaccggaccctcaccggtgacacgcggcgccaactggctgaccggatccggcaggcaggcgagctggtcgacgcgatgaacacacgactcgaacgggtccgcaccgcttcccgggtggccgtgcgactggtgtggcaggtcgatcaggatcttcccgccggaaccaaggacgcccggcaactactgctcaaggacccggtgtggctctcggaggccgaccgggaatccctgcaccggttcttccgggaacggatcgaggcggccagggccgacaacacgtcgtcgaactggcgggaacaactcgcgcaggtcttcgactacaccgcctggcaccggttcgtcgtgaagctcgaccgcgccgacggcaagggatggcagccgctgacgaagaaactccacggcgccctgtccggcggggaaaaggcgatcgcgctgcacctgccgctgttcgccgccgtggcggcgcactatcagggagttccgtcggcaccgagattgatcctgttggacgaggtgttcgtcggagtcgattccagcaaccgaggccaggtattcgagctgctcgcctcgctggatctggatctggtgctgacctcggaccacgagtggtgtgcctaccgggaactgccgggcatcgccatccaccaactcgtgaccggcgacgacgatgatgccgtgaccacggcacggttcgtgtggaccggaaaagattgggcgggtgagcagaattga

SEQ ID NO: 50257 - DNA, 1215 bp, Saccharomonospora xinjiangensis XJ-54
atgccccatgcgttgcaggcagtggcgctgcgccccctgtgggaggcggtgcacacgcgaatgtcgtcgggtcgcgccgtcacacgtgtccgtatcgggccgctgaatcacaaccagcgcgcggcggtggcggacctgctggggctggaccggacaccgggcgagcactacacggtgtcgatacctgcgctggaaacagcgctggccgaggcgggcacggacattcccacggtcgtcaccacgttgatcggcccgatcggtgaccgggccgcggagcgcgtccgggctgaggctcgccgcgcggagttgtgggactggctggacacccatcccgaggtacggcgccagcccgcactggcgagctgggcccagcaggtgcgccgcgcgggactggtcaacggatcggtcggccagacccgcgacatcctggcaacagtgctggctgtgttggcccggctccccgccgaggggcaaccgctgcccgccgtcgcgagtgaagtcaccggcgatccgcacgcgctggacgacggcacccgcctcggcaatcttgtcctgcgtgcgctggccacgatcttcggcgccccgatgcctgccaccgcctacgagcgtcgggtgctgtgggagcaggcgggcgtggccgcggacgagctctccagcgtcgtcctcgcggcgggcttgcgcctgaacggtcacggcgtggccagcgacctcgcgaggtgctgtgccgaggccgggcaggccgtggccctcacgctggcgcagctgcgcgcgaccgaactgcacgcggcaccggagcaagtgtgggtggtggaaaaccccagcatcatcgctatggcgctccgagagtttggcaccgactgcccgccgatggtgtgcacatcgggttggcccaacactgcggtggtgctgctcctgcgcggcatggcagatctcggtgcccggctgcactaccacggggacttcgacggcgagggcctgcgcatcgccgcgtatgccatggagaagacgggcgcgcggccatggcgtatggccaccggcgactacctgcgcgggctccgccccagcacccaaggccccgaaccgggacgcatcacagaggcaccgtgggatgccgatctcgcggacaccgtccgcgagatcggccaagctctggccgaggagagcgtggccgacgacctcctgaccgacctggcgcgccacgtggtttctgggtga

SEQ ID NO: 50258 - DNA, 1452 bp, Rhodococcus imtechensis RKJ300 = JCM 13270
ttgaaactgttcgccttcaccacggcggagaaacgcgcggaatacctgtgggtgctgcgggccttcgaccacgcccgcgccaactacgtcgtcctgctccacgccgccgacgtcgcccggattctggacggcctcgccggcgacgatccggccggacaactcggcgccggagacgtcactcccctgctcgaacaacttcacgtctgggaagtgctcgaacgcagctacgacggaacacgcgccgcgacgctggccgaataccggaaccgacacttcgtctatcagttcagccaggccggctaccaggtgttccgagccgtcgaggacgctctggcagcccggctcgacgacgcgtcgctgtcccggctggcgctgcccgacctcctcgccgacatgaacgacctggccgccgccaaccgcgcggccgacaacgacctggtgtaccggaaactcaaccgcctcgatgcgacattgtcggacatggccgggcgcgccgcccagttctacctgaccctgggcgacctcgtccgcaccacggagatcacgccggagacgttcatgtcccacaaggacgctctcctcacgcacatgcgcgagttcagctccgacctctcgcgctatgcaccgaaactcgcggcggcgatcgcgctcgtggaagacaccggcgtcgagacgatggtggcccgagccgccgccagcgacgagcgggtgttcctcggcatcgacgagcgcgaagccgattggcgcgcgcggtgggcgggcctgacgcattggttcgtcgggagcgaggccggtctcagcgagtcggaacgcctgcgcgagggcacgatgagcgccatcgccgccgtcctgtcgctgctgcgccgcgtcaccgaaacccgcaggggtggtgtcagcagggagagccaattgcgtcacctcgcaggctggttcgccgccactccgaccgaggacgccgcgcatgcgctgttccgagccgtgttcgacctcgggcgtccgcgccatctgtcgatggtgcatccggacgccgacatcattcccgacacacggtcgtggtgggaggcccagcccgtggagatctcccgcacgctggccgagaccggacgtcccccgtcgcccggtctgcccgcgcgggtgcagcgcaacgagggcagcgtgcgccgcctgcgggaggaacagctgaccgcgcaacgacttcgcgccgccgccgcccagtcgctggcccggggcggagtctacgagcgggaactcgacgaggccgaaaccgacgtgctgctgagtctgctcaacgccgcgctgacggcacgggtaccggtcagcggccgcgtgaaaagcagtacaggatcggagaacggcgtgaagctgaccctcagcccgcacagcgaatcgacggtggtgcgcaccgcccgaggacgtctgcacctcgacggacttcaggtgagcgttcggtga

SEQ ID NO: 50259 - DNA, 1395 bp, Rhodococcus imtechensis RKJ300 = JCM 13270
gtgaaggcgcgggagatctcgccgctcgccctcgattcgtatcagcgcgccgcccgtgtcatcctgtcgaatcacctggtgacacagacctatccggatcgcatcgctcttcccctgctccgccggtgggcgaccgaactacgcgaagatctgatgacgctcttcgggtaccgactcgaagtcaccgagacgaccgcccggctgttcacggtgagcgaccgactcgacgccgggacgccggccaagacgtccaccgaccgcacgttcgaccggtaccgctacgcctacctcgcgttggcgctggccgcgctcggccgcgccggaaaccagatcaccctgtccgagctcgccgatcacgtggccgccgacgccgcacaggtcgacggtgtggatctgtccacggaacgcgcgtccgaccgggacgcgttcgtcgacgccgtcggctggctcgccgcccgcggcgcgatcgccctcgccgacggtgacgcgggcggctgggccgccaatcccgatgcgggagaggcgctgtacgacatcgacaggtccgtcgtcatcgccctgttccggccgccgcgcgcactgcagcacctccggtccatccgcggactgcttgccggtgcggactcggtgaccgaggacgacacctcggagttcgggacggccaggccggtggacgtgaaggagacggcgcggcgggtgcggcgtgccctcgtcgaacggcccgtggtctacgccgccgacctggacgatgacgaactggtgcaactcacgctcccccgcaccgcagccgatgtcgagttgctcaccggactggtcgcggaacggcgtgaggagggcgtcgcgatgatcgactcctccgggcgtctctccgacgtccggttccccgggacgggaacggtcgcgcaggtcgcactcctgctcgccggggagatcgccgatcgcgtactggatcccgatgccccggagaccgcccggatgccgctgccgcggggccggttcgacgacctgatcgaacaggtcgacagcgccattccgcagtccgggatcttcgacagcctcgccggccacgacggattcgaacccgccgaccccgcccccgcggaccggctgttcccggtcgtcgaggacgaatggatcgccggcaccgtccgcacactgaccgaacggttcgggcgcacgttcgccgccgggtggcaggcggaccccgacggtctgggacgcgcggcgctgacgctgctcgagcggctacgcctcaccgcggcggtcccgggtggtgtgctcgcactcccggcactcgcccgctaccggggtgtggtggtcacgatccgcgaccgcacacccgagatcgacctgttccagagctcagcgaacgacagcgaggaagtcacagcatga

SEQ ID NO: 50260 - DNA, 4158 bp, Rhodococcus imtechensis RKJ300 = JCM 13270
atgacgagtgcgcgtttccggcccacccgcgccgggatcatcaacctctgggactaccgcgatcaggagttctccttcgccgacggtcgcctcgttctccgcggtcccaacggatccggcaagacgaaggccctcgaagtgctgttcccgttcgtcttcgacggcaggatcgaaccccggcggctcaatccgttcgccggcgaggaacgcaccatgaagtcgaacctcctgtaccgcgggcaggagagcgcgtactcgtacgtctggatggaattctgccgcggcgcgaaggacgaccccgaggccgtcaccgtgggcatcggcatgcgcgccacccgcaccaacgacaaggtcacacgctggtacttcgtggccgacggtcgcgtcggcgtcgacttctccctactcggcagcgacgaccggccgctcacgaagaagcaactgggcgaacagatcggcaccgactccatcaccgaccggccgctcgactaccgcgccgccatcgacgcccggatgttcgggctcggcgtccaacgctacgaccagctgatcaacctcatcctcacgctccggcggccccagctcgcgaagaacctcgaccccaagggactgtcgcaggcactcaccgacggtctgcgaccgctcgacgagcaactggtcctcgaggccgcccgctcgttcagcgacatggaggaggtcggccgcgcgctcgaggggctggccgcggccgaccaggcagcgcagagcttcgtcggcgtgtacgcgaaataccttcgccagcaggcgcgtacggacgtcgatcacctcgcgacccgtctcgaggccgtccggtccggcatcgccgccctccacgacgcggcggccgaccgggcccgcagccaggagagccgagcggccgccgaggaacgcttcaccgccgccgaacgcgcactcgaccaggccaatgccaccctcgacgcactgaagcgatcgacggcgtacgagggacggacgcagctcgacgacctcgcgcaggctgtttcgacactcgagaaatcgaccgaactgcaggccgagaaggcacgcaaggcgaaggcgaccctcgaacagcgagccgaggagcacgacaaggccggtgacgccgtcgcccgcgccgtcgaggcgctcacccatgccgaagacgagcttcacctcgccgccgaggacgcgggaatcacctggaccgcactccccgagaacgcgcgcaccgaccagctgaccgccgcgctgcgcgggcacgccgaggaacgggacggcgacatccgcgcggtccgggccgcgctcgccaccgtcgagaaggccgccaccgagcggacccgcgccgacgaggcggcccgccgtggccaggagcaactcgacaccgcgaaggtggccgttctcgaggccgagaccgcggtcgagtcggcccgcagccggtgcgccaccgaactccgatcctggtggacggaacagtcgtccctctacgccgagatcgacgcgccggcttcactgttcgactccctggacaccgccctcggccggatcggcgacgacgacgccgccaccctgtcggaaacgctgacggaacagaccacggacgccgtcgactcgctccggctgcgtcgtcagcagtacgaccgcgacgtcgccgccgccgaggaagcgatcgccgaacacgaatcggcccgcgcggccatcgaatccgagcacgacgacgccccaccgctctcggccgcccggcaggacgcccgttcccggctggccggcgcaccactgtggcgccttgtccgcttcaccgacggtgtcgacgccgcagcggcggcgggaatcgaggccgcgctggaggccgcgaatctcctcgacggctgggtgaccgtcgacgacgcgctccccgacgtcgaatccgaacagttcctcgtggcccttccggccgcggatcggcccaccggcaagaccctcgcggacgtcctcgaggtcgagcaggacacgggtgttcccgacgatcgcgtgcgcgggctcctcgagtccatcgccctcgaatacctcgacctgtgtgaaggacctgtaggtgtcgccgaagacggtgcgtaccggcagggaatccagcggggacgccacacgaaatcggacgcggagtacatcggcaccaccgcacgggcccgcaggcgcgccgcccgtatcaccgaactcgacagcaccctcgacgaaacccgggcgaccctcgacgaaacccgggcgtccgcggatgcgacggctgcattgctgacgcggacgaccgcggcggcgcaggccctgccccgcaccgggtcgatcctcacggcgctgaagaagatcaccgaatccgcaggcgcgcttcgcagccgctcggacacggcgaccgcggtcggtcacgaactcgaccaggccatcgccgacctgtccgcgaaggagaagcagctccgggccaccgcgtccacacatcggactccccacgtcgcccgcgagatcgactcgctcgccgcggccgtccggcatttcgagaagcagggcgagatggtgcagcggtgcaggcgcgaacacgccaaggaggtggagcatactcgcgagtccgaggaccgactgcacgaggcgcgcggcaacgcagaggagttcgcggaagaggcggccatcgccgaagaggttctcgcgcaacagatccaacgtctcgagacgcttcgcgacacgctgggagcgggggccgagcagctcgaccggcagctcgaggaggcgcacgcgcggatcgaggcgtgcaagaaggagcagcgcgacgcccgcaaggcggacaaggacgcgggtgaggcgatcggtaaagccgagggcgcgtacaacaccgctgtccagacgctccggctggcgctcacggaaacgcacgccgacgccgcccgcctcgccccgtatgcccggcgcgacctgctcgaactcctcggcgtcgacggcggccacacctggccggcgagctcggcggcgtggatgagtgccgaacagctggtgtaccgcatccagaacgccgaaggcgacaccccgatcctgccgcccgaagtggatgcgctgttccacgcactggacggcgccaccgaatcggtgcgggtcagtgactcggcgcgcaaatcgacgcgcaccgcgctcaccaccgccctgcaggacttcgacgcacagttggcggccgccggccaggactaccgattgcagtgggacgccccggacggcgtgaccgtggtgcaggtgcaggacgacgagggatactcgtcgatcggcgagttcgccgcccgcatcgcgtccgctcgctccgatcaggaattgctgctcaccgaatccgagcgtcgcatcctggaggacgcgctgctcacgggtctcgcacagcagatccacgaacggaccgtcgacgcccgcgaactcatcgcccggatgggcaccgagatgcgggagcggcggatgtcgtccggcaacaccatcggcgtccactgggtgctcgccgacaacctcgacgacagcgcgaaggcgatctccaaactgctcgagcgcgacacctcggcgctggggccggacgagctcgccacgatgcgcgcccacttcgcccaccagatcagaaccgcccgcgccgcccacccggagcgttcgtacccggagatcctggcatcagccctcgactaccggcggtggcgggtgttctcgttcaccctgatcagcggcaacggcaacgaggaccggctgacggtcgcccggcacagcgcactctccggcggcgagcagtccgtctcgctgcacctgccgttgttcgccgcggcacacgtcatgctcgattcggccgacccccatgcaccgcgactgctggcgctggacgaggcgttcgccggcgtcgacgacaacggccgggccgaactgctcggcctcagcgtgcaattcgacctcgacctgttcatgaccgggttcgacctgtggatcacgtacggcggggtgccggggtgtgcgcactacgatctggcgcactcgacggccgagcagagtgtcagcgccacgctgctcgtgtggtcggatggcgaactgctcgccgaacacgacggcaccgacctggcgcaggcgctcggttcgcccctccgccggcgcgtcccgacgcccgcggagggcgccttcgagttcgcctga

SEQ ID NO: 50261 - DNA, 1488 bp, Thermoanaerobacter siderophilus SR4
atggaagataaacttgatttgaatgtgataaaaccgattgaagaggtaaagtatttgtctgcggaaaatgcttcgcgatatcgccttatcatgaggtatttttatgagcagtaccagaaatttaaatattggctgtacaaagaggatgtatatgaatatgtaagtcaatttgatatgtttgctgactatacaatggaaaaatgtgagcaggacttaaaagcacttactgaatggaaaaaccttattgcgacacaagataccagtaaagcttctacgattgacgaatttaaaaacaaaaaattcaggtatcagctgagtccatattctattgagatagagagaatgaccataaggctggaaagcatcgtcggttatggtgggtcactacagccgtctttatttgaaaggatttaccgcaatttaataaagataaatgaaatggcgaaaaaagaggatttacaggaaataaacagatggtgggaagacctcaataccgactttgaaaatatatatcacaatgcgacagattacattgcaagtcttcaaagctctaacgctgatgaacttatgaagtcagagcagtttataatttacaaagacaaacttatagaatatttaagagattttataaaagaccttcagagattttctgttgccatagagagctttttgaaaaaggtgagtccggaggttgtcaattccgttgtagataagttatgccaatatgaaatgagtatcccaagaattgacagggttttaaatgaagaggaagtaaaagaagatttgatggataagtggaataacatatctttttggtttacaggtcataattttgaagacagcgaggcagtaaggcttcttaatatatcaaatgaaataatcagaaaaataacaatgtatgcggcgagaatagcagaaaacaggatgaaagctgccagcagaaagaatgaatatattgctctttctaaaatgtttgcaaaagcaggtagtataaaagaagcacaccttttgtctgcggcggttttcggttgcttttacacaaggcacataaagggtgattttgaaagaaagacagaaagtgtaaaccagagtgtatgggaagaaccgccctttaaagtgattataaagccaaaaacaaggagctacagtaattatgttaagacaaatgcgattattgataaaagtgctgacaagacggagatgctgatggactatctcaatcagaaaaatatagaagatgaaataatagcaagttgcattgttggcaatagaataaggataaaggatttacctgttgtaaaaccttttgtgagggcaacgatacttaaatggataggaaaagcgatagcaagaaatggctttacaggaaaaacagaagatggcagaacatacagacttcacatgccaaagaatggcgaaagagcggttttgaaatgcacggatggtaatcttgatatgcctgatattgtaattgagtttgttgattga

SEQ ID NO: 50262 - DNA, 1152 bp, Thermoanaerobacter siderophilus SR4
atggaagaacttcagatgcttcttgaaaatttttggatactgagagaggatagagaaaatttcaacaaaataagagatgctgagaataaaataaaaccttttgttgaagagaagttaggatatagattgattataaacccatatattattaagttagaaaaagtgccgtcagatgttgaagagtggatggggatagatgcatttcaaatgcctatggattatgcatttttgtgtttgcttttagcttttttggaggataaaggaccagaagaccagtttgtgctgtctaatataacggaatacatagaggcgcagtatgatggacctgataaagtagattggacgctttttcagcacagaaagtcacttgtgcgggtgctcaattttgctgtagatattggcataattaaaatagatgatggtgaccacgagaggttttcagaaagtgaagatactgaagttctttacgaaaacacaggcatttcaaggtattttttgaggtcttttaacagagaaattacagaagacgtgaagattgaggattttttgcaggaggatttaaatctttcaaaccccaaagatgcggttatacagagaagacacagggtgtaccgaaaacttattctttcaccttctgtgtatagtgaaggacctgatgaccaagacttcatgtatataaaaaattacagaaatactatagcgaaagatttagaggagtatcttgatgcaaaacttcacctccacaaaacttctgcttttgttctctttaatgacaacaaatatttaaagtcctattttcccgacaaaaacaaaaacatatctgatataatgctgcaggtaaataaaattataagacaaatgattgaagatggaaaactcgcctataatcctgatgatactatagatataactgaagcagaatttataaatattattttgaaagtaaaggaaagatttagtgatggttggtataagtcttacagggaaatgagtgaaaagcagcttatagaagaggtcattgaaaacatggaaagctttaagatgataaaaagagttgaggaattgcattctattaaaatattgcctatggcggcaaagttaattggggaatatcctccagattttgaaaaaggagaaggtgcagatgagtga

SEQ ID NO: 50263 - DNA, 4167 bp, Thermoanaerobacter siderophilus SR4
atgagtgaaaaattagctgaaagatggatgattaacaggattgggcttcttaatttttggtattatgatgatgaaatatttgagtttgcagatggaaggcttcttttaagaggtgctaatggttctggaaagtcagtgacaatgcagagtttcatacctttagtattagatggcaacaaaagtcctgaaagacttgatccctttggctcaaaggcgagaaagcttgaggactatcttcttggggaagaagaggtaagtgggcttgatgaaagaactggctatcttttcatggaatttaaaaaagagaaaaaagacagctacattacaataggcatgggactaaaggcgaaaaggcatcaaaatatggacttttggggctttgtaatacttgacggcaggcgtataggtatcgacttctttttatacaaaatggaaataggcgatgacggcaaaagagtaaaagtcccacttaccaaaaaagaacttaagaatagaataggtgaaggcggagaagtagttgaaagccaaaaagagtatatggaaatggtcaataaatacatttttggctttagttctatcgaggaatacgacgagctcataaaactgctgatacagcttagaagtccaaagctttccaaagacttcaggcctactgtgatatatgaaattatgaaggcttcactgccttcactcacagatgatgatttgaggcctctttcagaaaccatagaaaacatggaccagattaagatgcaccttgatgttctttacaggaatatggctgcagtaaaaaagcttaaaaatgagtacgacaactataacagatacattctttatgaaaaggctggggatttagtaaaggcatacagcgatttatacgcatcaaaaaaagaatacgataatttaactaaagatattgaaaattacagaagtacaatagcaaacttaggaaatgacatcatttctcttgaaagtgaaagagaagccttaaagaaaaaggaagaacagctttcaagtggtgatgctaaaagaacccaaaaggagttattagaagaagaggatcgatataagcagtatttggaggataagtctaaaaaagaagaagaactccggaataaacaagataaatattatggtttagaaagaaagataaaaaacactgaggaacaaaaatacaaactggataaagaactacaggataaattagaggatatatcttcaattgcacaggatatagatttcatggaacatgagttttctgtaagtgaacttaaaaaagtgtatggaaaagaatttgattttacttattggaaaaatgaattaaaaaagcataaagataaaataaagcgtgcaatgagtgcattgagagaagaaatagaagcaaataaaaggtatgatgccgcacttaaagagcaggaaaggcttaaaaaagaaagagaagacagggctaaaaagcttaatgaggcagaaaggctttttgacgaacaaaaaagagaatatgttgaaagagtttatagttggtcacagggcaatgcagagcttaagcttttaagtagccaattggaaggcttaagccgtgtcatactggcgtatggagaggataaaggatttgacgatattttggcttttgtgagaaaaccctatgaggaaatactaaatggaattcagcaagaaattttaagattagaaaatcaaagagaggcaaaagaaaatcaacttcatgagaaagaaaagttattggaggaatggaaaaacaaaaaagatcctgagcccgaaagagatgaacaagtcataaacaacagaaaaaggcttaaagaagctggaattccttacattcctctttacatggcgattgattttaaagaggatgtggatgaagagacaagaggcaatatagaagctgcgatagaagacatggggcttttggatgctcttatcgtgccaaaagaatattttgaaaaagctcttcaaatggacagcaatatggcggataaatatgttatgcctggaagctttaatatgatgttaaatgtatctcaatattttaaagtagttgacaatgaagaaggggtttcaccagaagatatttcagatgctttaagcaatatatttgtatcagaagaaggcgggacaacctatatcgattcaaagggcgcatatggaataggagtaataaaagggaaagcacgggataaagttaaatcaaagtacatcgggagtgagtctagaaagcgctacagagaagagcttattaaatctatacaagaagaaatacaggctataaaagctgaaatatctgcaatcgatgaggaaataaatgcaaaaaaattaaggatacagaggctggattacgaatattcggcatttcccgggaaagaagacattgaagaagcatatagatatttaaaaacggcaaaggctgattatgaatacacctctcataaactcgatggacagcttttcacagttaaaaactgttttgaggaccttcagaaaaagaaagctgttgtaagagaattgacatctggcataaacatacatccagatattgatacctattcttctgcgtatgaatatgcggaagaatacgcttcagggcttaatgaagtagaaatactatacaacaaatatgttttgcacatttcaaacgaagaaatgttattgcagcaaaaacaagatttagaatacgatattgataacttaaagtacgaaatagacgtactggaaaacaaaatacagagttctgttaagaaaattgagatgctaaaagagacattaaaagaacttggacttgaagaaattgaaaaagaactggagatttgcctaaaaaggctggaggaaatacctaaagagattacaaataaatcagccgaaaaagcaaaacttgaggagaggctacagagaagcttaaaagaccttttaaacattgaagaagagattaatcttaaagagaaaatttacaatattgttgaagagggtttaaaaaaggaattagcacttggctttgtcaagcaagacgttgaaatggaggatatgttaaaattaagcaaaagcattctttctgaatacaaaggcttttttgacaaagcgggctttgacagagaaaagtttacagagagacttcaaaatgtgtattttgaaactcgcaacgaacttttggaatatgggctttcaattggcaatatctttgacgaagcttatgagggagacaatgaaagaataaaagaggcaaagaataagcagagaaggctcaatattacagcaaatataaatggtaaaattgtgtctttatatacgctttattctaatattgaagaagatataatggcgaatgaaagccttttaagagagactgataagattctttttgaagagattataatgcacaatgtgggaattaagataagagcaaagatttttaaagcagaagaatgggtaaagaaaatgaataaactcatgtctgaaagggatacttccagcggacttaagttctctattgagtggagaagcattcctgcttctaatgaagaagaacttgacacaaaagagcttgtggatattttaaaatccgatgctgatatgctgaaaaaggaagtctttgataaagttgtaaatcattttaggtcaaaagtagaaagagccaggagggcaatggaggaaaaaaacaatacagaaacttttcacaagattatgaaagaaatattagattacagggattggtttgagtttaagctttactacagaaaagaaggggaaagccgcaaggagcttactgataatgcctttaataagctaagcggcggagaaaaagcgatggccatgtatatacctttattttccgcggtttactcaagatatgagggagcatcgccggctgcacctcgcataatatctctggatgaagcatttgcaggagttgatgacacaaacataagggatatgtttaaactgattgaggatttaaggtttaattatataatgaattcgcaggttttgtggggagattatgacactgttcccaagctttcaatttatgaacttgtaaggccaaaaaatgcaaaggctgtattggtcatgaagtatttgtgggatggaaaggtaaagcatcttatacttcctgagaaagaggaggttgccgctacagaagtgggtgctataaatgaataa

SEQ ID NO: 50264 - DNA, 1295 bp, Thermoanaerobacter siderophilus SR4
atgaataaagaagaacttaaatattttaaagaaaaaagggatacaagaggatttttgaaggtatacgggaaaagtacagaagtttaggacgtcttggaggcgttgtaaagcttgataatcttacggaagatgaaaaagaagtacttacaaaccattttaaaaaagactataggacaaaaaaatctgcatccattgatgtggcaaagtttgaagagtcgctaaaaaatactcgatttgaggagtatacgctaaaagacatactggaatactattttggcgaaaaactcaccagcaaaaaagaggatatggaaatattggcaaaagaaagagaagagttctttaaagagctcttctctaaataccaggaatgtaagtgcattgattggctaaaaagtttgtatgaaggaaccgctgtaggggtaagggcagtaaatcagaggtatttaaatgataaggacggattaaaaaaagatataatgtacgtatgcgatgccataaacaatttgcctgtttataaaggggaaaagaaaagactgccggtgttttcttcccagattgcacgtaatcctcactattttgattcaaatacagaagctggaagtatgtttataaacgctttatgcactttaatggggcttaatgaagtaaaaggaagtgaagaaatatcagaactttattacaacgttggtattttgatagatgaaatatccaattatgtcacactctcaggacttttggcatatgagggcgatatggaaaatcaagtatttaaggctgcttatgaaagcaatcaagtcttgcaagttcctcttttaaatttgagtaaaattgagagagtcataagcccttctaagaaagtgtatgttgtagagaatccttcagtttttacatctttaatagatgctacaaataaagtatttcctcttgtatgcacatatggccagccaaaactttcttctctcctgctcttggacatgctttataaagaagggacagagatatattactcgggagattttgacccagaggggcttatgatagcagatagattgtacagaaggtataaagacaagtttcactttttaaggtacggcctagaagattatttaaaatctctttcaaatgaagtcataaatgatgtgaggcttagtaagctaaataagattgaatcacctttactctttgatgtggcaaaggagatgaaaataataaaaaaagcagggtatcaggagcttataatagatgatattataaatgatataaaattgattgaagaaggtaagggggagtggtaa

SEQ ID NO: 50265 - DNA, 1557 bp, Frankia sp. QA3
atgagcggcgagccacggttgtggtggcaggatatcgatccggtcgtctggcgttgcttcgggcagcctgaggatcttgcccgtgagcggaacaccgcgttgctcgcctcgttggaggagctgtcgacgcgggcgccgatgtccaccctgagcgatatcattgcccggattcgccaggttggttaccacgaccctttgaccgatctcgagctgcgggacgccctcgaccatctgacgacagtccacctcgtggagcctttccgcgactatgctgcgctgaactcgggtctggacgcggtggtccgtcggcaggaggcctgggcgctgacccgaaccgggcgcgccgtggtcgcggccgtgcgtagcgcggtcgtggattcgcgacgtgccctccagctgccgaaccggctgctggacggcgtcgaacgtacggtgcgggccttgttggagcacgtcaacggcgaccacggactgctacccggggacctcaatgacgttcgcactcgtatcgaggagctgcagcgcgtcactgccgacttctatgcgtcgctcggacgtatggtgcagtcggacgtcaccgacgaccagcttttcggcgacaaccgcgaccgcattgtcgaggcccttcgccagttcccgcgcgagtacggccgtgcgttgcgtcgtgttgaacaggcgctcgtcgacctggccgaggtgggccatcggcaggtcaccgaggcggcggtggctcatgccggtctgatcgacccgcgagaccagcagcactgggtcgacgagcgggtccgtagactggccgatctggcggcctggttcgcacccgcaggctcggtacagcgattgatcacctccgccaccggcgcagtccacacccttctcgtggcgatcgaccgtcggtacacggcgctgagacgcgggtccgatctcggtgccgacttccgcgagctggcctacagcctgcacgcccagctcagcgacgacgacactcgtcgggtctacgcggcggccttcggggcctggccgtcctggcatgccgccgtcccgaccgtcgaggaggatgtcgcctttgccaccgtcgccgcggccggcgcctcccgccaccagatcgaggtgactctacgtgagcacgagcgcgtcgggccggccggtggccgtccgcgaaaggtgcccgactccacgcgggaccggagtgccgccctcaaggaggctgcggcgatcgccgaacgcaggaggcggctgaccgcgcttctggtcaccgaaggcgaggtgtcgctcacctttttcgtgggcctggagtcggcggcggcagcgatcctcctggccgcggtcgaggtcgccgtgcagcgcgtcgactcgaagaccgggtacggcgagtgccatgccgaaggggccagcgttctggtgcgagtgcgacgcgtatctcccgaacgaagggttacggttcatctcgcggagggcgacctgaccggcccggacctgcgtgtcaccgtcacggctaccgaaagctccagcgccgaggccacggccacggcccgcgccgccggtggtgccgcgtga

SEQ ID NO: 50266 - DNA, 1305 bp, Frankia sp. QA3
gtgagcgcgcggccgctggacccggacgttgccgaagccgccctgtacctgaccaggacctgccgcgtcacggctgtggacgacccgggccggtaccgcgccgtgctgcgggggcgccgtgagctggtcgagttcttccgccgcgagctgggctgggagttggacgtgcgggaggtggccgggctcgcgcggctgcacaagcgacgtgacgacgcgccgggggaccgcggaccgcgactggtccgcgccgaccggcaaggcggactcgcctccgcgaaggttcttgtactcgtcgcgttggtgtgtgagcagctatggcgtcggccccggatcaccctgcgggaattgttgcaggcggtggcgcaggtctgcgccgcggaggcgccgactggacggctgccgcgctttcgcgtcgtcgccagcgacggcgtgagtaagcgcgaggcccagcaggaccgccaggacatcgtcgacgcgctcaagctgctggtggcggaaggcgagatctcggtcgactccgatctcgacctggccgtcgccgatgagaatgtcgacgtattcatcgccgccgaccgggagcggctgtcgacgaagttcgcgtcgctgtcaccatcgttgctgggtcttagcggtcgtccggtcgacggacacatcgccgcgctcagtgccccctcactaccggacgccgatttggccacggtcgccgaccggctgagcagcgtcgaaggacgaaggttgaccgcgctgcgccgggtggtggacgacccgtcgactgacccaggtgatgatcccggtccagtcggctacctgatgacatcggccggccgggaacgcgcgctcgccgtcgtcgcggccctcgggctcgtcgccaccgtccgacgggactggtgggagatcattgatccgtccggcgccgcaacggacttccctcagggccgtcgcaccgaacggcaggcggccctcgcgctgctcgccgagttgccaaaacgaccggagcctgccaccgacctgctcctcgcagagatcgtggccatgctggagcgctggcgcgcggcgctgccgcgatgggccgcgtcctacgtcggtcggctgcccgcgctcgcccgtgccgccgccgccgagcttgtcgtcgcgggcctgctgaccgtcgtggacgaggtcgaccggtggcgaccgacgcccggggtccatctgtggcgcgtccgtgtccggcacggacagcccaccgggactgctcccccggtgccctcgaagtccgggcagcggcttgagcagcccatcctcggccacggggagcagccatga

SEQ ID NO: 50267 - DNA, 4977 bp, Frankia sp. QA3
atgaccgtaccgcgccagccctctcatccgactctggcagtgccaccgaactccgcggaggccgaggtgggccggccggtccgggacgggcggtggcagccgacccgcgcgggcgtcgtgaactcgtgggcttgggccgacgagcagctgctgttcgccgacggctggcttgcgctcgccgggccgaatggctccggcaagtcgctgaccgcgtcgatgctcgtgactctcctgctcgatgcggacagctcgcaacgggcactgtcggtctccggcgaggccaccggaacgcttctgagtcgccataccgaccgcaacgaccgcgaggaccgcacggggacctggtggatcgagtacggccggcgggacgcgaacggcctcgtcgactacctcaccaccggtctgtggcttcggtcggtgggaggggcactgcaccgcgcattcttcgtcacgcctgcccgggtgggcgccggcctcgacctccaccacgagcgggtgcctgtccccgtcgagaaactggccgagcagcttgccacgacccatgggcagctgttcacctcctcgtcgcgccttcggccgaaagccgccgcgcacctttctgtcgccgacgaggaccagtaccgcccgcatctgctcgctcggctgttcgcccctctcgacgacgttcagttcgaagcgctcgtcggcgtgctgcgcagcctgcgcagcgtccgcaccgcagaggcgatctccccgaacgacatgagccgggtgctcacggacgcgctgcccgcgcttgacggcgaccggctcgtcgtcgtcgcggaggccatggaacgcatctccgacctggaggagcagcttcagcggacgttggaggagacccgtctgctggcgcggacggacgagttctaccgccgctatgtcaacgccgtcaccgcggccgaggccgcacacctcgccaaagccgtcaccgtcttcgacgatcagaccaggctggcgcgcgaggcggcgcatgcgctggagcgggccaacgcccgcctggcggcgaccagggagcgtcgcgccgatctccgcaccgagacagccgatcttgagggtcagctcgacggggtcgacacccgtctgcgcgaccatgcgggcgccgagctgccgcagttggagaagaggctggaaggactacgtgagcagcgggatcgtgacgccgatcgagcgcgcagggaacgggtgactgccggtgaagtggtcgaccgggccgccgaggcggcccacaccgcgcgggacgcacaggtccacctcacggagctgggcggtgagctggaggccaccggaacacggtggggcgccgatgccgctctcgagcggctgctcggtgccgggcgcgccctcgccgacgtgggcatcgggcagacctcaagcatcgccgtcgacgaggtcggcgccgttccgctcgcgtgggccgacatgcggcagacgcagacacgacacgtgcgggacgcgctccacacgcatgcacttgcgcagcgtgacgagcaggcggccgcagtggagctgagacggatcgaggacgacgaggaccggctccgacaggaggcgttcgccgccgctgaggcgcgaaccgcctccgaacagggggtactcgacgccatcaccacctgggatgcggaccgtgccgagatccacgctgttcccgacatgctgaccgagccggacgaccggctggaccccgaccgcatcgcggactggctgcgcggtgcgtgggaggacgcccgcgaccggatcgcggtggtcgaccaccagcgtgctgcggccgccgccgacatcgcggcgaggcagaccgccgcggcggccgcggccgccaccgaggcacgccggcgggcggaagcggaggcgcgcgagacggagtcgtggcgggtggcgattgaacaggacgcggtacagcggcgcgcccaggcccaggcccgccgacggctcgcgcacgagagccacgccaccgccgagctggccgcgcacgaagtcaccacacgtgcacggacgggactgagcgtgggccgggaggcggctgccgccgccggccggacctgggcggagcaggtcgcggcctggcggaccgggctggtccacctgccggccgacgcggtgccgctccccgacgatccggacgagctcgacccggacgcggcgtaccgcgaccttgaacgcgtctatggcgaggccatggcgacgctgcgcggccgtgtcgtcgccgccgaccgggcggtcgaggatgtccgggacgccgttcacgccgtcgagaccgagctggcagtcgcccgccgcgcggcgccggtcccgcccgcgcccccgtggcgggagggccgccggcacgccgaagggtggccgctgtggtcgctggttgacttccacccgggactcagcgagccggaggccgaccggctggaaggagcactgcttgtcgccggtctcctggacgctctggtcacccccgatgggcaggtggtcgccggggacctcactcttaccccggatgctccggtggcgggtgggcgcactctggccgacctgctcgtcatcgaggaggaacccgaggtcgacggtggccgcgtccaaaccgtgctgagcggcgtcggcgtaggcggcccggctggcgagcccagcgagggcctgttgcgcaacggcatcctcacggccgccagccccgagggctaccgggcgacgttcatcggccgcaccacccgggaacgcgcgcggctcgaacacgtcgtcgtgctggagaaccggcaccgcgccgcgcgggccgaccttgatcgggcccaggagtggcgggcggggcttgacaccgaggtcctcgccgccgccgcggagcgggaggatttccccgccgccgatgagctgcgtcaccgccgcggcgccatcgtggaactgcgggttgcggtcgaagccgcccagcggcgcactgccgagctcatcaccgccgcggacacggcgcttcgggaagccctggccgacatcggggccgacgaggcggccctcgatgtccgcgtcgcagacgccggcgagcgggcggcccaggccgccaccgccgccgccgacgcggtcgtcgctgaggattcggcacagtccgatctgcgcgcagcccgcactgcagcggcagacgccgcggccctgcgcgaccaggctgagtccgcgcagcgacgggcggacgccgaacgcgcccgctttccctcgctcggtccgctgcgtgaggccctacggaccgaggacttcgcggaccgtgcgctgtccggtgcccaggcggcgaccgtggccgcgcgtgaccggcaccggagcgcgagcgggaaggtcgcgacggcgctgcgcgcggtgcacgacgcggcgacgctcccggacggggcgatgcttcccaccgccaccgaggcactggacgggtttgtctcggcgctgaaccacctgagccggcgcgtcgaagcctggatacacgcggcctcccgcaccggcgacctcctgcgcgacgccgcgcgggccgcctccgacgccgcgcgagccgaacgggcggcgcgggagtcagaaggtgacctgcaacggatcggcctggccgtcgaacggctccaggctcagatcacgctggtccttcagctgcacggagccgagtacgaggagctgcgggcagcccgccatgcgctcgtggagcggatcgccgacgcgaaggccgccgacgaccagcagatcgcggaatgggaggacgcgtcgcgcgccgcgttcggagcagaggcgaccctccgtgagctcgagccggcccgcacgcaggcggaacaggacaggaacgcccgcttccacgccatggcgctgctcgtcacccacggcctggcggatgttcccgacgggatcccggtcgacgacgtcggccgccccgcgaacatcaccgccgcgctcacctggtctcgacggatactcgccgggcgttccggggacgcggatcgcgtcgcggcgctgacgaacagccgggaccgggcactgagtgccctggagaacagcgcgcgcacggtcaacggagccatcgcccgcttcgatcagcaggtcgacatcgccaccatcaccggcacccagtggcggcgggccaccctggccgctccgaacgcggccatgggcgaggacctccgcgtggctgtcgaagccctgcgcgccacccgtaccagactcgagtccgacctgcgtgacgacgtgaaggcgacgctgaagacctcgatgttcacccagctccggagggacatccaggatcgccgggagctggcccgggaccttgtccgccagatccgcaccacgctggccggtgtgcgtaccggggtcgcgagggtcggggtcgaggtcgactgggtagtgcgcgaggacgcagacgcccgccgcatggtcgagctgatctctgcgcctccgtccgacgagacgttcgagcagatgtacgaggtgctacgcctgcggatggaggactctcgcggcgaggcgtgggcagaccgggttgcccacaccttcgactaccgctcctggcacgagtggaagatctccgtcacccatgcgagctttggggaggagggaacagaacggttcaggccggtcagcgctcgatccaatccgctcaaggcgctgtcgacgggggagtcacggctcgcgacgatgctgccgctgctcgccgccgcctggtcgatgtactccggcgacggctaccgtggccccagactgctgtcgatcgacgagatcgacgcggcgttcgatgaggagaacctgcggcaggtactggcgctgctgcgctcctgggatttcgatgtactcgcgacgactccgacgatcactccgctcatcaagcgggaagcggggcaggtggtcgtgcaccaggtggtcaccaccggccgcactcgggtgaccgtgccatggctgtggcagggctccggggaaccgcggccgctcacgctggacctgtggtccgccggcacggacgggccgtag

SEQ ID NO: 50268 - DNA, 1203 bp, Frankia sp. QA3
atgctcgcggacgatcccgagctggcgccgctgtggcaggccgtgcatgcacggctgtgcgccggtgaggccgcgaatgccctcgcgacagtgcgggtcgccggcatgtcccgcagtggggtcgccgcgctgcgttcctggttggacaccaccacccgacgccgtcgcgggccgtcggcggtccggaccgacacggacggcacgttggtgccattgcgcgagctcctcggcgtgctcgggctggctgcggagcagctgcaggcacttgtcgaacgcgccgtgggcgttcccgtggtcgatcgtagtgctgcgcagcgcctcggagccggccgccgcgagcgtctgtgggaggaggcggccgagcgactgccccaggtaccccgcctgcttgcccgtatgcgggccgccggtgtcggcgctgacgacaccgacattcgtcggcttatcgacgcactcgccgcggcactggcccggatcccggcgcggccgccggtcccgctggcgaagctcgctcacgacacggccggcgacccgcacttcttcgacctcgacactacggccggcggccggctggtcgcggcggtcgccgagatatccggccacgagcagccgacccgacccgacagggttcgtgccctgctcgccggggcaggtgtcatcgctgatcgcctctcggcaactgtgttgttactcaatgtggcagccagtggcgacgggcccgtcgaccgaaggctgcgggaggcggttgcgcccgtcgccttgactctgctggacctcctcgaaacaccgcccgtgctgtgccctcagcagctgacgatcgtcgagaacccgtcggtgctcgagatcgcactgatccgaggcgtccgcaagccgctggcctgtaccagcggtcatctccgtgccgtggaccacacgctgctcgccctcgctcagcgttgcggagtcaccctgcgctatgccggtgaccttgatggcccgggtcttcggatcgccaccaccgtcgcccacacatacggcgccgagctggttgcgatggacaacgcgacgttggcggaagccgccgtgccgccatccgctgttcctctcgacgcaccgatctttgccgacgacttggcgctcgccgacggactgaacgcacatggccgtgcggtcttccaggaacacgacgagctactgcgcagagttctcgatcagagctcctaa

SEQ ID NO: 50269 - DNA, 1536 bp, Frankia sp. QA3
gtgagggccgccgagccgggcgacgccccgggcgcgggccggggcgaggtgaacacgtcggtgttcgcctacgtcaccgagagcgccgactaccgggtgatcctcggcgtcttcgccggtacgttcttcgcggagctcaccccggacgacgtcacggcccggctcgccgaggcgggcgtggtcctgccggtcgagacggtcgccagccggctggagagcctgcggggctggggcaacctcgacgtctcggcgtcggtcggctcggtcagcaccgtcgccgactactaccgccgccgcaaccgctatctgatcacccggatcgggcaggaggtccacgagctcgtcgagggggtgctcgcccaggtcgacgacgtccgcgacgtctccctcagccggctcgacgcgctcgccgccgcgctcgaggcgctgctgcgcctcgacctcgaacgcgccgacccggcggtgctggccgatcacgtccgcgccgtcttcgacccgcaccgggcgttctccgccgagatcacccagttcttcgccgcgatcaaccagtggcagtcgcggttcgacctcgacgagaccgagttcgcgttcttctccgaggtgctcgtcggttatgtcggcgagcggttggacgcgatggagcggcgggcccggccgatcgccgcgctgctcggcgcgttggagccggacgtgccggtgctggtcgcccgggcccgcgacggcctggccgcccgggtcgccgacgcggggctgaccggggtgcgggtgcgggccgagcacggcagcagcgcggcggactgggagaacctcaacgcctggttcctcggccgcccgggtgccccgagccggatcgcgaccctcggccgtgacgcggtgaacgcggtgcgcacgctcacccagaacctcacccggctgtcccgctccggcgtcggcagcacctcgcggcgcgccgactacctgcgcctcgccggctggttcgagcaggccggccacgacgatcccgaggcggcccaccagctcgccgccgccgcgttcggcttgttcggcgcccggcatctcggcgcggcggccggcgacgagaccgacccggtgccctccgccacgtcctggtgggacgcgccgagggcgcgggtcccggtgagcctgcgccaacgcggggacacgaccaaccggggacgctccggccagctcctcgaccggtcccgggagcgggcgcacctgctggagcgccgccggcgcgccgaggagctcgccaccgccgcccgcgccgagctgctggcctcgaccaccggcccggacggcgcgctcggcgacggcacccggctgtccgagcaggcgctggcccgcctgcaacgcctgctcggcccggccgtcgcggcgatgggccccggccgggcgaagggcgaggcggaggccgacgggctgcgctgcgtcgtggagcgtcgacccggtcagccgaccaggctgcacacccccgcaggcaccctgacggtgcacgacctggcgctgaccctgctgccggtgcaggaggcctga

SEQ ID NO: 50270 - DNA, 1179 bp, Frankia sp. QA3
atgccagaaggcccaaggatcggcgacgatccggagtccggcgacccgcagcgtcccggcgagctggtggcggccggccgggccctgctggtgcgcccgtggcggacagccgaggccgaccggtcgctgttcgtcctgatccgtcggcatgccgacgtgctcgaccgctggttcacccagcggctgggctaccggctcgtcgtcaccgccgacacggcccggctggtcaagtccgggtacgtcccgcccgaccggccgctgcgtacccacaccgaccatccgttcaccgcccgccagtacgtcatgctggcgctggtgctggcggccacggcagccggccccgaccggatcagcctgcgcgatctcgtcctgcaggtgcggtccgccgccgccgacgcggacatctccctggacggcgccgccggggaacgccgggcgctcgtcaccgcgctgcgcttcctcatcggccacggcgtggtgcgtgagctcgaccggtcgatcggcggctacgagtcggacgagggcgtggacgcgctgctggagatccgcaacgaccggctcgcgatgctgcccgcgccggcgctggtgggcgcgcgcagcgccaccgatctgctggagcgggccgccggcgagggccgcggccgggcggcgctgcgccggcggctggtggaggacccggtgctgcacgccgaggacgtggtgcccgaggactgggcgcagctacgccgccgcttcggcgaggaggcccgctactgcgaggagatgttcggcctgctcgtcgaggcccgagccgagggcgtcgccgccatcgacgtcgacgggggatgcagtgacacgccgttccccgccaccgggaccaccgcgcacgccgccctgctgctcgtcgaggcgctcgccgcccgccaccgcgacggcgccaccgtcgagcaggtcgacgccgagctcgccgacctgctcgagcgctacggccggtactggcgcaaggacgccaccgccgacccggcccggctgcgcgacgacgccgtggcgctgctggcgtcgatgagcctggtccgctggcagcccgacggccggctgtgcccccggcccgccgccgcccggttcgccacgagcgtcaccgtcaacgagccacgccgcgagcagcccgcaggcgagccggaacagccgaccctgctatga

SEQ ID NO: 50271 - DNA, 2486 bp, Frankia sp. QA3
tggcgacggccgtggcagcggccggggtccgcgccgacgccggcgccgctgaggccacccggttgacgcgggagctggccgcggtgcgcgcagcggccgagctgccgctgccgcgcggcgactggcgggccaccgacccgcccgacacggccctgttcgcctcgctggtcgacttcgccccggacctcgtcgacgccgaccgcgccggtctcgaggctgcctgcgaggcggtcgggctgctgaccgcgcaggtgctcgacgacggcacggcgagggcggccaccggcgagctgctcgtcgtcgcgggacccgtggcgacgccgaacctcacctccgtgctcgtcgcctcgttgccggttggagcgacggtcgcccagggcgtggtgcggcgggtcctcgaacacgtcgggctgggtgccgcggccggcgccgcgctgtgggtcgacgtcgacggcgcattcggcgcgggagcgctgcgcggccggcacgccaaggcgggcgccgagcatgtcggcgcgggtgcgcgagcggcggcgcgggcacgccggatcggcgagcttgccgcggcgctggaggtcgccgaacggcagcgggacatccagcggcagacgcaccaggcgttgcgcgggcacgccgatgcgctgcgggccctgaccggcgaggtgccgtccgccgctccggtcgacgaatcggtcgcggccgccctcgccgccacccgcgacgcccagcgcgccgccgaacgggccgccaaagcccgcgaggcggcggtgcgcgcgcagagcgcggcggaacagacctgggcccgggcgcagacgggcgccgcgtcggcccggctgccgctcgacggcgacgcgctggccaccgcatccgccgccgtgaacgacgccggcggcgagctggaccggttgtccggccgagtcgaggcggcccggcgttccctcgacgactgggcgggggccgtcgagactctccaggcggacgccgacgcgctggcgcgggccgccgaggacgcagccgaagcgcggctggccgccgacacggccgcagaggagctcgccgccgcccgggcggcgctcggcgaggagccgcgccgggtcgccgaacagatcaccgagctcgatacccgcagcatccggagcgacggcgagctgaccgcgacccgtcgcgagcacaccgagtcggtcggggtggcggcgacagcccgctcggccgccgacaacgcggcggacgtcgccgagcgggccgagcgggcatgccgggaccagcgcggcgcgctgctggccgtgacttcggtcgacggcctgctggcggcgtccggccagctcccgccccaggccgggccgccggagcagggagcagccgagcacggagcagccgagcacggagcagccgagcacgggacggacgagcacgggacggcacagttcgggcaggtgcgactcccgctgaccgcggacacggtggacgggacatcccggctggtcgcggcgctgcgcgagctggtgtccaagccggaacgcgaggtcagcgaggacgcgctgcaccgctcgctgcgtgcgatccgcgacagtctcggcgccggctgggacgccgagtcccgtcggggcacggacggtgcgccgctggccgtggaggtctccggtccctacgggcggcgggtgctgcccgacgccaccgtccaggtcgcggccgacctgcgccgcgcccgggggctgctcaccgcccagcaggatcaggcgctgcgcaacctgttgcacggccgggtcgcccaggaagtcgcccgcgcgctgttcgacgcccgggagctcgtcgagcggatgaacgccgtcctcggtcgggtgacgaccagccagggcatcggcgtccggctggactggcggacccgcggcgacctcgaaccggccacggccaccgcgctgcgcctgctcgccaaggacccggacgcgcgcaccgccgaggaggacgcgtccgtgcgcgccgccgtcgccggcctcatggacgatgcccgcgaccaccggccggacgcctcgtaccgcgatgtcatcggcgaggtgctggactaccgtgactggcacgagctgcggatctacctgtgccggccgggccgccccgacgagctgctcacccgtcgctcccgcctgtcggaaggcgagaagaagctcgtcacctacctgccgatggcggcggcggcctccgcctccgctgccgcccacgacccgcacggggtgggcgcgccgcggctgatcctgctcgacgacgccttcgcgaaggtgtcggaggacaaccacgcccggctgttcggcctgctggtgagcctggatctcgacttcgtcgtgacgagcgagcggctgttcggcacccacgcggacgtgccggagctgtcgatcatcgaggtgttgcgcgacccggacctgcggacgatcgccctggtccactatcactgggacggccggcagcgcaccgagctggcgggcgcgtcccggtga

SEQ ID NO: 50272 - DNA, 1308 bp, Frankia sp. QA3
atgagccttcccgacgacgaagccccggcccggcccgcagccgaggcgcacccgttcctggccgatccggcgctgcgcccgttgtggcaggcggtcgcggccgcgctggaccgcaacggtctggactggcgcggacggctcacgctgcccgtgctgccggcggagggccggcgccgcctcggcgtcctcgtggaacgtcccgtccccgtgggacgccgggcgctgccgctcgcggacgtggcggcggcggtggagcggctgaccggcggcggtctggtcgaggcgctcgtcgccctcgactgcgcgccgcgcggacgtcgcgaggcggcgcaggcccgccgggcggagtcccaacaccgccgcgtcacccttgaccgcgccgtcgagacctacctcgccggcctcgcgcaacccgactcccccgacgccgacggcgtgggccgggacgccgggtggtctgccggctggcgggacgcggcctggtccgacgggctgttcgcgggccgaacaccggaggaggtcgcgggcctggtccgcaccgtggctgcggtgctggcgcacaccggttcgggcctgagccgcggggagatcgccgcccgggagtgcggcgacgcgcacgcgctggacggctcgacccggctggccgccctgatcacccgggcgctggtcgcccgggacggcccggccggcgagcgggccgcctgggaacgcgccggcatgccgctcgacctcgtctccgcacccgtgctgacctgggcgctgccgctactcggcgactcggccgtggcccgcgccgcccgggcgatgaccgccgccggcctgccgctgcacctgaccgtgctggcgctgcgggccgcgccgctcaccatcgccgcgggcacgccggtgctcgtcgtcgagaacccccggctggtcgaggcggcggcgcggcgccggctgccggcggccgtgctgtgcacgggcggcaacccggcgaccgcccccacggaggcgatcgccaaactgtccgcgagcggcgccgcgctgcgctaccacggcgacttcgacgccgcgggactcgcgatgaccgcccgggcgggtgcggcgggctgcgtgccgttccgcatgtcggccgccgactaccgcaccgccgtcgaggcggcgcgggccgagggcgtggagcttccccgggacccggcgccggcaccgccgaccccctgggaccccgacctcgcggccgccttcaccgccgaacgcgccatcgtgcacgaggagcgcctgatggacaccgtcctgaccgcgcacgaggacgccccgtcgccgccataa

SEQ ID NO: 50273 - DNA, 1452 bp, Rhodococcus opacus M213
ttgaaactgttcgccttcaccacagcggagaaacgcgcggagtacctgtgggtgctgcgggccttcgaccacgcccgcgccaactatgtcgtcctgctccacgccgccgacgtcgcccggattctggacggcctcgccggcgacgatccggccggacaactcggcgccggagacgtcactcccctgctcgagcaacttcacgtctgggaagtgctcgaacgcagctacgacggaacacgcgccgcgacgctggccgaataccggaaccggcacttcgtctatcagttcagccaggccggctaccaggtgttccgagccgtcgaggacgctctggcagcccggctcgacgacgcgtcgctgtcccggctggcgctgcccgacctcctcgccgacatgaacgacctggccgccgccaaccgcgcggccgacaacgacctggtgtaccggaaactcaaccgcctcgatgcgacactgtcggacatggccgggcgcgccgcccagttctacctgaccctgggcgacctcgtccgcaccacggagatcacgccggagacgttcatgtcccacaaggacgctctcctcacgcacatgcgcgagttcagctccgacctctcgcgctatgcaccgaaactcgcggcggcgatcgcgctcgtggaagacaccggcgtcgagacgatggtggcccgagccgccgccagcgacgagcgggtgttcctcggcatcgacgagcgcgaagccgattggcgcgcgcggtgggcgggcctgacgcattggttcgtcgggagcgaggccggtctcagcgagtcggaacgcctgcgcgagggcacgatgagcgccatcgccgccgtcctgtcgctgctgcgccgcgtcaccgaaacccgcaagggtggtgtcagcagggagagccaattgcgtcacctcgcaggctggttcgccgccactccgaccgaggacgccgcgcatgcactgttccgagccgtgttcgacctcgggcgtccgcgccatctgtcgatggtgcatccggacgccgacatcattcccgacacacggtcgtggtgggaggcccagcccgtggagatctcccgcacgctggccgagaccggacgtcccccgtcgcccggtctgcccgcgcgggtgcagcgcaacgagggcagcgtgcgccgcctgcgggaggaacagctgaccgcgcaacgacttcgcgccgccgccgcccagtcgctggcccggggcggagtctacgagcgggaactcgacgaggccgaaaccgacgtgctgctgagtctgctcaacgccgcgctgacggcacgggtaccggtcagcggacgcgtgaagagcagcacaggatcggagaacggcgtgaagctgaccctcagcccgcacagcgaatcgacggtggtgcgcaccgcccggggaagtctgcacctcgacggacttcaggtgagcgttcggtga

SEQ ID NO: 50274 - DNA, 1395 bp, Rhodococcus opacus M213
gtgaaggcgcgggagatctcgccgctcgccctcgattcgtatcagcgcgccgcccgtgtcatcctgtcgaatcacctggtgacacagacctatccggatcgcatcgctcttcccctgctccgccggtgggcgaccgaactacgcgacgatctgatgacgctcttcgggtaccgactcgaagtcaccgagacgaccgcccggctgttcacggtgagcgaccgactcgacgccgggacgccggccaagacgtccaccgaccgcacgttcgaccggtaccgctacgcctacctcgcgttggcgctggccgcgctcggccgcgccggaaaccagatcaccctgtccgaactcgccgatcacgtggccgccgacgccgcacaggtcgacggtgtggatctgtccacggaacgcgcgtccgaccgggacgcgttcgtcgacgccgtcggctggctcgccgcccgcggtgcgatcgccctcgccgacggtgacgcgggaggctgggccgccaatcccgatgcgggagaggcgctgtacgacatcgacaggtccgtcgtcatcgccctgttccggccgccgcgcgcactgcagcacctccggtccatccgcggactgcttgccggtgcggactcggcgaccgaggacgacacctcggagttcgggacggccaggccggtggacgtgaaggagacggcgcggcgggtgcggcgtgccctcgtcgaacggcccgtggtctacgccgccgacctggacgatgacgaacaggtgcaactcgcgctcccccgcaccgcggccgatgtcgagttgctcaccggactggtcgcggaacggcgtgaggagggcgtcgcgatgatcgactcctccgggcgtctctccgacgtccggttccccgggacgggaacggtcgcgcaggtcgcactcctgctcgccggggagatcgccgatcgcgtactggatcccgatgccccggagacggcccggatgccgctgccgcggggccggttcgacgacctgatcgaacaggtcgacagcgccattccgcagtccgggatcttcgacagcctcgccggccacgacggattcgaacccgccgaccccgcccccgcggaccggctgttcccggtcgtcgaggacgaatggatcgccggcaccgtccgcacactgaccgaacggttcgggcgcacgttcgccgccgggtggcaggcggacccggacggtctgggacgcgcggcgctggcgctgctcgagcggctgcgcctcaccgcggcggtcccgggtggtgtgctcgcactcccggcactcgcccgctaccggggtgtggtggtcacgatccgcgaccgcacacccgagatcgacctgttccagagctcagcgaacgacagcgaggaagtcacagcatga

SEQ ID NO: 50275 - DNA, 4158 bp, Rhodococcus opacus M213
atgacgagtgcgcgtttccggcccacccgcgccgggatcatcaacctctgggactaccgcgatcaggagttctccttcgccgacggtcgcctcgttctccgcggtcccaacggatccggcaagacgaaggccctcgaagtgctgttcccgttcgtcttcgatggcaggatcgaaccccggcggctcaatccgttcgccggcgaggaacgcaccatgaagtcgaacctcctgtaccgcgggcaggagagcgcgtactcgtacgtctggatggaattctgccgcggcgcgaaggacgaccccgaggccgtcaccgtgggcatcggcatgcgcgccacccgcaccaacgacaaggtcacacgctggtacttcgtggccgacggtcgcgtcggcgtcgacttctccctactcggcagcgacgaccggccgctcacgaagaagcaactgggcgaacagatcggcaccgactccatcaccgaccggccgctcgactaccgcgccgccatcgacgcccggatgttcgggctcggcgtccaacgctacgaccagctgatcaacctcatcctcacgctccggcggccccagctcgcgaagaacctcgaccccaagggactgtcgcaggcactcaccgacggtctgcgaccgctcgacgagcaactggtcctcgaggccgcccgctcgttcagcgacatggaggaggtcggccgcgcgctcgaggggctggccgcggccgaccaggcagcgcagagcttcgtcggcgtgtacgcgaaataccttcgccagcaggcgcgtacggacgtcgatcacctcgcgacccgtctcgagaccgtccgatccggcatcgccgccctccacgacgcggcggccgaccgggcccgcagccgggagagccgagcggccgccgaggaacgcttcaccgccgccgaacgcgcactcgaccaggccaatgccaccctcgacgcactgaagcgatcgacggcgtacgagggacggacgcagctcgacgacctcgcgcaggctgtcgcgacactcgagaaatcgaccgaactgcaggccgagaaggcacgcaaggcgaaggcgaccctcgaacagcgagccgaggagcacgacaaggccggtgacgccgtcgcccgcgccgtcgaggcgctcacccatgccgaagacgagcttcacctcgccgccgaggacgcgggaatcacgtggaccgcactccccgagaacgcgcgcaccgaccagctgaccgctgcgctgcgcgggcacgccgaggaacgggacggcgacatccgcgcggtccgggccgcgctcgccaccgtcgagagggccgccaccgagcggacccgcgccgacgaggcggcccgccgtggccaggagcaactcgacaccgcgaaggtggccgtactcgaggccgagaccgcggtcgagtcggcccgcagccggtgcgccaccgaactccgatcctggtggacggaacagtcgtccctctacgccgagatcgacgcgcccgcttcactgttcgactccctggacgccgccctcggccggatcggcgacgacgacgccgcaaccctgtcggaaacgctgaccgaacagaccacggacgccgtcgactcgctccggctgcgtcgtcagcagaacgaccgcgacgtcgccgccgccgaggaagcgatcgccgaacacgaatcggcccgcgcggccatcgaatccgagcacgacgacgccccaccgctctcggccgcccggcaggacgcccgttcccggctgaccggcgcaccactgtggcgccttgtccgcttcaccgacggtgtcgacgccgcagcggcggcgggaatcgaggccgcgctggaggccgcgaatctcctcgacggctgggtgaccgtcgacgacgcgctccccgacgtcgaatccgaacagttcctcgtggcccttccggccgcggatcggcccaccggcaagaccctcgcggacgttctcgaggtcgagcaggacacgggtgttcccgacgatcgcgtgcgcgagatcctcgagtccatcgccctcgaatccctcgacctgtgtgaaggacctgtaggtgtcgccgaagacggtgcgtaccggcagggaatccagcggggacgccacacgaaatcggacgcggagtacatcggcaccaccgcacgggcccgcaggcgcgccgcccgtatcaccgaactcgacagcaccatcgaggaaacccgggcgaccctcgacgaaacccgggcgtccgcggatgcgacggcggcattgctgacgcggacgaccgcggcggcgcaggccctgccccgcaccgggtcgatcctcaccgcgctgaagaaggtcaccgaatccgcaggcgcgcttcgcagccgctcggacacggcgacagcggtcggtcacgaactcgaccaggccatcgccgacctgtccgcgaaggagaagcagctccgggccaccgcgtccacacatcggactccccacgtcgcccgcgagatcgactcgctcgccgcggccgtccggcacttcgagaagcagggcgagatggtgcagcggtgcaggcgcgaacacgccaaggaggtggagcatactcgcgagtccgaggaccgactgcacgaggcgcgcggcaacgcagaggagttcgcggaagaggctgccatcgccgaagaggttctcgcgcaacagatccaacgtctcgagacgctccgcgacacgctgggggcgggggccgagcagctcgaccggcagctcgaggaggcgcacgcgcggatcgaggcgtgcaagaaggagcagcgcgacgcccgcaaggcggacaaggacgcgggtgaggcgatcggtaaagccgagggcgcgtacaacaccgctgtccagacgctccggctggcgctcacggagacgcacgccgacgccgcccgcctcgccccgtatgcccggcgcgacctgctcgaactcctcggcgtcgacggcggccacacctggccggcgagctcggcggcgtggatgagtgccgaacagctggtgtaccgcatccagaacgccgaaggcgacaccccgatcctgccgcccgaagtggatgcgctgttccacgcactggacggcgccaccgaatcggtgcgggtcagtgactcggcgcgcaagtcgacgcgcaccgcgctcaccaccgccctgcaggacttcgacgcacagttggcggccgccggccaggactaccgattgcagtgggacgccccggacggcgtgaccgtggtgcaggtgcaggacgacgagggatactcgtcgatcggcgagttcgccgcccgcatcgcgtccgctcgctccgatcaggaattgctgctcaccgaatccgaacgtcgcatcctggaggacgcgctgctcacgggtctcgcacagcagatccacgaacggaccgtcgacgcccgcgaactcatcgcccggatgggcaccgagatgcgggagcggcggatgtcgtccggcaacaccatcggcgtccactgggtgctcgccgacaacctcgacgacaacgcgaaggcgatctccaaactgctcgagcgcgacacctcggcgctggggccggacgagctcgccacgatgcgcgcccacttcgcccaccagatcagaaccgcccgcgccgcccacccggagcgttcgtacccggagatcctggcatcagccctcgactaccggcggtggcgggtgttctcgttcaccctgatcagtggcaacggaaacgaggaccggctgacggtcgcccggcacagcgcactctccggcggcgagcagtccgtctcgctgcacctgccgttgttcgccgcggcacacgtcatgctcgattcggccgacccccatgcaccgcgactgctggcgctggacgaggcgttcgccggcgtcgacgacaacggccgggccgaactgctcggcctcagcgtgcaattcgacctcgacctgttcatgaccgggttcgacctgtggatcacgtacggcggcgtcccggggtgcgcgcactacgatctcgcgcactcgacggccgagcagagtgtcagcgccacactgctcgtgtggtcggatggcgaactgctcgccgagcacgacggcaccgacctggcgcaggcgctcggttcgcccctccgccggcgcgtcccgacgcccgcggagggtgccttcgagttcgcctga

SEQ ID NO: 50276 - DNA, 1491 bp, Propionibacterium propionicum F0230a
gtgaccgaagcgctagaaggggatctgtcgccctggagcctgctcacgacccccggggagatccgcgccgccagctacctcgtcggttcccacgcccgccagtaccggctcatcgtggacgtgttggcagaccggcaggaggtgtcgctgacgggggtgggccacgacgaactggccgaattgatccgcgcgcggctgccgcaggggacggtggccgagctggtcgaggacctcaacctctccgaccgtctcgcgtcgctggtctcctggggaacctgcgaggcctggcaggaccgggccaccacggaggaagagttcctccggaaccgctaccgctaccagctcaccgaggccggagcggccctcaaccaagccgtcagggccatcgaggaggacctgggggcgggttccacggcggtgctgctggccccggcggtgctggccgaccggctccgggccgccctggacgccctggcgggggaacgtatcgatgacgcctcccgggagttctccgtggtcgaaaccaccctggacgccatggcgcgggaggccaaccagtggcagtcgcggatggccgctgcgctcggtggggttcccgaccaggcgcgcatcacgcgcctgttggaaaccatcctcgcctacatcgatgcctggggtgccggggtggacgcctggtccggtcgcatcacggcctgcctaccggacctgaaggccatcggccccgatatctggcgggccctgaccctccaacgcctcggcgccgagatcaacccggagacggtgacccgcgcgaccacccacctggcgggcatcgtcgcagtcctggaacgctggttcagcggcgaactgccgcaggccacccggcttcgccgccagatgcgtgacgccgtcaccccggtgctccgtgggcaccgggcgctgctggcggtcgggggcaccgtctcccgggcctcggaactgtcccggctggccgacgcggtcgccggggccgaggacgacgcggaggcctggcgggtcttcgcatccggcacggggctctactccgccaggcacctggccatggagaccccagaggtgcccggtaccccgagcgtgtgggaggcaccccccgccccggtgtcgaaacggctgcgctcccagggccggcgttccctgtccggccgggccccccgcgtggtggaccggtcgagggccagggaactggcccgcgctgccgccgcccacgaccaggccgcgctgcgggaggccgaacaccgcctggtctcccgttccggcacacacctcagtgactgggccgtcctgaccgcggaggaaacccggctcttcctggacctgctcacctcggcccgggaatcggacgggacgggcaccaccgccgacggcagatgcaccatgaaactgacccccgtccaccctccccggtccgccgtctgccggaccgaggaagggcgactggtgctggccgacgccctggtggagttcaccgcgtga

SEQ ID NO: 50277 - DNA, 1116 bp, Propionibacterium propionicum F0230a
gtgatgctgggcaacgaccactccgagatccaggccgccttcaccggcctgctggcgaaccccatcgtcacgccctggagacatcccgaactgcacgtgctggtgcaccgtcacgccgccgtcctgaacgtctgggcgaagcgggtgggctatctcctggttggtatcaatcgctgctaccggttgcgcaggccacccatcgagggaggagtggctcttcccgcgaccacgccaccgccccgcggccagctggtgctggccttgtacaccgccagttgcctggaggcaagccccggggagtcactgaccctccaggaactttccgacgatgtggcgcggctggcgcagatcaacggcggctggccctacgacccgaaccgccgcccggaccggcagcggctgctcgccgccatccagctgctcatcgggcacggggtgctggaggaacgcacctcaggcaccttgcagaacgactgggagcgcaccggatccgggatcggcgccggctacctgctgcaccgggacgccctgatgctgctggtggacaccaatgacgtcgacctcgccctggcgcgccgggtcgacggcggccaggacgcccggggacaggagctgctgcggatcctggtggaatgccaggccctgtatccccaggagcttcccgaatcccaccgcgactacctgacccggcagcgcagccgcctggtggagcgggccgaggaactgaccggaggccgggtcgaggtgcgcagcgacgccctcgtgctggtgatgcccgcatcccgggaactgcccgaggggttggtttgcggtttccccgacgccaccaccttggattgggtgacgctggccatgatcgacgcgctgtgcccgggggcggcaggattccaccgggttcctgccgaccgggtgctggccgccgcggaagacattcaccgtggcagggagaaacaactcacggtggccctgaaggaatccgccacggcgatccgcgacgccgtggcggggcggttgggggaactcggtctactcagggtggaggccggggactggattctcgccccggccgcggggcgctaccgcgatgccgaactgacctcgggcgaggaggagtga

SEQ ID NO: 50278 - DNA, 1131 bp, Propionibacterium propionicum F0230a
gtgagcgtgcccggctatctgctggcctgggcgcggctgccaggaccggcccgcctgctggcggaggtcaggagacgccgggaacgaggctggcgcggggacaggggtgaggtgtccctggactggtcgccatcggagcgccgggacatcgggcggttcctgaaggcggattggagggaatccggcaggggggtgagggcgtcggaactcaggcagggattgagggcccacggtgccggactggacgagctgctcgtcgcgctcggaggacccctgcgggatctccggggggagcgggccgaggcggagcaggcgcgggaatccgaccgtgcggccggtctggcgctgctgcgaggtgcggtcggcgactggggggacgacctgacggtggtggcccggggcattctgcaaccggccccgtcgtgggcgctgctggccggtgaagtcgcggatgtgctcgcggccaccggggaggagccgcgccggctggctgaactggccgccgccctgttccgggatccgcacgccctggaccgttcgacgccgttgggacgggcctgcgtcaggtcgctggaattgcgccgggccgtcaccgagggcgggagctaccgcgaccccctggaggacgcacaactgtggtcggcggcctgggcgggcgccggggtgatctgcgacgcggtctcggcgcaggtgctggtgctgaacctgcccctgaccgggaacgccccggcggtgcggctctgccacgccgccccgggggaaccggtgtggctgaccctgcggtcgctccggggcgcctgggaactcgccgggggcgcggaggtcttcgtctgcgagaacccgaccgtcctggaggccgccgcggaccgccacggcgcggcctcccggccgctggtctgcaccttcgggcttcccagccaggccacctgggagctgctgacgggtctcggcgaggtccgctgccaggtgcgggccgacggggacgtcgtcggctggcggatcgtgaaacagctccgggcccggctgcccggtgcgttcacttggcggatgccggagggctgcaccgcctatgaggaagaacttcttgaggatctgctctccgacttgaagggcgataccctgggtccgtga

SEQ ID NO: 50279 - DNA, 1452 bp, Rhodococcus sp. JVH1
ttgaaactgttcgccttcaccacggcggagaagcgcgcggagtacctgtgggtgctgcgggccttcgaccacgcccgcgccaactacgtcgtcctgctccacgccggcgacgtcgcccgcattctggacggtctcgcggtcggcgatccggccggacaactcggcgccggcgacgtcacccccctgctcgagcaactgcacgtctgggaagtgctcgaacgcagctacgacggaacccgcgccgcgacgctggccgaataccggaaccggcacttcgtctatcagttcagccaggccggctaccaggtgttccgagccgtcgaggacgcgctggcggcccgactcgacgacgcgtcgctgtcccggctggcgctgcccgacctcctcgccgacatgaacgacctggccgccgcgaatcgtgcggccgacaacgacctcgtgtaccggaaactcaaccgtctcgacgcgacgctgtcggacatggccggacgcgccgcccagttctacctgaccctcggcgacctcgtccgcaccacggagatcacgcccgagacgttcatgtcccacaaggacgctctcctcacgcacatgcgcgagttcagctccgacctctcgcgctatgcaccgaaactcgcggcggccatcgcgctcgtggaagacaccggcgtcgagacgatggtggcgcgggccgccgccagcgacgagcgggtgttcctcggcatcgaagagcgcgaagccgattggcgcgcgcggtgggcgggattgacgcattggttcgtcgggagcgaggccggtctcagcgagtcggaacgcctccgcgagggcacgatgagcgccatcgccgccgtcctgtcgctgctgcgccgcgtcaccgagacccgcaagggcggtgtcagcagggagagccaattacgccacctcgcaggctggttcgccgccactccgaccgaggacgccgcgcatgcgctgtttcaggccgtgttcgacctcgggcgtccgcgccacctgtcgatggtgcatccggacgccgacatcattcccgacacgcggtcgtggtgggaggcccagcccgtggagatctcccgcacgctcgccgagacgggacgtcccccgtcgcccggcctgcccgcacgggtgcagcgcaacgagggcagcgtgcgccgcctgcgggaggaacagctgaccgcgcaacgacttcgcgccgccgccgcccagtcgctggcccggggcggggtctacgagcgggaactcgacgaggccgaaaccgacgtgctgctgagtctgctcaacgccgcgctgacggcgcgggttccggtcagcggccgtgtgaagagcagcacaggatcggagaacggcgtgaagctcaccctcagcccgcacagcgaatcgacggtggtgcgcaccgcccgaggacgtctgcacctcgacggactgcaggtgagcgttcggtga

SEQ ID NO: 50280 - DNA, 1395 bp, Rhodococcus sp. JVH1
gtgaaggcacgggagatctcgccgctcgccctcgattcgtatcagcgcgccgcccgcgtcattctgtcgaatcacctggtgacacaaacctatccggatcgcatcgcactccccctgctccgccggtgggccaccgaattacgcgacgatctgatgacgctcttcgggtaccgactcgaagtcacggagacgaccgcccggctgttcacggtcagcgaccgactcgacgccgggaccccggccaagacggccaccgaccgcacgttcgaccggtaccgctacgcctacctcgcgttggcgttggccgcgctcggccgcgccggaaaccagatcaccctgtccgagctcgccgatcacgtggccgccgacgccgcccaggtcgacggtgtggacctgtccacggaacgcgcgtccgaccgggatgcgttcgtcgacgccgtcggctggctcgccgcccgcggcgcgatcgccctcgccgacggcgacgcgggcggctgggccgccaatcccgatgcaggagaggcgctctacgacatcgacaggtccgtcgtcatcgccctgttccggccgccgcgcgcactgcagcacctccggtccatccgcggactgctcgccggtgcggacgcggtgaccgaggacgacacctccgagttcgggaccgcccggccggtcgacgtgaaggagaccgcgcggcgggtccggcgtgctctcgtcgaacggcccgtggtctacgccgccgacctcgacgatgacgagctgatgcaactcgcactcccccgcaccgcagccgatgtcgagttgctcaccggactggtcgcggagcggcgtgaggagggtgtcgcgatgatcgactcctccggacgcctgtccgacgtccggttccccgggacgggaacggtcgcgcaggtcgcgctcctgctcgccggcgagatcgccgatcgcgtactggatccggacgctccggagacggccctgattccgctgccgcgggcccggttcgacgacctgatcgaacaggtcgacagcgccattccccagtccgggatcttcgacagcctcgccggccacgacggattcgaacccgcagaccccgcccccgcggaccggctgttcccggtcatcgaggacgactggatcgccggcaccgtccggacactgaccgaacgattcgggcgcacgttcgccgccggctggcaggcagacccggacggtctgggacgcgcggcgctggcgctgctcgagcggttacgcctcaccgcggccgtgccgggtggcgtgctcgcactcccggcactcgcccgctaccggggtgtggtggtcacgatccgcgaccgcacacccgagatcgacctgttccagagctcagcgaacgacagcgaggaagtcacagcatga

SEQ ID NO: 50281 - DNA, 4158 bp, Rhodococcus sp. JVH1
atgacgagtgcgcgtttccggcccacccgcgccgggatcatcaacctctgggactaccgcgatcaggagttctccttcgccgacggtcgcctcgttctccgcggtcccaacggttccggcaagacgaaggccctcgaagtgctgttcccgttcgtcttcgacggccggatcgaaccccggcggctcaatccgttcgccggcgaggaacgcaccatgaagtcgaacctgctgtaccgcgggcaggagagcgcgtactcgtacgtctggatggagttctgccgcggcgcgaaggacgaccccgaggccgtcaccgtgggcatcggcatgcgcgccacccgcaccaacgacaaggtcacacgctggtacttcgtcgccgacggtcgcgtcggcgtcgacttctccctactcggcagcgacgaccgtccgctcacgaaaaagcaactgggcgaacagatcggcaccgactccatcaccgaccggccgctcgactaccgcgccgccatcgacgcccggatgttcgggctcggcgtccagcgctacgaccagctgatcaacctcatcctcacgctccggcggccccagctcgcgaagaacctcgaccccaagggactgtcgcaggcactcaccgacggtctgcgaccactcgacgagcaactggtcctcgaggcggcacgctcgttcagcgacatggaggaggtcggccgggcgctcgaggggctggccgcggcggaccaggcggcgcagagcttcgtcggcgtgtacgcgaaatacctgcgccagcaggcgcgtacggacgtcgaccacctcgcgacccgtctggaggccgtccgatccggtatcgccgctctccatggggcggcagcggaccgggcgcgcagccaggagagccgagcggctgccgaagaacgcttcaccgccgccgaacgcgcactcgaccaggccaatgccactctggacgcgctgaagcggtcgacggcgtacgaggggcggacacaactcgacgacctcgcgcaggccgtctcgacgctcgagaagtcgaccgaactgcaggccgagaaggcacgcaaagccaaggtgaccctcgaacagcgatccgaggagcacgacaaggccggtgacgccgtcgcccgcgccgtcgaggcgctcacccatgccgaagacgagcttcacctcgccgccgaggacgcgggaatcacctggaccgcactccccgagaacgcgcgcaccgaccagctgaccgcggcgctgcgcgggcacaccgaagaacgcgacggcgacatccgcgcggtccgggccgcactcgccaccgtcgagagggcggtcaccgaacggaccagggccgacgaggcggcacgccgaggccaggagcaactcgacaccgcgacggtcgccgttctcgaagccgagacggcggtcgaatcggcccgcagccgctgcgccggcgaactccgatcctggtggacggaacagtcggccctctacgccgagatcgacgcgcccgcttcactgttcgacgtcctggacgccgccctcggccggatcggcgacgacgacgccgccaccctgtcggagacgctgaccgaacagacgacggacgccgtcgacgcgctccggttgcgtcgtcagcagtacgaccgcgacgccgccgccgccgaggaggtgatcgccgcacacgaatccgctcgcgcggccatcgaatccgagcacgacgacgccccgccgctctcgaccgcccggcaggacgcccggtcccggctgaccggtgcaccgctgtggcgtctggtccgcttcgccgacagtgtcgacgctgccgcggcggcaggaatcgaggccgcactgcaggccgcgaatctcctcgacggctgggtgcccgtcgacgacgcactccccgacgtcgaatccgaacagttcctcgtggcccttccggccggggatcggcccaccggcacgaccctcgcggacgttctcgaggtcgaacaggacacgggcgttcccgacgatcgcgtgcgcgggatcctcgaatccatcgccctcgaatccctcgacctgtccgaaggtccggtcggtgttgccgaagacggtgcgtaccggcagggaatccagcggggacgccacacgaaatcggacgcggagtacatcggaaccaccgcacgggcccgcaggcgcgccgcccgtatcgccgaactcgacaggatcctcgaggaaacccgggcaacgctcgacgaagcccgggcgtccgcggatgcggcggcggcgctgctgtcgcggaccaccgcggcggcgcaggccctgccccgcaccggatcgatcctcacggcgctgaagaaggtcaccgaatccgcaggcgcactccgcagccgctccgacacggcgacagcggtcggtcgcgaactcgaccaggccatcgccgacctgtccgcgaaggagaagcagctccgggccactgcgtccacgcaccggactccccacgtcgcccgcgagatcgactcgctcgccgcggccgtccggcatttcgagaagcagggcgagatggtgcaacggtgcaggcgcgaacacgccaaggaggtggagcacacccgcgagtccgaggtccgactgcacgaggcgcgcggcagcgcggaggagttcgcggaagaagctgccatcgccgaagaggttctcgcgcaacaggtccaacgcctcgagacgctgcgcgacacgctgggatcgggggccgagcagttggaccgccaactcgaggaggcgcacgcgcggatcgaggcgtgcaagaaggagcagcgcgacgcccgcaaggcggacaaggacgcgggtgaggccatcggtaaagccgagggcgcgtacaacaccgccgtccagacgctccggctggcgctcaccgaaacgcacgccgacgccgcccgcctcgcgccgtatgcccggcgcgacctactcgaactcctcggcgtcgacggcggccacacctggccggcgagctcggcggcgtggatgagtgccgaacagctggtgtatcggatccagaacgccgacgacgacacccagatcctgccgcccgaagtggatgccctgttccgcgcactggacggcgccaccgagtcggtgcgggtcagcgactcggcgcgcaaatcgacgcgcaccgcgctcaccaccgcgctgcaggacttcgacgcacaattggcggccgccggccaggactaccggttgcagtgggacgccccggacggcgtgaccgtggtgcaggtgcaggacgacgaggggtactcgtcgatcggcgagttcgccgcccgcatcgcgtccgctcgctccgatcaggaattgctgctcaccgaaaccgagcgtcgcatcctggaggacgcgctgctcacgggtctcgcacagcagatccacgaacggaccgtcgacgcacgcgaactcatcgcccggatgggcaccgagatgcgggagcgccggatgtcgtccggcaacaccatcggcgtccactgggtactcgccgacaacctcgacgacagcgcgaaggcgatctccaaacttctcgagcgcgacacctcggcgctggggccggacgagctcgccacaatgcgcgcccacttcgcccaccagatcaggactgcccgcgccgcccacccggagcgttcgtacccggagatcctggcgtccgccctcgactaccggcggtggcgggtgttctcgttcaccctgatcagcggcaacggcaacgaagaccggctgaccgtcgcccggcacagcgcgctctccggcggcgagcagtccgtctcgctgcacctgccgctgttcgccgcagcgcacgtcatgctcgattccgccgacccccatgcgccgcgactgctggcgctggacgaagcgttcgccggcgtcgacgacaacggccgggccgaactgctcggcctcagcgtgcaattcgacctcgacctgttcatgaccgggttcgacctgtggatcacgtacagcggcgtgccggggtgtgcgcactacgatctggcgcactcgacagccgagcagagcgtcagcgccacgctgctcgtgtggtcggatggcgaactactcgccgaacacgacggcaccgacctggcgcaggcgctcggttcgcccctccgcaggcgcgtcccgacgcccgcggagggtgccctcgagttcgcctga

SEQ ID NO: 50282 - DNA, 1533 bp, Ralstonia solanacearum PSI07
gtgcaagccaacaggatggccgccgaactcttccggcatttgagtgccgagaaatcagtgttctaccgcagcattatggaggtcttcgccgccgctaaacggcaatataggctccagctacgccctgacgaggtcttacatgaggccaactggcccgaagagccccctcggcttgaagaggtcaacgctgctctagcccagttaactgaatgggggaatctggagtcccagcccgacaccgcgcgagtctctacgttgaatgacttctaccgcgcccgttttctatatcgtctatcgcatggtggcgaggctgtagaaacgagtcttgcagtgttcttccaaacattgcagcgccgggccgagttgcaaaccgtcgcgctggaagacattgcacaacgtctgcaggctttacaacaactgatcgatagcgacaccccagaaaacggactcgacgtcgccaagatccaccaacttctgcgcgacttggttggggtattccacgacctcgcggaaaatgcccaggccttcatggcaggcgtcgcgcgtagccttgaattacgacaggcggaggcaagtgcaatcatcgcgtacaagcgccgactgatcgattacctagaccgattcctcggtgatctggtacgccgctctgactccattgcccggctcatccagcagctaacaccacgggttgatgccgtttttctacaagtggctgaacgcgaagctcgagacgcagccccaggagatttgccacatcaaacagacgaaaaactgcgccgctggcgcgcatggcgtgagcgatggaaaggtctgcggggctggtttctcgcgacaggatccgagccgccccaagtcgagctactacgagcacgtgcccgcgccgccattccacagctactgggcgccatagccgcgctgaatgagcgccgcagcggccgtagtgatcgttccgccgattttcgtgtgcttgcctactggtttgccgcgtgcaacagcgatagcgaagcacatcaattggcacgcgcagccttcgcacttcaccccgcccgccactactcccttaatccccagtcggatgacgacctacccgcgactacgccgtgggcagatgctcccccactgcaaatcagtcctcggctacgagagtatggcgaaatcgcccctcgcggcccgctcgcacgtgtgcgcgatcgcagtgcggagcgagccctaatggccgaacagttgtcagaggagtcgcgccaagtcgacatggctcgagagcgcttagccactggtcgccctgtgcgactctccgaactgggtgacctggacacgcatgccttcggcctatttctaaatctcttgggagaagcactggccgaacaggcgcaccccgaccagaccatcgagcgccaaacaggagacggcctgctccatatccggatggagccgctggacgccgccacgcaagcatctatcacgactccaactggcatctttactggacgcgaccatctactcacgatcacgtccacacaaaaaaccgcatga

SEQ ID NO: 50283 - DNA, 1275 bp, Ralstonia solanacearum PSI07
atgaacgcaagatccgatcgaaggcgagacaatcaacgcatcggcgaactccaacgagctcagcagcaagacgagttccgccaagcgttgcgtgctcttttgatgcgaccgctgatggcccctgatcatgaagcattttcagcagtacgccgccaggccgatcgactgcgcgagtggttcgcgcgcgaagctgggtggcctcttcatgttgagcgcgaaggcgcacgactcttcaagagaccagcgaatcttgtcgacgatactcgtggactaccaaactatgatcgccagcgctacgtcctactcagcctagcgtgcgcagtgcttgagcgcgccgatccacagatcacgctgcaattgctcggagagcgcctgatggagttggccggcgatccagtgctgacctcctacgggtttcaattcacgcttaccagcgcagccgaacgacgcgacctagtggccgtctgccgaacactgctagatctgggaattctgcaacgcgtcgctggcgacgaggagaacttcgttcacgaaagtggttggatgcaatcagacgccctctacgatgttcaacggcgcctactagccggcatgctggctgccgtacgcggcccctcgacatggcggaccgaagaggccccgatcgatttcaaggatcgcttgcactcattggtgcaggaacacgtagccgatagcgagcaagggcgacgcgactcactacgtcaccatctcgcacgccgactcctagatgatcccgtcatctatagcgccactcttagccctgagcattttgtctatttcgtgaatcaacgtggcgcaatggcagcacgtctatgcgaggctgcgggattgaatccagaacagcgcgctgaagggctggcattgacggatgaatctggagaacttaccgacatctcaatgccagcggaagggactgaggcgcacgccacactcctagtcgccgaatttttggctaaccaccttcgggacacgccgcagacccctgatgtctcaaaggacgctgttgccgatttcctgcgcagcgccgtagatcggtacggccgctactggcgcaagtcagcgcggcaacccggtgcagagacagagttagccgacgttgcacttgaccgcctggaaaagcttcaactcatcacacggacgcaaggaaagattttccccttacccgccatcgctcgctttgcactgggcaatcccgagatgcgggcaaggtcgaccgatgacatttcgccgaaacgatcgcgagccaccgcatga

SEQ ID NO: 50284 - DNA, 3729 bp, Ralstonia solanacearum PSI07
atgaccggcaccctttttgattcgcctcaaactgcaaaacccgcacttcctgagcctcaacgcgaacgctggcaaccccttcgaatcggcgtggtggagctctttcactatgacagcgaggaattctggttccgggacggacaccttctgctgcgcggcaataatggcaccggcaagtccaaagtgctgtcgctcacattaccctttctgtttgacgcacaactgcgttcatcccgtgttgaaccggacggggataacagcaagagaatggcctggaatctcttgatggacggttaccagcgccgcatcggctatacgtggatcgagttcggcatgcggcaagccgatggctctgcacgctatctaacactgggcgctgggttatcggcagtgaatggcaagacacacgtcgacagttggttctttctgatcgaagggcaatctccagggcaagacccccgcattgggcaagacctgtggctcaccagcgaacaacggatcgtcttgacacgtgaacggttacgcgaactcctagagggacaaggccaaggcatcgttttcgaaaacgctcatagctatcggcgagctgttgacgaacggcttttccacctcggccccaaacgatacgaagcgctgatggataccctaatccaattgcgccagccccaactatcaaaaaagcccgatgaaacaagcctttcccacgcgctcacggaggccctgccgccaatgccgcaggagttgctagtagacgtcgcgcaagcgctgaatcagttggaggaggatcgcgagcaactggataagacccgacaactagagcaagcagttaggcacttcgagcatcgataccgaatatacgctggcacactgacccggcgccaggcgcgggagctgcgccaggcacaaactgcgttcgacaacgccagcgaggaccgaaatagaacgcagggcgccttgcgtgaggccgaactggcgaaggatgcagctacccaagcccacgatacggcgaagagcgcgctggccagcgctcgggagcgcttagaaacattgcaaagcgacccagcgaaccaggacgccaaccggcttggccaagctgaaaaagatgcaaaagatcgggaagaggaagcggccaagtcggtctcccagcattcgttagcgcttcagaatctaaagcgcgaagaagagcgccgcgaacaatctgaacgccggactgagacggctcggatcgagatcaccaccgcacgctcgcaatgtgagtccgaagcacaaaccgcgggtacatcattcgctctatccaacaaccccgccattgaactccctgtcgaggagattgctgtgcttccggctgcggatgtcggaactgccattgccaaattgcgcatcgcagcaaacgatcgccgcaatgatattcgtcatatggagcggcgccatgctgccttagctactaagcaatcaacgctccagacactccagacgactcagcatgagcgacgcgcagaactcgaggatgctacggagcgacgcgcagaggccgacatggcggcggaaaccgagggcaataggctggtcgacgcgtggactacctattgcgctggacttgaacaactgcagttggacgtcgagcaaccgctgtcgcaacttgcgacgtgggtcatccgacccgacggtcctaatccagctcaatccgcactatccgtggcctattcagatgcatcagtaagacatgcgaatcgccaagccgtccttgaggctcgccaagcgagcgtggaacaggagcaaaccgatcttcgcgcggagcgggaaaggctcattgcgggccacgatgcagtgccaccagcccctttcacccggagcaccgatgcacgtcaaggacgacaaggtgccccgctctggcaactggtcgattttcgtccccacgtcgagccagccggtcgcgccggcctggaagcggcactggaagtcagtggcctgttagatgcatggatctcacctgacggcgaagtgacacaggcagaaggcgcaccgatctgggatacacaatggcgccgccgcccgccccccataggcgaaagcctgttgacccacttacatccggttacgccggatcgatgccctattgagcccgcgctagtagagaccctcctcgccagtgtcgcctgtggacgagaagatgatcctagtcttgaatcttgggttgccacggatggacgtttccgtttaggcacactcacgggtgcctggctcaagtcggaagccatttatatcggacatacggcccgcacgcaggctcgccagcgtcgactgcaagcgattgatcagcgcctgcatgagttgggtgcagatgctgacatcctgtcgcaagacttcgagaatcttgccaaccaccgagtccgcgccaaagacgagctggatggtttaccttccgacgacgcggttcgcgaagcgatcttagccaccgcaggtgctgcgcgagaggttcttcaagcgcgcaagaggtttgacaacgctgattcgcagtgccaagcggcggagatcgatctgcagagggaacgcgaagaacttgcgaacgatgccaccgatctgcaattgcccgtcgcgcaggccgacctaacgcccattgcacacgccctcgaccgattcacagaaacccaccatgccctgtcgcaagcgattcgggaatggcaaagtgcgtggccggactatctccagcagcgagaacgcgaagcagaggcgcgcaacacattgacgcaacgcgaggaggaagtccggaacgccaactcgcgtgcagagcaagcacgagcacgccactcggtcttgcaggaagcagttggcgcaaaagtggagacattacgtcaccaacttggtgaggcctctcaaacggtgcaacgaatcgatgctgaggccgaactcaaacagaaagcactaaccgatgcggccactgcatacggcgtcgcccagacccacttcgtcggcgcagagaatgtgctggccgaacgtaccgcagcccgcgccctagccatcgagcgcctgcaacgctttactgaaagcagcctactcgcatccgcgctccccgacatccccatcccactcggtaccgccacttggactatcgatcctgcgttgcaattggcacgacgcgctgaacaggcactcgctaacatcgcagacgacgacaatagctgggcccgcgttcagcggcaggtctcggaagatctcactgagctgcaacgctcgctcagcgcattgggtcaccaggcaacctcagagccgaacgactgggggttcaccgtccatgtgacctatcaaaaccgttcggaacggccggatactttggccgcgcaccttgcagatgacgtcgcccaaaggagcgaactactttccgccaaggaacgagaggtactggagaatcatttgcaggcggaaattgctgcagagatccagcgtttgatgcgtgccgcggacaagcaagtcgagaccatcaacgaggaactgtacaagcgccccaccacgaccggcgtccgctaccgcttacaatggctagccctttcctcggaagaggggggccccataggcttggagatagcccgcgagcgactgctcaacacaagctcggacctctggagcgccgaagaccgccgagtggtgggcaccatgttgcaacaacagattgcgatggaacgcgatggatttgcccccgcacctccggacaccgcctcacacttgagttga

SEQ ID NO: 50285 - DNA, 1581 bp, Nocardia cyriacigeorgica GUH-2
gtgaccgattccgtcgacggctccccgagcaccgaacccgcacaccgggacgagcgtctgcggctgttctccttcgctacggccgagaagcgcgccgactacctgcgcgttctggacgccttcgatcgggcgcgcgcggcgtatgtggtgttgctgcacgccgacgacgtcgccacctggatcgacgccgccgatccggcgcccgccgacgcctccccggaaccgacccggctcaccgccgccgagatcggcccgctgctcgatcagctgcaccgctggggtgtgctcgaacgcagctacgacggttcgcgcgcggcaaccctggccgagtaccgcaaccggcacttcgtctaccagttcgcccaggccgggttccaggcctaccgtgccgtcgcgggcgtcctggaggcccggttggacgatgtggcgctgccgcggctggtgttgccggaactgctggccgatctcgaggcgctggccgaggccaatcgcggcgccgacgccgagcgggtctatcgcacgctgcgcaggctcgatatcgcgctgaccgatatggccgggcacgcggcgcagttctatctgtcgctgggcgatctggtgcgcaccaccgagatcaccccggaggccttcctcgcccataaggacgccttgctggcgcatatgcgcgaattcggtctcgacctggcccgtttcgcaccccggctggccgcggccatcctcgccgtcgaagccaccggactcgacgagctgatcgaacgggccgcgcgctgcgacgagcgagtgttgctgagtccggttcggcggcaagcggattggcgttcccgctgggacggattgcggacctggttcgtgccgccggaggacaatgcgggcaccgaggccgagcgactgcgtgaggccaccatgagtgcgatcgcagcggtgctgtcgctgctgcggcgggtcaccgagacccgcaagggcggggtgagcagggagtcggcgctgcggcatctggcggcctggttcaccgccgcgccgagcgccgagggtgcccatgccctcttcgacgccgtgttcgggctgggtcggccacgtcatctggccaccgagcatccggacgccgatatcgtgcccgcgatccggtcctggtgggaggcaccgcccttggagatctcgcggacgctggccgagaccgggcgtccgccctcggccggtgcgccggcccggatccatcgcaatgacgcgggtattcgccggttgcgcgaaacccagctggcggcgcagcgggagcgagcggcggcggcacggtcgctggccggcgccgatgtgcacgagcgagtgctcgacgagcgcgagaccgaggtgctgttgcggctgctggatgccgcctcgacggcgtgggtgccggtgagcgggcgggtcggcgggaccaccggatccgacagcggcgtcaccctgaccgtgtcggcgcataccggttccacggtggtgcggacggcggcggggatgctgcatctgaacaatcgcaagctcgaggtgcgtcaaaccacgcgcgcgtcggcccgcaagaccgcgaccggggagggggatcgagcgtga

SEQ ID NO: 50286 - DNA, 1428 bp, Nocardia cyriacigeorgica GUH-2
gtgaccgcacgccgcatcgacgcgctggcgctggacaactatcagcgcgccgcccgcgtggttctggccaatcatctggtgacccgcacctatccggatcgcatcgcgctcgcgctggtgcggcggtgggccaccgagctgcgcgaggatctggcagagttgttcggttaccggttggaggtcaccgagacgacggcgcgggtgttcccggtgctggaccggttggatgcgagcaggcccgcgcgcacacccgccgaccgggtattcgaccggcgtcgctatgcgtatctggcgctggcgttggccgcgctcggccgcgccggtgatcagatcacgctgtccgagctggccgatcaggtcgccgtctacaccgcccagatcgacggcctcgagctggcgaccgagcgcgccgccgaccgcgatgccttcgtcgatgcggtcggctggctttccacccgcggggcgctgacgctggccgacggtgatgcgagcggctgggcgtcggatccgtcggcgggcgaggcgctctacgacatcgatcgcgcggtggtgttcgcgctgttccggccgccgcgggcggtgcagcatctgcacagtgtgcgcgggttgctcggcgaatccgccggcaccggaccgccgcccactcgccaggccgaggcggcgcgtcaggtgcggcgggcgttggtggaacggccggtggtgtatgccgccgatctggcggccgatgccgtgccgctgctgacccaggatcgtctcatcgccgaggtcgagctgttcaccggtctacgcgccgaacgccgcgccgagggtgtggcgttgatcgatacctccggacggttgtccgatgtccggttccccggtaccgggacgctggcgcaggtcggtttgctgctggcgggtgagatcgccgatcgggtcctcgatatcgatgatccggtcgaacgccgcaccggcggcaccgagcccgagtcctcgctcgcggccgacctcgacaccgcgatcccgcaggaatcggtcttcgagccgctgagcgaactcgacccggtgaccaccgaatccgaggacccgcccgccgaacccgcgccggaaccggactatccgttcctgcctaccgcctggatcgacgagaccgtgcgcgcgctcaccgaccgctacggcgcgaccttcgccgcccagtggcaggccgacgtgccgggcctcacggccgaggtggtcgcgctgctggagcggttgcggttgatcgtgcgcgtgcccggcgggctactggtattgcctgcgctggcgcgttatcggggcgcggtggtgaccgtccgggcgaagaaatcggcggagttgttcgtcaccgcggccgaaacctatccgcccgccgaggaccgacttcacccagaacccgtgctggacacggccggtacggaaggagccgagtag

SEQ ID NO: 50287 - DNA, 4350 bp, Nocardia cyriacigeorgica GUH-2
atgacgctcattcacggcggggtacgtttcgtgcccacccgcgcggggatcgtgaacctgtgggactaccgcgatcaggagttctgcttcgccgacggccggttggtgctgcgcgggccgaacggttccggcaagaccaaggcgctggaggtgctgttcccgttcgtgctcgacgggcggatcgaaccgcgcaggctgaacccgttcgccggtgaagagcgcacgatgaagtcgaatctgctgtatcgcaagcaggaatcggcgtactcgtatgtctggatggagttcgcgcgcggcgactgggacgaccccgaggtggtgaccgtcgggatcgggatgcgagccacgcggtcgtcggacaaggtgacgcgctggtatttcgtcgccgacggtcgcgtgggtgtggacttctcgctgctcggacccgatgaccggccgttcacccggaagcagctggccgagcagatcggctcggacgcgatcgtggatcgtccggtggagtaccgcgccgcgatcgatgcgcgcatgttcgggctcgggcagcaacgctatgaccagctcatcaacctgatcctcacgttgcgccgcccgcagctggccaagaacctcgacccgcgcgggctgtcacaggcgctgaccgatggtctgcggccgctggacgagcagctgatcatggatgccgcgcgctcgttcagcgatatggaggaggttgggcgaacgctggcgggcctggtccacgccgacaccgcgaccagggacttcgtggccgtctaccggaaataccttgcggtgcaggccaagaccgacgtcgaccaggtcgcggcccgtttggatgcggtcacccacgcctcgaccgcgctgttcgcggcaacggcattgcgggagcgccgggaaggcgagcgcaccgccgccgaagcgcgcgccgaggacgccgaccgcgcctacgagcaggcgatcgccgatcgggagacgctgcaacggtcgagcgcctatgagggcaagcagcagctcgaggatctcgccgatgccgtgcgccggctcgaggtgtccgcgggcgcgcaccgcgacaaggcggtcaaggccgcgcagacgctcgaccagcgcacgcaggaggccgaacgcgccgccgctgcggtcgccaccactgctgcggcgctctcccgcggtgaagacgaattgcgttccgccgctgaggaagccgggatctcctggtcgccgttgccggagggatcgcgggccgagcagctgaccgccgccgtgcgcgggcacgccgaggaacgcgacgccgatgtgcgcgccgtccgccaggccctcgggctactggacaccgcgaccgccgaacggaccagggccgaacggctggccgaccgcgcccgcaccgcccgcgacgaggccggcgccgagatcgcccgcgccgaggccgcggtggccgttgcccgcaccgaagcgagtgcggcactgcgggagtggtggtcggcgcatcgcgaggtgtacgccgccggcggtaacgatatcgtcgacgcgctcgagaccgcgctcgcccataccggcgccgacgaggtcgcgggactgtcggaaatcctggccgagcacgccgaaccgctgctcgacgagctgcgcacgcgacgtcaagaagccaaggcccacgcggccgccgccgcccaaaaggtgcgcgagctcaccgccgaacgtgatcgggtggccgcccagcgcgacgacgctcccccctcctcagccacccgcaccgactcgcgcgacgggcgccccggcgcaccgctgtggcagttggtgcgtttcgccgacgacgtgcccgctgaggaagcagccggtatcgaatcggccctggccgcagccggtctgctggatgcctgggtctgcgccgatgccgaccgccctgcggagttcgagtcggagttgttcctcgtcccgctgccggaacatgagcgtccgaccaggcgcaccctcgccgatgtgctcgtcgtggaggacgattccgacgctctcgaggtgccgcgcgcggaagtcgctgcggtgctggcatctatcgctctgggcgatgccgcgaccggcgggagcgtcacgtcctcgctcaccgacgcgcctggtgacgccgcgccaaccccctccggccaggatgcgccggaacaggcgagcgattcagccgacaacggcatcgcgatccggccgaacccggacggtggtgcggctgccgggtcgcgctcggtcgctgccgaccaggtcagcgtttcggcgtcggggcatttccgcagcggcatccagctgggccgccaccgcaaaccgcacgccgagttcatcggcaccaccgcacgcgcacgcaggcgggagttgcgcatcatcgagctcgagcaggcgatcgaggccgccaccgccgctcagcgcgcggccgccgacgaggagaccgaggtgagcgcgcggttgtctcgaatcagcgccgccgccaaggctttgccccgccccaccggcgtcaccgccgcattgcgtgcggtatccgaatgcgccggcatgctgcgctccaagtccgaggccgcaacccaggccgacgccgatctcgaccacgcggtgggacaggtggctgcggcggagaaggcgctgcgcaccgccgccgtcgcgcaccgcacgccccgcgacgctcgggaactcgatgcgctcgccgccgccatccgtcatttcgagaacaccggtaccggattgctgcggctgcgcgccgaacacgagcgcgaccgggaacgcgaacgggaagcggcggaccggcatggcgaggcacgtgatctggccgaggcgttcgccgaagaggccgaagccgcgcaggccgggttcgaggagcagtcgcgcaaactggagaccctgcgcgaatcactcggcgcgagcgccgccgatatcgaccgcgatctcgagcaggcccgcgaacgcatcgaggcggcccgcgccgaacagaaagccgcgcgcaaggccgccaatgcggcgatcgaggccgtcggcgacgcggaggccgcgtaccgcaccgcccacgaatcgctgggcaccgcgctcaccgaggtgctcgccgacgtgcgcgcgctggccccgtatgcgcagcccgatctgctggcgctgctcggcgcgaacaccgaatgccggtggccgagcagtgaggcggcgtggtcgacaccggatcagctgctctaccggatcgcctcggcgggaccggaatcggagccgtcggtgctgcccgacgaagtggccgagctgttcgccgagctgcgcactgccaccgagtcggtgcgcgccaccgaagccggtcgcaaatccacccggagcgcggtgaccacggcgctgcaggaattcgacgccgccctcgccgcctccggccgcgactaccgggtgcactgggacgccgccgacgggctgaccgtggtgcgcgtgcacgacgaacacggtgtcgccccactggccgacttcgccacccgcgtcgacgccgcccgccgcgatcaggagctgctgctcaccgacgccgagcgccgcatcctcgaagacgccctgctcaccggcctggcccagcagatccacgaacgcaccagcgacgcccgcgagttgatcagccggatgagcgcggagatgaagcagcggcgcatgtcttcgggcaacaccatcggcgtgcactggctgctcgccgacggtctgtccgacgccgcccgcgccatgtgcaaactgctcgaccgcgacacctccgccctcagcgccgatgatctcgcggccatccgcgcacacttcgccgccgagatccgcgccgcccgcgccgcccacccggaacgctcctaccccgaaatcctcgccgccaccctcgattaccgcatctggcgggtgttctcgttcaccctgatctccgccgacggcagcgaagaccgcctcaccgtcgcccgccacagcgccctgtccggcggcgaacaatcggtctccctgcacctgccgctgttcgccgccgcccacgtcatgctcgactccgccgacccgcaggccccgcgcctgctcgcactcgacgaagcgttcgccggcgtcgacgacaacggccgcagcgaactgctcggcctcagcgtccaattcgacctcgacctgttcatgaccggctatgacctgtggatcacctacccccacgtccccgcctgcgcccactacgacctagcccactccaccgccgaaaacaccgtcagcgccaccctcctcgtctgggacgccggcgacctcctcgccgaacacgacggcaccgacctcaccaccgccctccactcccccaaccgccggcggttgccccattcgatccatggggggttgccgttggagcccgtcgggtga

SEQ ID NO: 50288 - DNA, 1482 bp, Selenomonas ruminantium subsp. lactilytica TAM6421
atggaggagcaggattttcgccgtattgcggaagtcagttatttgaatacggacaatacctggcgctatcgctctattttgcatttttgctttaagcgtcatgaacatatgcagacctatgtttatcctgaggatatttttcacgagctgaaaaaggatcctcattttcaggcgtataccttcgagcagttggagcaggatcttgctacgctggtgggctggaaaaaccttattccccatcaggaaacaggacgttccaagagcattgcggactttaagaagaaacgctatcgctatcaatgcacgccttatacggtggagattgagcgcatggtggagaaattacaatccctgggcacggagtttagcggttcactggaaaccactcagtttgaccgcattctgcgcgccttacgggattttttagtgtccgggcaggaacttacatcgaaggaactgaatcagacctgggtggatctggagcattatttccatacactggtgcagaattcttccgattatctggcccatctgaagagcgccaaggtggaagaacggatgcagaccacagcctttgtagtgtataaggatcgttttaccaaatatctgcagacttttgtcattggcctgcagcggtcggccaagcggatggaaaatctctttcagggcagcacgtctgagcaggaggcagccttattttcacggctgacggattatcagctgtccattccccggctgggggaggagaagagccgggaaacctacatggaagattatcaggagagttttctggttatgcgggaatggtttatgggcaacagttatcgggaaagcgagctgtcagccctgtccaaggaaacggtggacaccatccgccgcattacgaaatttgcccagcggttggcggaacagcatcagaccttccgcagccgcaaggctgagtatatccaattagcgcgttggttctcccatctctccagcaaggaggaggcggattgcctcagtgccgtggcctttggccctgccggcgggcggcatttctatggggaaagccgggaaatggaggatatgaacagccatatccaggatgaagcgccgacgaggattgagatgaagccacgggtgagcacctatcgggaacgtcagcggcaggtacccatccggcagtatgctgcggctaaggaagaagcccgtcagcagcatctggcccagcaggaaaagctggcagcggtgatgaatggcctggccgctgatggcgtaatcgattttgcctcgctgcctgttatcagccgcgaggcgcggcagatgctgctgagctgggtggcccgtgctttgcagcgcaatcctgtgcgcacagaactgggcagcacggtggaacttatctatgaccggcaggcgaaagggcgcattaccctgcactgcgaggatggtgaattctcattgcctcccatgaagtttcggctgcagaaaggaaacggataa

SEQ ID NO: 50289 - DNA, 1215 bp, Selenomonas ruminantium subsp. lactilytica TAM6421
atggcaattacaggcggacaggatgaactccggcaggccgcccagctgcttgtggaaaaccgctgggtaacccgcaaggacatgcccgatgaatatttactggtacgccgtaacgaaaaagcgctgcggcaatttttccgtgacaaatgcggctggcctctgctggtaacgccgcagttttacaaattggagaaaatccccgccaatccccggtcttttatgggcatagaggccatgcagagtgtggaggattatgtgctgctggcctgcgtcatggcttttatggaggaatatgaggccggcgggcagttcctgctgggggatttggctgaggcattgctttcctattatccagaggatgcttatactcctaagttgaattgggaatcctacaactggcgcaagtctctgatccgggtgctgaaatatctggccgatgagggaatcctgcagattgtggatgatgaaagcgtggcctttttgagtcagggctatggcagcgatggcaatattgccggcgaggcactctatgaggtgacgacattggcccggtacttcctgcggaatttcccccaggaattgggggcctatgacagcctggcagaactgggggcggcggatttcatgccggagattgatgaggaggccacggctctgcggcagcggcggcacaggctatatcgggaagtgctcttaagtcctgtgtactatcgggatacagagtcggaaggggatttcctctatctgcgcaagcgccatggccggctggaagaggcgatgctggaatggttcggcctccatgtggaactttatcaggatgccgtgatggcggtttcccatgagcagtcatcctgggtcaaggacagtttcccggtccggttccgggggcttcatgatgtgttgttgcattttgcccattattggcgagaggtttcgccacaggtgacttccctgagcaaaacggaatggcaggtgcatatggagaaattgcaggcggctgtgggccacggctggaccaaggaataccgggaaatgagcgtcaagcgactggcggagaatgtgctggcggaaatgacggcctggggcatggccaaagtggcagaggatggcctgattacattattgccggccctgctgcgctatgatggcagctatcccacagattatcagccaggcaagagtgccaagcggggcaaaacggaggacaaggaatga

SEQ ID NO: 50290 - DNA, 4164 bp, Selenomonas ruminantium subsp. lactilytica TAM6421
atgagcgacaatcgttggcaggcctatcgggcaggcattttgaattattggtattatgatgaggcggagttttactttgccgatggcaggctgcttttgcggggcagcaacggttctggcaagtccgttaccatgcagagcctgattacggtgctgctggatggcgtgaagagggcggatcgtctggacagctttggttccaaatcccgtaccatggatgattatctgttgggggaaaaggaaatcagcgaatacgaggaacgtactggctatctttatctggaatacaagcgggcaaatagtgagcagtacatcaccacaggcattggccttcatgcccgccggggcaattccaaggtggacttttggggctttgtgctgcagaatggccgccgtatcggcgaggatctgtctctctatcatctgacgaagaacccggaaacgggagaagaacagaagattcccttgacccgtcgggaattggaaaatgccatcggccaggacggccgggtgaccacggagcagcgggaatacatggccatggtgaatcagtatgtctttggctatgaggatatccgcaaatacgaggaattgatgaagctgctcattcagctgcgcagtccgaaattatcccgggatttcaagcccagtgtcatctatgagattttgaatgcctctctgcctaccctttcggatgaggatttgcggcctttggcggagacgctggaaaatatggaaaagaccaggctggccatcgaacagctcaagcgggagcggggggcctttcagaatatctgccgagcgtataccgcctataatacggcggtgctggcagagcgggctttggctgaggccgattgccagaaggccctcaagcgtctgaacaagcaggcggaggcccagcaggaggaactgctggcggcagaaaaacaggcggcagaggccagtgagcggttgcagagcctgacggtggaagaagaagccctgcggcaggaacaggccagcctgcaggagcatgaagcctataaggctgccgaaaggaaaaaggaagcagaattgcagctggctaaagagcaggccgagaaacagcgcaaggatgacagcctactggaaaaacgccggcgggaactgtctctgcaggagcagatgcggcaggaagaggctgatctggcccaattggaaaaacaggtggccgatattctggaggatttgacggatctggcggagcaggcggactttgacagccacgccgcttttcaggagggcttccagctgtcctcgccggattgtgaggagcatttccgcctctggcgccgggaacggcagaatcagctgcagagcctgcagaaactgcataagcagatgctgcagtatgagcagtcgttggaaaagctgcagcaatgggagcaggaactgggcgaggaaaaccgccggctggatcagtaccgccatgaagaagaccggctgacagaaatgctggcccaggaacgggaacagctggtcaaggccttctatgaatggaaagaccgctggcaggccctgctgtcaatggacaaagacgcagaaatccgcctggctggcagtttgcgggaactttttggcacaacctcctggctggatatccagaatcaactgggaaccattgtcagcgaaaagcagcgcagcctgaatgcagctatcggcaaggtggagctgaataagcaggaactgaccggtcagctggccgaagcgcaggcagaactggcaagcctgcgtcagacaaaggaggctgaaccggaactgcaggaagcctgggcagctgcccgtcaggaactgacagcccagggcatcgcctatgtgcccttatacgaagccacggagtacagaagcacggtttccccggccatgcgggaacggctggaatcggcattgctggaagctggcttgctgaactctctgctgctggcttccaatgaggcggcgcaaaaactgccggaatccatgcggggcacggtgctcttcagcggcgagccagtgatgctggctgaatccctgctggattatctggaacctgtgcccggggagagcggtatcgccagggaacgcattgctgacgttttgggcagcattgccatcagcagtgaagtatacggcaagggcaatggcattgccctgaatgtggtggatggagcttatcggctcggtacactggcaggacgggcagcccagcgcccggcggcgctctttatcggcaagcaggcccgggaaaattaccgccgtcagcagattgccgctaaggaagcagaaattgccggcttgcaggcagagcttgcccatgtgcaggagcaggaaagcagcctgctggctgaaaatgactgcctgctgaaggctcgggaggatttcccgaatcagcaggaggtacagtcggtttatgatgaactgcgcagccgggaacgggatattgaacgacagcagcacaggctgggtgaactggcggacaggcagaagaagttgacactggaactgcgggacgaacgggccggaatcattgctgagcgtggcgatacggggctggcgttttccgccattgcctatgaggaagctttggcagccctccacgattatggcgaagtatggcacaagctcactcttatgcaggctaactatgcccatagtgcggagctgttccggcagcagagtcaggaggcagaatatgtccgggaggaagtggatgccctcaagggggaactgctggacaaggatatgaatatcgcccggctggagaagaatatctctgccctgcaggagcagctgacccggatggatgcggcggccattgaagcctgcattgccgaagtggtggaacgcctcaggcatatcccccaggaaatccggcaggtatcccagctgttgggacagaatgaaagcagccggcagatattggctagtcagctggagcaaagccggcgccggcagcaggtctatggaaagctgctggttttatggcagaaacttctgcaggctgagcagaagcggggctttgtggatttggacaagaagaatctgcgggagcttatgcaggcccggcaaaagagccgtgacaacaagaccctgcattctctggcccaggatgtggaaagccagtatgccagacagcgggatgaaattgctgagtaccgcttatccctgcgggaaaatgtggacgaactgggcgatttgccggaaatttccccggaagatgaggagattttcctgccccgtctggataccctgcgggattatgcggtgcggcagctggctttgactgaggccggcggcaagccgttgagcccctatgagcagctccagcagctcaaggaccatctgctggaacaggaaagcctgctgtccgagcaggacaagcggatctatcaggagatcatcctcaacagcatcggtcgcaccatcagcgaaaagatctacggtgcagaggattggatcaagaagatgaacaagctcatgggcaaaagcgaaacctccagtgccctgcggttccggctggaatggaagcctcttacgggcgaggatgataacgagctggacacggccgaactggtggaactcttgcacagcgatccggaattgatgaaggaagcagacatgaagcggctggagaaacatttttcctcccggatacggcgggccagggaagaggctcagctgcaggaaaaggatgcagatgcctttcaggcttcggtgcgggaacagctggattaccggcagtggttccgcttccgtctctattatgacaagggtgagcagattcagcggcgggaacttacggacaaggcattcttccgcttcagtggcggcgaaaaggccatggccatgtatgtgcccttgttttcggcggcttattcccgctatctggatgccggcaaggatgcgccccgtctgattacgttggatgaggcttttgccggggtggacgagcagaatatgcgggatatgttccggctggtggagcagatgggcttcaactacatcatgaactcccaggccatctggggcgattatgatgtggtgcccagcctcaatatctatgagctgctgcgtcctctgaatgccaattatgtatcggtgctgggctatcattggaatggccatagccgtaatgtgatgttggaggatagccgtgaaggataa

SEQ ID NO: 50291 - DNA, 1263 bp, Selenomonas ruminantium subsp. lactilytica TAM6421
gtgaaggataagctggcagcggaagcggcggcgtattttaaaggtcatgcaatattgctggcgttggcgaaagagttttgctgcaagtatcgcagtctgggccatttcggcgggcgggtgtccctgactgcgcttacggtggaggaacagcgatctttagcggccttcctgcgccgcaagtttggtgaagcagattccgtgtcttataaggaattttccgcagcctgggagaaaacccgtttcgggagcattcccttgccggatttcctgctttccctgatgcccgggaatttcatcaccaagcgggaagaacggcagcaggaacaggcgaaacggcaggaaatcatggacaggctgctggcaaaatacccggctggacctgccaggcgctggttgcaggctttggcccagggaaatcttcatctgtttgccaaagaattatatcagcaggaagatgttctggctacggtggcctgcgctttagcaatgctgcccgccaaatatgagcggttgcccctgtttgccaaccgggtggcgcaaaatccccatgcattggattttgaccgtaccgagggacggcttttcttgcaggctctggcctttttgcagggggagaacgttccatctgctgctgacgcacgcacagagctgctgtataaataccgcctgatccgtgacgatatcctgaactttgccacggtttacggcttgaaggcctacggcgaagatggcggagaaatagcctattggcgggaggcggccaatagctatgctcctttgaacgtgcctctgcgggaaattgcagccgctgagcgaatcctgccggtggaggggaatgccgatacggtctatatcgtagagaattccggcgtgttctccaccttgctggacggattgcaggctcggcaaaagtctgtgccattggtggccctccatggacagctgaaggctgcttcctgggcattgctggatcgtctggccgcaagtggcatccgcctgctctatgccggggatttcgacccggaaggactgagcattgccagccatatcctgaatcgctacgaaggagccgccctctggcatatgtctgtgaacgagtacgcccaggccaatctgctcctgccggaaaaccggctgaaaaaactgcccacaagcgatcacccgcagctgacgcccttggtggcagccatgcggcaagaacaaaaggtgctgtatcaggaaagtttgctccaggaactgcaggccgatttgtggaagaagtaa

SEQ ID NO: 50292 - DNA, 1509 bp, Bacillus alcalophilus ATCC 27647 = CGMCC 1.3604
gtgctagagtctagacttttagagccttttacaaaagcaaaatatctaagtgagcaaaattatcaaaggtatgtcgctataattaattatttatatatacaacatgaaatttattactcgcctccttcgttaccgatagatatatttaaccatattataagtaacgataaattgggtgtgtttaaagaatataatttaacaaagttagagactgatttaaatgcattagaagagtggggaaatgttatgtctcacccagatacaggacacgtaactcgaattgaagattttaataaaaggaaattaaggtatcaatgtacagaagaaacaatagaactagaaagaatgatggaaaaactaaatagtaaaataaatatggtaagaggttcaatggattcaggtcttgttaaggctttaactactttgttgctagaattggaagactatactggtgaagagaaatacgttaatttggaagaacaaaaagatgttagtaagttgtgggaagatatgtttactagatttgataatctaagaaaggaaacatcagactatcttggtgtcatccatagtagaaacattgaagatgcgatgcaaaataaaaaaataaacgcatttcgcattaaatttactaactatttaactgattttatcattacgatacaaagaaatatccatattattgaagatgtaattagtgtaatggataagtcaaaagcattagatttggttattgcaactttgataaaaaaacaaaaagagaaacctaccctcgaagatgacatgtcggacgatgaatatcgtgaaatcttcatgaaccagtggaaagggttagtaagatggtttgttcgagatgatttcaacgaaagatatgttgactatttactaaagcaaacaaatgatacaataagtcgttttacaaaatatttacagcaacttagcgaaagagagttacagtccaaaaatagaaagaaacaatttttacatgtagctgacctttttgaaacagaggagggttttgacatttgccaaaaggcttttggaacgattactaatgttgaaaagccacttcattttcagtcatcaaaagtaagggaagtaaatacagaagacactctttataatcatacccctgaaataatatctattaaagatgcaaaggacaggaataaaccgattaaaaagaaaatggctgcaattgaactgtcagatgaggataaagatattcaggaacaactaaaaagaaggaaagaatatgaagaacaagagttgtcagctctcatgaattgcggaatagttgaaatcaaggaattagaagaggtagaacctttcgttagaaatgctttattaaattggataagtatggcagtaggaaaagagaaaatgaaaggaaaaactgagcaaggtattaagtatgaaatagaaaaacagtcagcttcctggataagtatgaattgtacagatggtacattgagaatgcccgattatgtcctgttttttgaggtgtaa

SEQ ID NO: 50293 - DNA, 1194 bp, Bacillus alcalophilus ATCC 27647 = CGMCC 1.3604
atgaatatattcaataaagtagatttagagtatgacaagaataaccaagtcaagccagttattaaggaatgcatttatgaactctttgaacgattctgggtattaagggaaaatgatgaaaagttattttatcaaatcaaagacaatgagcatgagttaaaacggttttttagagatacttttcggtacagactggtttctaatcatgaaatgataaagttggaaaagattccggtaaaaccacttagttggatgggagaaaaatatattaatagcgtaccagtatttaaaagtgcaaaggatttcgcttttttctttcgcattttagcatttttagagggtaaatccgtagaccaacaatttacattaaaaaatatatgtgatgcaattagtgctttttcgcaagaacaagtagtgtggaaagaagggataggttatcaaaacaggttatccttagtccgtttgttgaaatacatggtgaaaatgagtttgattaaggttatagaccaagaaatagaagattttactggaaatgataaccacgatgtacttttggaaagaactccacatagttcgtactttatgcgtatgtttcctcaagaggaagttgaaaattggaagggcttacgagattttttgagatatatggagcgagaaaatcaagagatagctgatagaaaacatcgatactaccgaaggttgtttttggagccagtagtctatcataacgaactatccgaggaagaaagagattatattaaaaaattctatgtcggtgtagaaaatactatctatcgttataccgatttaacatatgaaaggtataaaagttcatcattggtagttaaaacagactatgtaaaaggtgaaaaaatatatccggcagataacatgattacgaaaatagctattttaatggggaattacctctacacgagaccactagcttttccaaaaaatgaaagaaatgagatagagctaatgggggaagaaatcgcaaccgttttatctaacttgagaaaagagtataaaggtagttggactaaaaaaatgaaggactacaaattagaagaattgcagaaagaagtaatgtcagagctcgtaatgtggggctttttagaagaaaaaagcgaaaacatttatgtaattaaagagggaatatttcgttttgtaggcgattattttaaagattaa

SEQ ID NO: 50294 - DNA, 1842 bp, Bacillus alcalophilus ATCC 27647 = CGMCC 1.3604
atgggagaaataacagaaaagtggacaatgcacagagctgtactatttaactattggtattatccgaatcaagaactattgtttagcaatggatgcgcggtattacgaggtcataatggaagtggtaaatctgttacaacacaaagtttgattactgtattgttggatggagacgtgcgaagtcataagttagacccgtttggaggaagagagcgtaaaattacagatacagtgttaggtgaaaaaggtttagttgatattgaccaccgtattggttacatcgctctagaatttaaaagaggaaacactaatatctttaaaactatcggaatgggtgtagaagctgaccgtaataaaaaacaaccaaatgtttggtattttattattgacggaaaacgtattggtgaaaaagaaagagatttaaagttatatgaagaagtaatggatgagggtaaagtaaagaaactgcctagaaacgaaaaagagctacgtaatgtaattgaagcgaaattacagtgtggaaaagtttattcaaatagagatgagtatgcggataatgtgaacaaacatttgtttggatttgaatccctagaaagttttaaaggattaattgatttattattgcaggcgcgaagtcctaaattaagtgaccagaataaacccgaaggtgtggttcaggtattaaatgattccttgccacagttaacaggagaagagttgagaccattgacatcttctattgaagccattgataggatagaaaaagatttaagggattatcgtcaggatttaaaagggataaatgcactgcatgaagtttatgaagaatataacaaaataacacttgctgaaaaagctgtttcctatttaaaatcgactgcggattacgaagaaaccaaaaagaaaatcacagaatcaaagaaaaatatcgaaaaattcgagaaaagattagctgtattatcatttgaatctaagaaactagacgatgaattaagtatttttcgaacggagaaggcaaatctgggattggacgaaatagaggctttacaacagaacaagaatgatgaagaaaaaaatcttgttgaaaataaaaataaattagctggcttagaagagaaaaaagaaacggctgagaaagaatatcgaacgtataagcttcagtatgaggagaaggaaagccaaaagaaaactctagattggaatatgaaagggtatctaagcgaattaaaaaacctttccgctgacatacactttgaagaacatgaccgtttttataatcatttttttcaggaaaaggatgggaatagttatagcttcgcaacatggaaagatgtttttgatggttataaacaattcattaaaataacaaaggaaaaactggatgcatacgaaggtatgaaaaaagaagtcgaggtacttgataatcaattaggtaatattcgtatggaaatcgataagtctcaatctattatagataaagaggaagaaaatcatgaaacagaagttattaagctgacgcatgaaataggggcttggagtcaaagttctaaaacattaagtgtatctgaagatattgtggatggcttacaacgcaatctagaagacgttttcgattcaatggaaaaagaagtgtatttttcaatacttaaacttcattatgagggttctaaaaaagaacatgaaaggcaactcatgaagaagggttacgcaattgaattattagcctctgaaatagaagatatagaatcaaagatacaagattggaaaggtagagaagaaatagagccggaatttgcaaaaaaagaaaaagtgattgggaaaaattgtatcaaaatggaatag

SEQ ID NO: 50295 - DNA, 1008 bp, Nocardiopsis alba ATCC BAA-2165
gtgggactcaaccagtgggcgaacgatcgcgcggacgaacgacaggacaccggcgaccggccggtgccacggcacggccgcgccgctctgctgcgcctggccgcgtggttcgaggaggccgagccggaccgggcggacgccctggcgacggcggccttcgcgctccacccctcgcgcgaccttcaaggccgggtcgccgacggagtggcggccaccacctcctggtggcaggcggaacccgatcgcagcaccgtcaccgaacatcccgggacgcgctcgcccgagcccgtccgcgaccaccgcgcccaacaggcccggttgcgcgacgccgccgagtcctccgcccactggaggcgggccggcgccgaacaggtgcgttccctgctcaccgagcccacggccgaccgggcccggctggacctgtccggtgcggggatggaggtcctcatggaactcctcaccacggccctggggtccggtgacgcctcccgcggtcccgcctccgccggcgacctggagttcgggctgcgtctgcacgtccacaccgcgcccggggcggaggtcgtcgtccggggagagggcggagacctcactctggaggggctgcgcctgcacgtgacctcgtacgaccaacaccacggacagaccgttccccccacgccggtcgagcccctcgccgagccggaaggggagatcgacgggccggagggccccgaccggaccgagaccctcgacgtccccgaggagcccggatccccggagacggacgagacgcccgagcccgaggagaccaccgagagccctgaggccccggagacggcggagggctccgaggagaccgaagcggccctcgaacccgagacggcccccggggacgacgaggcctcctcaccggaggccgggggcgagggacccgagcggaccgatagcctcccgggaccggaccccgacgccgagaccaccggtccgatcgagatcatcacgcacacgccccggacccggaggtga

SEQ ID NO: 50296 - DNA, 1395 bp, Nocardiopsis alba ATCC BAA-2165
gtgacggtgccgaacgtccacatcgaagacgccgccctgctcggagagcgtcaggccgccgcccgcgccctcatggccaggccgctgctcacccgccgggcccacccgaccgagttctcgctggtgcgatcgcacaccgagtggctcgtccagcgtttccaacgcgtgctcggctaccgcctcaccgtcgccgacgaccatgcccgcctggtcaaacgcggtctcgtcgacgaggtggtccgccccctgacccgcgccgacgggacccgtttcaccccccgcgccctcgcccacctggccctgagcctggccgtcctcgtcgagaccaccgaaccggtggggatccgggcgctggcgcgcggggtgcgcgacgccgccggagaggccggggtggacgccgatccgacccgagggctggcggagcgtcgcgccttctgcgcggccctgctccacctgaccgacctcggagcgctcaccgagacctccggtacgatccgcgcccatcgcgacgacgccgccgtcgacgccgtgctgacccccgacgtcgacgccctgcgcgcggtcgccgcccacctgcccaaggccggggacaccgccgacaccttcctcgccggagccgtcgaccccgaccccgagagcgaccaggccggagagaccaccttgcggcggctgctcgccgagaccgccgtggtccaccgcgaggagctccccgcccgtcagcgggaccgtctcgccgcccaccagtggcgcgccgccgcggctctgggcaacctcctcggaggggagatcgagatccgggcggagggtgtggcgctcatcatgtccgacgaggcggccacctcgccccggctcccctccgacgaccctgtcggccacaccgcgctcgcgctcgtccgtcatctcgccggtcgtctgaaccccggccgtcccgccacctcggtccccgtacccgaccgagaactccaggtggcgctggaggccctcggtggagccgacgccccggcacgtgccgactgggcgcgcaccgccgggcccgaggtccccgaccccgaccggctccgcaccctcgtcctggaactcctcgccgactcggggctgctcctcggaggccccggcgagtggcgcttgaccgccgccgcggcccgattcggcgcggaagtggacgatcgcgtcccccggatccaggacaatgacgaagacgaccggacggaccccgcgcgaccgcgtggagccggtcacgacgcgtccgagcacgacgagtcgaggcttcgaaccgacccccgtgaagacctcgaccgagtggcgtccgtgctgcgaacggtggcgaacgagaaggtgagcgcgaccagtggtgacacaggagacgagcgaggcccgggagacggctccggctga

SEQ ID NO: 50297 - DNA, 477 bp, Nocardiopsis alba ATCC BAA-2165
gtggtgacacaggagacgagcgaggcccgggagacggctccggctgaccccaccccccgttatcgcctcgaacgcgcgggtatccggaacgtctggcagtacgacgaccacgtcctggacttcgccgaggggcggctgctgctgcgcgggcgtaacggcgccggaaagtccaaggccctggagatgctcctccccttcctcctggacggggacgtccgtcgtctggacaccaccgggaccaaccggaccagcctgcgctggctcatggccgaggacccccgcgccggtcgggccccggtggaggaggccggccccgacctgctcggcgagcccgaggacgagccggcagaggcggacgacgcgaccgacggggggctacctgtgggtggagttcacgaccgcccgcggcgatcggggcctggacgcggcggcccggaacgacaccggcccccggtccgccgccgccctgctcggtga

SEQ ID NO: 50298 - DNA, 1488 bp, Caloramator australicus RC3
ttggaaatcaatgctaaacttcaaaaacagatagatgaagtaagatatttaacggcagaaaatgcctcgcgatatagggttattatgcgttttttctaccttcaatatgaaagaatgaagtattggctatacaaggaggatgtatttgaagagctcaaaaaacatagccaatttgaggattacacgatggagcagctaaagcaggaccttgacaaccttgttcaatggaaaaatttaattcctgttcaagatacctcaaaagtttcatcggttgaagagtttaaaaacaaacaatttagataccaaatttctgattattccattgaaatcgaaagaatgattatcaagcttgaaaccttgcatgttgagacagcctcccttgaaccgtcactacttgaaagaataaaagaagcctttataaaaatcccgcaaataataaattccgatgaaaaagtggctaaccagtggtggaaggacttaaacagcgactttgagaggcttaataaaaactacaaagattatcttggctccttttatagtctaaaggctgaggagatgatgaagacaagcgcctttctactatacaaggataaattcatagaataccttagaaacttcataaaggagcttcaacagcacataatttcaattgaaggcatactaaaacaaataaatgaacatacggaaaatgctttgcttttaaagatttttttacatgaaaagtcaatacccaaaataaacaacgaggcaacagaagaggaaataaaggaaaacatcgaatcaaaatggagaaacattaaaaattggtttttgccttcaaatgccaaagaaagtgaagccacaaggcttcttgacatcaccaatgaaataatacgaaaaataacccgatatgcggcacaaatttcagagagccgaaacagtgcagcaaaccgcaaagaggaatacaaaaaacttgcccagctatttacaacctgcaaggatattaacgaagcccacaaactttcggccctttgctttggcatatttaacccttaccatataaaaacaaatgccccaagaagcaccgaaagtataaactcaagcccctatgatgaaataccaagcctttacattataaagcctaagattagaaactacaaagaaaagtccgaaagaagcccaataaaaagcaaccttgaaaaaaaggagattactctacaaaatatactaaaatcaagacagcaggaacaggaattaatacaaaactacataaaaaacgggattattgacttttcaaaccttcctaaaattccacaaagtattagaatatcccttttaaggtggctatcaaaggggctgaattctcccgattttacatcaaaaactgagactggaataaaatacaaaatagtcccaccagacctaccaaaccaaaaatgcacaatagtttgcgatgatggtgaatttacaatgccagcctttaaaataatttttagggacggttcataa

SEQ ID NO: 50299 - DNA, 1161 bp, Caloramator australicus RC3
atgaaggaacttgagttacttctcgataatttttggataataaaagatgaagataaggagcttttttatcaaattaaagatgccattcctgaatttaaaaactttttagctgaaaaacttggataccatatcatccaaaatacacagcttattaaacttgaaaaaattccagggaaggcagaagcctggatgggaatacaggagtttgatagtcctatggaatatgcttttttatgccttcttttaatgtttttagaggacaagggcaaagaggagcagtttgttttatcaagtataacagagtttatcgaggcaaattatccaggtgaaaagatagattggaccctatttagacatagaaaaagccttgttaaagtgttgcgttttgcaacaaaaatggggatgcttaaggtggacgatggtgatgaatcaaaatttacaaacgatgcatcaaccgaagttctatacgaaaatacaggcctttcaagatattttacaaggagcttttcaatgaatatattaaactacacttcatataaggactttgaaaaggaagaggaattagatatagataaagacaaaggcgtcataaggcgccaaagagcctatagaaaacttttaatgtcgcctgtcgtctataaagaaggggattttgatcctgattttgactacatcaaaaagcaaagaagctcaatagagaacgaccttgaaaaatatttaggcctagagcttcatgttcacaaaaattgtgcaatggttgtgctaccccaaaacaaaacatataaaagcatatttccagatgggacaacccttaatgatataatacttcaaatgaattatatgataaccaatatggttaaaacaggaaagctaaagccggacaacgatgatataataaccatttcaaagcctttttttgaaacgatggtcaaagaactaaaggccttaaactcagcaggctggagcaaagagtatagggaaatggattttgaaaaattgtataacgaaataatacactttatggagatgcttaacatgataaaagtaagcgaaaaggaaataaaaattttacctctgtgcggtaaggttgtaggacgttatcccgatgatttttattcaaaggaaatggaaagggaggtggctttagatgaagcaaaatag

SEQ ID NO: 50300 - DNA, 4074 bp, Caloramator australicus RC3
atgaagcaaaatagatggataatagaaagggcaggccttataaacttctggtattacgatgaagaggaatttaatttttctgacggaaggctacttttaagaggggcaaacggctctggaaaatccgtaacaatgcaaagctttatcccccttttgcttgacgggaacaagagccccgaaaggcttgatccctttggctcaaaggcaagaaggattgaaaactatcttttaggagatgaggggtcagaactcgaagaaaggacttcgtatctttatatggaatttaaaaagaaggagagcggaaattatattacaataggaatgggttttaaagcccaaaggggaaaacccatccaatcatggggctttgccataaccgatggaagaaggataggccataattttttcctttataaagacatcggagataaggtcccacttagcaaaaaagagctggaaaatagaataggaggcggtggaagggtagtagaagcgcaaaaggattacatgaaaatggtcaacgatctattattcggctacgaagacatcgacgactacgacgaacttataaaactcttagttcagcttcgttcacctaagctttcaaaggagtttagacctacagttatatacgaaatacttgaaaattctcttcagcccctatcagacgacgatttaaggcctatgtcagaggccattgaaaatatggataacataaaaataaggctggatgagcttaaggaaagcaaaaaagctgcagagaagataaaggatgtttacgataaatacaaccgctttatgcttcttgataaggctaaaaatctaatcaacatatacaatgaatatcagaaacttctaaaaaataaacaagagcttgaagggtcaaaggaaaactcaaaaaaagaatttgaaacggcttctaaaaatattgatgaacttaaaataaaacaagccttctatgaaaacaaaaaaaggcagcttgaggtccatgacagcctcaaaattaaagaaaaaataaaagaagttgaggactttatagaaagccttaaaaaacaaaagcatgaaaagatttcccaagaagaaaccaaaagacaaagggaaagacagctacaatttgagttaaacaaattaaaggataataaggaaattctattaaaaaaggtagaggatataatccttcaaatggacgatttataccttgaatttgactttgatgagcaggtatttttaaaggatgagctaaaaaacaatatagaagtagaatacaactttagctttgttaaggaaaaattatcgaaacacataaaaaacttagaggaggcaaaagaaggaatagaggaacttgaaaggataaataaactttatgatgaagctctaaaggtattagaaagggcaaagcaggaaaaagattataaggaaaagaagttagatgaagcaaagcttttattggaggaaattaaagaggaacttatagaaaaaatctacaaatggcataaagaaaacaacgaactaatattatccgatgaaacattagtaaaaatttcacaggttataaataattttaacaaagacagcagctttgatgaagttattgtccttttaagggatgagtttaataaagtcgagttccttttaaacagccaaattttaaaattaaaatttcaaaaagaaagtcttgaagaaaaaattaaagagcttaatgaaaaaattgctgagtggaaaaacaaaaaagatcctgaacctgaaagaaaagaggcggttataaaaaacagagaaaggttaaagaaggaaaatatcccctttattccattttataaagcagtggattttgtcgacggcctttcagaggagataaaatcctacatagaatctgccctttgtgacatgggagttcttgatgcccttatagttcctaagcaatataaagaaaagatttttgaaatggacaaagacatggcagataaatatatttttccttcaccggcatatcttatgcatgatttaactcaatttttaaaggttgacaagatcgatgttgatggtattaaagaggaggatattgtaaacagccttaagagcataatgatagatgaaggaagtgcaacttaccttaacgaaaagggagaatattctataggaattttaaaggggaaaactaacataactgaaggtgttaaattcatcggctcttcagcaagaaaaagatatagagagataataatcaaggatcttgaagagcaaaaaagccaacttgaaagggaaatccaaacaataaaagaagaattagaaatgatatatcaaaaattagaaatattaaaaaaagagctaaattccttcccaaggccagatgacttaaaaatagccataaacactgttacagccgcagaatttgaacttgaaaaggcaatagaggatatttcaataaaagaaaaggaagaaatcaaaatatttgaaaggctcaaggaaatcaagcaaagggtttatgaacttaccaataaaataaacctaaaggctgatcttgatacattcaaaagcgccttagaagcttcaagggaatatagagaacttttatatgaacttgaaaattcccatagaaaatttctccaaaacaaagaaaacttaaaggcagcagaagaaaatctaaaactcatccaagaggacattgaaataataatatacgatcttaacagcataaagctaaaactaaaggagcaggagctcctattagactccttaaaggaacagctaaaaatctcaaattatgaagaaataaagaacgaaatagaggactgcattaaaaaccttagggaaatcccttcccttatagaaaaagaagttgaaaaaagagcaaaggaagaggaaagatacactaaagctataaaggaattggaagagattgataataaaataaaaagaaaagagatattgtttaaccttcatcaagatgcctttaaagaagaatatgcattaggctttatagaaactccaaaggatgaagatacaataaaacttgcccaaaggatcataaaagaaataaagcaagaggataaacaaagggaggactatataaacagcctttattccaaatttaacgagaacagcccctatcttagggagtatattttgaagatggatactatttttgaaaaaaatatcgatacagaagatgaagatataaaggaagccctgtttaaaacaaagcgtcttgcaattagaggaaaggtaaggggaagggaagttgacctttatgaccttttagaatttatagaagaagggataaatgaaaacgaaaaccttttaagggaaagcgacagacagctctttgaggatatattggtaaacaacataagcaaaaaaataaggtctaagatatatcatgcacaggaatgggttaaaaagatgaataaactgatggagtcgatggatacctccagcggcctttcctttagcttaagatggagtagtaaaaaagccgagggagaaaaccagcttgatactaacgagcttgttgagttattaaggcaggaaggcagcataatgaaaattgaagatttaaataaactttcccagcattttagagcaaaaataaacgaagcaagaaggatccaagaagaactcggtaaagcaaaatccttccacagcataataaaggaaattttagattataggaaatggtttgagtttaaactttattataaacgctcaggacaaaatccaaaggagctaacaaacaatgccttttaccaatttagcggtggagaaaaggctatggcgatgtatgtcccattattttcagccgtctatgcaagatatgagggagcaaggatggactgcccaaggataatatcccttgatgaggcctttgctggcgtcgatgaaagaaatattagggatatgtttaggctcttaacggaacttgaacttgactttattgtaaactcacagatactttggggagattatgacacagttccttccctttctatatgcgaacttataagacaagataatgcagactttgttaccgtcataagataccattggaacggtaaagttaaggaacttgtttgttag

SEQ ID NO: 50301 - DNA, 1296 bp, Caloramator australicus RC3
atggaaaggataaagcaggaatgcttaaaatattttaagtcaaataaaggctataaaaggctgtttgaaaaaataagggaaaaatatagaatgctaggctacttaggcggttctataaaacttgataatctaacccctgaagagcaggacgctctttcggggttttttaaaagggatttttacaataaaaaaagcgcgacgataaaaatagaaaactttttaaaagcattagaaaacacaagatttagcggcgttgattttgaaggggttttgatggagtatttcgatgaaaaaataatttccaaaaaagaggaacaaaataggcttgagagggaaaaggaaaaattcttttcagagattttaagctgttttagtggaactaaagctaaggagtggcttgaatatgttctagataaaaaggaaaacgcctacaaactaattattcaaaaatacgagagggataaattaggtttaaaaaattctttattgttaacaggtgaggcgttaaataggttgagttttgatataaataacaccgaaaggcttgcgattttttcatcgaatatcagcaaaaacccccatacatttgattttgatagggatgagggaaagcttttgctttatgggatatcttattttttaaaggaagaatatcctgaaaatgctcaaaaaagagcagaacttttgtatagagcaggaataatagacgatgaggtgtcaaactatacgatagtgagcgggcttttagcctataaggatgggaagctccacgaaggatgggaaggattttataaaaactctgagcctatgcagctatccttatataatctatccaaaatcgacaagatcattgcacctgaaagagtagtttatatatttgaaaacccaactgtgtttagtgaaatcttagaaaggacaaaggggaaaaagatagctttgatatgcacctatggacaaataaagcttgcaagtataattcttcttgacaagttaatggataacgtttataaaatatattattctggcgattttgatccggagggactactcatagccgacaaattaatccaaagatatggcgataaaataaccctttggcgatatggaattgatgattataaaacgataatctcaaataaaaagattagcccccaaagactaaaaaagctttctaatttaaaaacaaaagaactcatagcccttgcagaagaaattcaaaaaacaggccttgccgcctaccaagaacttttaatcgaaaagtatctcaatgatatagggacggttcgtgaaaactaa

SEQ ID NO: 50302 - DNA, 144 bp, Thermoanaerobacterium saccharolyticum JW/SL-YS485
atgtctgataaaatagattttaatgtcataagacctattgatgaggcaagataccttactgctgataatgcatcaaggtatcgcctcatcatgcgatatttttaccaaaattatgagcggcttagatactggctaactaaatag

SEQ ID NO: 50303 - DNA, 3252 bp, Thermoanaerobacterium saccharolyticum JW/SL-YS485
atgggaaaatctttgatgaaagacatacttagagagatatctaatacgagaaaaagatttttatcattgtttttcatcgtgttgatgggtgttggtgtttttggtggaataaaagcagccagccaagacatgaagcttactgcctcaaaatacgctgctgattataatttgtttgatgtacaaattttgtctacaatgggtcttacaaatgatgatttgaatagcatcaaatctgtaaatggcgtattatcggcatacccgttttacacggttgatgctgtggttgataaaaataataaagggtttgtagtaaaagtcataagtgtagatccagttaaaattaataatgataaaaattatgtaaacaaacctaaacttttagaaggtagatttcctgaaaacaattctgagtgtgtcgttgagacaaaatttcttaaagatttaggattttcaataggcgatactgtaaccataaatttggattctcaaaatcaaaacaatataaaaaacaaaaaattcaaaatagtaggtgtagtggaaacaccttactatatttcaagagacagaggttccagcaatgtgggaaatggtcagatacaagcttttatgatggtacctaattctaacttttcaatggatgcctacaccgaaatagatgtgctggtagatggcgcaaagaaattttctacattttcagatgaatactacaattttattcaacctgtaaaagatgatttaacaaaattaggtaaaactcgaagtgaaatcagatatgaagaaattaaaaataaagcacaaaaggaaatcgacgatgctaaaaaagctctggaggataaagaaactaagtacaacaaggaattatctgatgcaaaagcaaagcttgatgaaacaaaaactacacttcaaaattctcaaatccagttaaataaaagacaagccagttttaatgagcaaatggctttaaaccagaaaaaaattgatgatgggaaaaatcagattgctaatactcaagctgccatatcacaaaatgaggtggaattaaacagtgcagaagctgagatacaggcaaaagaaaaagaattaaattatgatgacaacatgaaaaaattaagttcgacgtacgatgagcttaatagttctctgaatcaattgaattctgagataaacaataacccgtctttgaaagatcagctaaaaccaaaggtagatgaattaaacgggcaaatcgcaagcatatcaaaacaaatagatacacttaatgccagcaaaaaagcattggatgagaatatggcccagttaaatcaaaagaagtcgcagcttgagaatgcaaaagcacaattagctgcttcacaggaaagcataaaagaacaggaattagctttaagcgaagccaaggttcaaggacaaatgcagatagataatgcagcaaaacagctaaatgatgcattattaaagcttaatgataattacaagaaatatgaggccaataaagcagaatttgacaaagagataagtgaagcaaaagaaaaaatagcatcttcggaagaaaaacttaaagatttaaaaaagcctacatggtatatattagatagaaaatctaacataggctatgtggagtacggggacgaagcagacaggataaaggcattaggcaatgtatttcctaccatatttttcttagttgcagcgttagtaagtttaacttctatgaccaggatggttgaagagcaaaggacgcagatggggattttaaaagctttaggttatggcaggcttgccataatgctcaaattcgtcatttattcatctgttgcgacaatattaggcggatttgcaggtttgcttttaggttttaacatattgccgaagataattttcaatgcgtacgggatgatgtatacattgccacctgtgattacggaatttaattcatattatgcttttgtaggaatttccgctgcgcttgtgtctactactgctgttgcggcacttgtgtgctttaatgatttaaaagaagttcctgcatcgttgatgagacttaaagcacctatggcaggcaaaagagttctgttggaaaacgtgagatttatttggtctcgactcgattttatgcagaaagtgactgccagaaacatatttagatacaaaaggagatttttaatgactgtaatagggataggtggatgcaccgcactgctgcttactggatttggaatcagagactcaataaatatcattgtgtctaagcagtttaatgaaatcttcaaatatcagatgataacgacttttaaaagtgacgcttctaaagaagatctaaaagagcttacaaatgttataaatagtgacaaaaatataaaagaaagcatcatgcttaatcaatccagcgtcgatgttataaaaggaaatgcgaaaaagagtgcatttctcgtcgtcgcaggagataaaaaccagtttagagattttatagttttgagaaatagaaatacaggtacagagatacccctcaaagatgatggagttgtaataacggaaaaactttctaatatgctaaaaataaaaaatggcgattatatatacttggatacaggcagtggaggaaaagtgaaagttaaaattgatggcatagcagaaaattatctacagcattacgtttatatgagctcatctttgtatgaaaaagtatttaataagaagatgcaatcaaacgagatactgtcgaagataaatgatagttcaagcacgaaagaagatgaaatatctcaaaagatattgaaatcaaaagctgtaatgacggtcaattttatttcatctgttaaaaagacgtttcaggatgtcgtaaacaatttgctgtcagtcgtgttagtcttgattgtatctgcaggtacgcttgcttttgtggttctttacaacctgacaaatatcaatataaccgaaaggataagagagcttgctacaatgaaagttttgggattttatgatgaagaagtttctctgtacgtcatgagagagaattttatcttgacaatcatagggattttattggggtttgtgatgggtgtttttcttcacagatatctcatgtccacagtagaagttgatatattgatgtttggaagaaatattgaaccgatgagtttcttgtattctgcacttataacaatgggattttctatccttgtaagcatcgtagtgcacttccagcttaagaaagtcgatatggtgcagtcgttaaaaagcccagagattgattaa

SEQ ID NO: 50304 - DNA, 384 bp, Thermoanaerobacterium saccharolyticum JW/SL-YS485
atgtatacgatatttgaagaatacagattaatcgacacattagaatcatactttgataaaaagctgaccagccttttagatatgctgtataaaaacgacacagatatatattattcaggtgattttgatccggagggattacagatagcccaaaggctttttaaaagatatcctgacagatttcatttttggaggtacgatgttgaagattatataaaggctttgtcagataaaacattgtttgaatcaaggcttaaaatgatagataaaatcgatacggttcaattaaagcctttaacagataaaatgagattattgagaaaaactggctatcaagagcttattgttgatgacatcattaaagatgtattggcaataatataa

SEQ ID NO: 50305 - DNA, 1488 bp, Bacillus azotoformans LMG 9581
ttggatgtaacgatgaagaaaattatcgaggctagttatttaacagccgatagtgcggcccattatcggacaattttaagatatttttatcaccaacatgaacggatgagagattatatttctccagaagaattactagattatttacgttccattccggtatttttagattatcaggaggaacagcttcatcagcagttagcgcagttagtgaagtggaacaatttaatagcacgtcaggatatgaccaacgcgaaaacgattgaagaatataaaaagaaaagattccgctatcaatgcacaccgtacactgttgaaattgaaagaatgctagtccaattagaaaaaatcggtgatacttttcaaggctctttagagcgttcacaatttgaccgtcttcttcaagcattaacttccttgcaaaccgaaattgagcatgaactgaaaaagccggcggaagagtacatgcggatatgggaggatgtctttcgttattttcaatcgattcgtacaagtacggctgactatattgcttatattaatagcgaacagacggaccaacggatgcaaacggaagcttttctagtctataaaaaccagtttacaacgtatttgcgggattttattgtgtctttacaaaaaacttcattacaaatccagcaacttttaacggaattagcaactgaaaaaatgcaaccctattttcaaaaactaattgatcatcgcatgtcaattccgcgtctcgaagatgtatcgacttcaaaagaagattggttgcttgagtatacagaatattgggattctctaagacagtggtttttaggttcgatacatcatcaaagtgagctcgatgtcctgcagtggcaaacaaatgaaatgattcgcagaatgacaaggtatgtgcaacgaattggcgaaaggcagcagcatttccgtagccgtaaaaaggattatttgcaactggcgaaatggtttggggagagcaagaacttgagcgaagcccacaagttatctgctgtagtatttggctcgatgacaatcaagcatcttcagcttgaggaagggactacggaaaatcttcacgtagatccatgggatgaaactccaacagagctaacgattaaaccgcgaacgacacgttatcgggaaaaaacaaagccgggatcgtttcaggccaatgacgaaaagaaaagagaacaacgtaagaagtacttagaagaacgcggccaagagaaaagaataatcgaaaaatatgtgacacaaggtaccattgaactgtcttcattatcaacagttgagccattcgtgcgtaaagtgctcttaggctggattgggaaatcaatggcaagtaaagatcgcatcgtgaagacagattatgggttccatgtaaaagtcaaacttaaacaagatcaaatgataacgttaaaagcagaggatggcgatctcacaatgccgaatgcaaccatagtatttgaagaaataaggtga

SEQ ID NO: 50306 - DNA, 1161 bp, Bacillus azotoformans LMG 9581
atggaacaaacgcaactttttgatgaaaaagcaattcagggaatggacctattgttccactattattggattttgcgggcagaccagcccgaatggtatcaattaattcgtgaacgcgaaaaagtactgcgccgctatattagtgagaagtttggcttacgcttaatcatccatcagcattttattaaattggaaaaaattccagtagaacctgaaagttggatggggattcaagactttcaagaacagatggattatgcgattttttgctgtgctctttcttttttggaaggaaaagaagtggatgaacaatttcttctatctgagttatgtcaagatatccaagccgattatccaagtgagtttccgttagattggacggtgtacatccaccgcaaatcattgattagggctgtcaaagttttgctagattttcaactcattcgcacgattgatggcgatatcagccgttttgaccacaatgaagaacaagaagtattatacgaagcgactgtgtacagccgttattttatgagaacctatccggatgatttttctaattatgaacattgggaagagctgctgcatgatgattggaagcttaatcaggaggatgaacggaggaagcgagtataccgtaaactatttttctcaccaggcctgcagcgtcaggaccaacaagatcaagattttctatatattcggaatttcagaaaccgcttagcagaagatattgaaaagcatagtgactataagctgcatgtctttaaaaatactgcttttttatcaatttcagaagcgagacaatatcatcagctttttccaaatacaaaggcatcaacggatctaattttgcagttatctagttattttcatagaaatctacaacgttttcagcctaacgaaaatggggaattattgctgacgattggggaatttgaacaaatcattgatgatgtacggaaccgatttggtataggatgggcgaagtattttcgggatatgagcacaaatgcgatttgcagtgaactcataagtgcgatgaacgagtggatgatggttgaggaggactcttcctttattcggattcgaccactggttgggatcataacagggaagtatcctgttgattttgaaggaggagagaagattgatgactga

SEQ ID NO: 50307 - DNA, 4143 bp, Bacillus azotoformans LMG 9581
atgactgaatctaaatggattatgcacagggcgggtctattaaatttttggtattacgatgatgagatttttcaatttacggagggaaagcttttgcttcgaggcacgaatgggtccggaaaatcggtaacgatgcaaagcattttacctgtattattggatggaaaaaaatctccggatcgcctcgacccgtttggttcaaaggcacggcgaatggaggactatttacttggggaaaaagaagtcgttgaccgcgatgagcgcaccggctatctctttttggagtataaaatggtggacgttgaaaggtacattacaacaggaatcgggatgcaagcgaaacgcaataaaggcattaagtcatggtattttgtgataacagataatcgcagaattggttacgacttagaacttgcacataatcagcttggagaccgcgttcctttttcggcaaaagaactagaaaaccgcattggtcaaggcggatatgtagtccattcacagcgcgagtatatggagctagtgaacaaatatatttttgggttccaatcattagaagcctatgaggacttaattaaactattaatccagctaagaagtccgaagctgtcaaaggattttaaaccgaccgttatttatgagattttagaatccgcccttccgccacttacagatgatgaactccgccatttatcagatacaattgaaaatatggatcaaacagagcagcagctagagcaactagaacgggaattcgagtccagcagtcgtctagtaaaacagtatgatctatataatcaatacatcttggcggaacgttccggtttatggctgaatgcaaagaagcggaaggaagatgccggcaaggaagtagagcggcttcatgctttggatgaacagtatcaggcagagatagaacaacttaaagcagacaaaaaccgcttcacaatacagaaggaagtcgcagaagctgaaaaagagcggctgcaaaaccatgaagtttggaagcttgaaaaagagatcacaaagaaaagagagctagttgaccagttaagtcaagaaatcaaacttttagatgatagatggaataacaaaaatgaacagtatcgcaagacaagggatgataaagataaaacggaagatgaactgggcgtacaacaaaaagaaatgactgaaattcttgaagagttgagattggatgccgaggaatcagcctttcaacagcattcagtcaatgcggaagattttgaacgccatcaacaggctgaatttgatttctcggtttggattaaggaaataggagaccatgaacgattattaacggcattgcaacaattagtcgatgaacagtcaagattacttgaggaatatagtagattagaacgtcaatcttctgagaaaaagaaagagattgatgaagtccggaaaaatcttgaccaccttgaagaatggtttactgaagtgaaacaaaagctggaacatctcgtgttcacctggattgaacaacatccaaaacttgtcttttcagcggaacagatacaggaaatctctcgtgccatcgaaggcttatacgaagaaaatcgctacgaccttgtccgtgaaaaactgttccatgttttaaatgattatattacccaactgaaaacggatatgaaattaacggaaaatacgatccaggctaaagcaaaagaaattgaagaggctaaagctgaactacaacattggaaatctttaaaaatgcctaatcccgatcgagcaaaagacactgatgaatcccgtctaaagcttgctgaagaagggcaagcgtaccttccgttttatgccgctgttgagtttcaagaccatgtaacagaagagcaaaaagagcgaattgaagcagcattaaaacaaacaggcttattagatagtctaataacagaacaatcgttatcacctgtccatgatcggataattcgtacggaaccagttgtcctggggtatacattagctgattatttacgaccagacttggatgacgatagtccaatttcaaaaaaggtagtagatgaagtattacgaagtatatcgttggaaccgcaagacggcggatttcatattgatgtggatggtacctattcgattggctgtatggtaggacatgctccgcacgaaggtccatccaggttcattggtcgttcctcgaggaaacgatatcagctggaaaaagtaaaggaatgggaacagcaaattgaggaattggaataccaattggaacaattaactagtgagtggcgagcattcgatcaagcacttaatgatgcggaagaatggaaacagacgatcccaacagatgtggatctaaatgacataaatattcaaattgaaaaagattatcgtcaattagagcagttgaaagaatcgttgcaaaaactagacgatcaatggaaaattgtccatcaaagattggaaaaaatcaagttgcagttgcatcaacaaaaaggtcaactcaatctgtcgttaacaaaagaagtgataactgaagctattgaagcggcaatccattaccgggagcatgttcataaactcaatcgaatctatgaaaaatgtttatttgggcgtaaaagaattcaagatttaataaatagactgattgaactggaagaagaaatggatgaaatcaagggcgagcaaaatagtaaggaaggacaatcaaataaagaaaaagcagagattacatcgattgaacaacaattacaattaaaagggattgatgatattaggagccgcatccaggaagtgcagcatttacttacggaagcggataaggagatgaatcaaatccttcaatcactccctagaaaagaaacagagcgagatatttgcttgaaagacttagaaactgcgaaaacaggctttgagttttggtctaacatggccatagaatgggagaaccttgtaaagacggaaatcatgcgtggttttattaagttagatggcgatctttcagaccccgtgaatttggtatcacagctggaaggaattgcggcaaaacttgaccgctcaaaattaaatgagcaattaacaaaaacattctttaatgaacaagcatttttaacagagtataggatgtttgaatttccggaagaagcggagcgacctgaatggtttgcgaaagattggggcttgtactttgagccttttatcaatgaatggaaccaatacaagagccgacgtttgattcaaatggaatacaaaggtcaacgggtaagtccgtaccatgtccttcattccctacaaaaagagttggacgatcaaaaaggctggcttgatgagcaggaccgccagctgtatgaagacatcatcgttaatacggtcggatcaatcttgagaaaccgaatccagcgtgctgaaaaatgggtacgtgaaatggataagattatggaagcgcgtgacaattcgtctggattgactttttcaatttcgtggaaaccattaaccgctgaatctgaacaagaattggatacgaaagatctcgttcaacttctacaacggaacagtaaatttttaaatgaagaagatttaaaccgtattacaaaacatttccgctcgaggattacgaaggcaaaagagctgatccagctgcgaaatgaaggctcgacgctgcatcaggtattgaaggaagtattagattaccgcaaatggtttacgtttgtgttatcgtacaaacgcgtcaatgagccaaagcgtgagttgacaaataatgcattctttaaatttagcggtggtgaaaaagcaatggcgatgtacattccgttatttacggccgcctattcacggtacaaggaagctgcagccatggcaccttatataatttctcttgatgaagcctttgctggggtagatgagaataatatccgcgatatgtttgaagttgttgaacagcttggcttcaattatattatgaactcacaggcgttatggggcgattatgatacgatttcaagtttagcaatttgtgagcttgtccgcccgaaaaatgctgactttgtaacggtaatccgttatctatgggatggaaaaaagcgctcgctcgtatgggatgaaactatgaatgatgatggtgctcaagaggaatttgttgaggagctcatcacaaatgagtaa

SEQ ID NO: 50308 - DNA, 1290 bp, Bacillus azotoformans LMG 9581
atgagtaagaacgttcaagtttttcgcaatgaaccaggttttataaagctgtttatattgtttaaagaaaaataccgttccctcggaagagttgggggaacggttagtattcgttcttttacagagggagaaatggaatcgattgctggattcatggggttgccagcttatgatttgctagaaaaagggaaagttgcattattagattttgaaaaggcccttctccatacgccctttgcagattattcgcttattcagttaatggaaggggtattggaagaaacgattcttacaaaaaatgaagagcatgaatttaatcgtgaaaagacaagggatttttttaatgtccttaaaacgaccttgcctgaaggggattggtggtggagctggattgaatcaaagcaacccgatacacggtggatttggtctctttacaaacaaaattccgatcaattaatggaatatctacggaatgtttaccaagcttttcttgaacttccgaaggacaattcctttgaaaggctaccgttatttgcccaaagaacaacgggcaatcctcattactttgatcgggatcaaacagccgggaaattgctcattcattgtatgtacgtcgaccaactacaaaatgatggtggaatgggaatgttggagcaaggaatgccaaaatcgtcggaagaagtaaatgaattatttgcacaatatgggttgatgaaagacgatctttggagctttgtcacctgcagtggtttacttgctgaagatgaaaacggaatccatcccgtatggcaagcggcttcggcaacaaatacagtattaaatgtcccaataaaagaattgcttaaagttaataaaatacgacctgtccatggaaataaggtgtgggtcgtcgaaaattcaggtgtctgctccacaatcattgatgaggtaccatctgcacctataatttgtacacatggtcaattcagaacggcaagctgggttgtgatggatcttcttgctggctccggttactccattcactattcaggagacttagatccagaaggcatatcgatggcacaacgacttaaaaataggtatccaaacaatgtaacgctgtggagaatggataaagaaagttatgaacaagctttatccgaagaagatataacttcaaggctttcaaaaattgaaataataaatctaccagaattggaggaggtcgttaacttaataaaactccataaaaaggccgcttatcaggaagggcttgtaacactgctcattcgagatattttagaaaattaa

SEQ ID NO: 50309 - DNA, 1482 bp, Bacillus bataviensis LMG 21833
ttggattcaacgatgaaaaaaataatagaagctagttatctaacagcggactcggcggcacactatcgaacgattctccgctatttttaccatcagcacgagagaatgagagatttcattgcaccggaagagttattggaatatatgcgccaggttccctctttcgccgattatcaagaagagcagctccatcaacaattagcgcagcttgtaaaatggaataatttaatcgcaaggcaggatatgaccaacgccaaaacaatcgaagaatataaaaagaagcggttccgctatcaatgtacaccttacacggttgagattgagagaatgattgtgcagcttgaaaaattaggagataccttccaaggttcattagaacgatcgcaatttgatcgtctgttccaggcgttaaccaccatgcaaaatgaacttgaccacaacaaatcggctgaagaatatatgcggatttgggaggatgtatttcgatattttcaaacgattcgtaccagcaccgccgattatattgcctatataaatagtgaacaaacagaccagcgaatgcagactgaagctttcttagtctataaaaaccagtttacaacctatctacgagattttattgtatctttacaaaaaacatcgctgcaaatccagcattcattagcagaattaaccccggaacggttacagcacttttttcaaaaattaatcgagcatcgcggggcgattccccgtcttgaagacgtttcatcgtcagcgaacgattggcttaccgaatataaggaatattggttttcattacgccaatggtttttaggatctgccacacagcaaagtgaactagatgtccttcagtggcagaccaatgaaatgattcgccgaatggcaagatatgtgcagcgcattggcgagaggcagcagcattttcgcagccggaaaaaggattatctgcaattatcaaaatggtttgtagaatgcagtgatcgtgaagaggctcataaactatcagcggttgtgtttggctcgatgacaatccagcatctccagctcgaggaagcgaccaccgaaaaccttcatgtcgatacatgggaagaagcacccactgaattaacaataaaaccgagaacagtccgctaccgagaaaaaacaaaaccgggatcgtttatttcgaatgaacagaagaaaaaagaacagagagaactctatttaaaggaacgagagcaagagaaaaggttaatagaaaaatatatgaatcaaggcagaatcacactctcatcgctaacaactgtagaaccgtttatccgcaaggttctattaagctggattgggaaatcaatggctaataaaaatcgcgtggtcaagacggattacgggttacatgttaaggtaatgctagattatgagaaaatgattacattacaagctgaggatggtaatttattgatgccagatgccacattcttgtttgaggagactaggtga

SEQ ID NO: 50310 - DNA, 1161 bp, Bacillus bataviensis LMG 21833
atggaacaaacacaattattcgatgaaaaagccacccaaggaatggacattctatttcatcattattggatattacgcaccgaacagccggaatggtatcagctgattcgtgagcgggagaaagtcctaaggcgctacctggatgaaaagtttggcctgcgtctaattgtccatcaacattttattaaactggaaaaaattccggttgaaccggaaggctggatggggatccaggattttcatgagccgatggattatgcaattttttgctgtgcgcttgcctttttggaggggaaagctgtggatgaacagtttctgctttcagagctatgtcaggagatccaaacggattatccgggagactttccgcttgattggacgctctatacccaccggaaatcattgataagagctgtcaaagtcctgatggaatttcggctcattcggacgattgacggggatatcggccgctttgaccagaatgaagagcaggaagttttatacgaagcttccacatatagccgttatttcatgagaacgtatccagatgatttttctagctttcagcattggagcgagttactaaaagaagattggaaactgaaccaagaggatgaacgaagaaagagagtgtaccgcaagctgttcttttcacctggattgcatcgccgagatcaacaggatcctgattttctctatatccgaaactatcgtaaccgcttatcggaagatattgagaagcacagtaattataaactccatgtctacaaaaatacggcttttttatcgattgcggagccgaggcagtatcaacaggtttttcctaattccaaggcatcgactgatattatccttcaattgtcaaagtacattcatgggcagcctgagcggtttaatgccaatgaaaatggtgaaatgctaatgacggaaggcgagtttgaacaagtagtggatgatttacgaaaacaatttggaacaggatgggcgaagtactttcgtgatatgagtacgagtggaattcgaacggagctgcttcgagcgatgaaggattggatgctagtggaagtggatgccgaaacttcgctaattcggattaaatcattagtaggtgtaatgacgggtgagtaccctgcagattatctaacgggaggtacagaatga

SEQ ID NO: 50311 - DNA, 1284 bp, Bacillus bataviensis LMG 21833
atgagtgacaaagtacaggttttcagggaagaaccaggctttcttaagttgttccggctttttaaggaaaaatatcgttctattgggcgagttggcggcacggttagtttagatggtttttcctttgatgaagtggaatcaatcgctggatttttaggtcagcctgttgaagccattcttaacaatggaaaggtttcattactatcctttgaaaaggaattaccgcaaactggttttgtggaatattcacttattgaattgcttgaaaaagtgctgggggagaccatcctaacaaaaaaccaggaaacgggcattgaagaggagaaagagaaaagatttttcgaaaaattaaggttatcttatccagatggatactggtggtggaattggatggagtcgaagtcaccggatacccgctggatttggtccctttacaagcaggattctgcggggttaatggagagattaatcaccgtttttaaagcgtttcaggatgttccatgtatggcgaataggtatgaaaaactgccgctatttgcccaacgaataactgggaacccgcatttttttgatagtaatcaactaacaggtaaattgcttgttaattgcatgcaggtggatcaacaactaaagagacaacgcgaatcgggaatgccgaaaacaacagaggatctaaatgagttactaggattgtatggtttgatgagggatgatttgtggagttttgtttcttgccgtggattacttgcagaaggtgaaatggggctgcatccagtttggcaagctgcctctgaaacggataccgttttaaacgtaccaataaaggagttattaaaaataaagagaatctggcccgctgtggggaaaaaggtatggattgtcgaaaattccagtgtttgttcgacgattgttgatgaggttgctgaagctccagtaatttgtacacatggtcaatttcgcgcagcgagctggattatgttggatttattagtggaagaaggctgtcatctttactactcaggagatttcgatccggaagggatttccatggcgcagcggcttatggatcggtatctaggtcgtgtcacttgttggcgaatggatctagagtcctatgaaaaatcaatttcagctgaggacatttcgggcaggctttccaaaatagattctatcacatcacctgaacttgttgatgtagtgaacactatgaaaatcagaaaaagagcaggatatcaagaggggttagtatttgaccttattcaagatataaataagacagtttaa

SEQ ID NO: 50312 - DNA, 1644 bp, Nocardia asteroides NBRC 15531
gtgagcggggcctaccacgcggcgggggcgcgccgatccgggacgggtcccccggagccggcggcggccaccactaacctgtctacggtgaccgacctcgccgacggcctgcccagcgccgtccccgccctgtgggacgagcggctgcggttgttctcgttcgcgaccgccgagaagcgggccgactacctgcgggtgctgcgcgccttcgacagcgcccgcgccgcctacgtggtgttgctgcacgccgacgacgtcgccgagtggatcgccagggccgagacccacaccggcgacgcgcccgcgggcgtgccgctgcccgcgggcgagatcggcccgctgctcgagcagctgcaccgctggggcgtgctggaacgcagctacgacggcaccagggcggccaccctggccgagtaccgcaaccggcactacgtctaccagttcgcccaggccgggttccaggcgtaccgggcggtggcgggcgtgctcaccgcccggatggacgacgcgtcgctgtcgcggctggtgctgcccgaactgctcaccgatctgcgcaccctggccgcggccaatcgcgacggcgacgccgagcgggtctacaccacgctgcgcaggctcgacgccgcgctcaccgacatggcggccagggccgcgcacttctacctgtcgctgggcgatctggtgcgcaccaccgagatcaccccggaatcctttctcgcgcacaaggacgcgttgctggcgcacatgcgcgagttcagcatggatctggcccggttcgcgccgcggctggcggccgcgatcggtgaggtcgaggacaccggggtggcggagctgatcgcgcgggccgcgagctgcgacgagcgggtgctgctgagcccggccgagcgggaggccgactggcgctcacgctgggacggcctgcgcacctggttcgtcgccaccgggggcgagtccagcgacacgtgcgaggccgaccggctgcgcgaggccaccatgagcgcgatcgccgcggtgctgtcgctgctgcgccgggtcaccgagacccgccggggcggggtgagccgggaatcggcgctgcgccatctggccgcctggttcgtcgacacgcccaccacgggcagcgcgcacgcgctctacgacgcggtgttcgggctgggcaggccgcgtcatctcgcgctcgagcatcccgacgccgacctgatccccgcgggccgatcctggtgggaggcaccgccgctggagatctcgcgcaccctcgccgaaaccggtcgcgcgccgagcgcgggcgcgcccgcccggatcgcgcgcaacgacgccggtatccggcggctgcgcgaagcccagctggccgcgcagcgggaacgcgcggcggccgcggcgtcgctggccaccggcgccgtgcacgagcgggtgctggaccggcgcgagaccgaggtgctgctgcgcctgctcgacgcggcctcgaccgcgtgggtgccggtgagcggaaaagtcgacggcacaacgggttccgacaacggcgtcacactgacggtgcgaccctgcgacgggtccacggtcatccgcaccgcggccgggctgctgcacctgaacaaccgccgcctcgaggtcaccgcgacgacccggcgggggacgccgcgatga

SEQ ID NO: 50313 - DNA, 1377 bp, Nocardia asteroides NBRC 15531
atgagacagcaacgccgcatcgacgccctcgccctggacagctaccagcgcgcggcccgggtgatgctcgccaaccacctggtcacccgggtctacccggaccggatcgcgctgccgctgatccggcgctgggccaccgaactgcgcgaggacctggccgaactgttcggctaccggctcgaggtcaccgagaccacggcccggctgtatccggtgcacgaccgcctcgacgactcccagcccgcgcgcagcgtcaacgaccgggtcttcgatcgccgccgctacgcctacctggcgctggcgctggccgcgctgggccgcgcgggcgaccagatcacgctgtccgaacttgccgagcacgtggccgattacgcgagccgcgtcgacggcctggagctgtccaccgagcgcgccgccgaccgggacgcgttcgtcgacgcggtcggctggctgggtacccggggcgcgctgacgctggccgacggcgacgccggcggctgggccagcgatcccgaggccggcgaggcgctctacgacatcgaccggcccgtcgtcttcgccctgttccggccgccccgcgccctgcagcatctgcacagcgtgcgcggcctgctggccgacgagagtgagcaggcgcccgccgagcaggcccgccgggtgcgccgggcgctggtggaacggccggtcgtgtacctcgccgaactcacgccggtcgagcgcgcgctgctgggccaggaccacctggtgagcgaggtcgagtactgcaccgggctgcgggccgagcgccgggccgagggggtcgcgctcatcgacacctcgggccgactgtccgacacccggttccccggcaccggcacgctcgcccaggtggcgctgctgctgatcggcgagatcgccgacgtggtgctcgacatcgaccatccgctgccgctgcgggccgcgcccgacgcgtccagcaccctgctcgaccagctcgacgccgccatcccggcggcgggcgtgttcgccccgctcgccgaggacaccgaatccctcgacgccaccggcgaatccggcgacgaacaggccggtgacgaggagcctcccggctacccgtacctcgaggacgcctgggtgcgcggcaccgtcaccgcgctgaccgaccgctacggcgcgaccttcgccgcccagtggcaggccgatgtcggcgggctcaccaccgaggtcgtcggcctgctgagccgattgcggctggtgcggccggtcgagggtgggctgctggtgctgcccgcgctggccaggtaccggggcgcggtggtcaccgtgcgggtccgccgggccgaggagttgttcgtcacggccgccgagaccgacggcaccgcaacgggagggaactga

SEQ ID NO: 50314 - DNA, 4254 bp, Nocardia asteroides NBRC 15531
atgtcgctcattcacggcggagtgcgcttcgtcccgacccgcgcgggcatcgtcaacctgtgggactaccgcgaccaggagttctgcttcgccgacggccgcctggtgctgcgcggcccgaacggttcgggcaagaccaaggcgctcgaggtgctgttcccgttcgtcctggacgggcggatcgagccgcgcaggctcaacccgttcgccggtgaagagcgcaccatgaagtcgaatctgctgtatcgcaagcaggaatcggcctactcgtatgtgtggatggagttcgcgcgcggcagctgggacgatccggaggtcgtcacggtcggcatcggcatgcgcgccacccgatcctcggacaaggtgacccgctggtatttcgtcgccgacggccgcgcgggcgtggacttctcgctgatcggcccggacgatcgcccgctgacccgcaagcagctggccgagcagatcggcagcgacgccatcgtcgaccggccggtggagtaccgcgccgccatcgacgcgcgcatgttcgggctcggcgtgcagcgctacgaccagctgatcaacctgatcctcacgctgcgcaggccgcagctggccaagaacctcgacccgcgcgggctgtcccaggccctcaccgacggcctgcggccgctcgacgagcagctgatcctggacgcggcccgctccttcagcgatatggaggaagtcgggcgcaccctcgacggcctggtgcaggccgacaccgcgacccgccgcttcgtcgacgtgtaccgcaaatacctcgcggtacaggcgaagacggacgtcgaccaggtccgcgcccggctcgacgcggtgaccaacgcctcgaccgccctgttcgccgcgaccgcgctgcgcacccgccgcgacgccgaccgcaccgcggccgaggtaagggccgaggaggccgaccgcgcctacgagcaggccatcgccgaccgcgagaacctgcaacgctccagcgcctacgagggcaaacagcagctcgacgacctcgccgacgcggtccgcaggctcgagacctccgccgccgtgcaccgcgacaaggccgccgaggccggccagacgctgcagcgccgcaccgaggaggccgagcgggccgccgaggcggtccgcaccgccgcggccgcgctggtccgcggcgaggacgcgctgcgcgccgccgccgaggaagcgggcatcgagtggacggcgccgggcgccgacggccgcggcgaccagctcaccgccaccgtgcgcgggcacgccgaggaacgcgacgccgacgtgcgcgcggtgcgaaaagcgttgagccgctgggaatccctggccgccgaccgcaccagggcccagcgcctggccgaacgcgcggtggagctgcgcgacgccgcggccgccgaggtggcccacgcggaagccgcggtcgccctcgcccgcaccgaatccaccgccgccctgcgtacctggtggcagacccacgccgcggcgttcacgtcgcccgccgacgagcccgggtccaccggcgatctcttcgccgcgctggaatctgcgctggccgcggcgggcaccgacgacgcgccgtcaccacacgaggtcctcgcggagttctgcgagcccctccaggaccggatccgtacccgcaggcaggaagccaagtcccgggccgccgcggccaccacccgcagggaggccctggtcgccgagcgcgagcaggtggccgccgaacgcgacgacgcgccgccaccgcacccgaccgatgcccgcacgcacgacgatctccccggcgcgccgctgtggcgtgcggtccgcttcgcggacacggtgaccccggccgaagccgcgggcatcgaggccgccctgcaggccaccggactcctggacgcccggatctgcgacccggccctggtcccggacaccgccggggtccgctacctggtcccgctgcccgccaccgatcgccccgccggtcgcacgctcgccgatctgctcgtcgtcgaggacgattccgccgacctgccgatcccggcggagctcgtcgccggggtgctcgcctcgatcgccgtcgacgagtcacttgcggcggacgggatccgcggcgtcccggccacctcggggcacccggtcatcggcaccgccggcatcttccatcacggcctgcacgtgggccgccacacgaaaaccgaggccgaattcctcggcgcgaccgcgcgcgcccgccgccgcgaactgcggcaagccgaactcgacgcggcgatcgaggccgccacgaccgaggtcgaggcggctcaagcagagcaggcttcggccaccgccgactcggcgcgtatcagcgccgccgtcaaagccctgccccgtccgtcggcgatcaccggcgccatgcgcgcggtcgcggaaaccgccgggctcatgcggtcgcgatccgaggcggtcgcgcagaccgaacgcgatcacgatcaggcggtcggcgaggccaccgccatggacaagaagctgcgcgccaccgcccaagcgcaccgcacgcccaccgaggcgcgcgaactcgacgcgctggccgccgccatccggcatttcgagaacaccggcaccggtctgctgcggctgcgcgccgaacacgagcgcgagcgtgaacgcgaacgcgagggcgccgaccggcacgacgaggcgcgcgccctggccgaggccttcgcggaggaggccgaggccgcacggctcggcgtcgccgagcagcagcgcaagctggagacgctgcgggaggcgctgggcgcgggcgcggccgacatcgaccgggaactcgagaccgcccgggccgcgatcgagacggccaaggccgagcagcgggccgcccgcaaggccgccaatgccgcgatcgaagccgtcggtgacgccgaggccgcctaccgcaccgccaacgaggcgctggccaccgcgctcaccgaggtgctggcggaggtgcgttcgctggcgccctacgcccggcccgacctgctcagcctgctcggcgcgtcggtcgagcatcgctggccgagcaccgacgccgcctggtccaccccggaccagctgcaataccgcatcgtggccgcgggaccggagaccgatccggtggtgctgcccgacgaggtcgccgccctctacgtcgatctcgagcgcgccacggcccaggtcaaggccaccgaggcggggcgcaagtccacccgctcggcggtgaccagcgcgctgcaggagttcgacgccgcgctcaccgcgtcgggccgcgactaccggctgcactgggacgccgccgacgggctcaccgtggtggccgtgcacgacgagaacggccaggccgccctcgccgacttcgccgcccgcatcgacgccgcccgccgcgaccaggagctgctgctcaccgacgccgaacggcgcatcctcgaggacgcgctgctcaccggcctggcccagcagatccacgaacgcaccagcgacgcacgcgaactcatcacccggatgggcgcggagatgaagcagcgccggatgtcctcgggcaacaccatcggcgtgcactgggtactggccgacggccagtccgaggccgcccgcgccatgtgcaagctgctcgaccgcgacaccgccgcgctgagcccggaggacctcggcgcggtacgcgcccacttcgccgccgagatccgggccgcgcgcaccgcccaccccgaacggtcctaccccgagatcctggccgccaccctggattaccgcacctggcgggtcttctcgttcaccctcatcaacggtgacggcagcgaggacaagctgaccgtggcccggcacagcgcgctctcgggtggcgaacagtcggtgtcgctgcacctgccgctgttcgcggccgcgcacgtgatgctcgactccgccgacccgcaggccccgcgcctgctggcgctggacgaggcgttcgccggcgtcgacgacaacggccgcagcgaattgctgggcctgagtgtgcaattcgacctcgacctgttcatgaccggctacgacctgtggatcacctacggccacgtccccggctgcgcccactacgacctcgcccactcgaccgccgagaacaccgtcagcgcgacgctgctggtgtgggacagcggcgagctgctcgccgaacacgacggcggcgacctgaccaccgccctcggctccccgaaccgccgccgcgtccccaacaccatcgagggcggcctcaccctggcaggcatgccgggcgaaccggcgccggtgggctga

SEQ ID NO: 50315 - DNA, 1833 bp, Nocardia brasiliensis NBRC 14402
gtgggcgaccggcccgctactaccctgttcccggtgaccgactccgccgacggcgccgcgaacgccacctccgtcctctgggacgaccggctgcggctgttctctttcgccaccgcagagcgccgcaccgattatctgtgggtgctgcgcgcattcgacagcgcccgcgccgcgtacgtggtgttgctgcacgccgatgatgtggcggagtggatcgagcgcaacggtcaggcgccgcgcaccccgggccagctcggcgcatcgtccgcacccgcggccaccacgtccggcgtcaccgcgcgcggaaccgtcgggaccgataccaccgcgacgctcaccgccgatcccgcgaccaccccgccggaacccgctgacgtcgtgcgccagcaaccaactgaggacaatcgcgctgccgagaacgccgccgacgaaggtcccgcgagcgctgccgcctggtcggatgtccagggcgaccgtccggccgcaccgcgcctgaccgccgcggagatcggcccgctgctcgaccaattgcatcagtggggcgtgctggagcgcagctacgacggcacccgcgccgccacgctggccgaatatcgcaaccggcacttcgtctatcagttctcccaggccggattccaggcctatcgcgccgtggccggcgtgctcaacgcccggctcgacgaggcctcgctgtcgcgtctggtgctgcccgaactgctcgccgatctgcacaccctcgccgcggcgaaccgggacggcgacgccgaacgggtctaccgcacgctgcgccgcctcgacgccgcgctcaccgatatggcagcgcgcgccgcacacttctatctctccctcggcgatctggtgcgcaccaccgagatcacgccggaatcgtttctcgcgcacaaggacgcgctgctcgcgcacatgcgcgaattcagcctcgacctggcccggttcacgccgcgcctggccgccgcgatcgccgagatcgaggagaccggcgtcgaggacctgatcgagcgtgccgccgggtgcgacgagcgggtactgctgagtccggccgagcgacaggcggattggcaggcgcgctgggacgggttgcggacctggttcgtcgcctccggtgcgggcgagtcggtgggcacgaccgaggccgagcggttgcgcgaggccaccatgagcgcgatcgcggcggtgctctcgctgctgcggcgggtcaccgagacccggcgcggcggggtgagccgggagtccgccctgcggcacctcgcgggctggttcacggccgcgccgagcgcggacagcgcgcacgccctgttcgacgcggttttcggactgggcaggccacggcatctcgcgatggaacatccggacgcggacgtcatcccggcgctgcgttcctggtgggaggcgccaccgctggagatctcgcgcaccctggccgagaccggacggccgccctcggccggcgcgcccgcccgaatccatcgcaacgacgcgggaattcgacgactgcgcgaggctcagctggacgcgcagcgcgcccgcgccgaggcggccaaatccctggccggtgccgacgtgcacaaccgggtgctcgacgagcgcgagaccgaagtactgttgcgcctgctggatgccgcgtccaccgcgtgggtgccggtgagcgggcgggtcgcggggacgacgggatccgacagcggcgtgaccctgaccgtgtccgagcatcccggttccacggtggtgcgcaccgcgcacggactgctgcacctgaacaaccgcaggctggaggtgcgcgagacgacgcggacccgcgcgaaccggaacgctcgatga

SEQ ID NO: 50316 - DNA, 1416 bp, Nocardia brasiliensis NBRC 14402
atgatgcacggacgcaagatcgactcgctcgcgctggacaactaccagcgcgccgcccgggtcatcctcgccaatcatctggtgaccaggacctatccggaccggatcgcgctgccgctgatccggcgctgggccacggaattgcgcgaggacctggccgaactgttcggctaccggctcgaggtcaccgagaccacggcccgggtgttcccgatcatcgatcggctcgacgcgggcaagcccgcgcgcacgcccgccgaccgggtgttcgatcgcaggcgctacgcctatctcgcgctctcgctggccgcgctgggccgggcaggcgatcagaccacgttgtcggagttggccgatcaggtcgccgcgtacgcgggccgggtcgaaggattggaactgtccaccgaccgggccgccgatcgggacgccttcgtggacgcggtcggctggctgacccatcgcggcgcgctcaccctggccgacggtgacgcgggcggctgggccagcgatccggaggcgggcgaggcgctctacgacatcgaccggcccgtggtgttcgcgctgttccggccgccgcgcgcgctgcaacatctgcacagcgtgcgcgggctgctcaccgaggagggtgcgggcgcgacgcacgcgcccaccgctgcggacctggccaggcgggtgcgccgcgcgctcgtcgagcgccccgtggtgtatctcgaggacctcgctcccgccgaacgcccggtgctcggacacgaccggatcgtggccgatgtcgaactgttcaccggactgcgggccgaacgccgggccgagggcgtggccttgatcgatacctccggccggctctccgatatccgcttcccgagcaccggcacgctggcccaggtcggcttgctgctggcgggcgagatcgccgaccgcgtgctcgatatcgacaatccgctcgaccggcggcccgcgccgcccgacgcgggcgaggcgctcgccgcacaactggacggcgcgatcccggagtccaccgtcttcgcgccgctcgccgaactgcgcagcgtgttcgaagaccatctggcgcaggatgattcggcggcggagagcgagcgcgacgagtcgttcgaggcgacctatccgctggtcgaatcggcctgggtgcgcgagaccatgcaggcgctcgccgatcgctacggcgccaccttcgccgcccagtggcaggccgacgtgccggggctgaccaccgaggtggtcgcgctgctcgaacggctgcgcctggtccgttcgatcgaggacgggctgctggtcctgcccgccctggcgcgctatcgcggcgcagtggtcaccgtccgcaccaagcgcaccgaggaactgttcgtcaccgcggccgacacctacgggtccgacagcactggcacggaagggaactga

SEQ ID NO: 50317 - DNA, 4185 bp, Nocardia brasiliensis NBRC 14402
atgtcgctcattcacggcggagtgcggttcatcccgacccgcgccgggatcatcaacctgtgggactaccgcgaccaggaatactgcttcgccgacggcagattggtgctgcgcggccccaacgggtccggtaagaccaaggcgctcgaggtgctgttcccgttcgtgctggacggccggatcgaggcgcgccggctcaacccgttcgccggtgaagaacgcacgatgaagtcgaatctgctgtaccgcaagcaggaatcggcgtactcgtacgtctggatggagttcgcgcgcggcaactgggacgacccggaggccgtgaccatcggcatcggcatgcgcgccacccgttcctcggacaaggtcacccgctggtacttcgtggccgacggccgggtcggcgtggacttctcactgatcggtcccgacgaccggccgctcacccgcaaacaactcgccgagcagatcggcaccgacgccatcgtcgaccgcccggtcgagtaccgcaatgccatcgacgcccgcatgttcgggctcggcacccagcgctatgaccagctgatcaatctgatcctcacgctgcgccgcccgcagctggccaaaaacttggatccgcgcgggctttcgcaggcgctgaccgacggtctgcgcccgctcgacgagcaactgatcctggacgcggcccgctcgttcagcgatatggaggaggtcgggcgcaccctggagggcctggtacacgcagacagcgctacccggaccttcgtcgaggtctaccgcaaataccttgcggtgcaggccaagaccgacgtagaccagctgcgcacccggctcgacgcggtgacccacgcgagcaccgcgctgttcgccgcgaccgcgctgcgggaacgtcgcgaggccgaacgcgccaccgccgagacccgggccgaggacgcggaccgcgcctacgaggaggccctcggcgaccgggagaacctgcaacgctccagcgcctacgagggcaagcagcagctcgacgacctggccgacgcggtccgccggctggagacctcggcgggcgtgcacggcgacaaggcgctcaaagcgcgccagaccctggaccagcgggcgcaggaggccgagcgggcccgcaccgcggtgcacagcgcggccgccgcgctgtcccgcggtgaggacgaattgcgttccgccgcagaggaagcgggcatcgcctggacgccgctgtcggaggctgcacgggccgaccagctcaccaccgcggtccggtcgcatgccgaggagcgcgacgccgacgtgcgccaggtccggcagacactcgggctgatggaaaaggcggccgccgaacgcacccgggccgaacgcctggccgaacgcgcccgcgaattgagcgaagcggccgctgccgaggtcgcgcatgccgaggctgcggtcgtgctcgcccgcaccgaagccgcagcggcgctgcgcagttggtgggacgagcaccgcgacgtgtactcccccatcaaggacggcttgttcgaggccctcgacaccgcactggcgcaggccggttcggaggaggcgacggtcgcggaggtgctcgccgaacgcggcgaaccgctgctggacgagatccgcaaccggcgccaggaggcccggggccgggcggcgacggcggccgcgcagatcgccgagctgaccgccgaacgcgaccgcgtggccgcgcaaagcgatgacgcgccaccggctttcgccgcgcgggcgcgcagcaccgcggaccgccccggcgcaccgctgtggcggctggtccggttcgccgacgatgtgccgcccgcggccgccgcgggcatcgaggccgcgctgcatgccgccgatctcctggacggctgggtgtgcgccgagccgcccgcgcagtacgactcggatcagttcctcgtcccgctgcccgacgcggaccggccgaagggccgcacgctcgccgatgtccttgtcgtcgaggaggattcggacgcgctgacggtgccgcaccaggccgtcgccgacgtgctcgcctccatcgcgctgcacgagggcaagggcgacccggcgggcggcctcgcggtgagcaccgcgggcggcttccggcagggcgtgcagctcggcaggcaccacaagaccgatgccgaattcatcggcgccaccgcccgcgcgcgcaggcgcgagctgcggctgaccgaactcgccgccgcgctcgaggccgcggccgcggccgaacaggcggccacgaacgacgaggccgccgccacggcggaactcgcgcgaatctccgcggcgggtaaggctttaccgcgcgccaccgcggtcgccacggccctgcgggcggtctcggagaccgcgggcatgatgcgctcgcgcaccgaggccgccgcgcaggccgaacgcgacctcgaccaggcggtcgccgaggtcacggcggtggagaagaagttgcgcgcggccgccgtcaaacaccggacgccacgcgacccgcgcgaactcgacgcgctcgccgccgccatccggcatttcgagaacaccggcaccggtctactccggctgcgcaccgagcacgagcgggaacgcgaacgcgaacgcgagggggccgaccgctacgccgaggccaaggatctcgccgaagccttcgccgaggaggccgaggcggccaagtccggctatcaggagcagctgcgcaagctggaaaccctgcgcgaggcgctgggggcgggcgccgccgatatcgatcaggaactggcgaaggcccgcgcgaagatcgaggcgaccaaggccgagcagaaggccgcgcgcaaggccgccaacgaggcgatcgaggcgatcggcgacgccgaggccgcctaccggaccgcgcacgaatcgctcggcaccgccctcaccgaggtgctcgccgacgtgaaagcccttgccccgtatgcccggccggacctgctgcggttgctcggcgcaccggcggacggccgctggcccagcagcgacgccgcctggtccaccccggagcagctgctgtaccggatcgcgcaggccggaccggaggccgagccgcaggtgctgcccgaagaggtcgccgaactgttcgagaacctcagcaccgcaacggcgtccgtgcgcgccagcgaggcgacccgcaagtcgacccgcagcgcggtcaccgcggcgctccaggagttcgatgccgcgctggccggttcggggcgggactatcgcctgcaatgggatgccgccgacgggctcaccgtggtgcaggtgcaggacgacgacggtatgtcggccctcgccgatttcgccgcccgcatcgacagcgcgcgcaaggatcaggaactgctgctcaccgacgccgagcgccgcatcctggaggacgcgctgctcaccgggctcgcccagcagatctacgaacgcaccagcgacgcccgcgaactcatcgccaagatgggcgcggagatgaagcagcgacggatgtcctcgggcaacaccatcggcgtgcactgggtgctcgccgatacgctctccgatcccgcgcgcgccatgtgcaaactgctcgaccgggacgcctcggtgctcggcgcggacgaattggccacgatccgagcgcatttcgcgtcggagatccgcgccgcgcgtgccgcgcacccggaacgttcgtaccccgagatcctggcggcgacgctggattaccgcacctggcgggtgttctcgttcaccctcatctccgccgacggcagcgaggacaagctgacggtggccaggcacagcgcgctgtccggcggtgagcagtcggtctcgctgcacctaccgctgttcgccgcggcgcacgtgatgctggattcggccgatccgcaggcgccgcgcctactcgcgctggacgaggccttcgccggtgtcgacgacaacggccgcagcgaattgctcggcctcagtgtgcaattcgacctcgacctgttcatgaccggctatgacctgtggatcacctacccgcacgtgcccggctgcgcccactacgatctcgcgcacgccgccgccgagaacacggtgagcgccacgctcttggtctgggacagcggcgaactgctcgccgagcacgacggcaccgatctcaccgccgccctcggttcgccgaaccgccgccgtacccataccaccatcgagggcgggctggaactcactccggtcagctag

SEQ ID NO: 50318 - DNA, 1518 bp, Thauera sp. 63
atgccctattcggacacatcgaccgacctgttccgacacgtcagcgcagacaaggccggcatctaccgcaacatcatggcgagcttcgccgcggcaaaacgccagttcaggctccacatgcgacccgacgaggtgctggccgaagcccggtggagcgatggcgtaccgaagctcgaggaggttcagagcgcgcttgctcagctcaccgagtggggcaacctcgaggcgcaacccgataccgcgcgcgttgccagcatcagcgacttctaccgcgcccgcttcctctaccgcctgtcccatggcggcgaagccgtcgagacggccatcactgccttcgccgaagcgctcggtcggcgtgccgagttgcagacggtcgcgctcgaagacatcgccagccggctcaagaccttgctcgcgctggccgacgcaccggcgctcgatgcggcgaagctgcacgaaaccctgcgcgatctggtgcgcgtgttcgaaagcctcgccgacaacgcccaggccttcatggccggcatggcacgcagcatcgagctgcagcaggccgacgccacggcggtggtcgcctacaagcagcgactgatcgactacctcgagcgcttcatcggcgacctcgtcgggcgttccggtgcgatcgcgcagcacattgccctgctgcatccgcgcatcgatccgctgttgtgggcggccgcgcagcgcgaagcgcgcgacgccgcgcccggggatgaacaagcgcaggccgatgcactctcgcagcggcagcaggcctggcgcgagcgctggaggggcctgcgcggctggttcgtcagcacccatcatgaaccgccgcaggccgaggtgctgcgctcgaaggcacgtgcggcgattccgcagttgctggccgcggtcgcggcgctcaatgagcggcgcagcgggcgcagcgatcgctctgccgacttccgcgtgctcgccggctggttcgcgacctgcggcagcgacgacgacgcgcaccgcctggggcgtgccgccttcgccctcaatccggcccgccatttctcgctgaacccgggcgccggccatgagctgccggccaccacgccgtgggccgaggcgccgccgctctccatccatccgcgcctgcgcgagtacggcgaggccgccccgcggggccccttgcccaaggtgcgcgagcgcagcgaagagcgcgccctgctcgcgcgccagttgcgggaggaacatctgcaggtcgaggccgcgcgggtgcgcctggcgaccggtcgaacgacgcgcctgtcggagatcggccacctcgatccgcacgccttctcgctgttcctgtcgctgctcggcgaggcgttgacggcgcaatcctcgcccgacgacgtggtcgagcgccagaccggcgacggcctgttgcgcgttcgcctcgagccgctggaagcgcacacccgggccgaagtcgtcaccgatgccggcgtctttgccggccgcgaccaccgtatcacgatcaccgccacgcaagcgccctga

SEQ ID NO: 50319 - DNA, 1239 bp, Thauera sp. 63
atgacaaccgacagcaccgcgatcggccagcagcaggccctccatcaacgcgaggagttcaccgccgcgctgcgcgccctgttgatgacgccgctgatgacaccggcacacgcggaattcgccgccgtgcgccgccacgccgatgccttgcgcgaatggttcgtccgcgaggccggctggcccctgcatatcgaacgcgatgcggcgcgcctgtacaagcgtccggccgacgtacacgacgccacgcgtgggctgcccggctacgagcgccgccgctatgttctactgtgcctcgcctgcgcggtgttggagcgcgccgacccgcagatcacgctgcgcgtgctcggcgaccggctgctcgccctcgccgcagacccggcgctggccgcgctcggctttagcttcacgctccaggcgcagcacgagcggcgggagctggtcgcggtgtgccgcacgctgctcgagctcggcgtcctgcatcgcgtagccggtgatgaggagggcttcgtgcacggcggcagcgaaggctcggacagtctccatgacgcactctacgacgtgcagcggcgggtcctcgccggtgtactcgcggcatcgcgcggcccgtccacgtggcccgcggacgacgctccggccacgctcgaggcgcggctcgccgcgctggtggcggagccggtgccggacagcgacgagggccgacgcacggcgctgcgccaccatttggcgcgccgcctgctcgacgacccggtgatctacctcgaccgcctcgacgccgaccagcgcgcctacttcatgaaccagcgcggcacgatggccacccggctgtgcgacgccaccgggctggtcaccgaacaacgcgccgagggcctggcgctgaccgacgaggacggcgagctgaccgacgtggcgatgccggccgaaggcaccgaagcgcatgtcaccctgctcgtggccgagttcctgactgcgcgcgcaaacagccgcgcaagcaccgacgaagtcgccgcatttattgctggcgcacgccagcgcttcggcaaattctggcgcaagtccgcgcgtgaagcgggctcggagcacgagttggcggcgaccgcgctcgaacgcctgcagcgtcttcaactgctcgaacgcgacggtgccgaagtacgacccttgccggcgctggcgcgctttgccgtcggcgaggccgagctcaggccggcggcacccgccaccaccggcactctgttcgattga

SEQ ID NO: 50320 - DNA, 4164 bp, Thauera sp. 63
ttggatactccggataccctgctcgacaccccgtccgaccttgcgacggccgacgcccgcccggcgctgccgcagccgacgctggcccgctggcaaccgcttcgcctcggcctcgtcgagctgttccactacgacagcgaggaattctggttccgcgatggccacctgctgctgcgcggcaacaacggcaccggcaaatcgaaggtgctgtcgctgaccctgcccttcctgttcgatgcccagctcaagccctcgcgcatcgagcccgacggcgacgccggcaagaagatggcctggaacctgctgctcggcaagatcgaccgccgcatcggctatgcgtggatcgagttcggccgcatcgccgacgatggcgagcccgactatctgacgctgggctgcgggctctcggcggcggcggcgcgggcccaggtcgatgcgtggtacttcgtcctcgaaaggcgacgcatcggcgaagacctgtggctcaccagcccggcacgcaccgtactcacccgcgagcgactgaaggaagccttgcacgagcacggccaggtgttcgacaccgccgccgcataccgccgggcggtcgacgagcgactgttccagctcggtgccgtccgttatgcggccctgatggacaccctggtccagttgcgccagccgcaactgtccaagaaacccgacgaaggcaacctctcggacgcgctgaccgaggcactgcctccgctgtcggccgagctactgaccgacgttgccgacgcgctcaaccagctcgaggaataccgccgcgagctgcaggattacgaagcgctggctaaggccgtcggccagttcaaccagcgctaccagcgttacgccgcgatcaacgcgcggcgccaggcccgcgggctgcgcagcgcacagagcggctatgacaccgccagccgcaatctcaacgaagcccgcaccgagttgcaaacctcgcagcacgccgaggcgcgggcgaaaggccgcctcgatgccgccgaagccgcattgctcgccggccgcacgcggctcgaccagctgcagtccgacccagggatgaaggacgcgaatcgcctgaaccaggccgaacgtgactccgaatcgcgagccgccgacctcgtcgacgcgacgcgcatgagtgacgaggcaaccgcccgcctcgagcgcgaacgtcgggcgctcgatgaacggggcacgcgccggacacaggccgaagaggccctcgccacagcacgcgaaggcgtcgccgcagcggcgctggccagcggcatcggcgagccgtggcgagacaatccgctggcggcgcttccggccgccgaactggcaaccctcggcgacctgcccctcgacacggccctccaggatctgcgccaggcaacccaggttcggcgcgaacagctcgccctggtacagcgccgcgtagccgaggtggcgcaggccgaggccacccacgcaagccgacaacaggcccgtgacgaacgacaggacgaagccgaagcggccgccgcccgccgcagcgtggccgacgccgcggtcgagaccgaaggcagccgcgtcgtcgaggcctggcaggcgcacttcgcgaacctgcaggtgctgcaggtggctgagccgccgctgtccgcgctggccacgtgggtcgccaacctgcaaggtgacaacccggcccgtgccgccttgtcgtccgcccagcagcgcgccgccgacgagttggccgggcagcgcgccgcacagctcgctgcgcaaaaaacgctgcacgacgagcaggcgacgctgcgcgccgagcacgagcgacttgcgcagggcgaagacgccaccccgccgccgccttatacccgcggcaccgaggccagacggcaacgggccggtgcgccgctgtggcagctggtcgattttcacgagcacatcgacgccgcccagcgtgccggcctcgaagccgcgctcgaggcggccggactcctcgacgcctgggtcacccccgatggccggctgcaggcggccgacggcgcgccgcccctgcacgacacccagtggctggagcggccacgctgtgacgcctcgctcgccgcctggcttaccccgtccgcctcggcggcaacgcccgcaatcgatgccgcgctgctgacgcgcctgctcgaaggcatcgcctgctccgcgcaagacgacggccgggccgaaggctggatggcccccgacggccgctttcgcctcggcgccctagccggcgcgtgggccaaaccgcaggccacgtacatcggctacgcggcccgcgccgccgctcgagcgcgacggctcgccgagatcgatcttcgcctgggcgagatcgccgacgcttcacgccggatcgacgatgcgctgaccgagcttgctcggcgccaggagcgggcggccgccgaatggaaggacgcaccgtccgacgagagcctgcgcgccgcccacgccgacgccgcggcccgcgagcgcgagttccagactgcgaagagccggctcgacgaagccgagcggcagctgcgcgcagcctgcgacgccttgcaaagccgccgcgatgcgctggccgccgacgcggccgatctgcgcctgcccaccgatgcagcggcgctggaagccgtcggcgccgctctgttgcacttcggcgagaccctgcacgggctcttgcgggtagcgcatgagctacgcctgtcggcaacggaactcgcccgccagcaagcgcggacgagggaagccgaggccgacgcgcgccagcgcgccgagcagttcgccgagcgcggccggctcgcccaggagtcgcaggtgcgcctcgccaccttgcgcgaatccatcggcgcccaggtcgatgagctgcagcggcggctgcgcgaggcgcgcactgccgtcagcgacggcgaacgccatgtgaaggccgaaagcgaagccctgcgcaccgccggcgaggcacgcgcgcgcggcgagcagaaggtgctcgacgccgacgccacgctgcaggaacgcgccgctacccgccaacacgccatcacacagctgcagggctttgccgccaccggcctgctgtccgccgcgctccccgaggccgagctgcccgacctgcgtgcgccctggacgatcgagccggcgctcacgctggcccgccgcaccgagcaggcactggcgcaggtggtggacgacgacgaggcctggacgcgcatccagagccagatctcccacgactacggcgaactcgggcgcgccctcacggcgctcggccagcaggcccaggccgacaccagcgactacggcatggtcgtcagcgtcatctaccagaaccgtccggagcgccccgaccagctgaccgcccggctggctgccgagatcgcccagcgccgcgagctcctgacggcgcgcgagcgcaccctgctagaaaatcacctccaggccgagatcgccgccgaggtgcagcggctcctgcaggcggccgagcggcaggtcgatgcgatcaacaaggagctgaacaagcgcccgacctccaccggggtcaagttccgcctcctgtggcaaccgctgcccgagggcggcgagggtgcaccggtgggcctggaggccgcgcgcaagcgcctgctcaacaccagcaccgacctctggtcggccgaggaccggcgggtggtcggcgagatgctgcaccagcgcatcgccgccgaacgcctgaaggccgacgccgtcggcggcagcctgctcgagcagctcgcccaggcgctcgactaccggcgctggcaccgcttccgcgtccagcgctggcaggacgggcagtggcgtccgctctccggtccggcctcgagcggcgaacgcgcgctcggcctgacggtgccgctgttcgccgccgtgtcgagcttctacagtcaggccagctacgcctttgcgccccgcctggtgctgctcgacgaagcctttgccggcatcgacgatgccgcccgtgcgcattgcatggggctgatccgcgagttcgacctcgatttcgtcatcacgagcgagcgtgaatgggcctgctatgccgagctgcccggcgtggcgatctgccagctgcagcggcgcgagggcattgacgcagtgcatgtgtcacgctggacctgggatggacgggcgcgccggcgtgaagacgatcccgatcggcgctttccccccgaatga

SEQ ID NO: 50321 - DNA, 1194 bp, Thauera sp. 63
atgaccgtggatgcccgccttcaacggctgctcggcggcgaaccccttgcggcgctgcgcaagcggctgcgccaacgctatgcgcgcggcgcgccggccgacgtcctgcgtctgggctcgctgagcgaggccgagcatgccgccctcgcggcactttccggccgaccggcgcgccctgtgcggtcgatgcagatcgacgtggcggagatcgacgcagcgctcgcccgggccggtctcgcctcgtccttgcgcgatgcgctcgaacaactcgacggaccgatcatcgacgccaaggccgaacgcctgcacgttcgctggcaatggcagcaggtggtcgagggctgcgcacaccccggcctgcgttcggcgctccagacatccgtcggactcgggctgctgaagcgcttgtgtgccagccagcccgaggccggcgcccgcttggtcctcgacgctgatcaagtgttgcggcggctgcccgcaggggggattccgcgggcgcagctggccgttgctactctcggtaatgcgcacgcgctcgacgccggcagcccggtcgccacgctggtcctctcggccctgcgccagggggccgcgcccgacgatgacgccgaccgggtacgggacctctgggccgcggccggcgtgctggtcaatgagctggcgcggcctgcgctgaccctcaacctccccggaccgacgggcaccgaaccgggcgaaccgacctatttctcgctacgcagcctggtacgatcgccgccggcctgggccgtcacgggccgcccggtcttcatctgcgagaacccgaacctgctcgcgatcgccgccgaccagctggggctgcgctgtgcgccgctggtatgcaccgacggcatgccggccgcggcccagcgcctcctgctcacgcaattgcgtgtcgccggagcaacgctgcattaccacggcgacttcgactggccgggcctgtgcatcggcaaccagatgatccgtgagcacgacgcccggccgtggcgcttctcgaccgccgactatcgcgcagccgtcatcggcgcaccacgtcccggtcgcctcctcgacgatgccgccgtcaccgcgctgtgggacgacacgctcgccggcgcgatgctcgccgaacgactggcgatcgacgaggaaggactcgccgacgtgctgctcgacgacctgcaacattgctga

SEQ ID NO: 50322 - DNA, 1488 bp, Desulfotomaculum hydrothermale Lam5 = DSM 18033
atgaataacaacttattgaaaccaattgttgaattaagttatttaaacgctcaaaatgttgaccgttatcgttgtattatgagatgcttttacgagcgccaccggcgactacaatattggctgcggccggaagaagtatacaaaggcgtcttatcttacgggttgctggaaaattatacgatggaacaatgccagcaggacctcaatcagttagtggagtggaaaaaccttgttccccaacacgatggcggccgctctaccactgtggaagaatacttgcgtaaaaaatttcgttatatgatgacaccttactccgtggagattgaacgactggtggtaaacctggagaacatccggggctacggtggctcactggagccttcccttttcgagagcatcgccttgtcactgcaaaaaatgaaggaactccccccggaaattactccccaagaagccctggccctgtgggaaaatatttacgaaacctttaccaagcttaccgaaaacgctgccgactatattgccagcctgcagagcagcaaaaccgaagaactaatgcaaacggaagcctttttggcctataaaaattctgttaccggatacttacagggttttgtccagggcctgcagcgccatgcctatcgcattgaaggactcctccccctgttccagccggaatttctcagggatttctttcataatgtacgtgatgctctggcctctcgcccccaattggatgagccggtaactccggaagaatacatgcaccgcttgcagacccaatggcacagcctgaaccgttggtttcttggtgaacccggcgaaaaaagtgacgtttattatttggagcaaaccaccaaagataccattgcccgcattgtgcgggccgccctgcggattcaggaaagacgccgttccggcatcagccggcggcgggaactggactacctgggacagtggtttttctccctgacttccatcgaggaggctcaccgactggctgcctacgcctttggcctgtaccgctgccgccactttcagggagaggatgataaggataccgaatctaccgatatctccatgtggcaggccggccccaacattcgcggtttgcgttcccgcagccggaaaaaaggccgtagctccggcccggacccggtgaaaagccagcacacacggcaacaaagggctaaggaagaatacctggctcagcagcaacggcaggcagaattgctgcaaaaatttctggcccaggggactgtaaccatttccgatttagacactgtccccgctgccaccaggcaagtgctgcttagctggatcggcctgtgtctggccaataagtccaggcaaatccgcacaccggacggcatcgaaatcagcctcctactgccggatcaccgacagcgcaccattttgcactgtgaagacggggagctggatatgcccgactataccctttacttccgcccaaccggcgaccaataa

SEQ ID NO: 50323 - DNA, 1179 bp, Desulfotomaculum hydrothermale Lam5 = DSM 18033
atggcccgtatagcccgtaataatcaggaagaaataaagaattgttttatcgccttgctcaaccgcccctgggtgaccaaggcggatgacccggaattataccagagcattcgcagtcattaccaggagctcagggactggtttcaagaatattgcggtttcagcctgctgttaacgaggcaactggccaggctggagaaatttcccggccaagcccatgcctggatgggtttggaattattcagtgacccattggactataccctttttacctattgtctctggtacctggaaggtaaaaatgaaacagaccaatttttgctcaccgaaatgattgaagaaatcaaaaaccatttgatcggctcccaggtatcgctggattttaccatgtaccaccaccgtcaatccatgtatcgggcccttaaacagttaaagacacttaaggtactggtggcggtggacggggatgaagcggaatgggcccgggtaggtaacgacaaaaacgttctctacgagtgctcccctttatcccgctatgtactccggcattttccgcaggatttgaccacctatcaaactccggcatccctgggggaattagcttatcccgatgaccaggaaggacaagttcgccgacgccgacacagggtttaccgcaggctgctgcaggaaccggtggtgcacgactgggaatggagccaggatgaacgctattacgtactgacccagcgacataccatcctggaacacctgtccgctcgctttggtctggaaggccggcgttaccgggaaggattgatcttttttcaccccgaccactcggcagaaatagaacttttccccaccgccaaaaacatctccgatctggtattgctgctggcaggagaaatccgtcgcctgctgaaccagtcggataccggcatttatacagatgaacgcgggtgtatcccgctgaccctggcggagttggagggactgctgctgcgcctgagggaaagacacaaatcactatggagccagcaattgcgtcaagccaagagcaatgaactggcccaggaaatactggcgcacttaaccgattggggtctggctacggtaaattcagagcaaataattttacttaacccggccctgggccgttggaacggaaattatctaacagatgaggatgaggaatga

SEQ ID NO: 50324 - DNA, 4086 bp, Desulfotomaculum hydrothermale Lam5 = DSM 18033
atgatgcgcaaccgctggcaaatgaatctggccggtatttttaatttctggtattacaccgatgaagttcagtttaagttaagcgatggccgcctggtcctgcggggggccaatggttccggcaaatccgtaaccatgcaaagctttttgccgctggtgctggacggcaataaacgcccttcccgtttagatccctttggttccaaggatcgcaagatcgactattacctgctgctggagccggatagcggtattcaagaccggattggttatctttatctggaattttatcacccggaacaacagcgctaccttactattggtattgggcttagggcccgccgcaatgccaacaccggtttctggggctttgccatcacggataaccgtcgcatcggcaaagatattctgctttatgaaagggactacagccaaggacaagagcaaaagatccctctcacccgttcccggttggaggatgtcatcggcgaaggcggacaagtggtcaccgagcaaggtaaatatatggaaatggtcaacaaactgctctttggctacggcgatttacaatccttccaggagctgctggacttgctgattcaacttcgcagtccaaaactgtccaaggatttcaaacccaccaccatttatgaaatattaagtaacgccctgcctcctctgcaggatgatgaactgcgcccgctgtcggaagtcatggaggatatggaccagattaacgaccgcctggaggaggtctgcctgcaccgccgggaagcagaaaaactccagcaggtgtataaccgctacaataaatacctgctctaccaccagtccagccaactgctgcaggccaaaaggcagtgggacaaccagcagagcagcacccaggaactggaggctaaactgcaagagatctcccgctctttacaggaacgaaacgagcgactaacagaacaatccaccaaactcctggaggttaatgcccggcaccaagtgcttgctgcctcggaggtgctggaaaaacggcatgaactaaaccggctgcgggaggaaaaagagagaaccaaccggcaggccgaacggctggccaaaagcctgatgtactggcaaggtaaacaaaaggaataccggcgggatcaagagaagtacaccgctgaagcggcggaatataccaccaggcagcaggcgaccctggctgatttagaagacattgcccgggaatttgatttttcccggcatgatgtgtaccaccgccggtgggatcgggatatgccccgggaattcaatcagtggcacaactggcagcaggatttgtccgaacaggagcggcaaattaaccaagcgctggaaatagcccgtcgggtggatcacaaaaagtatgagcgggatctggcggagcgggaagtgggtaatgcccgtcagcggcgggataccgctgaagaatcctaccgctttgaagaagaaaactgcgacctggtgcaaaaatcctaccaagaacaaatctttgcctggcgcaaaaatttactggaacttcatcttagcgatgaggaactacaaaaaactctgcaccgcctctccctgttcccggaagtctcctacgaatccatcaaggaaccaatgctggaggccttcgaccaccgttatttggatttgcaaaaacaaaaggtggcactggagcaacaaagagaccgacaccaggaagaacagaatcaactccgggcagcctggcaggaatggaaaaaccataaggagccggaaccgccccgttccgccgcccgggagctgtcccgccgccagcgcggcgaaggtgcccccctctatgcactatgcgagtttcgcgaaggggttagcgaagaacttaaagcctccctggaagcggccctgcagcaaagcgggttactggatgcctgggtcagcccccagggactgggtatcctggggactaatgaagaggaaatctggattgctcctaatccacaattctttggttacaccctggctgattacctgtaccccactcccccggaggatggctcgctgaaagctgaaatcattgaccaaatcctccgcaccatcagcctgggagacatcagcagcggggataatgtgggtgccgccgttaacgagcagggctattttcgcctgggagccctttgcggcaaggcggcggccaaggaacgggccgaatttatcggtaaagaaaccagacaccgcacccggctggccgaaatggcccggctggaggcgctgatggaacaagaacagcaaaatattgatgattgtaaccggcaaatccaccggatcgaggaggcactgacccgactgacccaggaaaaatcctgcttccccgccggtgatgaactgcaagaagccttctccagattggcccaggccaggagagaaatggagtctgccctggaggaagaaagacaaaaggtggaacttttccgccaagcatcccaggcctatcaggagactgcagccgaactgcacaccttcatgcagggttggaccattcctaaaaataccgccggcctgaccgctgcccgggatcaactgcaaacctatcgccagctgcttggtgaactgcattcccactggtccagctactgcatgagccaggcagctttagaccgggccctggctggattggccgaagcagcagaaaagattgccgaggaaaccgatgaactggcgtccctgcgagaaaccttacaccaaattaacgcccaaatctcagcctttgaacaagcccttaaagatttgggcattgaggatatcgaccggcaactaagagaactggagcagcaacgggatgcattgcaaagggaaattaatgccctggataaagaaattcgtcagctagaaaaagagcagggcatcgaggaaagcaggctgtccgctgcccgggaactgttaaaagaaaaagaaactgcccttaaccaggctcggcaggcctggctctgcgaatggaaccggcggttggtggcagattggtcagaagtcaccgtttccgaagccaacctgcccggtttataccgtgtggctcagcaggtgctgcaacaatatcgggatgaaaaataccttcagaagagcaaggatagcattaccaacgacctgtttctggccttccaggaatgccgcggcaatctgcacccctacggacctgagctgatgctggacgaagagcaccggcggaacctggtgctgtttatgcgggaccggcataatcccttgccaccccaggccctggtacaggaactgaaaaccactgaggaagagcagcgattgcttttaagccaaaaggaccgggaactgtatgagcagattatcatacacagtgtagggaaagccattcgctataaaatactgcgggccgaacaatgggtgcagcaaatgaaccggctgatggaacagcgggatacctccagcggcctgcgcttacacctcaagtgggaacccaggccggccgccaatgaaaaggaactggataccctccagctggttaatttattaaagaaagacccccaaatgctgcgaaatcaggaaatagaacaaatgattgaacactttcgctcccgcatcacctgggccaaacaggaggcagaccagcatgataccctgcgccagtggatttaccgactgctggattaccgggagtggttccggtttaccctctattatgaaaagggcgagcagtctcgcagggaacttaccgacagccgtttcaatgccttaagcggcggtgaaaaggccctgtctatgtacatcccattgtttgccgccacctattcccgctacaacgactgtcgaccggaagcccccaaaattatttccctggacgaagccttcgccggtgttgatgatgaaaacatgcgggatatgtttgggctgttaacccaactggattttgattacatgatgaccagccaggttctgtggggttgttatgatacagtaccaaagctgtcggtttatgaaatctaccgtcccaaagatgccaggtttgtgaccttgattcagtattactggaacggcttccggcgtatgctggtggatgaaagtatggtggaggagaatgcttga

SEQ ID NO: 50325 - DNA, 1290 bp, Desulfotomaculum hydrothermale Lam5 = DSM 18033
atgcttgactatttgcgccagccttgttttgagaaactgtttaacctggccaggaaaaagatccaatccttaaacggtctccggggtacggttactctggacaacctttccccggtggaccaggacctgatcagcggttttctgggcaagaactgtttggggcggaccaggctaaaaatccctttgcatgaaatagatgaggttctgaaaaacagccccctggaaatgggactataccctttcctggaactatattttaatgaaagaattctgaccagccaggaaatttacgcaacccggaaataccgttggtcccggttttttgcccaactgcaagaacaagcccaaaccccggtaacccaagactggttggctcaactttggcaagggaccggcagaggctaccgcaccctgctggccctataccaggataacccgcaggctgcccttgatgaggctttcatctgcgtaaaagcactggattacttagccacccatcccggtgagaatttacgcattcctgtttttgccgccaaattaaccggtgacccccatgccctggacctggaaaactcgttggggcggctactttattacggtctgctgcacttcttggacaagccggaaacagactatactgccgaaggaaagcgcaccctgttccgggaggccgggcttttggacgatgatgtttcatccaatgtgctggcagccggcctgcgcgtatgccaggctgaccccaggtttaccgtttttgatgtggccaatgccaccggcagccctttaattttacccctgcgctttctggcaatgcccacccgctggcaacccggacaaaaaatttatatgacggaaaacccggcggtattcagcaccattctggatgtctgccctgctgctttcttacccccaatcatctgcggcagcggccagcccagtgtggcggccctcaccctgttagaccaacttgtccaagccggatgcattatttgctacagcggggactttgacctcaaaggactggaaattgccatccgcctggctcagcgctataaacaaaattttcggccctggtgttatgataatgaaacctacctgggggtaccccacggcaaaccggcggctgccaatcaaataaacaacctgagaaagcttgatgtcccttgggacaagcaattggttcaccgcatgtcagagagaaagttgttcgtttaccaggaatcctttatagataaactgataaaccaattcaacaaccggcacctaaagctcgccatcaccaaagagtga

SEQ ID NO: 50326 - DNA, 1557 bp, Streptomyces ipomoeae 91-03
gtgagtgacgagttcgacgccccggagcccccagccccggagcccgtagacgagggcgcgttcggtatcgacgcgttctccctcgacgaccggctgcggctgttccacttcgcctccgccgagaagcgccacgaatacctgtggctgctgcgggccttcgatcgcgggcgcgccaactaccaggttctgctgcatgcttcggacgcggtgggactgctggagcggctcgccgtcgaccaccccgcggcgggcgccgtcggtgccgtcggggggccggccggtgtgcagtcgctgctcgacgcgctctcggagtggcaggtcctggaccggtcgtacgacgggacgcgcgccgcgaacctcgccgagtaccgcaaccgccattacgtgtaccagttcacccaggcgggataccgggcgtaccgggccgtggaggacgtactcggcgcgagcctggaggacgcccagctctcccgcctcgtcttccccgacatcctcggtgacctgcgcgcgctggccgatgccaacaccgcgggcgacggcgaggaggtgtaccgcaagctcggccgtctcgactcggtgctgaacgagatggcgcagcgggccgcccgtttctacttgatgctgggcgacctggcacgtaccaacgacacccggcccgaggtgttcctcgcccacaaggacacgctcctcgcgcacatgcgggagttcaccgccgaactcggacgctacgccccgctgctcgccgaggcggtcgagaaggcggcggccaccggtgtggaccgcatgatcgagtacgcggcggaggcggacgagcggctcttccgcagtccggccgagcgcttggcggactggcgacaccggtgggacggcatcgtccactggttcgcggagcgcgagcacagcgagaccgaacggctgcaggacgccaccgtcaccgcgatccgctccgtcctcgccctgctgcgccgggtcaccgaggcgcgccggggcggggtgagccgggagagccaactgcgccacctcgcccagtggttcacctcctgcgagagcgacgaggacgcgcacgccctgttccaggcggtgttcgggctcggtgcgccccgccacatcgccgtcccgtacgccgacccggagcagattccggggcgtacctcctggtgggaggccgaaccggtcgaactcgcccgcaccctggtccagtccggccgcacccccgccctgcacggccccggccgcatcgaacgcgacgacgaccggcgggccctgctccgcgccgagcagctcaaggagcaggccgagcgcagcggcgccgcgaactccctcgcctcggacggtgtgtacggccggacgctcgacgagcccgagacacgggcgctgctcgccctcctcgacgtggcgctcgccgcccgtgtccccgccagccgccgggtcaccgccgcctccggatccgcccacggggtacggctcaccctcacccccgccgagggctccacgaccgtcgacaccgtgcgcgggcgtctccatctcgacgggctccgtctggaggtcaccgcatga

SEQ ID NO: 50327 - DNA, 1431 bp, Streptomyces ipomoeae 91-03
atgaaccgtgtcgccgagggcgtctccccgctcgaactcgccgactaccagaaggcggtacgcctcgtcctgcggcacccgctgatcacacccgggtacccggatcgggcggcgctggcgaccgtgcgccgctgggccgagcagctgcgcaccgacctgatggaggcactgggctaccggctcgtgaccactgccgacaccgcccggctccagcgcgcccaggacggcctggacgccacccgcccggccctcacccgcgcgggacgccccttcgaccgccgccgttacgcctacctcgtcctcgccctcgcggccctgggccggcacggcgcgcaggtggcgctgggcgagctggccgacgcggtcgccgccgacgccgtacgcatcgacggactcgggctcgacaccgcgcgcaaggccgaccgggacgccttcgtcgatgccgtcagctggctcaccgaacgcggcgcgctcaccctcgccgacggctccgccaccgcctgggccggcgatcccgagcgcgccgaggccctgtacgacatcgaccgggagatcctcctcgccgtccaccacccgacccgcgtcctgcagcacctgacctccgtcaccgcgctcctcgactccggcagcgcgctgggcctgtccgcggggcgtgccgcacagcgccgtgaccaggcccggcgcgcccgccgcctggtgctggagaacccggtcgcgtactacgccgacgccgatgccgaactgctgggtcagctgcgggcgcccgccctcgtcgaggacttggagcgcctgaccgggctgaccgtggagcggcgggccgagggcgtggcgctcatcgacacctccgggaggctgtccgacatccgcttccccggcggcggcaccgtcgcacaggccgcgctgctgctcgccgcccggatcagcgccgccgtccagcgttccggacggcatgcccccgagctgctgcccgcgcccaccgccgccgaacgcctcgcggcgcgcgcccgacgtatcgacgcggccctgccggcccgtggtctgatgtccgaactcgccgagccggacgcggagtcggggttcaagcagtcggcgtacgaggcgcccgccgacgaggggcaggaaccggcggagacgcgttaccccttcgtcacggactcctggctgcggggcaggctcaaggagatcaccgccgagtacggtgcgggcttcgccgccgatctgcgtggtgacccggaccggctgctgggtcaggcgctcgacctgctggccgccatgtcactgatcgcccgggtcgatggcggggctctcgcgcttccgctgctcgcccgctaccggggggtcaccgcccgcgtgagaacccgtgcagcggccgggccgccctcccagaccgccctgttcaccgacgacgccaccaaggaccccactccgtga

SEQ ID NO: 50328 - DNA, 4125 bp, Streptomyces ipomoeae 91-03
gtgagcacccccgctcctactcaggctcccacccactcagcccggttcgttcccacccgtgcagggatcatcaacctgtgggactaccgggacgaggagttctccttcgcgggcggctggctggtgctgcgcggccccaacggatccggcaagaccaaggccctcgaagtcctcttccccttcgtcctcgacggccgtatcgaccccaagcggctcaacccgttcgccgccgaggaccgcacgatgaagtccaacctgctcttccgcgggcaggacagcgcgctcggctacgtctggatcgagttcacccaccgggagaccggtcaggccgtcacctgcggcatcgggctgcacgcccagcggcaccgcgacacacccgctcgctggcacttcgtcgccgacggccgcgtcggggaggacttctccctcctcacccacgacgaccggccgatgacgaggaagcagctcgccgccgaactcggacacgagctgatcgcctccacggccgactaccgcgccgccgtcgaccggcgcctgttcggcctcggctcggagcggtacgagcaactgctcaccctgatcctcacgttgcgccgcccgcagctcgccaagaacctcgacccggccaagctctccgacaccctcaccgccggtctgcgcccgctcgacgacgacctgatcgccgaggcggcccgttccttcgacgacatggagtccgtgcagcgcacccttgaggggctggtcgccgccgacgacgccacccgtgccttcctcgcgagctactccacctatctgcgggtccacgcccgtgccgccgcggaccggctcaccgcccgccgtaccgagaccgccgagcgcgccgccgcgctgcgcaccgccaccgcggacctgacggcggcccgcgagcagcaggccgccgccgaggcgcacgccgagtcggccgacgcctcgctcgccgcccagcgcgcccgtctcgaccaactgcgctcctccgccgcctaccaggccgtcgagcaactggccgacctggaacgcctggtgcgcacctgcgagcagaccgcccggcaggcgaccgccgaccgtgaacgccgtacggccgccaccggtcgcgcccgcgccgaggccgaacacgccgcgcgactcgccgccgagctcgacacggccgtctcccgggacgccgccgccgtggccgaccacgcccacaccgccggcctcccctggaccccggccgacgccgagcccacctgcctcgccgaccgctccgccgcgctcgccgccgcccgccacgagggcgtccgggccgtgcgcgccgcccagcaggcggcacgcggcgccgagcagacccgtgaccttgcccggatctcgctcgaccgtgctcagggggccgtcaccgcggccgagaccgcggagaccgccgccgagtcggctctggagtccgcccgcgaacaggcccgtacggcgctcggtcagtggacgagcgctcatggtgtgcttctctcggaggccggtgccgcccggctcgccgaggccctcgaactcaccggcgaggcggagaccccgggcgagcccgtcacgctcgccgacgccttcaccgaggccaccgcacccgccgtgcaggaactgcgcgacaccctcgcctcactgcgtgcccggcgcaccgatgtcgagcgccgccgtgccgagaccgaggccgaacgcgaccggatcgccgccgaacacgacgacgctccgcccccggcccggggccgtagcctggaaagggcactcggtgacggcgtcccgctgtggcggctcgtcgacttcgacgacgagctgacggaacgtcagcgagccggtctggaagcggccctggaggcgtcgggcctcctcgacgccctcgtcaccgccgaggccaatcccgtggcggccggacacagcgagggctacctccgtgccggcgccccggtgaacggcccgagtctcgccgacctcctgcgccccgagatcccggagaacccccagggcgaggcggccatcccgaccgccgcccgcatcaccgccgtactacgctccgtcgccgtcaccggcgacctcgacgccggcatcccgcacatcggccccgacggccggtacgcggccggtgtcctggtcggcgcccacaccaaggagcacgccgagtacgtcggcgcgaccgcccgtgcccgtcggcgtgccgcccggatcgccgcctgcgagacgctgctggccgaactctcctcccagagcgacgagttggcgcgtacccaggcccgtacggacgccgccttggaggcgtacgccgccgcccgcgccgccctgcctcgcaccaccggcatcacgcaggcgctgcgcgaactcgaccgggctgcggcgcggctgcgcgccacccgcgacgccgccgacgcctcccaggccgcgtacgacgagtcggtggccgcctgctcggtcgccgaacgcgccctgcgccgtaccgcggccgagcacgccatcgagtccgaacgcgtcgacgccgtcgagaccgccacccgcgctttcgagatggcggtccgcgaactcgccgcccgtcgccgcgaacacgcccgccagagcgaggcggccgaggccgccgccgaccggctcaccgccgccgccgaggacgaggaggcggcgacggacgccgagcgcgcggcgcgccgtcggcacaccgaggaggccgcggggctggaggccctccaggaggccgtcggggccgaggcgcaggaggtgatgcggcaggtgcaggagaccgaggacggaatcgacgccctggtccgggaggccgaggcggcccgcacggcccagcacaccgcgatcgcgggcaccgcggcggccgaggcccgccgtacggccgccgccgaggccggggcggtcgccgcggcggaggagaaggacaccgcccgcggtctgcgcccgtacgcggcccgtgaactcctcgacatcctgcgctgcccgcccggcctggcctggcccgcccaggaggccgactgggccggcgaggaactcccgcccgccgtggccgccgtacacgaggcgatcctgaccgccacccgcgacctcacccccaccgagaccagcctcaagcagtccgtcacccgtctcaccaaggccctggacgacctgcaggcgcggctcgccgccgccggacaggactaccggcccgaatgggacggctccgacggtgtcatcctcgtccgcgtggccgacgaggaggggccgctgcccgtggcggccttcgcccagaagatctcctcccaccggcgtgaccaggccgaactgctctccgagtccgagcagcgcatcctggaggacgccctgctcacccggctcgcccagcagatccacgaccgcaccgtcgacgcccgcgacctgatccggcggatgaacaccgacatgcgcaagcggacgatgtcgtcggggacgacggtcggagtgagctggctgctcgccgaccacctcgacgacgaacagcgtgccgtctgcggcctcctcgacgccgacgccgcccgcctcggccccgagggtctcacccgggtgcgcacccacttcgcggcgcagatcaagaccgcccgcgcccgccaccgcgaccagccctaccgcgaactgctcgccgaggtcctcgactatcggcgctggcgccagttcgcgttccagctcgtacgccccgacaggagcgaggagcggctcacccgcgcccggcacagccgcctgtcgggcggcgagcagtccgtgtcgctgcacctgccgctgttcgccgccgcgcacgccatgctcaactccgccgacccgcacgccccgcgcctgctcgccctcgacgaggccttcgcgggcgtggacgacaccgggcgcggcgaactcatgtcgctggccgcccagttcgacctcgacctgttcatgaccggctacgacctgtgggccgcccacgcctccgtgtccgccgccgcccactacgacctcgcgcacaccgccgtcgaccacaccgtctccgccctgctgctcgtctgggacggcgaccggctcctcgccgacgacaccggcgacctcaccgccgccctcggctcaccgggcacccggcgcgccccgacgcccggggaggccgcggttgtcgactga

SEQ ID NO: 50329 - DNA, 1293 bp, Streptomyces ipomoeae 91-03
ttgtcgactgagcagagtgaaggccacgggtacgacgagttgcggggcgagggatggacccggctgctcgccgccgcccgccgcagactggagcgcaccggaggcgcgctcgacggcgacatcgggctcacgaggcccagcgacgccgagcgccgcaccgtcatcggcatcaccggccgctaccgacccgagaccgtggggcgtctcgccgtacccctgcgtgacctggacgggtatctgtacgaccgttacggcacgggtctcctccagaccctcggtcggctccacgggccactgcgcgaccggccggccgaacgagccgacgaggaagcgcgccgcgatcaggcactgaagtccacccactccagtcgactcgccgggcagggatggttcgccgcctggctggaccggatcgccgtcgacggcaccctcacccgtctcgtacgccgcggggacacgccgctcctcgacgcggcggtacgtgtcctggaaaggctgaccggtgacgaggaccactccgcggactccccgaaccgggtccgcggtgtcctgccgcttccggtgctcgccgagtgggccaccggcgacaccaaggcccttgtgcccggcaccccgctcgaacaactcgtcctgcgcgccctcgcccagcgcgccggcgacggccgtgccgtaccgcgcgagcgggccgggcggcgcgccctgtgggagagcgccggagccatcgcggacgacctcgccagccaggtactcgtcctcaacatcggcgccgagggggataccgtggtctgcgactggctgcgtgacgccgccgacttcggcatccccttccggatcaccctccaccagctcgccaccgaccccgtcgtccccgccgcccgcaccatcttcgtctgcgagaacccggccgtactgcgcgccgccgccggcgaactccggtccgccagccgcgccgccgccctcgtgtgcaccgagggcgtcccgtccgccgcctgccacaaactgctcggcgacgccgtacgcgcgggagcccggctgcactggcgcgccgacttcgactgggccggcctgcgcatcaccgcggacgccgtggcccgccacggtgccggtccctggcggatgaacgccgccgactacacggcggcactcggcgagggcgagtccacaccactcgcgggaccgcccgcggccagcccctgggaccccggactggccctcgcgatggaggcatcgggcagcgcggtcatggaggaacgcctcctgcccgcgctcctgtccgacctcacccgtgcctga

SEQ ID NO: 50330 - DNA, 1554 bp, Streptomyces ipomoeae 91-03
gtgcgcagggttccgccggagatgttccggttcacgacggtggagaggtcggatctgtacggggcggtgctggacgccttcggtgtggccggcgagcacctggagacggcgctggggctcgacgcggtgcgcgagcggctgcgcggggtgggctgggcagcggcggtcgaggacgaggaactgcatgaggcgctcaggcggcttgtgcagtgggagctcctggacgtggtgcacaaccacgcggagaactaccgcatggccgaggagtacgagcggcgcaacctgcagtactcgctgacccgccggggcgaggccgctctcgccggagtgcggcacgcgcttgaggttctcgcctccacgggggcgctgcagacggccgtgctggaggcgatcgccgaccggctcgacgagctgtgcctgctgtccggcgagcccgcctcggccgatcgccggatctacaccacgctgcgggagctggaggggcatctggaggccctggtggagaacaccaaggcattcaacggcgaactgcagcggctgctgcgcgccgagggcgccgatctggaggtgttccgcgaggtcaaggccgccaccgtcgcgtatctgcaggagttcctggtcaacctcgaccggcgcgggcagacggtcgccgccgcggtggcccgggtggaggagcgagggaccgccgtgctgcgcgagcgagccctgcgcggggccgaactgccaccggtggccggtgaggatcccgcggccggctggctggagagccggcgggcacgctgggcgggcctgcgggcgtggttcctgccggacgacggggcgcggccccggatcgagcagttgcacgacatcgcccggcgggccatcgtctcgctgctgcaggtcctggagcggatcaacgagtcacggcgccgctcctccagcgccgtgcaggacttcagggagctggcgcgctggttcgcggcggcccccgtggaggaggacctgcaccggctgtggtcggcggccttcggtctcggcccggcgcgccacgctcatctcgcccaccccgacccggagttgatcccgtcgtcccattcctggtccgaggccccgcccgtgcgggtgtcggcgctgctgcggaccagcggacggaccgagcgcttcacacgcacggccagggtgcgggacgtcgcggcggtgagggcggagcgcgccgagcgggcccgcgcggagcgagcggaactcgcgcgtgcctggcgggtgctggagacggacggccccgtgcgtctgtccgccttcggcgcgctggatcccgctgtcttcgaccggctgctggacctgctgggccgggccctgtccgcccggccggacgcgggcggtctgcggcgcgccacgaccggggacggccgggtggagatcgcgctgtctccgcctcccgacgagcgcaccgccgtactgcgcaccgcgaagggcgcgctggccggaccggactacgtcgtccacatcatggcggcgggcggagcgagcgccttcccggccttcggcgccgcgcggcaggaggcggccggatga

SEQ ID NO: 50331 - DNA, 1347 bp, Streptomyces ipomoeae 91-03
atgagcacccttgccaaccaactggccgccgcggaacgggaggaggtcgcgcgcgccatccgtctcctgctggcccgccccctgctgaccgaggccgccgacccggccggcttcgaactggtacgccgccgtcgtgagccgctggcccagtggttcgactacacctgcggctggagcctggtggtggagccccgccgcggttacgcccgcctcaccaaggtccgcgccgacccggacggctcccgcccggcccgcagggcgcgttccggccgggccccgttcgaccgccggcgttacgtgctgctctgcgtgacggcggccgaactgttgtcgatgccgatgacgaccatcggcatgctcgccgaccgtgtcgtgcaggccacggcggccgaccgggcactggccgcgttcgacccggtccaccgggcggagcggacggcgttcgtcgacgtcctcaagctgctggagtcgtacgacgtgctgcgcgtggtggacgggacgaccgaggcgtacgtcgagtcagcggaggcgaaggtcctctaccgtgtggacaccacgctgctgatgcggctgcccgccgcgcccgtcggtgcctcccgcctcgccgtacctccggacgaggtgccggcgcggttcgaggaactcctcacggggctggtgcgggagcgccgctacggcggcacggtcgtcgacgggacggcggacgaggcgcacggcgagaccgccgccacggacgcacaacgcaacctgcggctgcgccactcggtgctgcgtcgcctcttcgacgacccggtgctgtaccggtcggacctcgccgacgacgagctggcgtatgtcacctccctgaccgggcgccagatcctgcgccgctcggtcgagcaggccggcttcctcctggaggagcgagccgagggctttctgctcgtggacccggacggactcgccaccgatgtccgcttccccgacgacacgtccaccgcccgggtcgccgcgctgctccttctggagccgctctgcgccgcgcccgccgggatgctgcccgaacagctcgccgaggccggagcggatctgctgcgccgcttcccgcgctgggccaaggcgtaccagtccgaggacggcgcggcccggctgtccgacgacgccgtacgcgtactgcgggatgtcggcctggcccgccgggccgggggccgtgtcgtcgcgtgcccggccgcgtaccgctaccgcctgacggagacgacgagttcggacccggaagacaagcccggaccggagcggggcgcgagtccgcgcgagacggcaagtgccacggcctcccgtggcgttgtcgcggaaggagaccagcagtga

SEQ ID NO: 50332 - DNA, 4158 bp, Streptomyces ipomoeae 91-03
gtgagcgtgacagagcttccccacccgcggcggccggagtccgtcgagcccgccgaggcaccggcacaagcggcggatgccgcccgcagccgctggcagccgcaccgcgcgggcatcctcaacgtctggcgctactacgacgagaccttcaccttccaccagggccgcctgctgctgcgcggtcagaacggttcgggcaagtccaaggccctcgaacttctgctgcccttcctcttcgacgccagcctccgccccaaccgcctgtccacgttcggcggttcggaacgcaccatgcactggaacctgctgggcgagggcgcctccggcaagacccgcgtcggatacgtgtggatggagttccgccgcgtcggcgacgacggcagcgagcggtggttcggctgcggggcgcgcctccaggcgaccgtgcacaccagcggggcccacgccgactacttcaccaccggcgccaggatcgcccacccggacggtgtgctcctcgtcaacgaggcgggacagccactgacccgggccgccctcgccgaagccctgcgcgaccgcggcgacgtgcacgcctccgccaccgactaccgcacggccgtacgacgtgagctcttcgccggcatgggggagcagcgttacgagtcgctgctgtccgccctgctccagctgcgccagcccaagctgtccgaacggctcgacccgtccctgctctccaccctgctgtcccgtgccctgcccccactgggcgaaggagagatcgccgaactcgccgagggcttcgagcggctggaccgccagcgcgaacacctcaagcggctcgacgacgaggtgacggcggccgagaccgtcgcatcccggcagcgcgcctacgcgcgacgggtcctgcgtgccggttccgccgcgctgatctcggcgaccaccgagatggacaacctcacccgtgtcgcccgccggagcgccgagcaactcgaacaggcgttggcggaacgcgagtcggcccaggcgctgcgcgaggaacagggactgcgcgcgcacgccctggaggagaccgtcgagggcctgcgcgagagcgacgcgtacaagcagggtgaggaactcgaccggctccgccgccgcacggaagacatggcagccgccgccgggcggcagcgcgccaccgcccaggccgctcaggccagggcggaggaggatcagcggtacgccgacgaggccgcgaggcaggcccgcgccctcgacgagcacgcgcgcgaggccgccgaggaagcacgccggtcggcccgggcagcgggtctggagtccatccatcacgaggcgaggacaatcctgggcgctgatcatgtggtgcccctccccgacggcacggggggtgaggcgggcggcagtcggcccgagggctccggcgctgcacccacggtgggcgagaacggggcccggcaggcccgtcggctgctgcggggcgcggtcaccgcccgacggcagcaggtcaccctcatcaccgaggcgatggacgaccacgatcgcgcggtacgcgaccggggcgccgtcgaggacctgctggacgaggcccgtacgcggctcgcggaggcgatcgcccggcgggacgaggcgtccggcgcctgggacgacgccctcgccgcgcagggggaacggctgctcgcctgggccgggggctgcgcggaactgcgtatcgccgaccccggggaactggttgccggggcggcgaccgaggccgcggtgacggccctgaccgaagccgccgcgcgcccgctggaacaggagatcgccaccgcggaggccaccgcccgagccgcacgccagggcctgcgggacgagcggagccgacttgaggaggaggtacgacggctgagcggtgagaccgacctgccgcctgcgcccccgctcacccgcaccaccgtccgcacggcgacggcgggagcaccactgtggcggctggtcgccttccgcgaaggtgtcccgttgtccgtccaggccgcggtggaggccgctctggaggcgtcgggcctcatggacgcgtgggtcagcccctacgacgggatcacgctgccggggcacgacacgcgggccgaggcggccctggccgtggccgcccctgggcccagcctgctggaggtgctgaggcccgaggaggccatccccgtcccggtcgacaccgtgatccgtatcctcgccggtgtcgcgtacggcacatatctgcccggcgggcaccccgcggccgtgtcggccgacggtgcctggcgtctcgcgctcgccaccggtacctggagcaagccggaaccggcccacatcggcgccctcgcgcgacagcgggcccggcagcgcaggatcggtgaactgaccgagcgcatcagcgagacgaacgcctccctcgccgcgctcgacgatcaactgcgcggcctcgccgctcgccgcgcccggctggacgccgaccgcgccgctcgccccgaccaccgggaactcgacgcccggcggcgcgactgggaccgcgccgaggaaagagtggccgctcgggacgacgccgtacgtgacgccgccgggcaactggcacggcgcgagagcgaggtggagggcactctgcgcacgctcagccgccgggccgcggaacacggactgcccaccgaccgcgaccgattgcgtgaactctccgccgacatcgaccggttccgggactccgccgacagctgggtggacgcccgcctcaccgcgaccgccgccgccgacagggcccaccagttggccgcgcaggcggagcgctcgcgccggaccgccggggaacaggccgaggtggcggctgccgccgaagcggaggcggccgggctgaaggcccgcctggaggcggtggaagccaccgtcggcgaggactaccggcagatcgtcgcacgcgtcgccgaggcgcgcgccgagctgcgccgctgccgcgaggaggccggccgggcggccgacctcctgctgcgcctggaagggcgcatcggagagctgcgggccaccagcggacaggacgccgaacgacgggaacaggctgtcgcgacccgggacggcgcggcgcaccggttccggcacctgtgcctggtcgggctggccgaggacgccggcatcacaccggaactcgacgccggggacggcaccaaggccaccttggaggccgcccgtgccacagcggcgaagtggcccggcatcccacacgccccacgcaacctgggcgacgccgcgacccgcctctccgaagcggtccacgaggcccgccggcgcctcggtgcccgcgccgacctggacctggaacccgacgacgacatccagctcttcaccgcgaccctggacggcgtacgcgtgggggcgacgggcctgctcaccacgctcacccaggaacgcgaccgcagccgcgacgacatcaccaccgccgagcggcgcctcttcgaccagatcctcaccggcgacatccgccgccacctcgcggcccgcatccgccaggccggcgaactcgtcgaccgtatgaacgggcacctggagcgggtccgtaccgcctccaacgtcgccgtccaactcgtctgggacgtccgcccggatcttccggacagcacccgcaccgcccgccagctgctcctcaaggaccccggccgggtcaccgagaccgaccgggaggccctgcacgccttcttccgcgcccgtatcgaggaggccaaggacggcgacacggccgcgagctgggaggaacagctcggcgaggtgctcgactacaccgcctggcaccgcttcaccgtccgcctggaccgggcgaacgggaccggctggcagccgctgaccaagaagctgcacggtgcgctctccggcggagagaaggccatcgcactgcacctgccgctgttcgccgccgtcgccgcccactacgaggccgtgcccctggcaccccggccgatcctgctggacgaggtcttcgtcggcgtcgacaccgtcaaccgcggacaggtcttcgcgctgctcaccgcactcgacctggatctcatggtcacctccgaccacgagtggtgcacctacggcgagctgcccggcatcgccgtccaccaactcctcaccgacggggacgacgacgcggtcaccagcgcccgcttcgtctggaacggcaccgacctggaggcgggatga

SEQ ID NO: 50333 - DNA, 1242 bp, Streptomyces ipomoeae 91-03
atgacccacccggaaccggccccgggcgaacgcaccctgcgccgccccgaactccgtccgctctggcacacggtccacgaccgcctctcctccggccgccccgtcacacgggtgcgcctcggaccgctcgacgacgcccaacgcgaagccctcgccgacctcctcggtctggaccggctgccggacgtccggccctccgtggccctggcccggctggaagaagccgtcaccgagctgtgcggccgtaccgtgcgcgaaaccgtcaccgaactcgtgggccccctcgacgaccgggcgggcgaacgacgccgccaggacggcgaacgcgccgaattgtggacatggctggacggccacgacatcgtgcgggctctgccggcgctcgccgactgggtcgcctcctgccgagccaccggtctggtcgacggctcaccggaacgcacccgatccctgctgaccgacgcgctgaccgtgctcgcggagctccccgcccgagctgagcccctgcccgtgttcgccgcccgagtcctgaagggcgactcccacgcgctcgacgacggcacccgcctttccaccctcgtcctgcgtgccctggcgaccctccacgacaccgccccgccacagtccgcggcggaccggcgcgccctgtgggctcgcgcgggtgtcgccgacgacgacctgtccgccaccgttctcgtcggtggactgcgcccgtccggcgacggtccgctcgcccgcgtggcccgcgtctgtgccgaggccgggcaggcggccagcctgaccctcgcccaactgcgggccccgggcgagttcacgctcgatgccgaccccgcgcccgtcgtccacgccgtggagaatcccagcgtcctggccctcgcggtacgccgcttcgggccggactgtccgccgctcgtgtgcacgtccggctggcccaacagcgcggccatccatctcctccgcctcctcgcggaccagggcgccgtccttcgctaccacggcgacttcgacggtgagggcatccgcatcgccgcgtatctcctggacaagacgccggcacgcccctggcgcatgacggcggcggactaccgcgccgcggtcgcccgcacaccgcacggccctcggccgggccgtctgaccgaggcaccctgggaccccgaactcacccgtgccatgaccgaacacggcatcgccgtggtcgaggaactggtggccgacgtcctgctggcggacctggctatgtga

SEQ ID NO: 50334 - DNA, 1545 bp, Thioalkalivibrio nitratireducens DSM 14787
atgtcctacagcacgttcagtcacctggtcgcggacaaggcggcgctgtaccggcgcatcatggccgcctttgtcgacgccaaggcgcatttcaccgtgcacctgcgcccggaagacgtgcgcgagcgcaccggcatcgacacgctcgaggacgtgcaggcggcgctggcacaactggtcgcctggggcaacctggaggccgacccggacacctcgcgcgtgaccagcgtcgaggagttctaccgtgcccgcttcctctaccaactcacgcgcgccggcgaggcggccgaacaggcactgcaggtgttcgaccgcgagctgggccgccgcggcgcgctgcaagcggtcgcgctcgacgacatccgcctgcgcctgcaatcgctgctcgaactctcgaggcaggcgcatcccgacgcgacccagacgcagttgctgctgcgcgacctgacccacgtattctcggacctcgccgaaaacgcccgcgccttcatgagcgggctgtcgcgaaccctggagctgcgcggcgacgaccagcaggcgctgatcgcgtacaaggagcgtctgatcgggtacatcgagcgcttcatcggcgacctggtgaccagttccgccgagatcgccggcacgatccgcgcgctcgaccgcgacgacgacggtcgccgcccgatcaccccgctgctgcggctggcggtcgaacgcgaactcgacgacctcgcccccgacctggccgatccactcgacatcgacgcggcccgggacgcagagcgccggcgcgtaaacgcgcactgggaaggccactgggaaggcctgaaggcgtggttcctggaccggcccgagcgacgctctcaggccagcctgctgcgtgcccaggctcggcgctcgatctcgcagatgctcgaggccgtgcagcggctgaacgagcgccggctcggtcgcagcgaccgctccgccgacttccgcgcgctggcgcgctggttcctcgaatgcgagaacgacgaccaggcgcatcggctttggcgggccgcgttcggcctcggcccggcgcggcacctgggcgtggatgcggaaacgctggcccagtggcgcgccgacccggtcccggcgaaccagccctggcgcgatgctccaccgctgcggatcagcccccggctgcgagcgaccggcagctaccagaagcgcggtgcgatgccccggctgcaacggcgcgaccgcgagcgggcgtttctcgcccagcagatgtcccgcgaggccgccgaaacgcgcgcagcccgggccgcgctcgcaaccggcgagacactgcgcctgtccgaactcgacgggctcgaccccggcgcgttctccctgctgctgcaactgctcggcgacgcgctgagccacgcagcgcaccccgaccatacggtcgccgcgaccaccggcgacggcagcctgcgcatcgagatggagcccctgggggccgacaccgaggcggcgatccgcaccgaagcgggtacgttgtcgggccgcgattaccggatacggatcaccgaactcgaggcggcgccctga

SEQ ID NO: 50335 - DNA, 1254 bp, Thioalkalivibrio nitratireducens DSM 14787
atgcccgccctgccccaaccgctgcccgatgtgctcgaacgcgcccgagccgaagagcgccagcgggcattgcgcgcgttgctgatgcagccactgatggacgcccgccatccggcgttcgcgctggtgcgccgccaccaggcgccgctgcgcgaatggctcgccgccgagaccggctggcacctgcaggtcgagtccgagttcgcccgcctgtacaagaggcccgcggagctgcgcgacgcgacccgcggcgcggccctcggcagcggcacccagaccacgccgttcagccgccggcgttacgcgctcctgtgcctgatcctggccgatctcgaacgcggcgaccagcagatcacgctggcgcgcctgggcaccggcctgattcaggccgccgccgacccggcgctggaagccgccggcctgcgtttccggctggaccatcaggacgagcgccgcgacctggtcgcgacggtgcgcctgttgctggactacggcgtgctggcccgcgtcgccggcgacgaggaggccttcgtgcgcgaccagaccggcagcgacgcgctctacgacatcaaccgccgcatgctggccgcgctcctggtcagcgtgcgcggcccctcgctggtcgagatggaggggccggcgagcgatctcgaagcgcgcctgcaggccctgaccgaatccttcgtgccggacacccaggaagggcgcaaccgcgcgttgcgccacacactgaccgcgcgcctgctcgacgacccggtggtgtactgggacgaactgccggacgacgcccgccagtatctcaccagccagcgcgcggcgatcacccggcgcatcgccgacgccaccgacctggtcccggaaattcgtgccgagggcgtcgcgatggtcgatccggcgcagaacctgagcgaccagtcgctaccctgcgaggggaccgaaggccacgtaacgctgctgatcgcggcccatctggcggaggcgccggagggcagccgtttcacgctcgacgcgctcgccgagcaggtcgcccgctggcgcccgcaataccgcggctactggcgccgctcggcactcgccgccggctccgagcgggcactggcccggcaggcggtcgaacagctccgccgcctgcgcctggtcgcgctcggagccgacgagcagatcatcccactgcccgcactcgcccgcttcgcggtcgaacccgcgcgcagcccgcagggcaagcccctcgccgaggccgccgatgcaagctga

SEQ ID NO: 50336 - DNA, 1863 bp, Thioalkalivibrio nitratireducens DSM 14787
atgcaagcgctgcaacgcctggaccagcgcgagcaccggatccgcgaggaatggcggacacagcccgaggacggcccgctgcgcaccgcctatgccgaggaagcctctgcgctgcgcgcgctggagagccagaccgaacgcaccgaggccgcgcgcagggcgctcgaggcgcgcagccacgaagccgccgagcagcgccagcagcgcgacgaactggccgccgacctggcgcttccgagcgccgacgagccgctcgccgcggtggcccgggcggtcgaaacctatggcgcgggcattcgcgaactgacccgggcgctgcgcgaccagcgaagggaacaactccggctcgaacgcatgcggcaggatctggaacaagcccgggccgaagcgcgacaggccaccgccgacgccgccaccgccgagcgcaacgcccgcaatgcggaaacccagcgcgatacgctgcgcgagaccatcggcgccgatgtcgcggaactcgagcagcggctcgccgaagtcgaacggcgccaagccgagttgaagtcggaacgccagtcactcggccaagggcgcactcggatcgcccgcgaggtcggcggcctcgaggccgacatttcgaacggcgagcagcaactggtggcgatcggcgaccaacgcgcggtggcgatcacgcgcctgcgcgaactcgccgatgccgggctggtgcccatggccaccgccgaccgggtaaccgtcgacccggaactgtcgtgggcgccggaaccggcggtgctgctcagccggcgcatggaacaggcactggccgaggtcgacgaaagcgacaccgcatggcaacgccaccaaaagggcctgcaccagcatttcgcggtgctccagggcgcgctcggccgtcacggccacgatgcgcacatcgagcaacaggacgacctgctgctggtgcgcatcatcttccagggccgccaccacggcccggacgcgctcgccgcgcaactggcacgcgagatcgaacgccgccgcgagctgctgaccgcgcgcgagcgcgaactggtcgagaactacctgctcgacgaagtcgcgagccatctgcagttgcggctgatggaaaccgaacggcaggtccggcagatcaacgacgaactcgccgaacgcccgaccagcaccggcatgcgcctgcgcatccagtggcaaccgctcgccgaaggccagcaggccgcgggcctgaccgcgccggccgggctcgagatcacccgcaaccggctgctgcgccagagcatggacgcctggtccgccgacgaccgacgcgcagtgggcgaattcatccagggccggatccgcgaggcacgcgaaaccgatagcgccggcgccctcaccgacgtgctggaacgcgcgctggactatcggcactggcatcgcttcgtcgtcgaacgctggcagaacggtcgctggcgccccgcctacggcccagcctccggtggcgaacgcgcgctggtgatcaccctgcccctgtttgccgccgccgccagccattacgagagcgcccagcctgccgccccgcggctgatcatgctcgacgaggtctttgccggcgtcgacgacgacgcgcgcgccaagagcatgggcctgctcgcgcagttcgatctcgacgcgatgatgacctccgaacgcgagtggggctgctaccccgaggtgcccgggcttgcgatcgcgcagctgatccggcgcgagggcatcgacgcagtctacgtgtcgcgctggcgctgggacggcgcccaccggatccgcgaatccgacccgcagacgccgatggaagccaccgccggaccggagaaggccgcggaggggcccgccaccgaggagctgttttga

SEQ ID NO: 50337 - DNA, 1245 bp, Thioalkalivibrio nitratireducens DSM 14787
ttgagcctcgaccgcgagcgcctgcagcggctcctgggcggcgccggtaccgaacgcctgcgccggcgtctgcgcgaacgcctcgggcgcggcggcggcgacacgctgacgctcacgcgcagcaccccggaagaacgcgcggcggtcgaacgcctgctcggccgtgcgccacgcagcggcagcagcctgcgcgtgtcgctgccggaaatcgacgcgacgctggcacgcgccggaatcgcgcccggcctgcgcgcagcgctggaggcgctcgacggcccgatccgcgaccagcaggcggaacagcaggccgaaacccggcgctggcaggcactgttcgaagcagtgcgcgagcgcgccgcgcccctcgggctggaaacctggctcgacgaactcgcggcgcgcggactgctgaaacggctggcgcgacgggatccgacgcgcgccgccgcgctgctcgagcagagtctcacggtactcgaagcgctccccgatccgggcctgaaccgcagtaccctcgccgcccgttgtctcggcgacgcgcacggtctcgatccgggccagcccgccgccgcactggtacgccgggcgctgcaccgccactggcgcggcggcatcggcgacgaccggcccgacgagcgcacgatctgggcgcatgccggcatcctggtcggcggcgacatcaccagcaccgtgctggtctaccaactgccggtgcagggcgacacccccggctcgcggatgctgcggattcagaatcaggccggcgagccaacctacctcacgctgcgccagctgctgcggcacccgccgcgctgggattgcgcggaccgcgaagtgttcgtctgcgagaaccccaccgtggtcgcggaagcggcggaacgcctgggcaccgaatgcgccccgctggtcagcaccggcggccgacccggtgctgcggtgtggctgctactggaacaattgcgcgacgccggcgcgcgcctgcagtaccgcgccgatttcgactgggcgggattgtcgatcatgaacagtgtgctcgcgcgcttcgaggcacacccctggcgcatggatgccgcgacgctgcagcgccacgcggaagtttccggcccgcccctggaggggccgaccgcggccgctccgtgggatcccgacctggcccccgcgctcgccgcccgcggcaccgcgctccacgaggagcggctcctggacgagttgctggccgacctttcccgccccccggatccctaa

SEQ ID NO: 50338 - DNA, 1452 bp, Rhodococcus wratislaviensis IFP 2016
ttgaaactgttcgccttcaccacagcggagaaacgcgcggagtacctgtgggtgctgcgggccttcgaccacgcccgcgccaactacgtcgtcctgctccacgccgccgacgtcgcccggattctggacggcctcgccggcgacgatctggccggacaactcggcgccggagacgtcactccactgctcgagcaacttcacgtctgggaagtgctcgaacgcagctacgacggaacacgcgccgcgacgctggccgaataccggaaccggcacttcgtctatcagttcagccaggccggctaccaggtgttccgagccgtcgaggacgctctggcagcccggctcgacgacgcgtcgctgtcccggctggcgctgcccgacctcctcgccgacatgaacgacctggccgccgccaaccgcgcggccgacaacgacctggtgtaccggaaactcaaccgccttgatgcgacactgtcggacatggccgggcgcgccgcccagttctacctgaccctgggcgacctcgtccgcaccacggagatcacgccggagacgttcatgtcccacaaggacgctctcctcacgcacatgcgcgagttcagctccgacctctcgcgctatgcaccgaaactcgcggcggcgatcgcgctcgtggaagacaccggcgtcgagacgatggtggcccgagccgccgccagcgacgagcgggtgttcctcggcatcgacgagcgcgaagccgattggcgcgcgcggtgggcgggcctgacgcattggttcgtcgggagcgaggccggtctcagcgagtcggaacgcctgcgcgagggcacgatgagcgccatcgccgccgtcctgtcgctgctgcgccgcgtcaccgaaacccgcaggggtggtgtcagcagggagagccaattgcgtcacctcgcaggctggttcgccgccactccgaccgaggacgccgcgcatgcgctgttccgagccgtgttcgacctcgggcgtccgcgccatctgtcgatggtgcatccggacgccgacatcattcccgacacacggtcgtggtgggaggcccagcccgtggagatctcccgcacgctggccgagaccggacgtcccccgtcgcccggtctgcccgcgcgggtgcagcgcaacgagggcagcgtgcgccgcctgcgggaggaacagctgaccgcgcaacgacttcgcgccgccgccgcccagtcgctggcccggggcggagtctacgagcgggaactcgacgaggccgaaaccgacgtgctgctcagtctgctcaacgccgcgctgacggcgcgggtaccggtcagcggccgagtgaaaagcagcacaggatcggagaacggcgtgaagctgaccctcagcccgcacagcgaatcgacggtggtgcgcaccgcccggggacgtctgcacctcgacggacttcaggtgagcgttcggtga

SEQ ID NO: 50339 - DNA, 1395 bp, Rhodococcus wratislaviensis IFP 2016
gtgaaggcgcgggagatctcgccgctcgccctcgattcgtatcagcgcgccgcccgtgttatcctgtcgaatcacctggtgacacagacctatccggatcgcatcgctcttcccctgctccgccggtgggcgaccgaactacgcgacgatctgatgacgctcttcgggtaccgactcgaagtcaccgagacgaccgcccggctgttcacggtgagcgaccgactcgacgccgggacgccggccaagacgtccaccgaccgcacgttcgaccggtaccgctacgcctacctcgcgttggcgctggccgcgctcggccgcgccggaaaccagatcaccctgtccgaactcgccgatcacgtggccgccgacgccgcacaggtcgacggtgtggatctgtccacggaacgcgcgtccgaccgggacgcgttcgtcgacgccgtcggctggctcgccgcccgcggcgcgatcgccctcgccgacggtgacgcgggaggctgggccgccaatcccgatgcgggagaggcgctgtacgacatcgacaggtccgtcgtcatcgccctgttccggccgccgcgcgcactgcagcacctccggtccatccgcggactgcttgccggtgcggactcggcgaccgaggacgacacctcggagttcgggacggccaggccggtggacgtgaaggagacggcgcggcgggtgcggcgtgccctcgtcgaacggcccgtggtctacgccgccgacctggacgatgacgaactggtgcaactcgcgctcccccgcaccgcagccgatgtcgagttgctcaccggactggtcgcggaacggcgtgaggagggcgtcgcgatgatcgactcctccgggcgtctctccgacgtccggttccccgggacgggaacggtcgcgcaggtcgcactcctgctcgccggggagatcgccgatcgcgtactggaccccgatgccccggagaccgcccggatgccgctgccgcggggccggtgcgacgacctgatcgaacaggtcgacagcgccattccgcagtccgggatcttcgacagcctcgccggccacgacggattcgaacccgccgaccccgcccccgcggaccggctgttcccggtcgtcgaggacgaatggatcgccggcaccgtccgcacactgaccgaacggttcgggcgcacgttcgccgccgggtggcaggcggaccccgacggtctgggacgcgcggcgctggcgctgctcgagcggctgcgcctcaccgcggcggtcccgggtggtgtgctcgcactcccggcactcgcccgctaccggggtgtggtggtcacgatccgcgaccgcacacccgagatcgacctgttccagagcccagcgaacgacagcgaggaagtcacagcatga

SEQ ID NO: 50340 - DNA, 4158 bp, Rhodococcus wratislaviensis IFP 2016
atgacgagtgcgcgtttccggcccacccgcgccgggatcatcaacctctgggactaccgcgatcaggagttctccttcgccgacggtcgcctcgtcctccgcggtcccaacggatccggcaagacgaaagccctcgaagtgctgttcccgttcgtcttcgacggcaggatcgaaccccggcggctcaatccgttcgccggcgaggaacgcaccatgaagtcgaacctcctgtaccgcggacaggagagcgcgtactcgtacgtctggatggaattctgccgcggcgcgaaggacgaccccgaggccgtcaccgtgggcatcggcatgcgcgccacccgcaccaacgacaaggtcacccgctggtacttcgtggccgacggtcgcgtcggcgtcgacttctccctactcggcagcgacgaccgtccgctcacgaagaagcaactgggcgaacagatcggcaccgactccatcaccgaccggccgctcgactaccgcgccgccatcgacgcccggatgttcgggctcggcgtccaacgctacgaccagctgatcaacctcatcctcacgctccggcggccccagctcgcgaagaacctcgaccccaagggactgtcgcaggcactcaccgacggtctgcgaccgctcgacgagcaactggtcctcgaggccgcccgctcgttcagcgacatggaggaggtcggccgcgcgctcgaggggctggccgcggccgaccaggcagcgcagagcttcgtcggcgtgtacgcgaaataccttcgccagcaggcgcgtacggacgtcgatcacctcgcgacccgtctcgaggccgtccggtccggcatcgccgccctccacgacgcggcggccgaccgggcccgcagccaggagagccgagcggccgccgaggaacgcttcaccgccgccgaacgcgcactcgaccaggccaatgccaccctcgacgcactgaagcgatcgacggcgtacgagggacggacgcagctcgacgacctcgcgcaggctgtctcgacactcgagaaatcgaccgaactgcaggccgagaaggcacgcaaggcgaaggcgaccctcgaacagcgagccgaggagcacgacaaggccggtgacgccgtcgcccgcgccgtcgaggcgctcacccatgccgaggacgagcttcacctcgccgccgaggacgcgggaatcacctggaccgcactccccgagaacgcgcgcaccgaccagctgaccgctgcgctgcgcgggcacgccgaggaacgggacggcgacatccgcgcggtccgggccgcgctcgccaccgtcgagagggccgccaccgagcggacccgcgccgacgaggcggcccgccgaggccaggagcaactcgacaccgcgaaggtggccgttctcgaggccgagaccgcggtcgagtcggcccgcagccggtgcgccaccgaactccgatcctggtggacggaacagtcgtccctctacgccgagatcgacgcgcccgcttcactgttcgactccctggacaccgccctcggccggatcggcgacgacgacgccgccaccctgtcggaaacgctgacggaacagaccacggacgccgtcgactcgctccggctgcgtcgtcagcagtacgaccgcgacgtcgccgccgccgaggaagcgatcgccgaacacgaatcggcccgcgcggccatcgaatccgagcacgacgacgccccaccgctctcggccgcccggcaggacgcccgttcccggctgaccggcgcaccgctgtggcgccttgtccgcttcaccgacggtgtcgacgccgcagcggcggcgggaatcgaggccgcgctggaggccgcgaatctcctcgacggctgggtgaccgtcgacgacgcgctccccgacgtcgaatccgaacagttcctcgtggcccttccggccgcggatcggcccaccggcaagaccctcgcggacgttctcgaggtcgagcaggacacgggtgttcccgacgatcgcgtgcgcgggctcctcgagtccatcgccctcgaatccctcgacctgtgtgaaggacctgtaggtgtcgccgaagacggtgcgtaccggcagggaatccagcggggacgccacacgaaatcggacgcggagtacatcggcaccaccgcacgggcccgcaggcgcgccgcccgtatcaccgaactcgacagcaccctcgaggaaacccgggcgaccctcgacgaaacccgggcgtcggcggatgcgacggcggcactgctgacgcggacgaccgcggcggcgcaggccctgccccgcaccgggtcgatcctcaccgcgctgaagaaggtcaccgaatccgcaggcgcgcttcgcagccgctcggacacggcgaccgcggtcggacgcgaactcgaccaggccatcgccgacctgtccgcgaaggagaagcagctccgggccaccgcgtccacacatcggactccccacgtcgcccgcgagatcgactcgctcgccgcggccgtccggcacttcgagaagcagggcgagatggtgcagcggtgcaggcgcgaacacgccaaggaggtggagcatactcgcgagtccgaggaccgactgcacgaggcgcgcggcaacgcagaggagttcgcggaagaggcggccatcgccgaagaggttctcgcgcaacagatccaacgtctcgagacgcttcgcgacacgctgggagcgggggccgagcagctcgaccggcagctcgaggaggcgcacgcgcggatcgaggcgtgcaagaaggagcagcgcgacgcccgcaaggcggacaaggacgcgggtgaggcgatcggtaaagccgagggcgcgtacaacaccgctgtccagacgctccggctggcgctcacggaaacgcacgccgacgccgcccgcctcgccccgtatgcccggcgcgacctgctcgaactcctcggcgtcgacggcggccacacctggccggcgagctcggcggcgtggatgagtgccgaacagctggtgtaccgcatccagaacgccgaaggcgacaccccgatcctgccgcccgaagtggatgcgctgttccacgcactggacggcgccaccgaatcggtgcgggtcagtgactcggcgcgcaaatcgacgcgcaccgcgctcaccaccgccctgcaggacttcgacgcacagttggcggccgccggccaggactaccgattgcagtgggacgccccggacggcgtgaccgtggtgcaggtgcaggacgacgagggatactcgtcgatcggcgagttcgccgcccgcatcgcgtccgctcgctccgatcaggaattgctgctcaccgaatccgaacgtcgcatcctggaggacgcgctgctcacgggtctcgcacagcagatccacgaacggaccgtcgacgcccgcgaactcatcgcccggatgggcaccgagatgcgggagcggcggatgtcgtccggcaacaccatcggcgtccactgggtgctcgccgacaacctcgacgacagcgcgaaggcgatctccaaactgctcgagcgcgacacctcggcgctggggccggacgagctcgccacgatgcgcgcccacttcgcccaccagatcagaaccgcccgcgccgcccacccggagcgttcgtacccggagatcctggcatcagccctcgactaccggcggtggcgggtgttctcgttcaccctgatcagcggcaacggcaacgaggaccggctgacggtcgcccggcacagcgcactctccggcggcgagcagtccgtctcgctgcacctgccgttgttcgccgcggcacacgtcatgctcgattcggccgacccccatgcaccgcgactgctggcgctggacgaggcgttcgccggcgtcgacgacaacggccgggccgaactgctcggcctcagcgtgcaattcgacctcgacctgttcatgaccgggttcgacctgtggatcacgtacggcggcgtcccggggtgcgcgcactacgatctggcgcactcgacggccgagcacagtgtcagcgccacgctgctcgtgtggtcggatggcgaactgctcgccgaacacgacggcaccgacctggcgcaggcgctcggttcgcccctccgccggcgcgtcccgacgcccgcggagggtgccttcgagttcgcctga

SEQ ID NO: 50341 - DNA, 1482 bp, Anoxybacillus flavithermus TNO-09.006
atggatacgtcgtggctaaagccgattacggaggcgaaatatttagtagtggataacgcgtaccggtaccgcgcgattttacgctatttttatacgcaacacgaacgaatgcggcaatatttgtttccagaagaagtgtacgcttttttaaaacaattcgatgaatttcaagattacacagaagaagagctgcaacaagacttagagcagcttgtcaaatggagaaacttaatcgctagacaagaaacgggtcatattcggacgattgaggaatttaaaaagaaacggtttcgctatcaatgcagcccatatacggttgaaatcgaacgaatgattcgcgcgcttgagcagctaggggagacgttcggtggatcgctcgaaaaaacgcggtttgaccgcttgtatgcgtcgcttgtccgaatggaatcgattatccacgatggatttgccgaaaaaagggaagaaatgaatcaagtgtgggaagaaacgtttgattattttaaaaaaatcatccaaaattctgccgactatattgcctatttaaacggagaaaacatggaagaacggatgatgtctgattcatttctcgtctataaagaacagtttaccgcttatttgcgcgattttatcgtcgcattgcaaaaaacgtcgatgcaaattgaaaaactgctcgaagacttgccagaggacggtgttcgccgttttattgaggaagtggtcgcttaccagcttgccattccacgctttgaaggggcgattctttcgcgtgaacagctagtagaagagaaattagacacgtggcgcagtttaagcgaatggtttttaggacgaaacgggcatgaaagcgaactgtcgtttttacaaaagcagacaaacgaagcgattcggcgaatgacgcgcgtcgttcagcgcttaggggaacgtcatcaccacttccgcagccgaaaaaaagattacttgcatttagcgaaatggttttcttcattagaaacgatagaagaagcgcataaattatcggcggttgtgttcggctgttttcatacaaagcacatcgtcgccgaaaacgatgcaacggaaaatatgtaccgcgatatttgggaggaacagccggcagaatggctcgtaaaaccgcgcgttcgccactaccgagaaaagaaaaagccagaagcaatgattgatctgcggaaagaaaaagaggaaacgatggccgcctacttagcagcgaaacaacaggaggaagaagaactcacacagcttataaacgacggaaaaattgtacttcaggagctaccggtcgttgctccgcatattcgcaaaacgctgctcgggtggattgcaaaagcgatggggcgagaagaccggacggtgcaaacggaaaacggatggaaagtgaaagtagttcaacgtgaagggacgattatactgaaagcagaagatggtacgttaatgatgccaaattacgaaatccatttgctagactag

SEQ ID NO: 50342 - DNA, 1167 bp, Anoxybacillus flavithermus TNO-09.006
atggaaaaagagttcgatgagaaagcgaaagaagcgttaacggcgctgtttgaacagttttggattgttcgggaaaaagagccggaactttttcaaaaaatacgggaacgtgaaaaagtgttaaagcggtatgtgcaagagaaattcggctatcggctcattgttcaccgctattttgctaagcttgaaaaaataccagccgagcccgaagcgtggatgggaatggagtcgtttcaagaaccgctcgactacgcgttattttgttgcttgttagcatatttagaaggaaaagcagtcgaagaaaaatttttattgtctgatgtatgcgaagaaataaaagcgatgtatccaggcgaaactgcgctcgattggacgaactaccaacatcgtcgcgcgttaattcgcgtcttaaaaacagccgagcaaatcgggattatacatcacgtcgacggggaagttgaggcgtttgccaatcaagaagacgaagaagcgttgtatgaagttcctgtactgtcccgctattttatgcggtcctatccgaaagacttcattcaatatgaaacgatcgagcaactgttggaggaagagtggaaaatgtcacccgacgattaccgccgccactttatttatcggcagctctttttatcgcctgtcgtatatcgccggcaaaaagacgacccaaacttttattatttgcgcaacttccgccatcgactgcgcgatgacatcgaggcgcataccgattttcgctacgagctatataaaaacgcagcactattgacgattccagaacggcaacatgtgtatacgttatttccagatcaaaagggaacgtcggatattatccttcattttgcctctgtcgttcgcgctcatttggacaactatccaccggatgaatacgggcaaatccacgtgacgatgtccgattttcggcagttgcttcaccggtgcagcgagcagtatggcgaaggctggagcaaaacgtatcgggaaatgacgacggcacagctcgcctctgaactgctctctgctttaaaagaatggaagatggcagaatatgaacaggaaacgggcatggtcgtgctttatccgctgcttggacgacttgtcggtcaatatccagacgactttacaacgaaaggaagagacgatgatgacgaataa

SEQ ID NO: 50343 - DNA, 4140 bp, Anoxybacillus flavithermus TNO-09.006
atgacgaataaatgggtgcttcatcgcgcgggattaattaatttttggtattacgacgagcaatatttcgaatttgctgacgggaagttgttgcttcgtgggacgaacggttctgggaagtcagtaacgatgcaaagcttgcttccagtcttattggacgggaaaaaaacgcccgaccggcttgatccgttcggttcacgggcacgaaaaatggaagattacttgcttggcgaaaaggaaattgtcgatcgcgatgagcggacaggttatttgtttttagaatataaacgaaagcagacggaccaatatgtgacaacgggaatcgggttgcgggcaaagcgacaaaaaaatatggatttttgggggttcgtcatttttgataaccgccgcatcggtcgcgatttatttttatataaaacggaaaaatcagcggatggaacggaaaaaatcccgctcaccaaacgcgaactggcgaatgtacttggcaacggcggaacggtcgtggattcacaaaaagaatatatggagctcgtcaataagcacgtcttccgctttgaatcgatggaggcgtttcaagaattaattgagctattgattcaattgcgcagcccgaagctatcgaaagatttcaagccaacggtcatttacgagattttagaaagctcgctccccgcgttgacagacgatgagttgcgccatttatcggaaacgattgaaaatatggaccaaacgaaacagcagctagagcagctagagcgcgatgagcaatcactaaaacggctttgtgcgcaatatcgagcgtataacgagtatatgattgcggaaaaagcaagcgaatggataaaggctgacaaacaagtgaagcggctagcagaagaagaaaagcaatggcttgcggaggaacaggaaaagcaagcgcaccttgtcgctttgagcgaatacattcaaacgcttgcaaacgaacaggacgtattgcatcaacgagaattagaattagcgagccacgaagtgtttcaagcggcgaaagaatatgagcgagtccaacaagaaatacgcgacattcatgacaagcaacaaaaactattgcggcaaatcgatgaaaaagagcagctcgaacgccgctataagcgccagttagaagaagacgaagaccggcggtatcagatagaaaagcaactcacgcagcaagtagaagacttacggcatgatgcgatggaaagttccttctcttcccatgctcttaacgaagcggactttgctcgacagcgccaaacgaaatttgattttaccgtctggaagcgagaaggacaagaatacgttgaaaaactagaacaaacgattgcgctttggcgccgccatgatgaaatgaaggcgcgctatgaagaaacgagtaaagaggcaggggagctgcagcgggaagtagacgaattgcgccatgaagaagcgaaatggctcgaactgttagaaaacgaaaaagcgcgtttccaacaagaagtatttcgctggctcgaacaatgccaagacgtttccgtaccggaaccctctgtccaactatttttacagcgtcttcacgaactatacgaaacgtatcacgtcgatgagatgaagcaaccgtttacggaagcgtattacgaagcactcaatcgaaaaaacgaagaaaaaatgaagcaaaagcatacgtgcacgttattagaggaaaaaatcgcctcaaaagaagccgaatggaaccaatggaaaacgcaaaaagaccccgagctcatgcgcgatgaacaaacgatcgcagcgcgggcggagttagacgaaaaagggattgcttttgtcccgttttatgcaggggtggaatttcaagaccatgtaccagaaccgcttcgggagcggattgaatcggcattgtatcatgcagggctacttgatgcgttaattacagaaaccgatgtcgaagtaacgtgtgaccgagtgattgttccacgtcctgtcgaattggcgcatacattagcagactatttgcagccagatgtagatgaaggatgcaaagtgtccaaaacgcgcattaacgaagtacttcaaagcatcgttcttgccgatagagaaatggacggaacgtttatgcttcatgaagaagggcgttatacgctcggcttaatcaaagggcatgccccggcgcgggaaaaagcgttgtttatcggacgcactgcccgcaagcgttggcggctagaaaagatcgccgcactcgaagcagaactccacgaacttcgcacccagcttcatgagggaaccgacatgctaaaacagctcgagcagacgattgcgcaaataacccgctggtttcgtgcctttccaaccgaccgcgacatgcgcgcagcctttgaagaacgagaaaaaacgaagcgaatgataataagcaaacaacgcgaatgggaaaagaaaaacgaaaagttagcccagcttgcccgcgattggcaacaagcaaaacaaacgttgcgcgagcaaaccgaggggctcgatttagagttttccaaggacggctatgaacaggcgcttgtttttatgaaatcgtatatgcgtgggcttcatgaattgcaaatgacccatcgggagtttctccatttgctcgacatgattcatcatcggacagagcagttagaaacgttgcaacaagaaatcgatgaaacgaaaggcgaacggcatatgctcgcaaaagagcagcaaaaactcgaactgaagcgacaagaaatcgagcggacgctgcaactaatgggcgcagaagaagttcaagcggaaattcagcgcgtccgcgaccggttggcatttttgcagcgagaaatgccagcgaaaatgaacgagcgcattgcgctagagcatgagctgaaagccattcgtgaaaaatgcgaacagctttcggtgaaagaaacgttcgcaaagcggctagcggaggcgtggaagcggtcgtttgcgcgagagctttcccttgagcttgtagagcttcacggttctgattggttggaaaaagcaaaagaagcgatgcagcaatacggggtgctagcgaaagaagctcgaacgtcgcttgtgaaccgattaaatagcgtctttttccaagagtcggcgaatttaacggaataccggctcagccaagagcctgtcgcagctgaggaggacaatttgtttacggatatcgagctagatgaagaaatggaattaaaagtatccggatggagagaaaagcaagaccgcatcgtccttttgcttgattataaagggcagcgcgtatcaccattttatgtattgcgtgaaatcgagcacgacattttcttgcagcgggaatatatgaaagagcaagaccgcgaattgtatgaagaaattattttaaaaacgatcggtcgaattttgcgcagccgcattcaacgggcggagcgttgggtaaaagatatgaacgaactaatgcaacagctcgacacgtcttctgggttggtgttgtttattcaatggaagccgcgcaccgcggaaacggaagaagagatggatacgaaagagcttgtcgagttgttgcggatgaactcgcggctattaaaagaggaagatttgcagcgagtgacgaaacatttccgctcgaaaattcatcgagcgcgcgaattgctagaagagcgcggccaaggaaatacgctccaccaaattattaaagaagtattagactatcggaaatggttttcatttaccctttattaccaaaaaacgaatgaaccgaaacgagagttgacgaaccaacggttctatcaatttagcggtggggagaaagcgatggcgatgtatattccgttgtttgccgcgacgtattcgcgttatcaagaagcagcagacgatgcgccgtacattatttcgttggatgaagcgttcgcgggggtagacgaaaataatattcgcaatatgttcgggcttgtcgagcagcttgggtttaactatgtgatgaactcgcaagcgctctggggcgattatgataccgttccggcgctatcgatttgcgaactcgttcgtccgaaaaatgcttcgttcgtgacggtcattcgctattattggaacggaaaaataaagcagcttgttacggatgaaaagttagcggcaatgatgagagggggatcgcattga

SEQ ID NO: 50344 - DNA, 1233 bp, Anoxybacillus flavithermus TNO-09.006
ttgaatcgggtagaggaagcggtgcaattttttcgcggtgaacgttcgtttcaccgccttttttgcgaaatgaaaaagaaatacgaatcgcttggtcgcatagggggcacgatttccgtttcgtctttttcggcggaggaaaaggaagcgatcgcgtcgttttttggcaaagaaatgagccgcgtgtcgctcgcggcgtttgaacaacagcttgcgaatacaaggtttgccggcatttctctcgtggagttgctgtcatgctattttggcgagccgctcgtaacgaaaaaagagcaacaacaagaaatagagcgggaaaaggaagcctattttacccggcttatgaatacgtatcgagcacagcgcgattggttgatggcggtagaaaagcagcggtttgtgcaattagcgtatcaacaaaatcatcacgcgttagaggcggcgctttctgctgtttgccgcgcgctcgaacagcttccgtccacctacgttcgcttgcccgtttttgcgcaaaaagtagcgaacgatccgcatatgtttgatttgcatacacttgcagggaagctattgctttcggcgctcgaattttatacggacaccgagtacgacctttcgtcggtcgaagacgtgaacgaactattgcagtcgtatcggctgttgcgggaagatgtattaaactttgtgacgtgcgctggcgtgatggcagaaacagagaaaggccgccatcctgttttcgctgccgcatgtgcaacgaatacggcgctaaatgtgccgttacgggaagtgatgccgctagtgcgggcgtatccgtctgtaggaaacaacgtctttgtcgtcgaaaatgccggtgtgttttcgacgctgttagatgcgaacgtaccgctcattagcacaaacggtcaattgaatttagcgacgaggtggctgtttgatttactcgtaaaagaaggggttaccttttattattcgggcgattttgacccggaaggactaaaaatggcgcagcgccttgtcgagcggtacggttcatctgttcggctttggcattacgactgttctgattatttggcgaccaaaccgaccgtcccgctatccgatgaacgtttggcgaaactgcaatcggtgacgcttcatgacttgcagccagtaaaacaagaaatattgcggcggaaaaaagcaggataccaagaggcgcttgtggaacagttgaggagggaggtgaagggaaggtaa

SEQ ID NO: 50345 - DNA, 1485 bp, Thermoanaerobacterium thermosaccharolyticum M0795
atgtctgataaaataaattttaatgttataaagcctatcgatgaggcaagataccttactgctgaaaacgcatcaaggtatcgcctcatcatgcgatatttttaccagaactatgagcggcttagatactggttgtctaaggaagatgtgtataactatgtaaagaattttgatttgttttacgattatacgctggaaaagtgtgagcaggatttaaagtcgctgactgagtggaaaaacttaatagctgagcaggacactggaagagcccaatctgcagaagaatttaaaaacaagaaatttagatacatgcttagcgagtattctatagagatagaaagaatgacaattaatctagaaaaaataaaaggatatggtggttccctagagccatctttattccagagattgtatgaaaacttaaagaaaattgatgacatatctaaaagcgatgacttagaagctgtacaccggtggtggaaagatttcacttctgattttgaaaatatttatcatagtgccatagactacattgctagtttgcaaagttcaaatgcagatgaactcatgaaaactgatgctttcttaatatataaagacaaacttactgagtatttaagaggatatataaaagatctacagaggttttctcaggttatcgtatcgcttttaaataagattgacaaaaagtcattagattgtatcgtagagaaattgctgctttatgaggagaatataccaaggctggatagggattttgatattaatgacgtcaaagaaaatatattaagcaagtgggagaacatagtattttggtttagaggaaatggcgatgaagatagtgaagcatataggcttcttgagatatcaaatgagataataagaaagattacaatgtatgcagctagaatttctgaaaacaggttaaggactgcaagtaggaaaagtgaatatataaagctttcaaagatatttgcaaacatcgatgacataggctatgctcataagctttcatcagtcgtgtttggagttttccacacgagacatttatacggtgattttgacaaaaggactgaaagcataaatgaaagcgtgtgggatgatgtgccatgtaaatttttgataaggccaaagacgagaagttatacacaatccacaaagacaaatgctataatagataggacagagaataaagagatgtgcttaaaacagtaccttgaagaaagacacagtgagattgaggaaatatcaaagtatataattgacggcaagatcgtgctgagagagttgccaataataaagccttttataaggacaacccttttaagctggatcagcaaatccttaagtcagcctaaaaatatagctaaatcagaagatggcaggagatacaaagtcagtatttcaagaaacaaggtaataactttaaattgtacagacggtgtccttgaaatgcctgatgtaacgatagagtttttagattga

SEQ ID NO: 50346 - DNA, 1137 bp, Thermoanaerobacterium thermosaccharolyticum M0795
ttggaggagcttgagatacttttagagaacttttgggttacaaaagatgacacagaaatgtttaatagaatacgtgataatgaaaagaaattaagatcatttgtagaggataagttaggatatcggcttatcgtgaatccacttcttataaagctagagaagataccggatgacgctgaagagtggatggggatcgaagaatttcaaagtcctatggactatgcatttttatgcctgcttcttgcatttttagaagatatgggggtaggtgaccaatttatactttcaaatataacggagtatatcgagatgcagtatgatggcatagaaagtgttgactggaccctttttaagcatagaaaatcccttgtcagggtacttaattttgcagaaaaaatgaaaatgataaaagtcgatgatggagagcaggaaagatttgctgataatcgtgaaatagaggttttatatgaaaatacagggctttctaggtattttatgagaattatgagcagcgaaataagcgaaaagatgacaatggaagattttatgaaggacgataggtatgaagataataaggttcttgagagaaggcatagggtgtacagaaaacttcttttatctccggctgtttactatgaaggacctgacgaccaagattttatctacataaaaaattatagaaatacgatagaaaaagactttgacgattatctcgattcgaaactgcacattcataaaacatctgcatacataattttcgatgagaataagtatgcaacatcttatttcccagacaataaaaatatatctgatatagttcttcaaatcgcatatgttttaagagagatgatagattccggtgatttaaatgtaggagtaaatgaccgcattgaaattacagaaggacaatttatgaatatcatatctgatgtaaagaataggtttaaaagtggatggagcaaagtatacgctgatatgaatgatgataaattgtttagtgagattacagaatttatggaaagttggaaaatggtaatatacaatgatgatacccactcgtatactttgatgccgatcttaggtaagtttattggtgaatatcgaagtgattttaaaggagcaattcaaaatggatga

SEQ ID NO: 50347 - DNA, 4173 bp, Thermoanaerobacterium thermosaccharolyticum M0795
atggatgatagatggataattaatagagctggtcttcttaacttttggtattatgatgatgaagtattcgaattttctggaggaaggcttcttctaagaggttccaatggttcaggaaaatctgtaactatgcagagctttatacctcttcttttagatggcaataaaagccctgaaaggctagatccatttggctcaagggctagaaggcttgaggactatcttttaggtgaagaagatgtaaatggaattgacgagagaactggttacctttatatggaatttaagaaaggaagtaaagataactatatatctataggcataggccttaaggcaaagagacatcaaagcatggacttttggggatttatcattaaagatggaagacgaataggtatagatatattgctttataagatggagacgggtatcgatggcaagagagtcaaaatacctttgtcaaaaaaagagcttaaaaattgcattggaaacggcggagaagtagttgattcacaaagagaatacatggaattagtaaataaaaatatatttggcttttcaagcattgatgactatgatgaacttattaagcttttaatacagcttaggagtccaaagctttctaaggatttcagaccaacggttatatacgacatattgagggcatctctttcgcctttgacagatgatgatttaaggccaatgtctgaaacgatagaaaacatggatcagataaagctgcaccttgattcactgaataaaaacatgaaatctttaaaaaagctgaaaaatgaatatgacaggtataataagtttatgctttattataaggcagagaaacttttaatgcaaaaaaatgagctttctaaagtacaaaaacaaagcgaggaaataaggcaaagtattgaaaaaaataatcaggatgttttgatgggggaagacaaaatatcggatcttgtcagtgagcttcaggcattgaaaaataaagaaattcaattaaggaaaaacgatgcctttaatacacaaagagaacttgctgaagaagaaaatattttaaatcaatacagaaaagacaaggatttaaaagaggttcagcttaaaaagaaaaaagatcgatattttgaaatagaagaagaattaaaggaccttgaaggcagagaatattcaattgataaaaatataaaggacaatcttgaatgtatggcttccatatctgaagaagtcaattttgatgagcacagcttctcagaagaagaattgaagaaatcgtatggtaaagattttgactttgatttttggaacaattcattaaaggaatatacaggaaaagtaaggaagacattagatgcccttaatgacgaggcagaggcaaaccaaaagtacaatgatgcattgcttgaagaagataggttaagaaaggcaaatgaggacttaaaacgaaaagtcaatgaaattgagattttgtttgatgaagaaaagaacaggttcattgacaaaatttatgattggtcagatacgaataaacttttgaagcttaatagagaggacatcgaaaaacttgccaggatcgtactgtcatatggtgagacaagcgtgtacgaagatctgatatcatctataagaaagccatacgatgatatcagaggaagacttcagatggatatgcttaaagttaaaaatgagttggacttaaaaaattctcagcttaatgaaaaagaagaggaattaagaaaatggaaagaaacggaggatccggaaccagagcgcaatgaacaagttttagaaaacagaaaaagactggataaagcgggaattgcatatgtaccactttataaagcgattgattttaaaaatgatatagatgatgatacaaaaggaaatattgaatcagctcttatagatatgggaatcttggatgcacttattgtgtcaagaagcgatttagacagagcaatgaaaatggataaggacatggcagataagtatatcgttccggggacttttaatatgaagcttaatgtattgcagtattttaatgttgtcgattcaaatagcggtgtcagcccggaggaaatttcagatgccttaagcaatgtatttatttatgaggaagagaatgcaacatatataaatgatgatggcacgtatggaatagggattttaaaggggaaagcagcaggaaattcaaagtcaaggtatataggttttgaatcgagacggcgctttagagatgaaatgatatcatccatagctaaggaaataagcatcataaaagatgaaataagggaacttatcgacagacaattgtcaataaagtcccaattaagtgacttagacatagaatataaaaattttccagaaaaagatgatttggaagaagcgctaaaagaattgaaagaagcgcaatcgaatcaaaaatttaccgaagataagttgaatgatgcaacccttgctgccaagaagttttttgatgtacttcaagaaaagagagcagttgtgaggaaattgacatccgaaatcggcatacatgcagatgtgaaagcttacagagatgctttaggcgaattggatgagtacaaaaatctcctacagaaattacagataaattacaatagttatattactgttttaagaagcatagagactagaaaaatgcagaaacaggatatcgagtatgacattgataattacaagtttgagattgatgctttagatacaaagataaaaaacagcatagaaaagatcaatgtgttaaaagaaaccattgagaaacttggtatagaggaccttcaaaatgaactttcacagtgcatgaagaggattgacgatataccaaaggaaataaatgatttaactgctaaaactgctgctcttaaagagagaatagtcctgcaagaaaaagaatatgaaagattgagagaagaaataagaaaaaacgaggatattctaaacatatacgatataggattaaaagatgaaataacattgggatttattgatgagtttacaaatctagatgatatgtataagctagcaaagactgttcaatcgcagtacaaagagatgtttaccaagtttgataaagatagtgcgacagaaaagattagaaatgcattttatgtctgtataaatgaacttgtggaatttgggctttcattagatgtagtagaaaatgaacaaagtgatgtgggtatgggcacttatcaggaaatatataaagatttaaggagatatcagataacagcgaaagtaaatgacaaaaagatatccctttatgggctgtacaatatgatcgatgaagatataaagataaacgaaaaccttatgaaggaaaaagataggcagctttttgaggacataatcatgcacaatgtaggacgcaagatcagaagcagaatttttaaagcagaagagtgggttaaaaagatgaatgatttaatgtctcaacgtgatacgtcaagcggtcttaagtttcaattagaatggaagccaaaggctgctacaaatgagcaagaacttaatacaagggagcttgtagagttgttgaagctcgacgcagatatgatgaaagaagaagattttaatttagtagtaaatcactttagatcaaaggttgagagtgcaaagaaaatatatgaagaaaacagcaacactgatacattccaccagattatgaaaagcattctcgactatagagactggtttgagtttaagctttatttcaaaaaagaaggagaaaatcgcaaagagcttactaacaatgcgttttacaagttcagcggtggagagaaagccatggctatgtatatacctcttttttcagccgtgtactcaatgtatcaatcagcgtcatcacatgctccaaagattatatcgcttgatgaagcttttgcaggagtggacgataacaatatacgggatatgttcaagcttatagaagatttgggattaaatttcatcatgaactctcaagttttgtggggagattatgatacggtgccagagctgtctatatacgagcttataagacctaaaaatgcaagctatgtgtctttgataaagtacaagtgggatggaaagatcaggcatttagttaccggcattgaagaaagtgttgaagcaacagatgatttctcatacgatgaggttgcatatacaagagtaggtgagtag

SEQ ID NO: 50348 - DNA, 1278 bp, Thermoanaerobacterium thermosaccharolyticum M0795
atgaaagctgaagatatagacttctttaaaagaaacaaaggatatgaaaggatatttaaagccatacgtgataagtataaaagcataggaaggataggcggtgtaatcaaacttgatgatttgacggattcggagaaagaaattttgtctaaccattttaaaaaagactttagcaagcgaaaatcagcaaatatcgatgtcaataaatttgcagcgacatttttaaataccagatttgaagaatacagcttgatcgacatattagaatcgtattttgatgaaaagctgaccagcaaaaaagatgatatgtaccagtatgcaaatgaaaaagaaaagttctttaatagacttttgtctgattatgaagggacaaaatgttggcagtggctgaaatctatttatgataataaagctgtaggcgtaagaacgataaaccagagatatgatagtgatcgcactttgctcgaaagagatataaaatacgtttgtgatgcattgaatagactcccagtttatgagggaaagaagttaaggcttccggtcttttcatcccatattactagagatccgcatggatttgacgtaaatactgactgcggcaaaatgtttataaatgcgttgtctacgatttttggagtatcggatgtaaaaaattctgaagagattgctgagcttttttatagggctggcatcgtgattgatgagatatcgaattttgtgacgcttaaagggcttttggcttatagcgcagataagtgcaacgaggtatttaaagctgcatatgagtgcaatgaagttttgcaagtaccgctttacaatcttagtgagatggacagggttgagagtccatcaaaaaaggtatttgttttagaaaatccaggtgtttttttgtctgtatgcgactttataaagaaacctgttccaattgtctgcgcatatggccagccgaggttgtcattgcttgtccttttagatatgctatataaaagtggtacagacatatattattcaggtgattttgaccccgaaggaatacaaatagcgcatagacttttcaaaaaatatcctgaaagattccattttttgaggtatgatgttgaagattatataaaagctttatcagataagacattgactgaatcaaggcttaaaatgctagataagatcgatatagctcaactgaagcctttggcagacaagatgaagatattgaaaagggccggatatcaagagcttattcttgatgatattattacagatgtattgtcaatgaattaa

SEQ ID NO: 50349 - DNA, 1569 bp, Saccharothrix espanaensis DSM 44229
gtgctcttggaggccatgcgcgtgccgccggagatgttccggttcaccaccggcgaacgggccgagttgtacgtggtgatcctccacgcgttcggtgaggccaacgagcggttggagaccgctctcgggctcgatgacgtgcgggcgaggctccgctcggtggggtggctcgacccgctggacgacaaggacctgaccgaggcactggggagcctgcgcggttggcggctgctcgacgtcacccagaaccacgccgagaactaccggaccgccgacgagtacgagcggcgcaacctccagtactcgttgaccaagcgcggtgaagccgccctggccggcgtggtgcacgcgatgggcgtgctggcctcgacgggcgcgctccagacggcggtgctcgacgcgatcgcggaccggctcggggagctggtcgcgcagctgggcgatcccggtgtgccggatcgccggatcttcagcacgctggtcgagctggaggggcacctggaggcgttgcgcggcaacaccaagcagttcaacggcgagctgcagcgcctgttgcgggcggagggcgccgatcaggagacgttccgcgaggtcaagtcggcgaccgtggcctacctccaggagttcaccacgaacctggagcagcgggcgcacgcgatcgccaaccgggtcgggttggtcgaggaccggggagtggctctcctgcaccaccgtgcgctggtgggcgccgaactcccgcccacctcgggcggtgatccggcggtggcgtggttggagctgcgccgcgcccggtgggaggggttgcgcgcgtggttcctgccggtggacggcggcacgcccagggtccagcagctgttcgtggtcgccaggcgcgcgatcatcgcgttgttgcaggtgctcgaccggatcaccgagtccaggcgcaggtcgaccagtgcggcggccgacttccgcgagctggcgcgctggttcgcggtcgcgccggcggaggaggacctgcacctgctgtggtcgaccgccttcgggctcggctcggcccggcacgcgcacctcgcgcaccccgacccggagctcgtggcgtcgtcggcccggtgggtcgacgcgccaccggtggaggtgtcggcgttgctgcgcagcgcggggcggaccgagcggttcagccgcaccgggcgggtgcgcgacgtggccgcggtcaaggcggcgcgcgccgagtcggcccgtgcggagcgggccgcgctgaaggccgcgtgggaccggttggacaccggcggcggcacgcggttgtcgcagttcgggcggttggaccacgaggtgctcgaacggctgctcgaccttctcgggcgggccttggccgcggcaccggaccggcacggcgtccaccgggccaccacgggtgacgggcgggtggagatcctgttgcggccgccgggagcgcaccgcgagcaggcggtgctcaggacgccgcgcggcgtgttcaccggcccggactacgacgtcgaggtccgcacgcacggtggccgcgcggcacgtcggccgcggagcgccgccgacgggacggcgaccggatga

SEQ ID NO: 50350 - DNA, 1248 bp, Saccharothrix espanaensis DSM 44229
atgagcaacctggcgaaccagctggtgatcgcggagcgcgaggaggtcgcgcgggcgatccgactgctgctggcgacaccgctgatcggcgccaagaccgcgccggaagccttcgacctcgtgcgcaggcggcgcgaacccgtcgagaagtggttcgactactactgcgggtggtcgctggtcgtcgaaccccgcctggggtacgcgcggttggccaaggtccgggtcgccaccgaccccacccgcccggcgcgacggcaccgcacggggcgcgcgccgttcgaccgccgccggtacaccctgctgtgcgtggcggccgccgagctgctgggtgtgccggtgaccacggtcggcttgctggcggaccgcgtcgtccaggcgtcggccgcggacccggtgctgccgccgttcgacacgtccagccgcgccgagcggatggcgttcgtcgacgcgctgcgactgctggagtccttcggcgcggtcgaggtggtggacggcgccaccgagtcgttcgtggactccgccgacgcgaaagtcctctaccgggtggacgtgacgctgctcatgcgcctgttggcggccccggtcggcgcgtcgcaggtcgcggtcgcccccgagcggtcctacaccgacgaggtgccgtcgcgcttcaccgaactgctgacccggctgtcccgcgagcggcgttacggcgatgccgacgagccggtgtccgaggtccagcgcaacctgtggctgcggcactcggtgttccgcaagctggtcgacgacccggtcgtgcaccgcgacgacctgacccccgcggaactggcctacctgtcgtcgccgaccggtgggcagctcttgcgccgggccgccgaccaggcggggttgctggtggaggaacgtgccgagggcgtcatgttgatcgacccggacggcgtggccacggacagccggttccccgacgactccggcaacgccaaggtcgccgccctgctgctcctcgacctgatcacgtccgcgcccggaccggtcgccgtcgagcagctgcgcaccgaggccgacgcactgctgggccgcttccccaagtgggccaagggctaccgcggcgaggacggggccacgcggctggtcgccgacgcgctggacgtgctcagggcgttcggcctcgtccggctcgacagcggtgtcgtgcgcgcccagcccgccgccacccgctacgcggtgacccgaacgagcgccgacgacgtcgaggacgagtcatga

SEQ ID NO: 50351 - DNA, 4077 bp, Saccharothrix espanaensis DSM 44229
atgacggtgaccgagctgccacgcacggaaagcggtgccccgccggagacggtggccaggtgggttcccgaacgtgccgggatcctgaacgtgtggcgctactacgacgaggtcttccggttccacaaaggacggttgttgctgcgcggccccaacggcaccggcaagtcgaaggcgctggaactgctcctgccgttcctgttcgacgccaacctgcgcgccaaccggctctccacgttcggcacgtccgagcgcaccatgcactggaacctgatgggggaaggggcgacgggcaccacgagagtcgggtacgtgtggctggagttccgcttccccggtgcggacggcacgccggacaagtggttctcgtgcggcgcgcggctggccgcgaccaagcacaccaccacggtgcacccggactacttcaccactgggcagcgcatcggcgtgccgggtggcctcaccctcaccgacccgaacagcgcgcccctcaccaccaaggcactggaagccgcgctcggcgaccggggcacgctccaccagaacgcggccgacttccgggcggccgtgcgctcgaccctgttcccgggtctgagcgagcagcgctacgacgcgctcatcacggccctgctccaactccgcacgccgaagctctcccagcggctcgaccccgggctgctgtccacgttgctgtccaaggcgctgccaccgctgggcgaggcggagatcagcgacctcgcggagggcttcgagcgcttggaccggcagcgcgaacagctcaaacgcctcgacgcggaggtgcaggccgcacaacacctcagaaccaggcaacgcgcctacgcgcagcgcgtgctgcgcgctgcggcggcgaagctgatctccgccaccacggagctgggcaacctcgcggacgccgcgaaactctcggaagacgagcaccgccgcgccgagctgcgcaaacaagaggccgaagaacgcggcgagctgctggagcagcgcatcgtcgagacggaagggcgcatccagggcctgaccggcagcgaggcgtaccggaagggtgaacagctcgaccggctgcggacccgcgtgcgcgaggctcgtgcgaccgccgggaagaggcgggccgacgcggaccagcaccgccaggtcgcccgaaccgacgcggaagcggccgacaccgctgcccggcacgcgcaggcacgagccgtgaccgcgggagcgctggccgacggcgcctcgaccgctgccgcccgtgtcggcctcgcctcggtgcacgccgagatcgcccgcgtcctcgccgacccctcgcggtcccgggccctgctgcgtgccgcggtccaggcacgtgccgagcaggtcgaggccgtgcgcgccgcgctcaacgagcacgaggtcgcggtcaacagcaggcgggacgcggaacgggcgctcgaacaggcacgggaagccctggcggaggccatcgaacggcgggccgaactcgccgaacggcgcgaggccgcgctcgcggagcttcgggccgccgtgctgacgtgggtggcggactgccgtgagctgaccttcgccgaccccgaggcactggcggacctcgcggcgtcggagaccgcagtgctgaccgaggtcgactcggccgcgagccgcgtgctgggcgccatcaccagggaagagaccctggtcgggacagcgctggagaacgccgagcgcgatcgggacgccctgcgcgacgaggtccggcggttgctgaccgaggaggacctgccgccccagccaccgcacacgcgcaccgcggaccgcatcaccatgacaggcgcgccgttgtggcgcctggtccgcttcgccgacgcggtgcccgacgacgtccgcgcgtcggtggaagccgcgctccaggcgtccgggctcctggacgcctgggtcggtcatgacggcgcagtcgtcgggcacgacacgttcgccgcgcccggtgccgtgccgccggcgccgggccgctcactcgccgacgtcctcgtccccgaggtcgacgcgcccgtggccgccgacgtcgtcgcccgcctgctcggtggcgtggcctacggggaagttctgcccggagcccacccggtcgccatcggagccgacggtgggtggcgcacgggcaacctgcacggcacttggcgcaaggacgaggccgcgcacatcggcgcgctcgccaggcaacgggcccggcaacgccggttgaccggactgcgtgagcggatcgccgcgtcggaagagctgatcgagacgcacaccgccgccttgcggtcgctggccgaacgcaggtccgacgtcgaagccgaccggcgggaccggcccgaccacgccgacgcgaacgccgcgctggaggccctgacccaggcgggttcagcggtctccagcgccgacggcgtggtccggcgttcgctggacggcctggcgaagagcgagcagcgcgtggaccgtgccctgcgcgcgctgaccacgacggcagccgaacacggcctgcccaccgagcggaacgcgctcaccgccgtcgtggccgccgtggacgccttccggaccgcgtccgacgcctggatcgacgagcacgccgttctgctcacggcacgtcgtgaagcggaccggaccgctgagcaggcccggcggtcccggctcgccgccgaacagcgcgaggacgaggcggccgaagccgaagccgtggcgcgcgggctcgacagcgagctggacgccgtggagggcaccatcggcgtcggctaccggcaggtgctggacgaactcgccgggctgcgcgagcagctgggttcggtgaggcgcgatgcgcgtgccaaccagagcgagatcggcacccttgccgtgcgcctgggagaactcaccacccagcgggccaccgatgcgcgtgaccgcgaccgggccaccgaggcgcgcgaccaggccgcagtgcggttccggcacctgtcggacggcagcctgcccgccgacagcggtctggacgacctgcccgcgttcagacaggtgctgacggcgtcgagcggtgttcgggcggcgctggacgcggcgcggtcggtcgcggccgcgtggccgtcgctgccccactcgccgaagaacctcggcgacgccgcacaccggttggcggaggaggtgcacgcctcccgtgaggtgctgggcggtcgggccgacctcgaactcgactccgacgaggacgtccaggtcttctccgcgatggtggacggggtgcgggtcggcgcttcggtgctgcacgacctgctgcgctccgacgcggaacgcagcagggaggacatcaccgcgcaagagcgcgagctgttcgaccggaccctcaccggggacacgcgccgccacctcgccgcccggatacggcaggcgcacgacctggtcgacgggatgaacgcccggttggagcgcgtgcgcaccgcctcgaaggtggcggtgcggttggtgtgggaggtctcgcccgagctgccaccgggtacgaaagcggcgcgtgacctcctgctcaaggacccggtgcggttgacggaggacgaccgcgagtcgttgcaccggttcttccgggaccgggtcgaacaggccaagggcgacgagacggccaccaactgggagcagcagttggggcaggtgttcgactacacggcctggcacaggttcgtggtgaaggtcgaccgcatgaacgggacgggctggcagcccttgaccaagaagctgcacggcgcgctgtcgggtggcgagaaggcgatcgcgctgcacctgccgctgttcgccgccgtggccgcccactaccaggccgttgccggagcgccgcggatcatcctgctggacgaggtcttcgtcggcgtcgacagcgtcaaccgcggccaggtcttcgcactgctgtcggcgctggatttggacctggtcctgacctccgaccacgagtggtgcacctaccgcgagttggacggcatcgcgatccaccagctgatcagcgggggcgacgacgacgccgtcaccaccgcccggttcgtttggaacggcgccgaggtggtcgatgaagaggtggttggcgaagaggtgacgcaggacgactga

SEQ ID NO: 50352 - DNA, 1254 bp, Saccharothrix espanaensis DSM 44229
gtgggctctggcagggttgggggcgtgcgttcggtgaacgggctcgattccgctgccttgcggcccttgtggcgggctgtgcacgagcggttgtcgtcggggcggcaggtcagccgggtgcgggtggggcccctcgatgacgagcagcggtcggctgtggccgacctgttggggggcgagcgcctgccgggtgagtacgtggtggtgtcggtggccgggctcgacgagctgctgcgggagtccgtgggggcgggcgtgcgggacgtggtcgcggcgctgctgggaccgctggacgaccgggccgcgcggcgggcgctcgccgatgcggcgcgggccgagctgtgggagtggctggtccggcaccccgtggtgaccgctcaaccggcgttgcgggagtgggtggacgccgttcgacgggccgggctcgtcggtggttcggtcgagcgcacccgggacgagctcgaccgggtcctgcgggtcgtcgccgcgttgcctgcgccgggtgtgccgctgccggtgctggcggaggcggtcctcggcgatccgcacgcgctggacgagggaacgcggtgcgccgggctggtgctgcgggcgctggcggcgctctacggtctcgacctgccgggagacgcgcaggagcggcgggcgctgtgggggcgcgctggggtggtcgaggacgaggtgtcctcggtcgtcctggccgccggcctgcggttgggtggtgtcgggggcgcggtgctgcgcgtgtgcgccgatgcggggcacgtcgcggccctgacgttggcgcaggtccgggcgacctcgttcgtcgggacgccccaggacgtgtgggtgttcgagaacccgagcgtgctcacggtggcggtggcccgcttcggggcttcgtgcccgccggtggtgtgcacgtcgggctggcccaacagcgcggtgatcgtgctcctgcgcgggctggccacggccggggcgaccctgcactaccacggggacttcgacggcgagggtgtgcggatcgccgcgcacgtgatggcgcgcactggcgccgcgccgtggcgcatggccaccgacgactacctgcttgcgctgggcgtcgcacgcgtcggcacatcggtcgggcgggtcaccgaggcgccgtgggacggtgggctggcggacgcgatgcgcgagcacgggctggcggtcccggaggaacgggtcaccgcgcggttgttggacgaactcgatgattgcggacgggatgtcggtggtctgccgtag

SEQ ID NO: 50353 - DNA, 1479 bp, Saccharothrix espanaensis DSM 44229
gtggaaccggcccgcctgaagctctacgcgtacctggacgcgcgcgatcaccagcgcacctacctggcgatcatgcggctgttcacgtcgaccctgctggccgacctgtcggcgggcgaggtcgcgggcgcgctggccggcgcggagcgcgagggccgggtggaaccgggcgagtcgcgcatcgagaacgtgatcaaccggctgcggcagctggtcgagtggggcaacctggtgcagggccggcgcgaggtggtggcgtcgagcatcgccgagttccagcacggcagcgtccgctaccaggtctcgaagctggcggtccgggtgcagcgggacgtggacgagctgctgcgcgtcccggagggtgcccgcgaggtgtcgcgcgagctgctgcccgccgtggagcgcggcctcgggcagctgggccggtcgctgtccgaggcgctgctcagcgaggcgaagcgcccgcgcgaggtgctcgccgagcaggtgacgacgctgttcctccagcacgccgagctggccgcgacggtccgcgacttctacgcctacctgggccaggtggtgacccgccaccacctcgcgcccgaggagatctccgggttccgcaacctgctggtcgagtacatccagatggtcgtggaggacgtgctgcggcacacccccgcgatagccgacgcgctggcggggctcaacgccgcccgcaccgagctgctgcgcctgctgggccgcgccgacctcggcgaccgggtcgaacgggcgcgcgggcggtcggcggaggactggcaggagctgaccgactggttcgtggaccggaccggccgccccagccaggtgacggcgttgcgcgacgcgacggcccgcgcgatcgggtcgttgctggccagtgtgaagcgggccacgtccggcggcggcctgctgcccggccggcgcgccgagctgctcaagctcgcggcgtggttcgacggcggcacccggtcgcaggcgcacgagctgtacgcggcggcgttcgggctgtactcggcgcgccacctctcccccgcgccggagcacgacagcgacaacgagcgcacgtcgtggcgtgacggcccggtgcacgaggtgtcggtgagcgtccgcagccgcagcgaccggggcgcgcgcggccggacgtcacgcatcctcgacgacccgatgaccgagcagtcgctgctggccgaagcgcgggacgccgacgagcggcgggccgcgtcggtcgccgaactcgccgccgccgcgccgtgcctgtccaccacgacgctgtccggcgaggcgttgggcgtgctgtgcgagctgttgacgctcgcgatggcgcaacgcgacaccgccgccgacgcgggctcggcgaccgacccggtgcgcggcctgcgcgtcaccgtcgcgcacgaagccggccattccacgcagatccactcgcacgcgggcacgttgacgctgcacgactcgacgctggtgctcgactga

SEQ ID NO: 50354 - DNA, 1239 bp, Saccharothrix espanaensis DSM 44229
atgttcgacgacctctccgacatcgacgccgcgaacgtcgtgcgctgcgcccgcaccctgctgcgccggccgctgctgcgcgccgacgggccggacggcgagctgctgaccctggtgtaccggcaccggttcgcgctccaggacctgttcgcccgccaactcggctaccgcctggtggtggaacgccgctacgcccgcctctacaaggccggtcccggcgcggacgactcgcggggcgtgctgggcatgtcgccgcgcgggtacgcgtacgtggcgctgaccatggccgtgctgaccgggatcgggcggcagaccctgctgtcccggctggtctccgacatccgcgcggccgccgcggaggcgggcatcgaggtcgtggacgacgtggtcgaccggcgcgcgttgaccgcggccctgcggcacctggtgtcgttgggggtgctgcacgagaccgagggcaccgtcgacatgcagaccgaggcgctgatcaccgtggacaccgacctgctcgggcagttgctgaccggcccggtggccgaggcgacgtcgccgcgacggctggtggagctggcgaaccggcccggcccgcgcggtgtggagcacgcggtgcggcgcaagctcgtggagaaccccgtggtgctgcacgccgacctgcccgccgagcagtccgagtggctgcggcgcaaccagcgccgggagtcggcttcgctggagacgtcgttcgggctgcgcaccgagtcccgcgcggagggcgtgctgacggccgaccccgaggactacctgaccgacctgtacttccccggcacgtccaccgtggcgcggatcgcgctgttggccctgcccgaactgctgtccggcgaacccgtctcgggcaggcaccccgtggaccgcgccgcactggtcgagctgtgcggacggctggtcgaggactacccggcggcgtggtccaagcagttcaccgacgaccgggaacgtttggccgacgaagtgctggaactgttgcggcgcatgggcttggccgtgcccaccgacggcggctggcagctcaacgccgccgcgcaccgctggataccggagccggacggcgacccggaacgtgaagtggagcaaccgccggtcacccctgaggtgccgggctggtcgcttttcgataccccggaggacggggcgcgcgacgctgttcccgcacgccacggccgaccgggcgcgggtgtcccgcaggacgaggagaacgtgtga

SEQ ID NO: 50355 - DNA, 4068 bp, Saccharothrix espanaensis DSM 44229
gtgaacaggtggcggctgcaccgcggcggcatcgtcaacatctggcagtacaccgagcagacgttcgacttctccggtggccgcgcgatcttccagggcaccaatgggtccggcaagtcgcgcacgctggaactgctgctgccgctgtgcttggacggcgacctgcgccaggtcgggtcgaagggtttcgacacggtcagcctgcgccggctgatgctggacgactacgacggcggccccaaccgcatcgggtacgcgtgggtggagctggtgcgcggtgacgagcacctgacgtgcgggctgggcgtgaaggcgtccaagacgtcccaggcgatcaccgactcgtggcggttcgtcacgtccgcgcgcgtggggcacggcctccagctcatcggcgcggagcgcaccccgctcggcccggcccagctgcgcgacctgatcggcgcggactgcgtgctggaggaagccgcgttccgggcgaagatcgccgagaccgtgtacggcgtgccgggcgcgcgctacggcgacctcctgcacctccagcgcaccctgcgcaacccggacgtcgggctgaaggtgctggaagggcaactggaacagatcctgtccgacgcgctgccgccgttggaccaggcgatggtcgagcagctcgcgacctcgttcgacgacctggagtcgatccgggagaacatcgtccggctgtcgtcggcggacgcggcgctcggcacgttcctcaagacctacggggactacgcgttcggtgggctgcgctcgtcggcggaccggctcggcgcggccgaggacgcggtgcgcaagctggagcgctcgtcggcgaagctggccgcggcgctgtccgggacggcggccgagcgcgcctccgccgagcactcgctgacctcgttggaagccggtgagcagcaggccgaggagaccatcggcgcgttgaaggaactgcccgcgttccgcgacctgcaagacctccagacccgcgagaagctggtcgcggagaagcgctcgtcggcgatcgccgcgctggacatggcgaacaagcagcgctcgcaggaggacggctcggtcgacggcgtgctgcggctgctgcgccggctcgccgacgacctgggcacggcggaggaactggtcgagccgctgcgccaccacctgcgggtggccgggttggccgaggcgctcgcgccggacgtgccgcgggtggccgtggtcgacgcggtggtgcgcaccgagtccgtgcgcgccaagcccgacccggaagccgaaccgctgcccatcgaccgccgggtgccgcccgcgctgtccgacctcgacctggaaccggccgccgcgcgcaccaccgagatcgcctcgctggcccggcaacgcggcgcgctggcgttggcgctgcaccggcaggccgaggagctggagaccgcgcagcgcaaggtggacgcgctgcggcagaccgcgcgggacgcccagcaggcggcgaccgagtcctccgcgctgcgcaaccaggaggcccaggaactcgccgaggtcgcgctgacctggctggacgacgtgcggtcctggcaggagtccgggccgggccggccggagaacgcgctggaactgcccgcgtcggtcgacccggtggccgcgcggaagctgacctccgccgcccgcgagtgggtcggcccgctggtcgccgtcgcccgcgaggccgcgcacggcgtgaccgtgcggcgaggcgacctgcgcggggcgatcgacgcgctggacgcggaactcgcggcgttgcgctccggaacggcccgcgtgcccgaacggggccgctacgccctcgccggccgcgaaccggcggccggctcgccgttctaccgcctggtcgacttccaacccgacgtggacgacacccgccgggccggtctggaagcggccctggaggcgtccggcctgctcgacgcgtgggtcaccgcatccggcacgactactccctctccttcctcttcctcctccgacgtgctcgcggtcgccgccgagccggtcaccggaccgtccctcgcctccgtgctgacgcccgcggtcgacccgggctcaccggtccccaccgacgtcgtcgccgcacttttggcatcggtgtccctcgccgaacgcacgccctccacagcaccagcctcatccaccctcgaaccaggcacgttcgccgtgacgccggacggcggatggcgtgcgggcgtgctgaccggcgcgtggcgcaaggacgcggccgagttcatcggcgcgggcgcgcgggaggcggcccgtcgccggcggatcgccgagctggaggacgaactcgccgccctgcgcaccgaactcggcgaggccgagaccgagctggccgccgcgcacggcctggtcgaccagtgggaaaatcacctcgaccggttccccgccgaccgcgagctcgtcgccaagcacggccggctgcaagccgcgcaggaatccgccgaccgggccgcgaaacgcgccgaagagctgcgcgccgaactcgacaccgcccagtcccgcggcgaagcggcgcagggcgaggtcgtgcggcaggccggggacgcgggcctgcccgccaccaccgagggcctgcgccaggcgcagagcgccgccgccgaggcccagcgcaccgccgaccggctcggcgacgtgctgcgccgccagtgccagtcgaccgtcaccgacctcaccgacgccgcccaccgctaccacgcggccgtggccgaccgggtcgccgccgaggccgacgccgaggcccggtgcgtggactacgcgacccaggcgggcacgttggccgagctgaccgacgcgatcggcggcgaggcgcgggagatcgccgaccagctctccgccgccgaacggtcccggcgcgagatgcgcgacgagctcaagggcgtccgggaacgcgtcgccacggcccgggagcaggccgcgaagctgtccgcccagctcgacgccgccggcgagcagttggcttcggcgcaggacgcgcggacgcgggcggtcgagcagttcaaggccaccgtccaggcacccggtgtgctggtcgcggccctgccggacgtgccggaggacgtcgagtcggtgcgcgccgccctggccgcggccgaccggcgcggcgcgggcgaggcgaccgtgatcaccaagctccaggcgttgcagacgtccctcgcgggcagccacgacatcgccgccgagcagcacgagggcctgctgaccgtgaccgtgaccggcgaggacggcgcgcgcccggtcgccgtcgccacccgccaggtgaccacgaagctggccgagcagcgggggttcctcgacgagcgctaccagaacatcttcgccgactacctgatccgcgacctcgccgagtggctgcgcggccagatcgccgtcgccgaggacctgtgcaagcggatgaacgaggtgctcgggcgggcgcggtccagccagggcgtgcacgtgaagctggcgtggaagccgtcggcggcgctggaggaggagacgcgcgacgcgctggcgctggtgcgcctgccgtacgcggaccgcgacccggagcaggacgcgttgctgcgccgcgtgttcaccgagcgcatcgaggccgaacgcgactcgcactccggcagctacgcggagatcctgtcccgtgcgctggactaccggacgtggcaccagttcaccgtgaccgtcgccgacaccggcccggacggcaacccccgggagcgacggctgcggcagctctcgtccggcgagacgcggctcatctcgtacgtgacgctgttcgcggcggcggcgtcgttctacgacgcggtcagcggcgagttctcgccgttgcggctggtgctgctggacgaggcgttcgagcggctcgacgacccgaccatcgcccggatgctcggcctgctggtggacctcgacatggactgggtgatcacctggccgagcggctggggcgtgtcggacaagatcccccggatgcacatctacgacgtgctgcggcccaagaacggccgcggcgtcgcgtgcacccagaccacgtgggacggcgcagccctcgaccgcatcgacccgtaa

SEQ ID NO: 50356 - DNA, 1578 bp, Streptomyces viridochromogenes Tue57
gtgctgggggaggaggggcgcagcgtgcgcagggtgccaccggagatgttccggttcacgacggtggagaggtccgatctgtacggggcggtgctggaggccttcggcgtggccggtgagcatctggagacggcgctggggctcgacgcggtgcgcgagcggctgcgcgccgtgggctgggcggcggcggtcgaggacgaggacctgcatgaggcgctcaggaaactcgtgcagtgggagctcctggacgtcgtgcacaaccacgcggagaactaccgcacggccgaggagtacgagcggcgcaacctccagtactcactgacccgtcgaggcgaggccgctcttgccggagtacggcattcgcttgaggtgctggcttccacaggggcgctgcagacggctgtgctggaggccatcgccgaccgcctggacgagctgtgcctgctgtccggcgaacccgcctcggcggatcgccggatcttcagcacgctgcgcgagctggaggggcatctggaggccctggtggagaacaccaaggcgttcaacggtgaactgcagcgtctcctgcgcgccgagggcgcggatctggaggtgttccgcgaggtcaaggccgcgaccgtcgcgtatctgcaggagttcctggtcaacctcgaccggcgcgggcaggcggtcgccgccgccgtggcccgggtggaggagcgggggaccgccgtgctgcgcgagcgggccctgcgcggggccgagctgccgccggtggccggtgcggatcccgcggccggctggctggagagcaggcgggcgcgctgggcgggtctgcgggcatggttcctgccggacgacggctcacggccccggatcgagcaactgcacgacatcgcccggcgggccatcgtctccctcctgcaagttctggagcggatcaacgagtcacggcgccgctcctccagcgcggtgcaggacttccgggagctggcgcgctggttcgccgcggcccccacggaggaggacctgcaccggctgtggtcggcggccttcgggctcggcccggcacgccacgctcatctcgcccacccggacccggagttgatcccgtcgtcccactcctgggccgaggccccgcccgtggaggtgtccgcgctgctgcggaccagcggacgaacggagcgcttcacccgcacggccaaggtgcgggacgtcgcggcggtcagggccgagcgtgcggagcgggcccgcgcggagcgagcggaactcgcgcgtgcctgggaggcgttggagacagaaagccccatccgcctgtcctcgttcggcacgctggatcccgccgtcttcgaccgactgctcgacctgctgggccgggccctgtccgcccgcccggacgcgagcggcctgcggcgcgccatcaccggggacggccgggtgcagatcgcgctgtccccgcctcccgacgagcgcaccgccgtactgcgcacgacgaagggcaccctggccggaccggactacgtcgtccacatcacggcggtgggcggatcgagcgccttgcggagcgtccgcgccgcgcggcgggaggcggccggatga

SEQ ID NO: 50357 - DNA, 1287 bp, Streptomyces viridochromogenes Tue57
atgagcaccctcgccaaccaactcgcggccgcggaacgcgaggaagtcgcccgtgccatccgtcttctgctggccaggccgctgctgaccgaggcttccgacccggccggcttcgaactcgtacgccgccgacgcgagccgcttgcccagtggttcgactacacctgcggctggagcctggtggtggagccccgccgaggttacgcccgcctcaccaaggtccgtgccgaccccgacggctcccgcccggcccgcagggcgcgctccggccgggctccgttcgaccgtcggcgttacgtgctgctgtgcgtgaccgcggccgagctgctgtcgatgccgatgacgaccatcggcatgctcgccgaccgggtcgtgcaggccacgtcggccgaccgggcactgcccgccttcgacccggtacacaagccggagcggatggcgttcgtcgacgtcctgaaactgctggagtcgtacgacgtgctgcgcgcggtcgacggcaccaccgaaacctacgtcgagtccgcggaggccaaggtcctcttccgagtggacaccacgctgctcatgcggctgcccgccgcccccgtcggcgcctcccggctcgccgtacccccggacgaggtgccggcacggttcgagtctctcctcaccggtctcgtacgggaacgccggtacggcggcgcgctcgccgacgggacgacggacgagacacacggcgagaccgccgtcacggacgcgcaacgcaacctgaggctgcgccactcggtgctgcgccgcctcttcgacgaccccgtgctgtaccggacggacctcaccgacgacgagctggcgtacgtcacctccctgaccggacgccagatcctgcgccgctcggtcgagcaagccggcttcctcctggaagagcgagccgagggcttcctgctcgtggacccggacgggctcgccaccgatgtccgctttcccgacgacacgtccaccgcccgggtcgccgcgctgctcctcctggagccgctgtgcgccgcgcccgccgggctgctgcccgagcagctcgccgagaccggagcgggtctgctgcgccggtttccacgctgggccagggcgtatcagtccgaggacggtgcggcccggctggccgacgacgccgtacgcgtcttgcgtgacgtcggcctggcgcgccgggccggggggcgtgtcgtcgcatgcccggccgcgtaccgctaccgcctgacggagacgacgagttcggatccggaaggcagtgaacgcagtcaaggagaacagcagtga

SEQ ID NO: 50358 - DNA, 4134 bp, Streptomyces viridochromogenes Tue57
gtgagcatcacggagcttccccttccccggcggccggagcccaccgagctggacgaggcaccggcgacggacgacgccatcagccgatggcagccgcaccgagcgggcatcctcaacgtctggcgctactacgacgagacgttcaccttccaccagggccgcctgctgctgcgtggccagaacggttcgggcaagtccaaggcgctggagcttctgctgcccttccttttcgacgccagcctccgccccaaccgcctctccacgttcggcggttcggaacgcaccatgcactggaacctgctgggcgagggcgcctccggcaagacccgcgtcgggtatgtgtggatggagttccgccgggtccgcgacgacggcaccgagcggtggttcggctgcggggcgcgcctgcaggcgagcgtgcacaccagcacggtccacgccgactacttcaccaccggctccagaatcgcccaccccgagggtgtgctcctcgtcaacgaggcgggacagccactgacccgggccaccctcgccgaaaccctgcgcgaccgcggtgacgtccatgcctcggccaccgactaccgcaccgccgtacggcgtgaactcttcgccggcatgggagagcagcggtatgagtcactgctgtccgccctgctccagctgcgccagcccaaactgtccgaacggctcgacccgtccctgctctccaccctgctgtcccgcgccctgcccccgctgggcgagggagagatcgccgaactcgccgagggcttcgagcggctggaccggcagcgcgaacacctcaaacggctcgacgacgaggtgacggcggccgagaccgtcgcatcccggcagcgcgcctacgcccgacgcgtcctgcgcgctggttccgccgcgctgatctcggccaccaccgagatggacaacctcacccgcgtcgcccgccagagcgccgaggagctcgaacaggcgctggcggagcgcgagtcggctcagggccggcgcgaggaacaggagctgcgtgcacacgccctggaggagaccgtcgagggcctgcgcgagagtgacgcgtacaagcagggcgaggaactcgaccggctccgccgtcgtaccgaagacgtgacagcggccgccgggcggcagcgagccgccgcccagggggctcggcaccaggcagaggaggaccagcggcacgccgacgaggcggcgggccaggcccgcacactcgacgagcacgcgcgcgaagctgccggggaagcacaccggtcggcccgggcagcggggctggagtccatccaccacgaggcgaggacgatcgtcgacgcggattccggggtggccctgcccgacagtgcgggacgcgaacagggctcccgcgtaccgcgcacgacggccgagaacggggcgcgacaagcccgtcggctgctgcgcggagcggtcaccgcccgacggcagcaggtcaccctcgtcaccgaggcgatcgacgcgcacgatcgcgcggtacgcgaccgaagtgccgccgaggaactgctggacgaggcccgcagccggctcgcggaggcgatcggccgacgggacgaggcggccggcgactgggacgacgctctcgccgcacaggcggagcggctgctcgcctgggccgagggctgcgcggaactgcgtatcaccgactccgaggaactggtggcgagagcggcggacgaggccggggtgaccgccctgaccgaagccgccgcgcgcccgctggagcaggcgatcgccacggcggaggccaccacccgagccgcacgtcagggcttgcgggatgaacggagccgacttgaggaggaggtacgacggctcagcggcgagaccgacctgccgcccgtgcccccgcccacccgcaccaccgtccgcacggcgacggcgggagcccccttgtggcggttggtcgctttccgcgaaggtgtcccgcccgccgtgcaggccgcagtcgaggccgcactggaggcgtcgggcctcctggacgcctgggtcagcccctacgacgggatcacgctgccgggtcacgatacgcgcgccgaggcggccctggccgtgaccgcgccggggcccagcctgctggaggtgctggagcccgagacggacatccccgtcccggccgacaccgtgacccgcatcctcgccggcatcgcgtacggggcgactctgcccggcgggcaccccgcggccgtctccgccgacggcgcctggcgcctcgcgctcgccaccggcacctggagcaagccggagccggcccacatcggtgccctcgcacggcagcgggcccggcagcgcaggatcggcgaactgaccgaccgcatcggcgagacgaatgcctctctcgccgccctcgacgaccaactgcgcggcctcgccgcccgcagtgcccggctggacgcagaccgcgctgcccgccccgacaaccgggaactcgacacccggcggcgcgaccgggaccgcgccgaggacagggtggccgcccgggacgacgccgtgcgcgacgccgccgggcgtctggcgcggtgcgagagcgaggtggcgggcgctctgcgcacactcgaccgccgggccgcggaagagggcctgcccaccgaccgcgaccggctgcgtgaactgtccgccgccgtcgacaggttccgggacaccgccgacagctgggtggacgcccgcctcgccgcgaccgccgctgccgaccgggcccgccagagggccgcacaggcggaccgatcgcgccgggctgccgaggcacaggctgaggacgcggccgccgccgaagcggaggcggcggggctgaaggcgcgcctggaggcggtggaagccaccgtcggcgaggactaccggcagatcgtcgcccgcgtcgccgaggcgcgcggcgagctgcgccgctgccgtgaggaggccggtcgggcggccgatctcctgctccgcctggaaggacgtatcggagaactccgggccaccagcggccaggacgccgaacgacgggaacaggccgtcgccacccgggacgccgcggcacagcggttccgtcacctgtgcctggccgggctggccgaggacgccggcatcacaccggaactcgatgccgcggacggcaccaaggccactctggaggccgcccgtgccacagcagcgaagtggccgagcatcccgcacgccccgcgcaacctgggcgatgccgcgacccgcctgtccgaagcggtccacgaggcccgccagtgcctcggcgcccgcgccgacctggacctggaaccggacgacgacatccagctcttcaccgccactctggaaggcgtacgcgtgggggcgacgggcctgctcaccacgctcgcccaggagcgcgaccgcagccgggacgacatcacgaccgccgagcggcgcctgttcgaccagatcctcaccggcgacatccgccgccacctcgcggcgcgcatccgtcaggccggtgaactcgtcgaccgcatgaacggacacttggagcgggtccgcaccgcctccaatgtcgcagtccaacttgtgtgggacgtccgtccggacctcccggacagcacccgcaccgcccgacagctgctgctgaaggaccccggccgggtcaccgagaccgaccgagaggccctgcatgctttcttccgcgcccgtatcgaggaggccaagggcagcgacacggccgcgagctgggaggagcagctcggcgaggtgctcgactacaccgcctggcatcgcttcaccgtccgcctggaccgggcgaacgggaccggctggcagccgctgaccaagaagctgcacggcgcgctctccggcggagagaaggccatcgcccttcacctgccgctgttcgccgccgtcgccgcccactacgaggccgtgcccctggcgccccggccgatcctgctggacgaggtcttcgtcggtgtcgacaccgtcaaccgcggtcaggtcttcgcactgctcaccgcgctcgatctggacctcatggtcacctctgaccacgagtggtgcacctacggcgagctgcccggaatcgccgtccaccaactcctcacggacgcggacgacgacgcggtcaccagcgctcgcttcgtctggaacggcactggcctggaggcgggatga

SEQ ID NO: 50359 - DNA, 1251 bp, Streptomyces viridochromogenes Tue57
atgacccgctcggaaccggcctcgggcgaacccaccctgcgccgccccgaactccgcccgctctggcagtcggtccacgaccgtctctcgtccggccgccctgtcacacgggtgcgcctcggaccgctcgacgacgcccagcgcgaagccctcgccgacctcctcggcctggaccggctgccggaagcccgaccctccgtcgccttggcccggctggaagaagccgtcaccgagctgtgtggccgtaccgtgcgcgaaaccgtcaccgaactcgtcggccccctccatgaccgagcgggcgaacggcgccgccaggaaggcgaacgcgccgagctgtggacctggctggccgaccacgacatcgtgagggcccagcccgcgctcgccgaatgggtcgcctcctgccgagccgccgggctggtcggagcctcaccggaacgcacccggtcgcagctcacagacgcgctcaccgtgctcggggagctacccgcccgggcggagccactgcccgtcttcgccgcccgagttttgaacggtcattcacacgcactcgatgacggcaccccgctttccaccctcgtcctgcgcgccctggcaaccctttacgacaccaccgcgccgcagtccgcggcggaacggcgtgccctgtgggctcgcgcgggtatcgctgatgacgacctgtccgccaccgtcctcgtcgccggtctgcgccccttcggcgacggcccgctcgcccgtgtgtcccgcgtatgcgccgaggccggacaggccgccagcctgaccctcgcccaactgcgcgccccaggcgagttcactctggccgttgcccccgcacccgtcgtccacgccgtggagaatcccagcatcctggctctcgcagtaagccgcttcggcccgggctgcccgccgctcgtgtgcacgtccggctggcccaacagtgcggccatccatctcctccggctactcgcggaccagggcgccaccctccggtaccacggcgacttcgacggagaaggcattcgcatcgccgcgtatctcctggacaagacgccggcccgaccctggcgcatgacggccgcggactaccgtgccgccgtcgcgcgcacaccacagggccctcagcctggccgactgaccgaggcaccctgggatcccgaactgacgcacaccatgaccgaacatggcaccgcactggtcgaggaactggtggccgacgtcctgttggcagacctcgctgcagcggttcggtaa

SEQ ID NO: 50360 - DNA, 1482 bp, Anaerostipes hadrus DSM 3319
atgaagataaatgaaaaactaataagatcacttaccgaaacaaaatatctcaatgtagataacacagatagataccgcccgattatccgttttttctatctcgaatatgagaagctaagatactggatgtatccagaagaagtctttgaagaacttcacaaagaagaatattttaaagattatacagaagaacagtgtcgacaggatctggaagttttgacaaggtgggggaatctttctgcgattcaggatacaaaaagggttacttctattgaagaattcaagaacaagaagtatcgatatcagttgacagactattccgtagagattgagcgaatggtgataagacttgagaatctgtcgattgaaggggcgtctttggaaccaactttattagagaagatcagaagcagtctttcagaaatctcggatattttaaaagaagatgatgaacatttatatggctggtgggaaggattgaattctgattttagaagattaaatcaaaactatcaggattatatgcgagacttaaatagcatgaaagcagaagagatgatgaagacaaaagcatttttgttgtttaaagatcgtttgatcgaatatcttagaagttttgtaaagagtcttcaattaaatgcaacgaatatcgaacaactgctttcaaaactgccaaaagatcagattcaaatgatcttagaacgactgacggaatacgaattatctattccaaggattgatgtggaagtgacgagacagcaattatgggataaaattcatggacgttgggctagtattgagaattggtttttaggaagcacaggttcaggttctgaagcaggaaaggtatttgatacgaccaatgagatcattcgaagaattacaagatatgcaacacgtatcagtgaacaaaacaatagcggagctaatagacgtgaagaatatgtaaagatcgcacaactatttcggaattgtgagacactggaagaagcacatcgattatcggcagttgtctttggaattgagaaaccattgcatttaaagggggatatcaaaagagaaacggaaagtatcaatagcggtgtatatgaagaaaaaccagcgctgtttacagttgttccaagagtacggatttatcgtgagaagtcacaacgaaaaggaatcgttgatcgcacaaaagaaaaagagaaaatgaaacaggagaatttaaagaaactaaaacaacagcaggaattattagatagttatgttaaaggaaatcgtctggagtttgcttgcctgccagagatcgaaccctatgtaagagatacttttttaatgtggctgtcaaaagctttagaatgtaaagaacaacaagcgaagacagaagatggaagaacatattatattgaaaaaccacagcaagatagaagatgtatactcaagtgtagtgatgggacatttgaaatgccagcatatacgatcgtatttaatgaggagtag

SEQ ID NO: 50361 - DNA, 1137 bp, Anaerostipes hadrus DSM 3319
atgaaaccattggagatactattaagtaagcgatggatcttgaaggatcgagagaaagaattatattatcagttaaaagatgagattggaaaaagcagagactttctgacagagaagttaggatatcaggcgatcataacccaaaatcttataaaattagagaagataccagcttatgcacaaaactggatgggaattcaggatttttcggatcatttggaatacatcttcctatgtatgatcttgatgtttttggaagatcgtgatgcaagagagcaattcgtgttatcaatgttgacagaatatattcaagcaaatatcaaagaagaacagattgactggacgatctacagttatcgaaggcatcttgtcaaagtgatgaaatactgtgtcaagattggaattcttgagattgatgatggaagtgaagatagttttataaaaagtgatgagggagaagttttatatcagaacacaggagcctccagatattttatgaagaacttctcacgagatatttctgattatcaaagtcaggaggatttcttaaaagaagaatggatcgggatgaatgaagatcgtggaattataagaagacagagagtttatcgttctcttttgatgtcacctggaatttatttaaatgatgatacagaagaagattttgcatatgtcaggcattatcgtggaatgatcgaggaagagctaaatcggttttttgattgtgaattgcaagtgcataagactagtgcatttttgatcatgggagaagatagcaatctggggagatcattcccagaggagaatacattatcagatattgttttgttatggtgtaatttattccgacagaagattgcggatggaagcatagaagtaccagcaggggaagatattgtgatttcaaggcagcagtttctgacgatatcggaagagtgcaagaggcagtacggaagtggatggatcaaaacatacagggagatgacaatgggtgaattttgtaaaaaattaaaagaatacatgatctttatggagatgatcatggaaaaatatgaccagatcatagtgtatccgattgttggaaaagtagcaggatgttatccaaaggattttaaaggtggtgaaacaaatgaataa

SEQ ID NO: 50362 - DNA, 4122 bp, Anaerostipes hadrus DSM 3319
atgaataatagtcggtggaaaatgaacaaaataggattactggatttctggtattacgatgatcaggagttttattttctggacggaagaatgttattaagaggttctaatggttctggaaaatcagttaccatgcaaagctttattccgcttcttttagatggcaatatgcgtccggaacgactagatccatttggctccagagcacgtaaaatggaaaactatctgttagaagacggtgatgaaagagatgaacgaacaggatatctctatatggaatttaaacgaaaagatgttgaaaattttttaacgatcggtattgggttgagagccagaagaggaaagaaattagatccttggtatttttgcattacagatggcagaagagttggtaaagatatttttctgtacaaggatttaaaagaaaagattgcatattcaaaaatggaattaagaaacaggattggagatggcggacgtatttttgaaagtcagaaagagtatgctgcatatgtgaatcaggtactttttggttttgagacaatggatgaatatcgagagatgttagaattgttgatccagttgcgtacaccaaagttatccaaagattttaaaccaacggtgatcaatgatattcttgggaattctctacagacattatcagaagatgatctgcgtccgatgtcagaagccattgaaaatatggatggattaaagacgaatcttgacaatctaaaggaaagtctggaagcagcaaaacagatagagaaagtatacgatcaatataatcagattgtgttataccacaaagcagcaaaatataaaaaagaaactgtccagtacaataagataaaagatcagttaaaaactttagaaataacgattaaggaaacaaaagaaaaatatgaacaggaattacaacatcatgaagaattaagtacagaacaatctgcaagacaggaagagagacgttctcttgaacataatgatgcaacgaaattaaaagagcaagaacaagcacttacaaaacagatctcagatctggaacaaaagattgaagaaaaacaacgtcaattggagcagaaaagagaaaaacagattcaaaatgatgatcgtttaaagagacttcaagatgaaaaagaacagtcaaaagaagaaaccaaagatatatttgatgagatggaagaatgtatttcagaagcagcgtttgatgaatttaatttcatgaaagacgaatttgagaaatcagaagatgaaggttttgattttcatgcacatcgtcagatattagaaagatatcagcaaaagattcaggatggaatcgatgtgcttgaaaaagagagaaaagcacaagatcagtatgacgaacatcttaagaaattagatgaattccgtgctcaaagagaaagtgcagaaagaggatatcatcagtatgagaatcaatttcaagagatcaaagaagaactgacggagaaggtttatcattgggagaaagatacaaaattactgaagttagaagacgaacagctgcaagcgatcagccggatgatcaaagggtatatatttggaacagatgaaggaaagatttatgagatcgttcgtcatcaaaaatatatcaaggaagatcaattgagagatcaacagagaattttaactgctcacaaagaagacgttgagacacaattaaaagaaaaaagggcacaattagaagaatggcagaataaaaaagatccagaacctcaactttcagaagaagtttacgagaatcgtgaacttttaaaagaatatcagattgaggcaattccattttacaaagcgattgattttgcggatcgattaaatgatgaacagaggaatcatttagaagaagcactttacagaatgggagttttgaatgcgctgatcgtagaggaagaagaccgtccaagaattgaatcattagatcagggaacttgcgatacttatatttatggaagtgtagagcatgtaaagaacaatatgttggaattgttaaatattgataatgaagagaatgacattttattttatcaaaagatctcaaatgtactttcttccattggatatataagttcaaatgagaaagaagcatctacttggatccatgaaaatggtaattttaaaatcggaattctggaagggacgatcacaggaaattatcaggcaaaatatattggagcaatgtcaagagaacgttaccgcatggaacaggaacatcttttagaggaaatctgtgagaatctgcagcatgagttagatgtcaaacaagaagaaatcagacaaaacaatgaacagattatattattacataaagaagaggaaacatttcctgaatttcaggatctaaagcttgcagcgaaagagtttgatcaaaaggaacatatactttctatggttgaacatcaggtaaaggagcaacaagaagttgtagaaacttcagcaaaatccttaaatgcgattcatctggaagttcaaacaatctgtagcggaatttatcttgcagtgcgttttgatgtttttatgaaagtgaaagaaagtcttgctgaatatcagaatctgttaatgaaactacagttagagcatcagacgtatttgaacagattatcagatattaaaggaaagcaagaatatgcacaggatatcgaagtagatattgatgagatcttatacgatcaaggacaggcaaaaagacagtgccgtgaaatcaaagtgcaaagagatcttgtgatcgatcaattgagtttaacagattatgaagagatcaggcatcagttagaccagtgtctggaacgtattgcaaaactgccagcagaaatagaaagatctatagtgagaagtacttctttacgaaaggatctggagagattcaaacaagatctggaaatgaaaaatatcgatcaggaacaacaagcgatcattgttggatttttgaaagatgcattttgcaaggagttaaagcaggggttggttgagcttgatttaaaagcagatattcaaacggaagaaggaatccgacaattgtctaatatgatctgtaaaacatatcgagatattgcagaaagaagaacacaaaatgatgcatttgcactgattcaggaaaatttccagaaaaataaagtatatctgcatgaatattttccgacgattcatacgatgtttgatgatattttggtaccagaaagcttaggggaattccagatcaatcgaatcaatatcactggaaaatacagaggtgtcacaattgaatttaagaaacttgtggagagattaaatgtggatgttgaggaacaagcaagattattaagtgaccgagacagagaattgtttgaagatattcttgccaatacattaagtaagaaaatccgtgcaaagattcaatcgagtaagcgatgggttgataacatgaatcagctgatggaatctatgcagacatccagtggattaaagttaagtttgaaatggaagagtaagaaagcgggaaaagaagaacagttagatacaagaaaattagtagatattttacaaaaagattatgatatcatgagggaagaagaagttctacaattaagccagcatttccgttcaaagatcgatgaagcacgtaaaatgtcaagtgaatctgatggagtacagtctttccacagtattatgaaggacgttcttgattaccgtaaatggttcgaattccagttggaatatcaaaaaacaggcgaaaagaaaagagaacttacagaccgaactttctttacatttagtggaggagaaaaagcaatggcaatgtatgttccattattttcagcggttgcggcaaaatatgaaggtgcaagagaggatgcaccaaggatgatttccctagatgaagcatttgctggtgtggatgagatgaatatcaaagatatgttccgtctgatggtcgaatttgaatttgattttatgatgaattcacagattctatggggagattatgaaactgttccagtgatcgcagtatatcagctgatccgcccagagaatgtcaaatacgtgactgtgatctcatatgtatggaatggaaaagttcgaagtctggtagataaaataggtgatgaaattgagagaggataa

SEQ ID NO: 50363 - DNA, 1305 bp, Anaerostipes hadrus DSM 3319
atgaaattgagagaggataaaaactcagaatataatcagttgctgcaagaagcaatcatatattttaaaaaatatccagtatttcacaagatattttcaggcttttgtaaaaaatacgaaagtcttgggcatcttggaggtacagttgttattaaaaatttgacgaaagatgagaaaatgcagttatcgggattctttcaaagagatttttacaagaataaaacgatctctatttctatgcagaggatggagaaagcattaaaagatagtaaatttgaatcacttgaatggatggatattctggaagaatactttgaccataaaatgatctggaaaaaagaaatgttacaaaaggaaaatgaaaaacgagagctgttttttgctctgcttctaaaagaaataaaatcggatcttgtaagagaatggctaaatgaccggatcagagaaagatcattgatctatcaacgactgcaaaaggaatacaagaattgtccagatacactaaaagtattgttgcgttctatagaatcagggataacaaatctacctgtgtttttcgataagaaagaaaggcttgctgtatatgcggcacaggtgacaggcaatccgcatttctttgactcgaatacaattgcggagattttcctgtttgattttatatcttatcattttcatatgcaaaatggagaaggactatcagatatggaatatcgcaatcagcagtattatacggcaggaatcataagagatgatctttcaaattatgtaacagtttatggaattcatgcaaaagatacagattctattttacattcagggatcgaaggattttttgacaggaaagaaccaatattgctcacattgtatacattaagcagattgaaagaggtttatggagagaaagaaatttatattctggagaacccatctgtcttttcctggctttgccagcaatatccagagaaaagttttgtttgcaccaatggacagttaaggttctcggcttttgtattattagatcatttatccagaacatcggacctgttttattctggtgatcatgatccagaaggattattgattgctcaaaaattaaaattacgttataaagaacgattaactttatggaattattcgatggatctttatgagcaaaatctgtcagatgtaacattaaataaacgaagattaaagcagctggatcagatattcattgaagaacttcaagaaatcaaagaagatatgaagtatcaaaaaaaggcagcgtatcaggaaattatgttggagaattatatattgcaataa

SEQ ID NO: 50364 - DNA, 1281 bp, Rhodococcus sp. AW25M09
gtgggcgccgcgaacgcgttcgtcgaggaagaccgcctcggtctcttttcgttcgccgtcgccgagaagcgatccgaatacctggccgtcctgcgcgcattcgacacggctcgcgcgaactacgtggtgctgttgcactcgggagacgtagccgacctcctcgcgcgtgggaccggtcggcaggaaccgctgacggcgctcgacatcgcccccctgctcgatcagctgcacgcgtggggcctgctcgagcgcagctacgacggcacccgggccgcgaccctcgccgagtaccgcaaccgccatttcgtctatcagttcggtcaggccggttacaaggcctatcgagcggtcgaggacgtgctcggcgctcgcctggacgacgcctcgctgtcgcggctggtgttgcccgagctgctggccgatatgcacgagctggccgaggcgaaccgacagaaagacggcgatcggatctaccgaaaactcagtcgtctcgattcgacgctgtcggaaatggcgacccgcgcggcacatttctatctcgtgctgggtgacctggtgcgcaccaccgagatcactcccgagtccttcctggtccacaaggacgcgctgctgacacacatgcgcgagttcagctcggacctcacgcgctacgccccgaagctcgccgaggcgatcgcactcgtcgaggcaaccggcatcgacgatctcatcgagcgcgccgccgtgagcgacgaacgtgtgtttctcaccgtgaccgaacggcaggccgactggaccgatcgctgggccgggctgtcgcactggttcgtctcggccgagtccgaactcagcgagtccgagcgccttcgcgaaggcacgatgagcgcgatcgccgccgtgctgtcgctgctgcgtcgtgtcaccgagacccgcaaaggcggcgtcagccgcgaaagtcaactgcgccacctggccggatggtttgctgccgcacctaccgaagacagcgcgcacgcgctgttccacgccgtgttcggcctcggcagacctcggcacctgtcgatggtccaccccgatgccgacatcatttcgacgtccaggtcctggtgggaggcaccgccggtcgagatctcgcggaccttggccgagaccggccgaaccccacccccggcgtgccgggccgggtacagcgcaacgacggtggcatccggcgactccgcgaacagcagctcgacgcgcagcgttcgcgcagtgccgcggcgcagtcgttggcctccacaggaattcacgaccgcgttctga

SEQ ID NO: 50365 - DNA, 1434 bp, Rhodococcus sp. AW25M09
atgagagctcgcgaaatctcctccctcgcactggattcctaccagcgtgccgccagggtggcgctgtcgaatcacctggtgaccaccacatatcccgatcgaatagccctccctcttctgcgcagatgggcaaccgagctgcgcgaggacctgctcgagctgttcgggtatcggctcgaggtcaccgaaaccaccgcgcgcctgttcccggtgatcgaccgactcgacgacagccaacccgcccggacgtcgaccgaccgaatcttcgaccgtcgcagatacgcgtatctttcgctggcactggcggcactcggtcgagcgggcaaccagatcacactctccgagctcgccgatcacgttgcggcagaggcgagccaagtcgacggagtcgagctgacgaccgatcgagcgagcgacagagatgccttcgtcgacgcgatcggctggctcgcgacccgcggtgcgatcgccttggccgacggcgacgcatcaggctgggccaacaatccgtccgcaggtgaggccctctacgacatcgaccgtccggtggtcgtcgcgatgttccgtccgccccgtgccgtccagcatctgcgctcgattcgcggattgctggcaggctcggacgctccgctcgaacccgacgatctcgattccgagcgtactgatcccgagcgcccggcagacccgaaggaaacgctgcggtcggtgcgccgagcactggtcgaacagccggttgtctacctgaccgacctggatcgggacgcccgcgctgcgctggccgcgtctcgcactgttgcggatgtcgagttgctcacgggcctcgttgccgagcgtcgctccgagggagtggctctcatcgatacttcgggccgactgtcggattaccgattccccagtaccggaaccattgctcaggtcgcgttgttgattgcgggtgaaatctcggatcgggtgatcgatcccgatgcaccggcgctggcggcctatccgctgcccgacggcgatgccctgatcgaacagttggaccgagccatccctgacggcggaatcttcggcgatcttgccgagttcgggtttccctccgatgcaacgacattcgccgatgccgacagcaggcaacagtacccactgatcgaagacagctggctcgtgacggtggtcgatgatctcgtcgaacgattcggccgcaccttcgccgcccagtggcagaccgatcgggacggtctacggctgcgagcactcgctctgctgcatcggcttcgcctcgtacacagcgtatccggcggagtgttggtgcttccggtgatcgcgcggtaccgagacgtcatggtcagtgtgcgcgatcgaaccccgcaggattcgttgttcgccgccgagaaacccgtcagtaccgaacagcccgtcagtatcgaatcgtccgaagcagaggattga

SEQ ID NO: 50366 - DNA, 4185 bp, Rhodococcus sp. AW25M09
atgaccgcacactcgaatcgctttcggcccacgcgagcaggaatcgtcaacctgtgggactaccgcgatcaagagttttcttttgcggacggtcgcctggtgttgcgcggacccaatgggtccggcaagaccaaagcgctcgaggtgctgtttcccttcgttctggacggccggatcgaacctcgacgactcaatccttttgccggagaagagcggacgatgaaatcgaacctgctctatcgggggcaggaaagcgcacactcgtacgtgtggatggagttcggtcgcggttcacgcgaggaccccgaatcggtgaccgtcggaatcggaatgcgggccagtcggcacaacgacaaggtgacccgctggtacttcgtggccgacggccgggtgggcgtggacttctcgctgttgggttccgacgaccggccgttgacgaagaagcaactcggtgagcagctgggcaccgacgccctgacggaccgcccggtcgactaccgcgccgcgatcgatgcccggatgttcgggctcggcacccaacgctatgaccagctcatcaatttgattctgacccttcgccgtccgcagctggccaagaatctggaccccaagggtctgtctcagtcattgaccgacggtctgcgtccgctggacgagcaattggtgctcgaggctgcccgctccttcagcgatatggaagaagtgggacgtgcgctggaaggtttggcgcaagccgatcacgccgcgacgaacttcgtctcggtgtattccaaataccttcgggtacaaacacgttcggatgtggagcaggtctcgcgtcgactcgaggcggtgacgcacgcaaccaccgcgcacttcgcggctgcggccctgaaggatcggcgtctgctggagcgatcagcggcagaagttcggttcgacgaggccgaacgcgctctggatcaggccgtcgccgaccgcgagacgctgcagcgctcgagcgcctacgagggcaagcagcaactcgacgacctggccgagtcggctgcgaagctggagatctcgacggcccaacaggccgaacgggcccgcaaggcacaaggtgatctggcacagcgcaccaccgaggctgcccgagccgactccgagcttcgcgactcggtagccggggtgagccgggccgaggaagaattgcagactgcggccgaggacgccggtattttctggactcccctgccaggtacggcccgaagcgatcagatcagtacggcactgcgcgggcacgccgaagagcgcgatggcgacgtacgggcggtgcgcgaggcactgggaaccgtcgagaaggcatcgacagaacgcgcccgtgcggagaaggcggcatccaaggcccgggagttgctcgaggcggctacgacagcggtcaccgaggccgaagctgccgtcgacctggagaaggcgcacttcgccaccggcctacgggcgtggtggtcgaccaattcggcgctgtattcctccgcgggcattacctcggccaccttcgaagcactcgacgctgcgctgaaagacatcggcgacgacgacgccccgagcctcgaatccgttctcgccgatcggacagccgacggagtcgacgcgattcgtgccaggcaagcacaggcgcgcgtcgacgtgaccacccggacagccgagctgaacgcgctgaacgacgaatcggcactggtgcgggcccaacacgacgacgcgccgccgtcgttcgccgcccggaccgacacccgtgtggatctctcgggagcgccgctatggcagctggttcgttttgccgacgcggtctgcccagccgatgcggccggaatcgaatccgcgctgcaagcagcgaatctgctcgacggctggatccatccggtcgacgactttccgctcgagtccgcctcggagcagtacctcgctccgctggccgaggccacacgaccgaccggcaccacgttggcgtcggttctcgaacccgagcccggcaccgccgtcccggaatctcgcgtcctcgccgtgctcgagtccgttgcactgcaccgggacgacggagcggccccaggtggttcggtttcggtgggcgtcgacggccggtacttccagggtgtgcagcagggtcgtcacgccaaatccgatgccgagtacatcggcgccacggcgcgggcgcgtcggcgtcagcaacgtatcgccgagctcgatatcgccatcgatgccgcgaccgaagcgttggcaaccgcgaccgtagaagaacaggctgcgcgcgagctggtgcaggcgctcaacgctgccgcgaagcgactcccccgagcgacgtccatcgtgaaggcgcagcgtgcggtcactgccgccgccggcgcactgcggacctccaaggacagttctgcagcagctgaccgcgaattcgatcaggcaatcgcagacctgtcggcgaaggagaaacagctgcgcaccgcagcggtggcgcaccgcaccccgcacatcggtcgcgacatcgatgcgctcgcagcggcgatcaggcatttcgagcatcagggctcggcggtgattcgcaagcgtgccgatcacacacgcgaggccgagcgtgcccgcgaggcgatgaaccgactcgacgaagcatccggactggccgaggagctcgccgaggaggctgcgatagcagacgagagctaccggcagcaggtccaacgcctggagttactgaccgagaagctcggtgctaccgccgaacagatcgacaccgatctcgacaacgcacgtgagcgcatcgagaagtgccgcgccgagcagcgggccgcacgaaaagcggacaaggaagccggagaggcgatcggcaaggcggagggtgcatgcaacacagcgctcgaaagcctgcgaggggcagtcaccgaaaccctcggtgatgccgggcgtctcgcgccgtacgcccgcaaggacctgctcaccatcctcggcgttcacgacgtgtacgcctggcctgccagcgaatcggcctggctgacggtggaacagatcctgtatcgagtccagcaggccgacggccccgacgacgaggttccggtgctaccaccggtggtgcgcgcgctgcattcggcactcgatgcggcaacggcatcggtgaaggtcagtgattcgagccgaaagtccactcgtaccgctctgaccagtgcgttgcaggagttcgactcacagctcgccgcctcgggtcaggactaccgcctgcagtgggatgctccggacggtttgacggtggttcgcgtgcaggacgagcagggctattcgtcggtcggcgacttcgcggacagaatcggtgcggccaggtccgatcaggagctgttgctgaccgagcaggagcgccgcattctcgaggatgcgctgttgaccggtctggcgcagcagattcacgagcgaactgtcgacgcgcgcgagctcatcgcgcagatgtccgccgagatgaagcagcgccggatgtcctcgggaaacactatcggtgtgcactgggtgttggccgacaacctcgacgacggtgcccgggcggtatcgaagatgctcgatcgagacgcatcggcgctcaaccaggacgatctggccgcgatgcgagcccatttcgcgtcggagatcagggttgctcgcgcagcgcatccggagcggtcgtaccccgagatcctgtcgacgacactggactatcgccgctggcgcgtattcgccttcaccctcatcagtggtgacgggaacgaggatcgcctgaccgttgcacgtcacagtgccctctcgggcggcgaacagtcggtctcacttcatctcccactgttcgctgcggcacacgtcatgctctcgtccgccgatccgcactcgccccgactgcttgccctcgacgaagcgttcgccggtgtcgacgacaacgggcgcagcgaattgctcgggctcagtgtgcaattcgatctggacctgttcatgaccggatacgacctgtggatcacctacgcggacgtccctggctgcgcgcactacgatctggcccattcgaccgccgaaaacactgtgagcgcagcacttctggtgtgggagaacggcgaactgttcgccgaacacgacggcaccgaccttgctgccgcgctcggctcgccgttgacgcgtcgtgttccgaccccgaccgaaggtgggctggagtttgaccgataa

SEQ ID NO: 50367 - DNA, 1239 bp, Rhodococcus sp. AW25M09
ttgaccgataacagcgagtggcggggcagcgccgaattggcagccctcctggatgcagcgcgaaagaagttggaggccaactggcttcgcgtcggcggcaacatcaccgtggatttgagcgacgcgccggaattgtggcgcctgtgcagcgcgatctcacgctcgaattccagtctgcattcccgggcgcggagtacccggctcgacctccaacggttcgacgagtggctcagtcattcgctcaacggtggcctcggactgatcgacaccctcacccagcaagcgccgttgcaggacaagaagcgcatcgcggcggacaaggctcaggtgcgctcggacgcgctggaacgagccagggaggtactcggcggcggaaccgatcgcgaatggatcgaacattggatcgcatcgctgctcaaccaggacggcaccctcggcggacgcgtcgccgtcgatgcgttggcggtggccacgcaggtgctcgctcggcttccggtggacgggctgtctctgaccgagctcgcggaactggccagcggagacaccaaggctctctcgggtggcggtgccccgaaactcgttctcgatgcgctgtcgctgcgcgagaacgtgcctcgccccgtcgatcccgtcgggatcaggtcactgtgggaaaccgcgggggtctcggtcgatgcgttgtccagccgcgtgctggtgctcggataccgcgtcgaggagtcccataccgttgcacgatggttgaacgaggccgctgacgagggggttccctttcccgtcacagtggacatgctctcgcgcggcggactcaccaacagcgcgtcggtcgtgttcgtctgcgagaacgtcgccgtgctcgccgctgcggcccgcactctcggctccgcgtgcgcaagtctgatctgcaccgacggtcagccctccgctgcggtgcaccgactgttggcttcccgtgcgccgggtaccaccatccgctggcgggccgatttcgactgggccggagtgcacatggtgacccgggcggtctctcggtacgacgcggtaccgtggcgaatggacgtcgactcctaccgagccgcgctggacgcgcggaactcggagccgttgaaggggcatcctacggacagcccgtgggccccggaactggctgctgctctgcgcgattcgggtcgagcagtcatggaagaacgcctgatcccggacctgttgacggatctgcgcctggggcctgcgaactaa

SEQ ID NO: 50368 - DNA, 1491 bp, Geobacillus sp. GHH01
atggacgccacatggctcaagcccattgtcgaaaccaaatatttatcgacggaaaacgcgcaccgctaccgggcgattttgcgctatttctacatccagcacgagcggatgcgccaatttttgtttccggaagaagtgtacgcctttttaaagcagcacgaggagtttgcggattacacggaagatgacttgcagcaagacctcgaccagctcgtcaaatggaacaacttgatcgcccgccaagagacgtcccatgtccggacgattgaagagtttaagaaaaagcggtttcgctaccaatgcagcccgtacacggtggagatcgagcggatgatccgtacccttgagcagctcggggattcgttcggagggtccctcgagaaaacacggttcgaccgtttgtatgcatctctttcccgcatggaggcgatcatcgcttctgattttcaagaacaagcggatgaaatgcatcaagtatgggaagagacgttcgattattttaagaaaatcatccaaaattccgctgactatatcgcttatttgcacagtgaaaacttggaagagcggatgacgtccgagtcgtttctcgtctataaagagcagtttacggcgtacttgcgcgattttatcgtcgccttgcaaaaaacgtcgatgcagattgaacaattgcttgaagatctgccggaaaaaggggttcggcagttcatcgagcgtgtcgtcgactatgagcggtcgatcccgcgctttgccgatgcgccgccgccgcgcgctgtgcagattgaagaaaaatgggagacgtggcgcagcctgtgcgaatggtttttaggccgcgacgggcgcgagagcgagctttcgtttttgcaataccagacgaatgaggcgattcgccgtctgacgcgcgtcgtgcagcggcttggcgagcggcatcatcattttcgcagccgcaaaggcgactacttgcatttggcccgttggttttcccgccttgaatcgattgaagaggcgcactgcctgtcagcggtcgtattcggctgcttccatacgaaacatctcgtggccgatttcggggcgacagacaacatataccgcgacgtatgggacgagccgccagccgagtgggtgacgaagccgcgcgtccgccattacggggaaaagaaaaagccgcaggcgattgaagacaaagaacgggagaaagaagaagcgcgcctccgctatttggaagaaaaagcgcgcgaggaagcggcgcttaggcagcttgtgaccgacgggaaaatcgtgctggctgaccttcccgaggtgactccatatgtacgaaaaacgctgctcggttggatcgccaaggcgatggggcgcgaggggcaagctattaagacggaaaacgggtgggtggtcaaggtggcggcgaaagaggggacgatttgccttcgggcggaagacggggaactcgtaatgcccaactatgaaatccacgtgctggcaggaggtgaatga

SEQ ID NO: 50369 - DNA, 1197 bp, Geobacillus sp. GHH01
gtggagacggcgtttgacgacaaggcgaaggaagcgctcgccgcgctgtttgagcagttttggatcattcgcgaccaagagccggatttgtatcagctcatccgcgagcgtgaacatgtgttgaaacggtatgtggaggagaagtttgggtatcgactcatcgtccaccgctatttcgccaagctcgagaaaattcccgccgatcccgagccgtggatgggcatcgagtcgttccaagagccgcttgactatgcgctgttttgctgcttgatggcgtatttggaaggcaaggcggtggaggacaagtttttgctttccgacgtgtgcgaagaaattcgcgccatgtacccgggggatctaccggtcgattggacgaactactcgcatcggcgctccctcatccgcgtgttgaagacggcggaacaaatcggactcgtccgccggatggatggggagattgaggcgttcgcccagcatgtggaggaagaggcgctgtacgaagtgccggtgctcgcccgttattttatgcgcacgtatccgaaagatttgttgcaatatgaatcgatcgacgaattgctcgccgaggagtggaaagcctcgccgcaagattatcggcgccatcgcctgtatcggaagctgtttttatccccggcggtgcatcggacggaaggggacgagcaagacttttactacttgcgcaacttccgccatcggctgcgcgatgacatcgaagcgcatacgccgtttcggtacgagttgtacaaaaacgccgccatgttgacgctgcctgagcggcaggcgccgtacacgacatttcccgaccagaaaggaacgtcggagatcatccttcatttttctgccttggtgcgcgagcggcttggggaatatccgccggatgaatacggccgcatacgattgacgcctgaacaattttccgcctggcttgccgattgccggcgccgttacggggctgggtgggggaaaacgtaccgcgacatgtcggctgccgagcttgtccgcgtagtgcttgcggcgctcaacgaatggcgcatggccgatgtggagcacgacaccggaatgatcgtcctttatcccctcctcgggcggatgtcgggacggtatccggatgattttgacgcgaaagagggaggagaacatggcgaatccatgggtgcttcatcgtgcggggctgattaa

SEQ ID NO: 50370 - DNA, 4122 bp, Geobacillus sp. GHH01
atggcgaatccatgggtgcttcatcgtgcggggctgattaatttttggtattacgacgagcagtattttcatttcgctgacggtaagctgctcttgcggggaagcaacggggcgggcaagtcggtgacgatgcaaagcttgatcccggtgcttttagacggcaagaagacgcccgatcgcctcgatccgttcggttcacgggcgcggcgcatggaagactacttgcttggggaaaaagatgtcgtcaatcgcgatgagcggacggggtatttgtttttggaatacaaacggaagacatccgaccaatacgtcacaacgggcatcggcctgcgcgcgaagcggcaaaaaagcctcgatttttgggggtttgtcctctttgacaaccgccgcatcggctatgaccttcagttgtataaacaagaaaaaacaggagaaaaaatcccgctgacgaaacgcgagctcgccgcattgctcggtgcgggcgggacggtcgtcgagacgcaaaaagagtatatggagctcgtgaacaaacatgtgtttcgttttgagacgatcgacgcgtttcaagaattgatcgaactgctcattcaactgcgcagcccgaagctgtcgaaagactttaagccgacggtgatttatgagattttggaaagctcgctgcctccgttgaccgatgacgagctccgccatttatccgaaacgattgaaaacatggaccaagccaagcagcaacttgagcagctcgaacgcgacgaacgggcgttgaagcgtctttgcgatcagtaccgcctgtacaacgaatatatgatcgccgaaaaggcggcagaatacgtaaaagcggtcaaacaagcggaacagctcgctgctgaacaacaccgccttcacgatgaagaagaaaagacgcgaaaggcgcttgatgagcttgaggagtccatcacccgcctcggccgcgaggaagacgtgctgcgagcgcgcgaaatcgacttggctggccatgaagtgtttcagcaggcggaaaagtatgaacagctgaaagccgaacggcagcgcctagaggagcggcgggagcggcacgagcagacgattgcggaaaaagaacggcaggaacgtcagcaccgccgccgcctagatgaatcggaagcgcggttggatgaccttgagaagaagcttgaagatgagttggagcagttgcgcatggatgccgaagaaggagcgtttcccttgcatgaaacgaacgaaggcgactttcaccgccatcgccaaaagcagcaggagttttcgtttgccgcttggaagcaggaagccgatcgtcatgtcgaacggcttgaggggctggcgcgcctttggcgcaggcatgacgaggtgaaacggcgctatgaagaagcgagcagcgaagcgggcgaaaggcggcgggaaatggacgaatggcgccaccagcaatggaaatgggaagagctgttcgaagaggagaaagagcggtttgaacaagccgtgcttgcctgggtcgagcagggaggaatcgacgtttccgaaacggacattcaggcgtttttgcaacaaatgggcgccctctatgagcagtattcgctcgatgatttgaagcgcccgttcgttcaagcgtattacgatgccgtcggcaagaaaaaggatgagaaatggcggctcgagcatgacatccgtctgttggaagaaaaacgggcagagcgcgaggccgaactgcgtcaatggcgggaacaacgcgaccccgagcctgaacgggatgaacaaaccgtcgccgcccggttggcgttggaggagaaaggcattccgtttgtcccgttttatgccgcggtcgaatttgtcgacgatgtgcctgacgatgtgcgcgagcggatcgaatcggcgctttcacacgcggggctgcttgacgccctcattaccgctcgcgagattgacgtcgcctgcgatcgtgtgctcactccgaacccggctcatatggcgcatacgctcgccgattatttgcgccccgacaaagacgcccctgtgtcaatggaacggatcgacgaagtgctccgaagcatcatgatcaccgatgtggaacaagaaggcggcatgacgatcgatgaaacggggcgctattcgctcggccttgtgcgcggccatgcgccgcggagatcgaaggcgatgttcattggccgtgcggcgcgcgaacggtggcggcttgagaacatcgcggcgctggaagccgagatcgccgctgtggggcaagagatcgaccgtctgcgcggggcgcatcaggcggtggaagcggccatccaagcgctcgccgactggttggcgtccttcccatcggaccgcgatgtgcgcaccgcgtttgacgaagcgcaagaagcgcgccgccaagccgaaagcaaagaacgggaatggaagcggcaagaagaaaaagccgctctcttggcgcgcgaatggaaacaaatcaaacaacagctccacgacgagtcggccgagctcgatttggcctttactttagacggctgtgaacaagcccagctcgccatgaaatcgtacgtccgccatgtgcacgaactcgaagtgctttaccgcgaaacgcgccataccgaggcgatgatcgcccaacagcgcgagcggctcgcggcgctggaaacggagatcgacgaagcgaaaggcgaacgaaatcggcttcgggatgaaaccgagcggctcgccttgcgaatcgcggagatggaacggacgctcgcgcaaatgggggcggatgacattcgcgccgaaatcgcccgcatccaagaacgattggcgtttttgcgccgcgaaattccgcgccttgtcaacgaacgggcgcggacggaacagcggctcatgcgcttagtcgaagagcgggaaaaaggggcgcagcgggaagcgttcgcccgcgagctcgccgcgatgtgggaaaagtcgtttgcccgtgaagcggcgcttgggcttgtggatcttgatcgttcccgctccctcctggagcaggcgaaagaagcgaaacaacggtacgaagcagtgttaaaagagacgcgttcctcgcttctggcgcggctgaacaccgtctttttccaagagtcgtccaacttgaccgaataccgggcgtccttcgagccgctggaagaacaaacgaagcccgaatggaccgccgctgccccagacgatgagatggccatgaaagccgcggactggcgggagaaacaagaacggcacgtcatttacctcgactacaaaggcgagcgcgccacgccgtttgcggtgctggcggaagtggagcgcgacatcgtcttgcagcacgagtatatgaaagaacaagaccgcgagctgtatgaggacgtcattttaaaatcagtcggccgcattttgcgcagccgcattcagcgcgccgaacggtgggtgaatgatatgaataaactgatgggcggcctcgacacatcatcagggcttgtgctgtccattcaatggaagccgaaaacggcggagacggaagcggagctcgatacgaaagaattggtgcgcctattgcggatcgattcacggctgttgaaagaggaagatttgcagcgggtgacgaaccatttccgctcgaaaatcgcccgcgcccgcgaattgcttgaagagcgcggccaaggcagcacgctccatcaaatcattaaagaagtgctcgactatcggaaatggttttccttcactttgtactatgaaaaaacaaacgagccgaaacgcgagctgacgaaccaccgcttttaccaattcagcggcggggaaaaggcgatggcgatgtacattccgcttttcgccgcggcgtattcgcgctaccaagaagcgggcgatgacgccccgtacatcatctcccttgacgaggcgttcgccggcgttgacgaaaacaacatccgcaacctgttcggacttgtcgaacagctcggctttaactacatcatgaactcgcaggcgctttggggcgactacgacaccgtgcccgcgttgtccatttgcgaactcgtccgcccgcgcaatgcgtcgtttgtgaccgtcattcattaccgttggaacggccgcgtcaaacagctgatggtcaatgataaagaatgggagacgatcgagacgtga

SEQ ID NO: 50371 - DNA, 1221 bp, Geobacillus sp. GHH01
gtgagcacggccaaggaggcggctgcctttttccgatccgaaccgggcttcaagcggctgtttgccgaaatgaaacgcaagtacgagtcgctcggccgcgtcggcggcgcggtttcattgcagtcgttctccaaggaagagcgggagtcgatcgccgcctttttcggcaaagacgtctcccgcgtctcccttatcgcgtttgaaaaacagctcggacagacgaggtttgcgggcgttgggcttgtcgagctgcttgaacagtacttcggcgccccgcttgtctcaaacaaagaacggcgccaggcggaggaagaggaacgggatcgtttttttgcgcgtctgaccgaggagcatcattgggttgagtcggtccgccctcagcgcttcgtccaaacggcgtacgaagccgaccgccgcagcctggaggaggccatccgccttgtcggcgccgccctgggctacttcccgctcccgtcatacatgcgcctcccgctctttgcccagcaagtggcgggcgacccgcacgcgttcgatttgtccacgctaccggggagattgttgctttcggcgttgcaagcgaccgtgcccggggattgggacatggcatctgtagagagcgtcaacgagttgctccagtccgtcggcttgctccgtgaggatatcctgaactttgtcacatgcgccaacattcttgctgaaaccaaggacggaccgcatcctgttttctccgctgcctgggaggcgaacacggcgctgaacatgccgcttagagatgtgctgtcgcttgtccgcgcccgccctgcccatggggggacggtgtacattgtcgaaaacgcgggcgtcttttcgacgctgcttgacacccgcgccccgcttgtcagcacgaacgggcaaatgaacttggcgacgatgaagctgctcgatttgctcgcggcttctggcgccaagctgtattactccggtgacttcgacccggaaggattggccatggcggagcggatgcaggagcggtacggaccgtccgtcaccctttggcgcttttccgtggacgattataaggctgccaaccctgtcgtcgacctcacccccgagcgcctcgccaagctcgcgtccgtaacgtcgacgccgctgcagccgctgaaagaggagatggcggaaacgaaaaaagcggggtatcaagaggcaattatcgggaggctgacagaggatatcaacgggtag

SEQ ID NO: 50372 - DNA, 1494 bp, Amycolatopsis azurea DSM 43854
atggatccgttccgtgtaccgcccgagctgttccgtttcaccgacggcagcaggtccgggctccccctggcgatcctgcacgccttcggtgaggcgaacgaacggctcgagacggcgctcgggatcgacgacgtccgcacggaactgcgggcggtcggctggatggagacgctggccgacgaagacctggtcagcacgctggaccagttgcggaacgacaagctcctcgacgtcgtccagaaccacgcgggcgattaccggacggcgtccgagtacgaacgccgcaatctccagtactcgctgacccggctcggcgaagcggcgtacgcgggcgtggtccgcgcgaacgaggtgctcaacgccaccggcgccctgcagacagccaccctcgaagcgctgggtgagcggctcggagagctcgcgaagcagctcgaagacggcaccgacaggcgcgtgttcagcacgctcaccgaagccgagggccatctagaggcgttccgcgacaacacgaagcgtttcaacggcgacctccagcgcctgctgcacgccgaagccgacctagcgacgtttcacgaggtcaaggcgtcgacggtcgcgtatctccaggagttcctgaacgacctggagcatcacacccacacgatcgccacccgcatcaaggagatcgacgaccacggcatcgagcgcgtgcaccgccgggcgctcaacggcgcggccctgccgaatccggatcagcgctggctcgacgtccgcaaggcccgctgggacgggcttcgcgcgtggttcctgcccgaagacggggcgacgccgcgggtcgaggacctgcaccaggtcgcgcggcgggcgatcatcacgctcttgcaggtgctggaccggatcaccgagtcgcggcggcgcgcgagcagcgcggtcgccgacttccgcgagctggcgcgatggttcaccgtcgtcccggcgcaggaggacctgcatcgcctgtggtccacgatgttcgggctcagttccgcgcggcacgcgcatctggcccacgcggacccggaagtggtcagcacgaccgcgtcgtggctcgacgcgccgccggtggaagtctcggagctgcttcggtcggcgggccgcaccgagcggttcaccaggaccggacgcgtccgcgacgtcacggcgatccgggcggcgcgtgtccagcaggcgatcgcggagcgcgccgaactcgaggcggcctggaacatgctcgacaccggcgggatcgtgcggctatcggcgttcgagaagctggaccacaccgtcttcgagcgactgctggacctgctgggccaggcgttgggcagcgcggtcggcgcggacggcacccggcggagcacgacgtcggacggccagatcgagatcgtcctgaggccgccgcccaagggcgcgctcgcgcgcctgaccaccacgagcggcgtcttccgcggccccgactacgagatcgagatcagcacggccggaggcggtgcgtga

SEQ ID NO: 50373 - DNA, 1221 bp, Amycolatopsis azurea DSM 43854
gtgagcctcacgaaccaactggtcatcgcggagcgcgaagaggtcgcccgcgggatccgggccctgctggccaccccgctcatcggcgaacgcggcgccccggagaccttcgacctcatccggcgccgccgcgagcccatccggcagtggttcgactactactgcggctggacgctcaccgtcgaaccccggctcggctacgcccggctggtcaaggtccgtgccgccgccgaccccagccggcccgcccggcggctgcggtccggacgggcggcgttcgaccgccgccgctacgtgctgctgtgcgtggcggcggccgaactcctgacggtgccggtgaccaccatcggcctgctcgccgaccgcgtggccagggcgagcggcgccgacgacctcgtgacgacgttcgacgtcgcctcccgggccgagcgtctcgcgttcgtggacgtcctcgcgctgctggagtccttcggcgtcctcgaaaccgccgacggcgacgcggagtcctttgtggacgatccggccgcgaaggtcctgttccgcgtcgacgcgaccctgttgctgcggatgctcgccgcgccggtcgggccgtcgcagctggccgtccccgccgacgacgtcgcgctgcggttcgaggaactgctggaggcggtgtcgcacgagcagcgctacggcctctcctcgggccgccacgaggacacgccgagcgcgtccgacgtccagcggaacctgtggctccggcacaccgtcttccgccgtctcgtcgacgacccggtgctgtacttcgccgaactgaccgcggaggagcgcgcgtacctcggctcgccgaccgggcgccagctgctgcggcgcgccgccgaacagggcggtttcgtcctggaagaacgcgcggagggtgtgctgctcgtcgacgtcgacgggctgtccaccgacgagcggttcccggacgacggcagcaacgccaaggtcgccgcgctcctgctgctcgacgtgctcgacgagccgcggacgacggactacctgcgcaacgccaccgccaaactgctgaaacgcttcccgcgctgggccaagacctaccggggcaaggacggcgtgcgacggctgaccgtcgacgcgctcgccgtgctgaccggcttcgggctggtccgcgccgaagccgaactcgtccggccgctcccggccgccgcgaggtacaccgaccgaaacgaggaggcgccgtga

SEQ ID NO: 50374 - DNA, 4005 bp, Amycolatopsis azurea DSM 43854
gtgaccgtgacgaggtgggtcccgtcccgcgcgggcatcctcaacatctggcgctactacgacgagatcttcgagttccacgacggccgcctcctgctgcgcggccccaacgggagcgggaagtcgaaggcgctggaactgctgctgccgttcctgttcgacgcgagcctgcgcgcgaaccggctgtcgaccttcggcaccagcgaacgcagcatgcactggaacctgatgggcgaaggcgcttccggcgccacgcgcgtcgggttcgtctggctcgaattcggcatggccggggacaagtggttcacctgcggcgcgcggcttcaggccagcacgcacacgagcacggtgcacgccgacttcttcacgacggaccttcggatcggcgacggcctttcactggtcaacgaggcgggccagccgctgaccaagaacgcgctggaagaggccctcggcgaacaggggaccgtgcacgccggcgcggccgagtaccgcgcggagatccgcgcgaagctgttccccaccttgagcgagcagcggtacgacgcgctcatcaccgcgctgctccagctgcggatgcccaaactctcgcagcggctcgacccgagcctgctgtccaacctgctctcccgtgcgctcccgccgttgggacagcaggagatcgcggatctcgccgagggtttcgaacggctcgacgcgcagcgcgaacggctgggctcgctggagaccgaggtcgacgcgacccgcgcgctcgccgcgcgccagaagacctacgcccagcgcgtcctgcgcgcgggcgccgcgaacctcatctccgcgaccaccgaactcgacgaactcgccgcggccgcccgccgttcggccgaggaacacgacgaggtcgccgcgaagaaggaagccgccgaagagcaggcggcgaagttcgaaaaggacgtcgaagagaccgaagcccgcctcgccgggctgaccgagtccgagtcgtaccaaaagggccaggaactcgacaagctgcggcagcggaccctctccgtgaaggaaaaggcggaatcgctccgctccgacgccgatcgcctccgtgccgaggcggacgccgacgaagagcgctcgcgagccgcgaagcaggtcgcgaaacggcaggccgacctcgtccgcgcgcaggagaccgaggtcgcctccgccgcgacccgcgcgaacctggccggagtgcacgacgaactcgtcgcgggcctgcgtgagccggaaaaaccgagcgaaccgacccggctgcgccccctgctgcaagccgccgtccgcggcaaacgcgaccaggtcgaaaccgtcggccgggcgctggacaagcacgaacgcgccgtcggccgccgtcaccaggccgaggccgatctggaccgggtccggtcggatttcgcggcctcgcaggagaaactggacctgacgacggcgacccgcgaactcgcgctgagcgatctgcgcacccggctcgccgaatgggcgatcggctgccgcgagctgcggttccccgacgtggaagcgatcgtgcgggacgccgaggcggaggtctcgctgctgggcaggatcagcgcggtcgccgagaccgtgctcgaagacatcatccggcgcgaggcggcgaccagcgccgcgctcgccaccgcgcgcgccgagcacgacgaactcctcgtcgaggcgggtgtgctcgaaacggaggacgtcctccgacccgagccgccgcgcacccgcacggcggaccggaccgagatgagcggcgcgccgttgtggcgactggtcgacttcgccggctcggtcccggaaagcgcgcgggccgggatcgaggccgcgctcgaaggcgccggtctgctggacgcctgggtgaactcccacggcgtcgtcgaagggcacgacgtgctcttggagaccggttcgctgccgatcgcttccccccgttcgctcgccgacgtcctcgtgccggaagccgacgcggaactctcgcccgcgaaggtccggcgggtgctggaagtgatcgcgttcgacgacgtcctccccgccggtcccgccgcgatcggcgcggacggcggctggcggatgggcggcctgtcgggcagctgggcgaaggacgctccggcccacatcggtgccgccgcccgccggcgggcccgggaacgccggatcgccggactgcgggacgagatctccggccgcgagaagctcatcgccgagctggaaggcgaactggccgcgctgcgcggcaggcgtgaactgatcaagatcgaacgcgccgcccgccccggccacgacgatctcctcgccgcgaccggcgagatgaccacggccgaggccgatctgaccgccgccgacgccgccgtccggcacctggagacgacggtctccgcgctggaatccgaggccaagaccgcgctccacgagctgaccggtcaggcgtcggagagcgggctgccgaccgagcgtgcgccgctggccgcgctcgccacggccctgcgcacctactccgaccagggcgagaactggttgtacgagaacgggaacctgcgcacggcgacccagcgggccgagacgttcgccgaacaggcggaccggtcggagggcaacgcggcccgccgtgaggacgaggccgccgaggcggaggcggaacgcaccaaactcaccgcgatgctcgacgcgatcgagggctccgtcggcaccggccagcgtgaggtgctcgccgagatcgacggcctgcgcacgaagctgcgcgagctctcgggcgaactccgcgccgcgaacgcgcgcgccaaggaactggccgtgtcactgggcgcgctcggcgtccggcgcacgaccgacgcgcgggcccgcgaagaggccgccaagaagcaggacgccgccgcgctccggttccggaagctcgccaccgggatcttcccggcggacggcgggatcgaggatctgccgaagttccaggccactctgtccgcctccgacggggtgcggtcggcgctcgacacggcccgtctggtggccgctgcgtggccgtccgtgccgcacgcgccgagcaacctcggcgaggcgctgcaccggctttccgaggcggtgcacacctgccggaacacgctcagctcccgcgccgaactcgatctggagaccgacgaggacgtccagatcttcaccgccgtcgtcgacgggctgcgggtcggcgcgaccgaactgctgaagatcctttacgcggaggcggaacagagcaggcacgagatcaccggccgcgagagcgacctgttcgacaagacgctgaccggggagacccggcggcatctcgcggcccgcatccggcaggccaacgacctggtcgacgggatgaacgcgcgcctggaacgggtgcgcaccgcgtccagggtcgccgtccggctggtctggcaggtctcccccgatctgccgccgggcaccaagaccgcgcgggacctgctgctgaaggatccggaccagctgaccaccgaggatcgcgcgtcgctgcacaagttcttccgcgagcgcgtcgagcaggcgaaggcggacgacaccgcgaccagctgggagcagcagctcgcgcaggtcttcgactacacgtcgtggcaccggttcgtggtcaaggtggaccgcgcgaacggggcgggctggcagctgctgaccaagaagctgcacggcgcgctttccggcggggagaaggcgatcgcgctgcacctgccgctgttcgccgccgtcgccgcgcactaccaggccgcgccagaggcaccgagggtgatcctgctcgacgaggtgttcgtcggcgtcgacaccaccaaccgggggcaggtgttcggcctgctgtcggcgctcgacctcgacctgatgctgacgtcggaccacgagtggtgcacctacgccgaactcggcggcgtcgggatccatcagctcatcaccggcggcgacggcgacgacgcggtcaccacggcccggttcacctggaacggccacgacctcctgcccgccgaaccgcgttag

SEQ ID NO: 50375 - DNA, 1533 bp, Rhodococcus triatomae BKS 15-14
gtgagcgaatccggccccgcacccgacgacccgtcggaacaccgtcgtgacgacccgtcggtgcgcctcgccgacgacgtcgccgccgagcggctccgcatgttcgcgttcgcaactgcagacaaacgcgccgactacctgtccgtcctgcaggcgttcgaccatgccaggacccactacgtcgtgctgctgcacgcggccgacgtcgccgacaccctcacccggatcggccggcccgcgctgtcggcggcggagatcacccccctgctcgaccagctccaccactggggcgtgctcgaacgcagctacgacggttcccgggccgcaactctggcggagtaccgcaaccgtcacttcgtgtaccagttcagccggctgggctaccaggcgttccgggcggtccgggacgtgctggcactgcgactcgacgacgccgccctctcccggctggcgttgccggatctgctggcggatctgcgccgactcgcggaggcgaacggccgcggcgacggggagttgatctaccgcacgctgcggcgcctcgactcgacgctgtccgacatggccgcccgggcatcccagttctatctcacgctcggcgacctcgtccggacgaccgagatcacccccgaggcgttcctcacccgcaaggacgcgctgctgacccacatgcgggagttcagctccgaccttgcccggtacgccccgaagctggcgtccgcgatcgcggacgtcgagcagaccggagtccacgatctgctcgaacgtgcagcagtggcagacgagcggctgttcctgaccgtcgcggagcggcaggcggactggactcggaggtgggccggactcacgcagtggttcgtcacggcgtccgacggtccgagcgaatccgagcgactgcgcgagggaacgatggccgcgatctcggcggtcctgtcgttgctgcgccgcgtcaccgagacccgtcgtggtggtgtcagccgggaaagtcaactgcggcacctggccggctggttcgccggcgctccgaccgaggacgccgcacacgcgttgttccaggcggtcttcgacctcggtaggccccggcacctgtcgacggtgcatccggacgccgacgtcatcccggaatcgcggtcctggtgggacgcaccgccggtggagatctcccggactctcgccgaaacgggaaagccggccgccgcgggcgcgccgggccgagtgcaacgcaacgaggcgagcatccgacgactgcgcgacgcgcaactcgcggcgcagcgagcgcgggcggaggccgcccggtccctcgcgaccggcggcgcctacgaccgtgtcctcggcgaggaggagaccgacgtgctgctcggcctgctgaccgcggcgctgaccgctcgcgttccggtcagcggagtcgtgcgcgccagcaccggctccgagaacggggtgcggctcaccctgactccgcacgaggcgtcgacgacggtcgagaccgcgcgcggcaggctgcatctggaccggctccgggtgagcgtccagtga

SEQ ID NO: 50376 - DNA, 1341 bp, Rhodococcus triatomae BKS 15-14
gtgagggccggacagctgtgggcccgggagatttcaccgctgacgctcgagtcctatcagcgggcggcccgggtgatcctggcgaatcatctggtgaccacctcgtatcccgatccgctggcgctgccgctgctgcggcggtgggccacggaactgcgcgacgacctgttggagctgttcggctaccggctcgaggtgacggagacgacggcgcggttgttcacggccgcggaccgcctcgacccgaccgctccagccacggccggtgaccgtccgttcgatcggcgacgctacgcgtacctcgccctggcgctggctgcgctggggcgtgccggcaaccagatcacgctgtcggagctcgccgaccatgtcgcggcggaagccacccaggtcccggccgtggacctgtcgcccgagcggttcacggaccgcagcgccctcgtggatgcgatcggatggctcacgacccgcggcgcgatccgactcgccgacggcgacgcatcgggttgggcgtccgatcccgatgcgggcgaggccctctacgacatcgaccggtcggtggtcatcgccctgttccgtcccccgcgagcactgcagcacctgacgtcggtgcgggggctgctcacggtggccgacgaggcaggcacgacccgggagacggcgcgccgagttcgtcgggcgttggtgcagcatccggtggtgtacgcggacgatctcgacgacgacgaacggctgcagctggcgttgcctcggaccgccgccgacgtcgcgctgctgaccggcctggtcgtcgagcgccgagcggagggcatcgcactgatcgatcagtcggggcgcctgtcggacatccggttcccgggtacggggacgatcgcacaggtcgcactgctgctcgccggggagatcgcggatcgcgtccaggacccggacgccccgccaccggttcggattcccttgcccgacggtcgaaccgacgacctggcgacccaactcgacaacgcgatccccgcggccggtgtgctgcgggagttggcggacgacgtaccggaacctcgaccgagcacctccgcacctgccgtgacctacgcgttgatcgaggacagctggatcgacgacgccgtcagcgaactgacgcggcgcttcggacgcaccttcgccgcgcaatggcaggccgaccccgagggcctgcggcgacggtcggtcgacctgctcgacgcgcagcgcctcgtccggaaggtcgacggcggggtgctggcactcccggcactggcccgctaccgcggagtcgtcgtcaccgtccgtgaacgcgccctgcaacccgacctgctgaccgaatcctga

SEQ ID NO: 50377 - DNA, 4158 bp, Rhodococcus triatomae BKS 15-14
atggcaagtgcgcgtttccgaccgacccgcgccgggatcgtcaacctgtgggactaccgcgaccaggagttctccttcgccgacggccgcctcgtcctgcgcggccccaacggctccggcaagacgaaggccctcgaggtgctcttccccttcgtcctcgacggacggatcgagccgcgccggctgaacccgttcgccggcgaggaacgaacgatgaagtcgaacctcctctaccgcggggacgagaccgcccactcgtacgtgtggatggagttcgcgcgcggcaccgcctccgatccggaagcggtgacggtcggcatcgggatgcgtgccagccgccagaacgacaaggtgacacgctggcatttcgtcgccgacggccgcgtcggagtcgacttctcgctcatcggcgccggtgaccagccactgacgaagaagcagctggccgagcagatcggggcggacgcgatcaccgaccgtcccgtcgatcaccgtgcggcgatcgacgcccggctgttcgggctcggtgcgcagcggtacgaccagctgatcacgctgatcctcacgctgcggcggccccagctcgcgaagaacctcgacccgaaggggttgtcacaggcgttgaccgacggcctgcgtccgatcgacgatcagctcgtcgtcgaggccgcacgctcgttcagcgacatggaggaggtcggccgggcgctggagggtctgaccaccgcggatcaggccacgcaggacttcgtggcggtgtacaccaaataccttcggcagcaggcgcgaaccgatgtcgagcaggtcgcccgacgattcgagtccgtgtggacggccaccgccgcggtgtccgaagccgttgccgggcaggatcatcggcagaaggaacgcacggtcgcggaggagcggttggtcgccgccgaacgcgagctcgatctcgcccgcgccgaactcgagaccctgcagcggtcgagtgcctacgagggcaaacagcagctcgacgatctcggagccgtcgtggccgacctgcgcaggtcgaccgatcagcaggcggacaagtccgcgaaagcgcaggcgagcctcgcgcagcgggcggacgaggccacgcagtcacaggctcgggtgacgcgggcgacggagtcgctcgtgcgcgcggaggagctcctgcaggaagcggcgggtgacgcgggcatcacgtggaccgcgttgcccgacaccgcccgcggcgacgagatcacggcgtcggtgcgagggcacgccgaggagcgctccggtgacgtccgggcgatgcgggacgcgctgagcgcgctcgagcgggccggtgccgagcggtctcgcgccgaccgggcagccgaccggggccgtgagcacctcgagtcggcgacggccgcggtgaaggaggccgaggccgcgacagcactggccaggaccgaatgccagggcatgttgcgccggtggtgggcggcgcactcggcgctgtacgcccgcgtcggggtgtcgagcgcgatgttcgtcgccctgcacgatgcggtgcccaccgtcggcaccgacgacgcggagggtttcccggagatcctcgccgaccacaccacggagcccctcgacgcggtgcgcggacgtcgtcgggacgccgaacagaccgcggcacgtgccgcggccgctcgtgccgagtgcgcagccgaccgggctcgggtcgcatccgaacacgacgacgcaccgcccgccccccccgcccgcaccggtgaccgctccggcctggccggagcgccgctgtggcggctggtgcggttcgcggacggcgtcgacgccgccacggcggccgggatcgaagcggcgttggaagccgccggcctcctcgacggctgggtgccggccgaggacgtacccgagtcgacgtcggaactgtttctgcttccccttccccccggcgatcgccccgggggacggacgctggcggacgtgctggtcgtggagccggatgcgggagtgccggagttccgcgtcgcggatctactggcttcgattgcgctgcaggatgattcgagtgccaacgacgtcgtcggggtcggggccgacggccggttccggcagggtgtgcaactcggcgtccacacgaaacccgaggcggagttcatcggcgcgacggcgcggcagcggcgccgcgagctgcggctcgccgaactggacgccgcgatcgagcaggccgaggcggagcgggccacagcgctcgccgagcactcggaggcgtccgacctgctgaacgcgctcacggcggcgggcaagtcacttccccgaccgacgggcgtgctcaccgcgctgcgcggcgtcgccgaggcagcgggcgcgctccggactcgcgacgaggcggccgcggtggcccagcgtgaactggatcaggcgatcgccgaactctccgcgcaggaacgcgcgctccgcgaggcggccgcccgccaccgtgtcgccgatccggtgcggggcctcgacgcgctgtcggcggcgatccggcatttcgagaccgcaggcgacgatgtcgtccgctgccggcgcgaccgggagaaggacatcgagcgcagccgcgaggccgacgaccggtacgcggaggccagggatgtcgcggaagagttcgcggaagagtccgccgcggcgcaggagaagctgctgcaccaggtccagaatctcgagatgctccgagagaagatcggcgccggtgcggacgacatcgaggccgacatcgaccgggcgcgcgcccggatcgacgcggccaccgcagagcagcgcgccgcacgcaaggccggcgatgtcgccgtcgaggcgatcggcaaggcggccggcgcgtacggcgccgcggtcgaggcgctgcgatccgcgctcaccgaaacacgatcggacacagcacgtctcgcaccgtacgcccggcgtgacctgctcgatctgctcggcgtcgtcggggcccacacgtggccggcgtcggacgcggcgtggctgagcaccgatcagctcgtgtatcggatcgagagcgaaccggacacaccggcaccggtggtgcccgccgaggtcgccgccctgcacgccgccctcgacgccgcgacggccgaggtgaaggtgtccgagggggcgggcaagtcggcgcgctcggcactgaccggcgccctgcaggagttcgacgcccggctcgcggctgcgggacaggactaccggctgcgctgggacgcggcggacggggtcaccacggtctcggtccagcacgaccaggggcagtcgtcgatcgccgacttcgccgcgatgatcgctcgcagccgagacgaccagcagcagttgctcaccgattcggagcggcggatcctcgaggacgcgctgctgaccgggctggctcagcagattcacgagcgaaccgtcgacgcgcgcgacctgatcgcgcagatggccgccgagatgcggggccgacggatgtcgtcgggcaacaccatcggggtgcactgggttctcgcggacaacatcgacgacgggtcacgcgcggtgtcgaagctgctcgaccgggacacgtccgcactcggacccgacgagctcgcctcgatccgcgcgcatttcgcgaatcggatccgggcgctccgcgctgcgcacccggaacgcgcgtacccggaaatcctcaccgaagcgctcgactaccgccgctggcgggtgttctcgttcacgctgatcggcggagacggcaccgaggacaaactgaccgtcgcccggcacggggcactgtccggtggtgagcagtccgtgtcgctgcacctgccgctgttcgcggccgcacacgtgatgctctcgtccgcggacccgcacgctccgcgcctgctcggcctcgacgaggcgttcgccggtgtcgacgacaacggccggagcgaactcctcggtatgagcgtgcagttcgacctggatctgttcatgaccggctacgacctgtgggtcacctacgccgacgttcccggttgcgcacactacgatctctcgcactcgacccctgagcactccgtcagcgccacgctgatggtgtgggacggagggatgctcatgcaggagcacgacggcaccgacctgacgaaggcgctcggatcacccggccggcgcaagatgctggagccgggcgggctggagttcgcggaagtgtga

SEQ ID NO: 50378 - DNA, 1506 bp, Rhodococcus qingshengii BKS 20-40
atggtggaagaaacgagtgcgcccgattacgccgcgtacgccgacaccaatcgactgaagctgttttcgttcacgatcgcggaaaaacgggccgagtacctctgggtacttcgtgccttcgaccatgctcgcgccaactacaccgtcctgctgcatgccggagccgtcgcgcacatcctcgagaagatcggtggatcggatccggcggccgatctgtcggcagcagaggtcactcccctgttggatcagctccacgtgtgggagatcctcgagcgcagctacgacggcacccgcgcggccacgctggccgagtaccgcaatcgccacttcgtctaccagttcggtcaggccggataccaggtctatcgatcagtcgaagacgttctcgccgcacgcctggactcggcgtcgctctcgcgtctcgctctgccggacctgctcgcagacatgtccgaactcgccgaggccaaccgaagctccgacggcgatctgatcttccgcaagctcaagcgcctcgactcgacactctccgacatggctgatcgagccgcgcacttctatctgaccctcggggacctcgtacggaccacggagatcactccgcaggctttcctcacgcacaaggacgctctgctcacgcacatgcgggagttcagctccgatctggctcgctacgcccccaagctcaaggaagcgatcgagcacgtcgaatccaccggggtcgatcgcatgatccgcctcgccgccgccagtgacgaacgggtgttcgtcccgatcaccgaacgcgaggacgactgggctgcgcgctggcgaggattgaccgcctggttcgtctccgcggaatcggggatcagcgagtccgagcgtctacgtgagggcacgatgagcgcgatcgccgcggttctggcgctccttcgccgcgtcacggaaacccgtcgcggcggcgtcagccgtgagagccagctccggcacctcgccggctggttcgccgccacgccgtccgaagacgcagctcatgctctgttccaggcagtgttcgacctcggtcgtccacgccatctctcgatggtgcatccggacgccgacatcatttcgcactcacgctcgtggtgggaggcaccgccggtcgagatcgcgcgaacactcgccgaaaccggccgcccgccctcacccggcttgccgagcaaagtcgcccgcaacgacggcagcatccgccgcctgcgcgaagagcagttggcggcgcaacgtacgcgcagtgccgcggcgcaatcactcgcgtcgaacggtgtttatcagcgcgaactcaacgagcaggagaccgaagttttgctgagtctgctcaatgcagcactgaccgcgcgcgttccggtggtgggacgcgtcaagagctccaccggtagtgagaacggggtgaagctgacgctcagtccctcggacggttcgaccaccatcaagaccgcccgcgggcgtatgcacctcgacggcatcgaggtcagtgttcgatga

SEQ ID NO: 50379 - DNA, 1443 bp, Rhodococcus qingshengii BKS 20-40
atgagagctcgcgagatcacgccccttgccctcgactcgtatcaacgcgcggcgcgagtgatcctgtccaaccacctgatcacctcgacgtacccggatcgaattgcgttgccgctcttgcgccgttgggccaccgagctgcgtgacgaccttctcgaactgttcggctaccgcctcgaggtgacggagaccaccgcgcgcctgttcacggtgtcggatcgactcaacccgtcggcaccggcccgaacttcctccgagcgaaccttcgatcgcacgcgttacgcctacctggcattgtgcctggccgcgttgggccgcgccggaaaccagatcacgttgtcggagttggccgatcacgtcgcggccgatgctgcacaagtcgacggcgtcgaactctccaccgatcgtgcgtccgaccgcgacgccttcgtcgacgcagtgggctggctcggagtcagaggcgccatcgccctcgccgacggtgacgcaaacggctgggcgtccaatcccgaagcgggagaagcgctctacgacatcgaccgttccgtcgtcgtagcgctgttccgtccaccgcgcgccctgcagcaccttcactccatccgcggactcctggccgccgagacctcgagcgcctccgaggacgacggaattcccgtggacgcgaaagagatcggacgccgagtacgtcgggcactcgtcgagcgcccggtcgtactggccggtgaactcgatcagcacgaattgatcgcgttggcgcagcccaagaccgcgtcggaagtcgaactactgacggggttggtggccgagcgccgcgccgagggaatcgcgatgatcgatcccaccggtcgcctctccgacgtccgcttcccgagcaccggaacgatcgctcaggtggcgcttctcctggccggcgagattgccgaccgcgtactcgacgtcgacgctcctgaactgccgaaacttccgatcccgcacgtgtcggacgatcacctgatcgaacaactcgatgccgccatccccgaggccgggatcttcgaggacctcgccgacgaggacgacgacttcgtgctgcccgccggcgaaccggccgagccaccgccacccgtcacgtacccgaaaatcgacgacgactggctcgctgacaaggtcaccgagttggtggaccagttcgggcgaactttcgcggcgcagtggcaggccgatcacaacgggctgcgcaagcaggcgctcgggttgctgcaacgtctgcgcctgacgcatgcggtcgacggcggcgtactggtgttgcccgtccttgcccggtaccgcgacgtcgtggtctccgtgcgcgaacgcgatcctcagatcgacttcgcggtggacaactccgcaccggatccggtcgacgaattcggccccgaaccttcccccaacggcgaactatcagaggtagagaacgtatga

SEQ ID NO: 50380 - DNA, 4176 bp, Rhodococcus qingshengii BKS 20-40
atgagcaacgcccgcttccgacctactcgggctggaatcatcaacctctgggattaccgagaccaagagttctcgttcgccgacggtcgactggttctgcggggacccaacggatccggcaagaccaaggccctcgaggtcctgttcccgttcgtcttcgacggccgcatcgaaccgcggcgcctcaacccgttcgccggtgaagagcgcacgatgaagtccaacctgctctaccggggccaggacagcgcgcactcctacgtgtggatggagttctgccgcggctccctcgaagatcccgagtcggtgaccgtgggaatcggaatgcgggcaacccgaaccaacgacaaggtcacccgctggtacttcgtcgccgacggccgcgtcggagtcgacttctcgctgatcggcaacgacgatcgtcctctcaccaagaagcagttggccgaacaactcggcagcgattccatcaccgaccgtcccctcgactaccgcacagccatcgacgcgcgaatgttcggtctcggagtgcagcgctacgaccagctgatcaatctcattctcacgcttcgccgtccccagctcgcgaagaacctcgacccgaagggcctttcgcaggcactcaccgacggtctccgtccactcgacgatcagttggtcctcgaagctgcgcgttcgttcagcgacatggaggaagtcggccgcgcgctcgaggggctcgcggccgccgatcaggcagcccagagtttcatcggggtctacaccaagtacctgcgtcagcagtctcgcggagagatcgaacaggtcagcacccgcctcgcagcggtcaccagaggtgttgccgccatggacgagtcgtcgctcgcccagacccgcagccgtgaggcgcgggcagcagccgaggagcgcttcaaccaggccgagcaggcgctcgagaacgcgcgcgccaatgtcgaagcactgcaacgctcgagcgcgtacgaaggcaaacagcaactcgacgacctcgcccaggccgtcgcgacgctcaagctctcgaccgagcagcaggcagacaagtcccggaaagcgcaggccgcactcgctcaacgcggcgacgaagccgacaaggctgcatcgtcggtcaagcgtgcggccgaagcactctcgcgcgccgaggacgaacttcaggcagcagccgaggacgccggcatcgtctggactcccctgcccgacggctcacgcagtgaccagatcacggcagccgtccgtggccatgccgaggagcgtgacggtgacgtacgcgtcgtccgcaccgcactggcgaccgtcgagaaggcggcgaccgaacgaacccgggccgaaaacagctctcgccgtggacaagagctgctcgaagcgtccaaggcggctgtactcgagggcgaagctgccgtggaactcgcacgcagtcagtgcgccagcgggctgcgcgcgtggtggaccgatcactcctccctgttttcggctgtcggcgccgacacgtcgctgttcgaagctctcgacgcggcgctcgccgaggtcggcgacgaagacgctccggcgctgtccgcagttctcgccgagcacaccgtggccggcaccgagacgctgcgcgagcgtcgacgtgaggccgaagctgaaatatctgcatcacacgcctccatcgcggctctcaaatccgagcgcaaggccgtctccgcggaacacgacgacgctccgcctgccttccacgcacgctccgacaaccgcagtgaactgggtggtgcaccgctatggcagttggtgcgcttcgccgattccgtcgaaccagacgtggccacgggaatcgaatccgcactccaggcggcaaatctgctcgacggctgggtctgcccggacgagaagattcccgagcacgtcagcgagcagttcctgacggctctgcccgtcaagcagcgtccgaagggacgaacgctggccgacgtcctcgaggtcgaaggcaatgccgacgtacccgacgctcgggtacaggacattctcgcgtcgatcagtctcgtcgaggcgccgggcgactccgacgcaagcgtcgcgatcggcgtcgacggccgcttctggcagggcgtcgcgcgtggccggcacgtcaaggccgacgccgagtacatcggcaccacagcacgggcgcgtcgacgcgaggctcggatcaccgagatcgacgcggctctggaagaacttgccgcggcagtcgatacggccaaggcactggtggcgcagaccaacgagcaactgagccggatcaactctgcggcaaaggaattgccgaagacaggttcgatcctgcgcgcactcaagacggtcaccgaatccgccggcgcactccgtactcgctcggaggccacggaaacggcacaacgcgaactcgatgcggcgatcgctgatctcgcggcgaaggaaaagcaactccgagcgacggcgtcgcagcaccggacgccgcatatcggccgtgaactcgactccctcgcggcggcgatccgtcatttcgagaagcagggcgaactggcgctgcgctgccgacgggagcatgccaaggaagtcgaactcgaacgcgagtctcgcgaccgtctcgacgaatcacgcgccaatgcggaggaattcgccgaggaagccgccatcgccgaggagagtctgctccagcaggtgcagcgtctcgagacgctgcgcgacaccctcggtgccagcgccgagcagatcgacctggacctggcaaaagcccgcgcgaagatcgaagaatgcaaggtcgaacagcgtgcggcgcgaaaggcgtacgacgccgccgtcctccagatcggcacggcggagggtgcgtacaacaccgccgtggagactttgcgtcacaccctgaccgaaacccgcagtgatgcagagcgactcgcaccctacgcgcgcccggaccttctcgagttgttgggcgtcaaggaacatctgagctggccggcaagttcagcggcgtggatgagccccgatcagttggtctaccgcatccagaacgaagatcgcagcgaggacgcagcccacccgcccgtcctccccgaagacgtcgacaggttgtaccgagcgctcgaggctgcgacctcggcagtccgagtcaccgacggcgcccgaaaggcaacccgcacggcactgacctcggcgctgcaggacttcgacgcgcaactcgcagcagccggacaggactaccgtctgcagtgggatgcaccggatgggctgaccgtcgtacgagtccaggacgatcagggctattcgtcgatcggcgagttcgcaacgcggatccacgacgctcgcggcgatcaggagcagttgctcaccgaatccgagcgtcgcattctcgaagatgccctgttgacgggattggctcagcagatccacgagcgcacggtcgacgcacgcgagttgatcgcacagatgggcaccgagatgcgtgagcgtcggatgtcctcaggcaataccatcggcgttcactgggtgctcgccgacaacctcgacgacagctcgcgggcaatctccaagctgctggatcgagacgcgtcggccctcggcgtcgatgaactagctactctgcgagcacatttcgcgacgcagatccgtaccgcccgcgcggcgcaccccgaacgctcgtacccggagattctgtcctcggcgctcgactaccgtcaatggcgcgtgttctcgttcaccctcatcagcggtgagggcaaggaagaccgtcttaccgtcgcgcggcacagcgcgctgtccggtggcgagcagtccgtctcgctgcaccttcctttgttcgccgcggcgcacgtcatgttggactcggccgacccgcacgccccgcgtctgctggcactcgacgaggccttcgccggtgtcgacgacaacggtcgcagcgagcttctcggcttgagcgttcagttcgacctggatctcttcatgaccggctacgacctgtggatcacatacgcagacgtccccgggtgtgcgcactacgacctcgcgcactccacggccgaacaggctgtcagcgccgcgctgctggtctggtcgaacggtgagctgcttgccgagcacgacggaacggatctggcgagggcattgggctcgccgctacggcgccgggtgccgacacccgccgaaggtgcgttggactacgcctag

SEQ ID NO: 50381 - DNA, 1467 bp, Rhodococcus ruber BKS 20-38
gtggccgacgaccggctccggttgttctcgttcgccacggccgagaagcgggccgaatacctctgggtactgcgggctttcgatatcgctcgggccaactacgtcgtgctgctgcacgccgccgaggtcggggcgatactcgagcggaccggctcgacggatccggcggcggcactgtccgcccaggacgtggcgcccctgctcgagcagctgcacgcctggggggtgctcgaacgcagctacgacggcacccgggcggcgtcgctggccgagtaccgcaaccggcactacgtgtatcagttcggccgcgccggctaccacgccttccgcgccgtggaggaggtgctgagcgcgcgcggcgaggacgcgtcgctgtcgcgtctcgcgctggcggatctgctggccgacctgaccgagctggcggcggcgaacgacgccggggacggcgagctcgtccaccgcaaactgtcgcgactggacacgacgttgtcggacatggccgagcgggccgcggggttctacctgatgctcggcgacctggtgcgcaccaccgaggtcacacccgaatcgttcctggcgcacaaggatgcggtgctggcccacatgcgggagttcagcaccgacctggcccgctacggacccaaactcgcggcggcgctggcgcgggtgcgggagaccgggatcgaccgcatgctggggttcgccgccgcgcacgacgagcgggtgctgatgcccgtgcccgagcggcacgcggactggcgggcccggtggcacggcctcgaacggtggttcgtcggcgccgccgacgtgccgagcgagtcggagcggctacgggagggcacgatgagcgcgatcgccgcggtgctggcactgctgcggcgattgacggagacccgccgtggcggggtgagccgggagtcgcaactgcggcacctggccggctggttcgcggccgcgccggacgagcggtcggcgcacgcgctgttcgacgcggtgttcgacctgggccgcccgcggcacttctccgtcgtgcatcccgacccggagacggtcccggtgacgacgtcgtggtgggacgcgccacccgtgccgatcgcccggacgctggccgagaccgggcgcaccccgtccgcgggagcaccggcgcgggtgcagcgcaacgaatccgggatccggcggttgcgagagcggcagctggcgacgcagcgggcgcgcgccgaggcggcccgctccctcgcggcgggcggcgtggacgagcgggagttgtccgagccggagaccgaggtgctgttgggtctgctcgacgcggcgctgtcggcgcgggttccggtcagcggcaccgtgccgggtgcgacgggcacccagaacggggtgcggctgacgctgagcccggcccccgagggcaccgtggtccggacggcgcggggccggctgcatctggacgggctgcgggtgagcgtgcagtga

SEQ ID NO: 50382 - DNA, 1365 bp, Rhodococcus ruber BKS 20-38
gtgagagccaggcggatctcgccgctcgaccgggattcctatcagcgggcggcgcggctgatcctgtcgcaccacctggtgaccacccggtaccccgaccgggccgcgctgccgctgctgcgccggtgggcgacggagctgcgcgaggacctgctcgagttgttcgggtaccggctcgaggtgaccgagacgaccgcacggttgttcaccgtcgccgaccggctcgatcccgggggcggcgcgcgctcggtgaccgaccggcccttcgaccgtcgccggtacgcatatctggcgctggcgctggcggcgctgggacgcgcgggtgggcagatcaccctgtcggagctggccgagcaggtcgcgtccgaggccgggcaggtgcccggggtcgaactggctcccgagcgggcgacggaccgggacgcgttcgtcgacgcggtggcgtggctggcggcgcggggggcgatcgcgctggcggacggcgacgccggcggctgggtgtcggacccggaccggggtgaggccctctacgacatcgaccgacccgtggtggcggcgctgttccggccgccgcgcgcgctgcagcacctgcactcggtgcggggcctgcgcaccgccggtgaccgccccgacggcggccggagcctgggcaccgcggaggtggcgcagcgggtgcgccgggcgctggtgcagcggccggtggtgtatgccgaagaactcgacgacgaggagcggctgcagctggcgctgccgcgcacaaccgcggggatcgagctgttgacggggctggtggccgagcgccgcgcggagggcgtcgcgctggtggactcgtcggggcggatgtcggatctgcgttttccgggggtggggacggttccgcaggtggcgttgttgctggccggggagatctgcgcgcgggtgtcggagccggggtcggaaccggtgcggtggccgaggccggcggacccggaggcggagctcgaggcgggattggacgccgcgatcccggcggccggggtgttcgcgtccctggcgggtgacgcggctccggcggaggcgccgccggtgccgcagccggcgccgacgcatccgctggtcgaggacagttggctggcggagacggcggcgaagctggccgacgagttcggccgtaccttcgccgcgcaatggcaggccgatccggccggcctgctcgacacggcgctgacggtgttggagcggcaacggctggtggcccgggtgcccggcggggtgctggcattgccggcgctggcccggttccggggcgtggtggtgacggtgcgtgaacgcgacccgcgtctcgcactggccggcgaggattcgaacgaagcggagatgtcgtga

SEQ ID NO: 50383 - DNA, 1362 bp, Rhodococcus ruber BKS 20-38
gtgagcagtgcccgtttccggcccacacgtgccgggatcatcaacctgtgggactaccgggatcaggagttctcgttcgcggacggtcggctcgtgctgcggggacccaacgggtcgggcaagaccaaggcgctcgaggtgctgttcccgttcgtcttcgacggacgcatcgagccccgacggctgaacccgttcgccggcgaggagcgcacgatgcggtccaacctgctgtatcaggggcaggacagtgcgtattcgtatgtgtggatggagttctgccgcggacgctgggacgatccggaagcggtgaccgtgggggtcgggatgcgcgcagcgcgcggcaacgacaaggtcacgcggtggtacttcgtcgtcgacggccgggtcggtgtggacttctcgctgctggacgaggccgatcgtccgctgacacggcggcagctgatcgaggaggtcggtgccgatacggtcacggaccggccggtggactaccgggcggcgatcgacgcgcggttgttcgggctcgggatcgagcgttacgagcagctgatcaacctgatcctgacgctgcgccggccgcagctggccaagaatctggatccgaaggggttgtcgcaggcgctgaccgacgggctgcggccgctcgacgagcagctggtgctcgaggcggcgcggtcgttcgccgacatggaggaggtgtcccgcacgctggaatcgttggcggcggcagacgacgcggcgcagcggttcgtcgcggtgtatacgacctacctgggtcagcaggctcgcgccgacgtcgaccggctcggggcccggctggcggcggtcgacgccggcacctcggagtggacggcgtcggtggcggcgttcgaccgggccggtgcggagcgggcgctgaccctcgagcggctcgaggtcgccgagcgggacctcgagcagacccgcgcgacacttgaggcgctgcagcggtcgagcgcatacgagggcaagcagcagctcgacgatctggcgcaggtggtggcggatctcgagcgcaccacggccgggcaggcagagcaggcgcagcgcgcgcaggcggagctggcacaacgcgaggaggaagcgcgacgggccgcggaggcggccgtggacgcggcgggcgccgcgcaccgcgccgaggacgcgctcgccgcggcggcgcgcgatgcgggcatcgagtggacggtgccggccgaggacacccgcggtgaacagatcgcagcgagggtcgccgcgtgcgcggaggaacgggccgcggatgtgcgagcggtgcggaccgcggtggcggccgccgacggggcgtcggcggcgcgggtgcgggcggaggcgacggccgagcgcgcc

SEQ ID NO: 50384 - DNA, 1494 bp, Amycolatopsis decaplanina DSM 44594
atggatccgatccgtgtaccgcccgagatgttccgtttcaccgacggcagcagatccgggctccccctggcgatcctgcacgccttcggcgaggcgaacgagcggctcgagacggcgctcggtatcgacgacgtccgcacgaggctgcgagaagtcggctggctggaaacactggatgacgaagacctggtcaaggcgctggatcagctgaggacccaagggcacctcgacgtcgtccagagccacgcgggcgattaccggacggcgtccgagtacgagcgccgcaatctccagtattcgctgaccaggcagggcgaagcggcgtacgcgggtgtggtccgcgcgaacgaggtgctcaacgcgaccggggcgctccaaacggcgacgctcgaggcgctgggtaagcggctcggcgagctggcgaagcagctcgaagacgggactgaccggcgcgtgttcagcacgctcgccgaagtcgagagccacctcgaagcgttccgcgacaacacgaagcgcttcaacggcgaccttcagcgcctgttgcacgccgaggccgacctcgcgacgttccacgaggtcaaagccgccacggtcgcgtatctgcaggagttcctgaacgacctcgaacaccacacccacaccatcgccacccacatcaaggagatcgacgaccacggcgtcgagcggatgcaccggcgggcactcaacggtgcggcccttcaaaacccggatcagcgctggctgaccgtccgcaaggcgcgctgggacgggcttcgcgcgtggttcctgcccgaggacggggcggcacctcgggtcgaggacctccatcaggtcgcgcggcgggcgatcatcacgcttctccaagtccttgaccggatcaccgagtcacggcggcgcgcgagcagcgcggtcgccgatttccgcgagctggcacggtggttcaccgtcgtcccggcgcaggaggacctgcatcgcctgtggtccacgatgttcgggctgagttccgcgcggcacgcgcatctcgcccacgcggacccggaggtggtcagcacgacggcctcatggctcgacgcgccgccggtcgaggtgtcggaactgctccgctccgcgggccgcaccgagcggttcaccacgaccggacgggtccgcgacgtcaccgcgatcagggcggcacgggtccagcaggcgatcgcggaacgcgccgaactcgaagcggcgtggagcatgctcgacaccggcggcgtcgtacggctctcggccttcgagaagctggaccacaccgtcttcgagcggctgctcgacctgctgggacaagcgctgggcagcagccccggcacgggcggcacccggcggagcacgacgtccgacggccagatcgagatcgtcctgaagccgccacagaacggcgcggtcgcgcgcctgaccaccacgagcggcgtcttccggggccccgactacgagatcgcgatcaacgcggccggaggcggtgcgtga

SEQ ID NO: 50385 - DNA, 1221 bp, Amycolatopsis decaplanina DSM 44594
gtgagcctcacgaaccaactggtcatcgcggaacgcgaagaggtcgcgcgcgggatccgggccctgctggccaccccgctgatcggcgaacgcggctcccccgagaccttcgacctcatccggcgccgccgtgaacccatccggcagtggttcgactactactgcggctggacgctcaccgtcgaaccgcggctcggttacgcccggctggtcaaggtccgcgcggccgccgaccccacccggccggcgcgacggctgcgctccgggcgcgcggcgttcgaccgccgtcgctacgtcctgctgtgcgtggtggcggccgaactcctgaccgtgccggtgaccaccatcggcctgctcgccggccgcgtcgcccaggcgagcgccgccgacgatctcgtcaccaccttcgacggcgctgtccgggcggaacgcctcgcgttcgtggacgtcctcaggctgctggagtcctacggcgtcctccgaacggccgacggtgatcctgagtcctttgtggacgacacgacggcgaaggtgctgttccggatcgacgcgaccctgttgctgcggatgctcgccgcgccggtcggtccgtcgcagctggccgtgcccgccgacgacgtcgcgctgcggttcgaggaactgctgaaggcggtgtcgcacgagcagcgctacggcctctcgtcgggccgccacgaggacacgccgagcgcgtcggacgtccagcggaacctgtggctccggcacacggtcttccgccgtctcgtcgacgacccggtgctgtacttcgccgaattgaccgtggaggagcgcgcgtacctggggtcgccgacagggcgccagctgctgcggcgagccgcggagcagggcggtttcgtcctcgaagaacgcgcggagggggtactgctcgtcgacgtcgacgggctggccaccgacgagaggttcccggacgacggcagcaacgccaaggtcgccgcgctcctgctgctcgacgcgctggacaagccgaggacgaccgactacctgcagaaggccacggccaaactgctgaaacggttcccgcgctgggccaagacgtaccggggcaaggacggcgtgcgacggctgaccgtcgacgcgctcgccgtgctgaccggcttcggcctggtccgcaccgaagccgaactcgtccggccgctcccggccgccgcgaggtacaccgaccgcaacgaggaggcgccgtga

SEQ ID NO: 50386 - DNA, 3987 bp, Amycolatopsis decaplanina DSM 44594
gtgaccgtgacgaggtggatcccctcccgtgcgggcatcctcaacatctggcgctactacgacgagatcttcgagttccacgacgggcgcctgctgctgcgcggccccaacgggagcgggaagtccaaggcgctggagctgctgctgccgttcctgttcgacgcgagcctgcgcgccaaccggctgtcgaccttcggcaccagcgaacgcagcatgcactggaacctgatgggcgaaggcgcttccggtgccactcgcgtcgggtacgtctggctcgaattcggcatggccggcgagaagtggttcacctgcggcgcgcggttgcaggcgagtacgcacaccagcacggtgcacgccgacttcttcaccaccgatctgcgggtgggcgacggcttgccgctggtcaacgaagcgggtcagccgctgaccaagaacgcgctggaggaggccctcggcgagcacgggacggtgcacgacggcgcggccgagtaccgcgcggcgatccgcgcgaaactgttccccaccttgagcgagcagcggtacgacgcgctgatcaccgcgctgctccagctgcggatgcccaaactctcgcagcggctcgacccgagcctgctgtccaacctgctctcccgcgcgcttcccccgttggggcagcaggagatcgcggatctcgccgagggtttcgaacggctcgacgcgcaacgcgaacggctgggctcgctgcagaccgaggtcgacgcgacccgcgcgctcgccgcgcggcagaagacctacgcccagcgtgtgctgcgcgcgggcgccgcgaacctcatcgccgcgacgaccgaactcgacgaactcgccgcggccgcccgccgttcggccgaggagcacgacgtggtcgccgcgaagaaggaggccgccgaggaaagggcggcgaagctcgaaaaggccgttgaagagaccgaagcccgcctctccgggctgaccgattccgagtcgtaccgcaagggccaggaactcgacaagctgcggcaacggaccctgtccacccgggaaaaagcggaagcattgcgcgcggacgcggatcggctccgtgccgaggcggacgccgacgaggagcgctcgcgagcggcgaagcaggtcgcgaaacggcaggccgacctcgtgcgctcgctggagaccgaggtccgcgccgccgcgacccgcgcgaacctggccggagtgcacgacgagctcgtcgccgggctggacgagccggccaggcttcgccccttgctgcaggccgccgtccgcggcaagcgcgaccaggtcgagactctcggccgggcgctggagaagcacgaacgcgccgtcggacggcgtcaccgggccgaggcggatctggaccgggcccggtcggacttctcggccgcgcaggagcgagtggatctcacgacggcgacgcgggaactcgcggtgagcgatctgcgcacccggctcgccgaatgggcgatcggctgccgcgagctgcgattccccgacgtcgaagcggtcgtccgggatgccgaggcggaagtcgcgctgctggtcaggctcggcgccgtcgccgagaccgtgctcgaagacatcatccggcgggaggcggcgaccggggccgcgctggccaccgcgcgcgccgagcacgacgaactcctcgtcgaggcgggcgtgctcgaaacggagggcgtcctcgcgcccgagtcgccgcgcacccgcacggcggaccgggccgagatgagcggcgcgccgctgtggcggctggtcgatttcgccggctcggtcccggaaagcacgcacgcggggatcgaggccgcgctcgaaggcgccgggctgctggacgcctgggtgaactcccacggcgtcgtagaaggacacgacgtgctcgcggagaccgggacgctgccggtggcctcaggccgatcgctcgccgccgtcctcgtgccggaacccgacgcggaactctcccctgcgaagatccgccggatcctggaagtgatcgccttcgacgacacgcttcccgccgggcccgccgcgatcggcgcggacggcggctggcggatgggcagcctttcgggcagctgggcgaaggacgctccggcgtacatcggtggttccgcccgccgtcgcgcgagggaacgccggatcgccgaactgcgggacgagatttcccgccgtgagaagaccatcgccgaactggagggcgagcttgccgcgctgcgcggcagacgcgagctgatcaagatcgaacgcgccgcccgccccggtcacgacgatctcctcgccgcgacgggagaactgaccacggccgaggcggagctgaccgccgccgacgccgccgtccggcacctggagaccgccgtctccgccctggagatcgaggccaagaccgcgctgcacgagctgaccgcccaggcttcggagagcgggctgccggccgaacgcgctccgctgaccgcgctcgcaacggccctgcgcacctactccgaccagggcgagaactggttgttcgagcacgggaacctgctcaccgcgacccagcgggccgagctgtgcgccgaacaggcggaccggtcggaggcgaacgcggcccggcgcgaggacgaggcttccgaggcggaggccgaacgcacgaaactcaccgcgatgctcgacgcgatcgacgggaccgtcggcaccggccagcgcgaggtactcgccgaaatcgacggcctgcgcacgaaattgcgcgagctctcgggcgaactccgcgccgcgaacgccgacgccaaggagctcgcggtgtcgctgggcgcgctcggtgtccggcggacgaccgacgcacgggctcgtgaggaagcggccaagaagcaggacgccgccgcgcaccggttccggaagctcgccaccgggatcttccccgccgacggcgggatcgaggacctgccgaagttccaggccaccctgtccgcctccgacggggtgcggtcggcgctcggcgcggcccggctggtggccgcggcgtggccgtccgtgccgcacgcgccgagcaacctcggcgaggcgctgcaccggctctccgaggccgtgcacacctgccggaacacgctcagttcgcgcgcggaactcgatctggagaccgacgaggacgtccagatcttcaccgccgtcgtcgacgggctgcgggtcggcgcgaccgaactgctgaagatcctttacgcggaggcggaacagagcaggcacgagatcaccgaccgcgagagcgacctgttcgacaagacgctgaccggggacacccgccgtcatctcgcggcccgcatccggcaggccaacgacctcgtcgacggcatgaacgcgcggctggagcgcgtgcggaccgcgtcgagggtcgccgtccggctggtctggcaggtctccccggatctgccgccgggtaccaagaccgcgcgggatctgctgctgaaggatccggatcagctgacccgcgaagatcgcgtgtcactgcacaggttcttccgtgagcgcgtcgagcaggcgaaggccgacgacacggcgaccagctgggaacagcagctcgcgcaggtcttcgactacacgtcgtggcaccggttcgtggtcaaggtggaccgcgcgaacggggcgggctggcagctgctgaccaagaagctgcacggcgcgctttccggtggggagaaggcgatcgcactgcacctgccgctgttcgccgccgtcgccgcgcactatcaggccgcgcccgaggcgccgagggtgatcctgctcgacgaggtgttcgtcggtgtcgacaccaccaaccgggggcaggtgttcggcctgctgtccgcgctggacctcgacctgatgctgacgtcggaccacgaatggtgcacctacgccgaactcggcggcgtcgggatccaccagctcatcaccggcggcgacggcgacgacgcggtcaccacggcccggttcacctggaacggccacgacctcctgcccgcgggggcgggttag

SEQ ID NO: 50387 - DNA, 1545 bp, Amycolatopsis decaplanina DSM 44594
gtgaccgccgaccaggagccccagccgttcgcgcacctcagtgcgccgaacgcggcgctctatcgcgacgtcctgttgacgttcgcacgggcgagggaccgattcatcgttcacatgcgtcctgaggacgtcacgacggatctgggcaggccgggtgacatcgagcaggtcgcggacgcgctggacaagctcgtcgactggggcaacttgcgggccgatccggatacgagccgggtgaccagtgtcgccgacttccatcgcgcccggtacctctaccagctcacggcggcgggccaggccgctgaagaagcattagcggtttatgaccaggcattgggccgcagggggtcgctgcaatcggtggcgctggaggacatcgccgggcagttgcgggcgctcgtggagctggcgggggcacgggagctcgacccggcgaaggtgcatctgctgctgctcgcactcgccgaacggttcaccggcttggccgacaacgcgcaggcgttcatggcgtcgctacgccgtgtcatcgatttcgccgacggggacgtggaggcgttcctcgcctacaaacagcggctgatcgactacgtcaaccgcttcatcgccgacctcgcgaacaggggtgcggagatcgccactctgctcggcaagatcgaagatgccggggtgcgcgagctcctcatggtggccgcgaaacgcgaagccgccgatgtcgcacctgatgatcacgagaacgcggcggccatcgaaagctgctacgccacttggcgaaatcggtggcgtgggctgcacgactggttcgtctcggccgactctcggcgtcagtcacaggcgcggctgctgcgcggagccgcggtcacggcgatcacccagctcatcgacacggtggccgcgctcaacgaacgtcgttccggacgctccgatcgctcggcggatttccgcactttggcgcggtggttcgcggaggccccggacgacaacgcggcacatcgcctgtggcggacggcgttcgggctcagttcggctcggcacctcacggtcgacaacgaaaccgttgcggcgtgggaggaagagcaacccgcgccgagcaccccgtggcgggaagcggccggggtgcacatcagcccgcagttgcgcaggacgggatcctacgagcggcgcggccagcccaaccgggtcgcggaccgcgcggagcagcggcggatactggccgagcaggcggctctcgaagccgagcaggtcgccgcggcacgtaagcggctggcgacgccggggccgacgcgactatcggcgctgggtgagctcgacacgcgggcgttccggcttttccttggtcttctcggcgacgcgctctcggcccgtgcccctggcgatcacgaagtccggaccaccacgagcgacggcacgatggaggttcgcttgaccctcgtgcgcggcggcggaacggtgagcatcgacaccgaggacggaattctccgcgggccggaacacctgatcgagatcatcgacctgatcggaaacggccgggtggaggcgatcgcgtga

SEQ ID NO: 50388 - DNA, 1194 bp, Amycolatopsis decaplanina DSM 44594
gtgaccgtactcggcgaggaagccgtcgcccagaagcggaaagccctgcgggcgctgctcgccaagccgttgttgacagcgggaacggacgacgaagtactgcggttggtccggcgccacgcggcggacctgcgtgactggctggccatggagacgggctggcggcttctcgtcggcgcggaatccgcgcgcttgttcaaaaccgtgccgacattgaccgaccagacccatccggcgagggacggtaagggcaaaccaccgttcggccgtcgcaggtacgtcctgctctgcttggcgctggccgtcttggaacgagccgacgcgcagatcactctcggccgtctcgccgagggcgtgctcgccgccgcgggtgaacccgagctggtcgacgcgggcgtgtcgttcacgatgagcaggcgcgacgaacgttcggatctcgtcgccgcggtcagattgctgctcacctggggtgtcctcgaacgtgtcgccggcgaggaagacgcctatctgagcgacaacggagacgtcttgtacgacgtacagcgccgggtgctggccacgctcctgaccagtggccgtggcccttcgacgatcaacgccgcggatttcgaaaccaggctcgaagagcttgcccacgaacccgtcgccgacaccgatgacttgcgtaatcgagctttacgccaccggctcactcgccgcctgctcgacgatccagtggtctactacgacgagctggccgacgacgaacgggcgtacctggccggccagcggcatgcgataacgcaccggatcgaggaagccaccgggctggtcgccgaagtccgcgcggagggcatcgcgatggtcgaccccgacgacgaactgaccgatgtacgcatgccggagcagcgcaccgatggtcacgccaccttgctcgtcgccgagtacctcgcggcacggaacgggccggtgccgatcgagcgggtgctggcgtacgtcaggaagatcgcccgtgaccacgcctcctactggcgtcgcggagtcaccgaagaaggcgctgacgaggaacttctcgccatcgcgttgcacaagctgcgcgcgctgcggctcgtcgaggattccgtgggggatccgccgatggtgcgcgcgctgcccgcgatcagccgttaccggctcgacgcgcccaccatccgggagaggaagaccgggaaatga

SEQ ID NO: 50389 - DNA, 4038 bp, Amycolatopsis decaplanina DSM 44594
atgaccttgcccgtcccggacagggcccgctggcaaccactccgggcgggccttgtcgacctgttctactacgacctcgaagagttccacttccacgacggccgtttgctgttacgcggcaacaacggaaccggcaaatccaaggtactcgcgctcaccctgccgttcctgctcgacggcgaactctcggcacaccgggtggagccggacggcgaccgcaacaaacgcatggaatggaacctgctgctcggcgggaaacatccgcacaatgaacgcctcggctacacctggctggaattcggtcgtgctcttccggacgggagcaccgagtaccgcacactcggctgtggcctcaaggccgtcgccggacgcggcatcgccaggcactggttcttcgtcaccgaccagcgcatcggacacgacctctccctggtgagcccgacccgcgtggccttgaccagagagaagctcaaggacgccgtcgaggggcatggtcaggtatacgacacagcgtcggaataccggcgcgcggtggacgaagcgctgttcgggctgggaacgcaccgctacgaagcactcgtcaatctgctgatccagctacggcaaccacaactgtcgaagaagccggacgagaaactgctgtcccgggcgctcaccgaagcactcccgccgctcgacccggccctggtggccacggtcgcggaggctttccgtggtctggacgaggagcgggaaaccttacgcgccctcgccgaggcgaagacggcggccgagcagttcctcacacattacagacgctattcccgaatcgcggccaaacgacgtgcggcaccggttcgccatacccacagcgcgtacgaaaggctcggacgtgagctgggcgaagccgaggccgcttacgagaaggcgaccctggcactcgaagagacacaacggctgctcgatgaactggcgaccgcgaagacccagctggagacacgacttaccgcgctgcggagcagtccggaaatgcgggacgccgaagcactgaaacaagtgggggaagaggccgccaaactcggcaggttcgcggatttgcggaagcgcgacctgctgtcggccgccgacaacctgcgacgccgtgtggagcaagccgaaacggcgcagcggacggccggcaccgatgcggcgattttcgagcaggccaaggagatcgcgcaagaggccgccgaggccgcctacgtggccgatggacattccgcggtcattgccgacgaagatgagcgagctggtcaggcgctcatcgaacggcagaccaaggcggtcgatcagctgcaacggttgatcaatgccgcgacgcaggccgaagccgcgttgcgttcggcgcgcgaaagcgtggaccggatcaccgctgagcagcagagtgccgccgagcggatcaccgctgccgaggagagtatcgccgggcacggtgcggccctcgtcgcctcttaccggtcctatctggcgaacacaaagcagttcacactgtctgatgtggacgaattgctcgactcgctgggcacgtggaacgagtcactcgtcggcgccaaccccgcggcatcggccgtggaggaggccgtgctgcgggcgaccgccgaactcggtcgcaggcaagccaccctcgacgccgaacgagcaggagcggcaagcgatcggcaagcgatcatcgacgagatcgcacggctggaagcgggcgggcacgacgctccgccaaggccttacacacgtgccgaagatgtacgaaccggccgccctggcgctccactgtggaaagtcgtggacttcgttcccggggtcgccgcggagcaccgagccggactcgaagcggcgttggaggccgcgggcattctggacgcttgggtgaccccggaaggtgaactgcacagcacgctgaccggcgacgtggtcgtcaaacccggtaagaccgcgccgtcaggcggcctcaccgctgtgctcgcgccggcggtggatcgggccgatcctcaggccgcggccctgactgacgatgtcgtcggcgcgatcttgcgctcgatcggtctcggtcccggcgcggacacgtgggtcgcggtggacggcaggttcgccgtcggcgtgctgaacggggcgtggcacaaggacacagcaggttacctgggtgaaggcgctcgggaagccgcgcgcagggaacgggttcatcggctgcgggaggagagcgctcggctggatcgacgccttgccgatctggcggccgccgcggacggcctgaccgctcagcggaccgccctcaccgcggaacaccgagctcagccgaaagacaacgatctccgtgaggcccatgtcgtgctcgccggcgagcacaaggcgaaacgccggatcgacgttcgcctcggcgaagccgtcacagattccgaggagtgtgccgacgaggccgagcggacacgcgggaaggtcatcgaattcgccggtgacgtcggtctgccaacggatcccgaggagttggcccgcgtccacaaagcagttggtgactaccgggtggcacttgccggactttggcccgcggcgcgggcgctggctcgggcgaaggcggaatcggccaaggccgaacacgagaagcgggccgccgccgaacgccacgacgaagcacgagagtcggccgccgaagcccgcgctgaagccgaagccgtggcggaacgccaccgcgtactggttgagaccgccggcgcgggagtcgatgagctctaccggaagctggccgcggtcgcggcggaactggacgagcgggacgcccgcgagaagcgggtgcgagaagacgaacgggtcttgcacgaagagcggggtacggccaacgggcggcgtgagacgcttcgcgattcgatctcgaccgccgtggccgaacgtgaccaggccatcagtgagctgcgcgcttttgcgacgacgggactgttgacgacagcccttcccgaatcggcattccctgacccggacaaggagtgggctcccaatccggctgtcgccctcgcgcgggccatcaacgccgcgctggagggcgtggacgacgcggaccggccatgggaactggttcagcagaaggtgtcggctgagcacaagctgctgaccgacgcgctgtccaggcacggccattcggtcggcatgaccgtacgggacgggatcatcgtcgtcgacgtgctgttccaagggcgcgcccaggacattccggcactggtggccgctttggcggtggagaacgagcagcgggcgaacctgctttcggcgaaggaacgcgagatcctcgagaaccacctcatcaacgaagtggcgggcacgctgcaagaattgatcggtaacgccgaggatcaggttcggtccatcaacaccgacctggaggcccggccgacatcgaccggaatgcgcctgcggttgcagtggcgtacttcgcgaacggcgcctgacgggctcgatcgggtgcgggaccggttgttacggcagaccgctgatgcttggagcgtggaggaccggaccgccgtcggcgggttcctgcaggagcagatcaaccgtgagcacgctgaagacgcggcgggtggctgggtcgaacaactgactcgcgcgctggactatcggtcttggcacgaattcgcgatccagcgctaccaggacggccagtggcggtcggcgacgggaccggcgtccggcggcgaacgggtacttgccgcgtcggttccgctcttcgccgcggcctcctcgttctactcgtcttcggccaatccccacacaccacgtcttgtcgcactcgacgaagcgttcgccggggtcgacgacgattcacgggccaagtgcctcggcctgctcgccgcgttcgacctcgacgtcgtgatgaccagcgagcgcgaatggggttgctacccgcaggtgccggggctggccatcgcgcaactcacccggcgcgacggaatcgacgccgtactcgtgaccccttggcgttgggacggccgcgagcgtgtccagcgacaacgaccgttcccctacgtcccgagcgcctga

SEQ ID NO: 50390 - DNA, 1029 bp, Amycolatopsis decaplanina DSM 44594
ttgagcgtttctctcgacgaagtcgacgcggtgcttcgtcgcagcggttcggccccggacgggctggacgacgtgacgaggctgctgatcggaaccgttccggtcagggcgaccgaggccgcggcctggacggcggctttcggtccgctggacaaactggtcgcacgacgtccgatgctggcgacgtggcgggcgtggctggactccaccggcttggtccggaggttggcttccgatccggagatcgcgtcggcgttgatcaccgcggctgtccgcgttctcgccgagttgcccttgaagggcatcgcgctggggcggctcgcggcggaaaccactggcgacgcgcacggcctggacgacgggcgcccgttggcgacgatcgtcctctcggcggcgagggtcctccgtggcagcccgccatccggcgacggaacagcgggcgaacggcgaacctcttgggcggcggtcggcgtacatcgtgacgagttgtcctcgtccgtgctgtgcctcggcttgcccggtggcgcggacacggtgaccggtcgcatactggcgctggcgaaggaagccggtgaaccgtctgtcctgacgctacgccagttgagtaccgcacggctcggcgtcggaacaagggtcgtgtcggtctgcgagaacccgatcgtcctcgcttcggcggccgatgagctgggtcccgactgccctcctctcgtctgcgtgaacggccagccgtcggccgcggtgtggcgtctgctcgacctcctcgccgaggaaggcgccggtttcaggtatcacggcgacttcgactggggcggcgttcggatcgggaacaccctgcgagaccggatttcttgggagccctggcgtttcgacgcttcgtcgtacatcacgacaaccacgacaggcggtccgctgacgggaaggccggcggacgcgacctgggatccggaactacggccggcactggagcgacgtggggtgcgcgtcgaagaggaactcgtcctccctgccttgttggaggatcttcgctag

SEQ ID NO: 50391 - DNA, 1467 bp, Rhodococcus ruber Chol-4
gtgcagcacgatcggctccggttgttctcgttcgccacggccgagaagcgggccgagtacctctgggtgctgcgggctttcgacatcgctcgggccaactacgtcgtgctgctgcacgccgccgaggtcgcggcgatcctcgagcggaccggctcgacggatccggcggcggcactgtccgctcaggacgtggcgcccctcctcgagcagctgcacgcctggggggtgctcgaacgcagctacgacggcacccgggtggcgtcgctggccgagtaccgcaaccggcactacgtgtatcagttcggccgggccggctaccacgccttccgggcggtcgaagaggtgctgagcgcgcgcggcgaggacgcgtcgctgtcgcgtctcgccctggcggatctactggccgacctgaccgagctggcggcggcgaacgacgccggggacggcgagctcgtctaccgcaaactgtcgcggctggacacgacgttgtcggacatggccgagcgggccgccgggttctacctgatgctcggcgacctggtgcgcaccaccgaggtcacacccgagtcgttcctggcgcacaaggatgcggtgctggcccacatgcgggagttcagcaccgacctggcccgctacggtcctaaactcgcggcggcgctggcgcgggtgcaggagaccgggatcgaccgcatgctcgggttcgccgccgcgcacgacgagcggatgctgttgtccgtggccgagcggcacgcggactggtgggcccggtggcgtgggctcgagcggtggttcgtcggcgccgccgacgtgcccagcgagtcggagcggctccgggacggcacgatgagcgcgatcgcggcggtgctggcgctgctgcggcgattgacggagacccgccggggcggggtcagccgcgaatcgcagctgcggcacctggccgcctggttcgcggccgcgccggacgagcagtcggcgcacgcgctgttcgacgcggtgttcgacctgggccgcccgcggcacttctccgtcgtgcatcccgacccggagacggtcccggtgacgacgtcgtggtgggacgcgccacccgtgccgatcgcccggacgctggccgagaccgggcgcaccccgtcggcgggagcgccggcgcgggtgcagcgcaacgaatccggggtccggcggttgcgggagcggcagctggcgacgcagcgggcgcgggccgaggcggcacgctccctcgcggcgggcggcgtggacgagcgggagttgtccgagccggagaccgaggtgctgttgggtctgctcgacgcggcgctgtcggcgcgggttccggtcagcggcaccgtgccgggtgcgacgggcaccccgaacggggtgcggctgacgctgagcccggccccggagggcacggtggtccggacggcgcggggccggctgcatctggacgggctgcgggtgagcgtgcagtga

SEQ ID NO: 50392 - DNA, 1380 bp, Rhodococcus ruber Chol-4
gtgagcgcccggcggatctcgccgctcgaccgggattcctaccagcgggcggcacggctgatcctctcgcaccacctggtgaccacccgataccccgaccgggccgcgctgccgctgctgcgccggtgggcgacggagctgcgggaggacctgctcgagttgttcgggtaccggctcgaggtgaccgagacgaccgcgcggttgttcaccgtcgccgaccggctcgatcccgggggcggggcgcgctcggtgaccgaccggcccttcgaccgtcgccggtacgcatatctggcactggcgctggcggcgctgggccgcgcgggcgggcagatcaccctgtcggagctggccgagcaggtcgcgtccgaggcgggccaggtgcccggggtcgaactggctcccgagcgggcgacggaccgggacgcgttcgtcgacgcggtggcgtggctggcggcgcggggggcgatcgcactggcggacggcgacgccgggggctgggtgtcggacccggagcgaggtgaggccctctacgacatcgaccggcccgtggtggccgcgttgttccggccgccgcgggcgctgcagcacctgcactcggtgcggggcctgctcgccgccggtgaccgccgcgacggtgaccgccgcgacggggaccggagcgtgggcaccgcggaggtggcgcggcgggtgcgccgggcgctggtgcagcggccggtggtgtatgccgaggaactcgacgacgaggcgcggctgcagctggcgctgccgcgcacgaccgcggggatcgagctgttgacggggctggtggccgagcgccgcgcggagggcgtcgcgctggtggactcgtcggggcggatgtcggatctgcggtttccgggggtggggacggttccgcaggtggcgttgttgctggccggggagatctgcgcgcgggtgtcggagccggggtgcgaaccggtgcggttgccgcggccggtggacgcggaggccgagctcgaggcgggattggacgccgcgatcccggcggccggggtgttcgcgccgctggcgggtgacgcggctgcggcggatgcgcccccggggccgcggccggcgccggagcatccgctggtcgaggacagttggctggcggagacggtggcgcggctggccgacgagttcggccgtaccttcgccgcgcagtggcaggccgatccggccggtctgctggaggcggcggtgacgatgttggagcggcagcggctggtggcccgggtgcccggcggggtgctggcgttgccggcgctggcccggttccggggggtggtggtgacggtgcacgaacgcgatccgcgtctcgcgctggccggcgaggattcgaacgaagcggagatgtcgtga

SEQ ID NO: 50393 - DNA, 4146 bp, Rhodococcus ruber Chol-4
gtgagcagtgcccgtttccggcccacccgggccgggatcatcaacctgtgggactaccgggatcaggagttctcgttcgcggacggtcggctggtgctgcgggggcccaacgggtcgggcaagaccaaggcgctcgaggtgctgttcccgttcgtgttcgacggtcgcatcgagccgcggcggttgaacccgttcgccggcgaggagcgcacgatgcggtccaacctgctgtatcaggggcaggacagtgcgtattcgtatgtgtggatggagttctgccgcgggcgccgggacgatccggaggcggtgacggtgggggtcgggatgcgcgcggcgcgcggccacgacaaggtcacgcggtggtatttcgtcgtcgacggccgggtcggtgtggacttctcgctgctggatgcggccgatcgtccgctgacgcggcggcagctgatcgaggaggtcggtgccgatgcggtcacggaccggccggtggactaccgggcggcgatcgatgcgcggttgttcgggctcgggatcgagcgttacgagcagctgatcaacctgatcctgacgttgcgccggccgcagctggcgaagaatctggatccgaaggggttgtcgcaggcgctcaccgacgggttgcggccgctcgacgagcagctggtgctcgaggcggcgcggtcgttcgccgacatggaggaggtgtcccgcacgctggagtcgttggcggcggccgacgacgcggcgcagaggttcgtcgcggtgtatacgacctacctgggtcagcaggctcgcgccgacgtggaccggctgggggcccggctggcggcggtcgacgccggcacgtcggagtggacggcgtcggtggcggcgttcgagcgggccggggtggagcgggcgctgacgctcgagcggctcgaggtcgcggagcgagacctcgagcagacccgcgcgacgctcgaggcgctgcagcggtcgagcgcgtacgagggtaagcagcagctcgacgatctggcgcaggtggtggcggatctcgagcgcaccacggccgggcaggcggagcaggcgcagcgcgcgcgggtggagctggcgcagcgtgaggaggaggcgcggcgggccgcggaggcggccgcggacgcggcgtccgcggcacaccgcgccgaggacgcgctcgccggggcggcgcgcgatgcgggtgtcgagtgggcggggccgggcggggacaccggcggtgaccagatcgcggcgacggtcgccgcgtgtgcggaggagcgggccgcggatgtgcgcgcggtgcgggcggcggtggcggccgcggagggggcgtcggcggcgcgggtgcgggcggaggccgcggccgagcgcgcccgggcgcagcgcgagtcggcccgggcggcggtggacgcggcggacgcggcggtggagtcggcccgcgcggaggcgtcgaccctgttgcgggagtggtggaccggtcatcgggacgcatggtcgggggtcgacgggccggaggagctgttcgaggcgctggctgcggcgatcgcggcggccggcgacgacgaggcggcgacaccggcggcggtgctggccgagcgtacggcatcggtggtcgaggagttgcggttccgcggccgtggcctggaggcggagatcacgcacggacgggagcggatcgcgctgttggaggccgagcgggacatgatcgaggccgagcgcgacgacgctcccccggcgttccctgcgtcgaccgcggggaccggcacgtcgggcgcgccgctgtggcggctggtgcggttcgcggacgcggtgagcgcggaggcggccgcgggcctcgaggcggcgctggaggcggcgaacctgttgacgggctgggtgtgcggcggggcgggagacgtgcccgcgggggcgacggtgctggtgccggcgccgccggcgcagcggcccgcgggccggacgttggccgacgtgctggtcgtggaaccggataccggggtgccggccgagcgggtgcgggaggtgctggcgtcggtcgcggtgccggacgtggtgacggacgagaccggcccggccgtcgacgagcgtggcggctaccgccagggggtgcagctgggtcggtacacgaaggcggaggccgagtacatcggggcgaccgcgcgggcccgtcgccggcgcctgcgatcggccgagctcgacgcggagatcgccgaggtgcgggcgcgggtggcggacgcggagtcggcgcgggtggcggtcggcgaacggctggcgcggctggatggggccgcggcggcggtgccgcgcaccggcgcggtgcttgcggcgttgcggaaggtcagtgagtgcgcgggggcgttgcgcaccgccggggaggcggcggccgcggcggaccgggacctcgatcaggtgatcgccgaatgctccgtgaaggagcggcaggtgcggtcggtggcggcccggcaccgggcgccgcacacggtccgcgagctcgagcagctggcggcggcgatccggttcttcgagtcgcagggccaggcggtgctgcgtgcccggcgggagcgggtggccgcgatcgagcgggcgcgggaggcgcaggcgcggcgcgacgacacccgggtggcggccggtgcgtccgccgagcgggcggtcacggccgaggagtcgctgcggcagcagcagcagcggctggcgacgctgcgtgaggcgttgggcgccgacgcgcagcagatcgacgcgcagctcgcgcaggcccacgagcggatcgaggcggcgcgagcggagcaacgcgccgcgcgccgcgcgcacgacgaggcggtcgaacggctcgggaaggcggaggcggcgcatgtcgcggcggagcaggcgctgcggtcggcgttgaccgagacgcgggccgatgcggcacagctggcgccgtatgcgcggccggatgtgctggcgctgctggggatctcggaggagctgcggtggccgtcggcggcagtggagtggccggcgccggagcaggctcggctcacccgggcggccggggacgtgcctgcggtgcccgcggcggtgggggcgctgtacgcggcgctggcggcggcgacggcgacggtcaagggcggggacggggcccgcaaggcggcccggtcggcgttgacggcggcgttgcaggagttcgacggtcagctcgcggcggccggtcaggactatcggctgcagtgggatgcgccggaggggttgacggtggtgcgggtgcaggacgagcaggggttctcgtcggtggcggagttcgcggtgcggatcggggcggcgcggcgggagcaggagctgctgttgaccgacgcggagcggcgcatcctcgaggatgcgctgttggcgggcttggcgcagcagatccacgagcgcaccgacgacgcgcgggagctgatcgcccggatggggacggagatgcggcaacggcgcatgtcgtcggggacgacggtgggagtgcgatgggtgctggccgatcatctcgacgatcaggcacgggcggtgtgccggctgctggatcgggaggtgtcggcgctgggtccggaggagctggcgcgggtgcgggcgcatttcgcggcgcggatccgggcggagcgggcggcgcatccggagcggtcgtatccggagatcctggcgaccacgctggattaccggcggtggcgggtgttctcgttcgggttgatcggggcggacggcacggaggatcggttgacggtggcgcggcattcggcgttgtcggggggtgagcagtcggtgtcgctgcatctgccgttgttcgcggcggcgcacgtgatgctggattcggcggatccgcaggcgccgcggttgctggcgttggacgaggcgttcgccggggtggacgacaacgggcgtgcggagttgctggggttgagtgtgcagttcgatctggatctgttcatgaccggctacgacctgtggatcacctatgccggggtgccggcgtgcgcgcactacgatctggcgcattcggtggccgagcacacggtcggggcgacgctgctggtgtggtcggagggcgggttgctcgccgagcacgacgggtcggatctggcggcggcgctggggtcgccggggacgcggcgggtgccggcgccggtgaagggggcgctcgagttcgcgtag

SEQ ID NO: 50394 - DNA, 1554 bp, Ralstonia solanacearum FQY_4
atgcacgacataaaactccaaagggatacgccagccgatctgttccgccacatcagcgctgaaaaggctgtgctttatcgttgcgtgatggactgcttcgccgcagccaagcgccagttccggctgcacctgcgccccgatgagattttgaatgaaggcaattgggatcggataccggaacatgcccaaccacgtatcgaagaagtccaggcggcgctcgcgcaactgaccgaatggggcaacctcgaatcgcagccggatacgacgcgggtggccagcatcagtgacttttaccgtgcgcgtttcctgtatcggctgtcgcagggtggcgaggcagtggaagcagcgctgacgaccttcgagcgcacgctacgtcgccgggcggaactgcagaccgtagcgctggaagatatctcgaaccgcctgcaaaccctgttgtccttggcggatagcgccaacccggatgcggcgaagatacacgagacactgcgcgatctcgtccgcgtgttcgaaagccttgccgacaacgcccaagctttcatggccggcatcggacgcagcattgaactacagcaggccgaggtcacagcggtgctggcctacaagaagcgactgatcgattacctagagcgtttcatcggcgacctggtggggcgctccggcgacatcgctcaacgcctcgtggcgctgtcccctcgcgtcgactccctcctctggctggccgcacagcgcgaagcgcgggacagtgcgccagacgacgatccagaacaactcgacgccgtggcacgcggctggcaagcgtggcgcgaacgctggaaagggctgcgcggctggttcgtgacgaccggccatgaacctccgcaagccgaactgctacgctcgaaggcacgcgcagcaatcccgcagctgttgacggccgtgtcggcgctcaacgagcggcgcagcggccgtagcgaccgctcggccgacttccgcatgctggcgggctggtttgccgcctgcgaagacgattcgcaagcccaccgcctggcacgcgccgccttcgcgctcaacccggcgcgccacttttcgctcaaccccgcgctggcgcccggtgtgcaggatctgcccgccagcacgccctgggccgaagcaccaccgctgcgcatccacccacgcctgcgcgaatacggtgaagccgcgccgcgcggcgctctgccccgtgtgcaagcccgcgacgaacagcgacgcctgttggccgcgcaactggaacaagagcacgcagagatcgaagccgcccgcttgcgcctggccaccggccgcgccacgctgctgtccgaacttggcgccctcggcacgcatgacttcgcgctgttcctgaaactgctgggagaagcactgaccgcgcagatgtcgcccgacgcaccggtggaagcgcaaagcggcgacggtctcttgcacatccggttgcagccgctggccagtggcacccaggccatgatcacgacgcccgcaggtgtgttcagcggacgcgaccacactgtcaccatcacgcgaatggaagacctgccatga

SEQ ID NO: 50395 - DNA, 1251 bp, Ralstonia solanacearum FQY_4
atgagcaatgacagccacgacatcggccgccagcaagcacgacaccgtgatgacgaacgcactcaggccctgcgcgcgctgctgatgactccactgatgaccccggcccacgagagcttcgccgccgtgcgccgccacgccgatgaactgcgcgcctggttcgcgcgcgaaaccggctggacactgcacatcgagcgcgactgcgcgcgtctgtacaagcgtcccgccgacctgcaggatgccagccgcggcctgcccggctacgaacgccggcgctacgtgctgctgtgcctggcctgcgcggtactggaacgcgccgacccgcaaatcacgcttcgcgtgctgggcgatcggctgctggcgctggcagcagatccggcgctggcctcgcgcaacttccacttcacgctcggcgccgcgcatgagaggcgtgaactggttgccgtctgccgcagcctggtggaactgggtgtactgcagcgcatcgcaggcgatgaagaaagcttcgtgcgcagcacgggcgacgctgcggatggcggcgatgcactgtacgacgtgcgccgccgcgtactcgccggcttgctggcggcggtgcgcggcccgtccacgtggcctgcggaacagacccctgtgagcctggacgaacgcctggcatcgttggtggccgagcacatgcccgacagcgacgacgggctacgtactgccctgcgccatgatctcgcacgccggctgctggacaacccggtggtctacctgaacacgctggacgccgagttgcgcgcctactttgtcaatcagcgcggcgccatggcgacccgcctgtgcgatgccaccggtctcgtggccgagcagcgcgccgaaggtctggccctggtggacgaagacggcgagttgaccgatgtcgcgatgcctgctgagggtacggaagcccacgccacgctgctggtggccgaattcctggccggccgcagccgtgccgatgcgcaggcgcccaccacgctggacgagatcaccgcctttctggccgacgccagaacgcgttatggcagctactggcgcaaatcggcgcgcgagcccggagccgagcgcgagttgacgactgttgcgctggaacgcctgctcaagctgcaactcgtggcacgcatggccgaccggattcagccgctaccggcactggcccgcttcgcgctcggcgagaccgacatccgcgcgccgatccgctcggcaacccaatccaacttgttcgaatga

SEQ ID NO: 50396 - DNA, 4131 bp, Ralstonia solanacearum FQY_4
atgaccgatacgcgatcccctgcactgcccatcccgaccctcacccgttggcagccgctgcgactggggctggtcgagcttttccactatgacagcgaagaattctggttccgcgacggccgcctgctgctgcggggcaacaacggcaccggcaagtcgaaagtgctgtcgctgaccttgccttttcttttcgatgcgtacctcaagccgtcgcgcatcgagcccgacggcgatgccagcaaaaagatggcctggaatctgctgctgggtcgccacgagcggcgcataggctacgcttgggtggaattcggccgcgtggacgaggatggaaggcatcactatctcacgctgggcagcgggctctctgccgtggccgcgcgtgggcaggtggacacctggtttttcatgctggacgagcggcgtatcaatcaggacttttggctcatgagcccaacccgggtggtgctcacacgcgaccgcttgcgcgaagctctacaggattgcggacaatttttcgacaccgccgccccctatcgccgcgccgtggatgaacggctgttccgcctgggttcgactcgatacgctgccctgatcgatacgctaatccagctacgccagccacaattgtccaaaaagcccgacgaggccagcctgtcgaacgcgctcaccgaggccctgcccccgatctccaacgacctgttggccgatgttgccgatgcactgaaccagttggaggaataccgtcgagagttggaggagtacgaggcgctggagcgtgccgtcggccagttcaaccaacgctaccaacgctatgccgccacgcaggcccggcgtcaggcccgcaatttgcgcaccgctcaaaccggattcgacaacgccagccgcgaattgaacgccgcgcgcgaggcgctggagacgacccaagccgaagagcagcacgccgatcaggcatggcgacaggccgacactgtgctgaccaccaaccgcacccgcctcgaggaactgcagaacgaccctgcgatggccgatgccaagacgctggagaaggccgacgccgattcccggcagcgccgcaaggaagccaataccgcgcggcagacgtgctatgacatgcaaacccgcctggagcgcgagcggcaagccacgcgcacgcgcgcccagcgcgccgagcacgccggccgcgcgctcgccgagtcgcgcgaagatgcggtgcaggccgccgagcgcgcaggccttgcgcctgcctactcagccaacccattggcctgtgccgacgcccatacgctgcagccgctggcgctggacaccgcacgccaagacctgcgccgcgccagtatcgagcgacgcgagcaggtggcactgctgctgcgccgctgcgacgaaaccgaccacgcggaacaaacccacgcgcgcgcgcagacccagcacgacgaacgtgccgacgaggcggaaaccgctgccgcacagcgcgaagaggccgatactgccgtcgatcggcagggccatacactgctcgacgcgtggcagcgctatctcgacggtctgcggcagctacattgccccgatggcgccgacgcactggaagcgctggcaccctggaccgtcagcctgcagggcgataacccggcccgcaccgcgctgcaccgcgcccagcaggccgcaagcctgcgtctggcgcgacgccaggccgcactgcaaaacgatcgccatgcgctggaacaggaacgcgacaccctgcgcgacgaacgcgcgcgtcttgaacagggtgaagacaccatgccgcagcccccgcactggcgcgcgcccgacatacgtgccgtccgcgcaggcgcaccgctgtggcaattggtggacttccgccccggcacgcccgcagccgactgcgccggcctcgaagccgcgctgcaagcctcgggcctgctcgacgcttgggtgacgcccaacggcatgctgcaggatagcgacggaggtcatgcgcaactgccgcacgacgcgcaatggctcacccgcgaacgccagccgcagtcgctggccgcctggctacgccccgcggaagcggcgagcgacgccccgccccgggtcgatcccaccgtggtgcagcgactgctcgagggcgtggcgtgcggcgcagaggacaatcccgccgccgaggcctggatcgcgcctaccgggcgcttccggctcggcgcgttggccggcgtatggcataagcccggcgccgagttcatcggctacgcggcacgctgtgcggcccgcgagcgccggcagcacgaaatcgacgcacgcctggaagcaatcgacgccgccctcacgttgctggcacaagattttgcccaactcgatgccgatcagcgcgaagccgccgacgaatggcaatgcgccccatctgacgacagcctgcgcgccgcacacgtcgaagctgtatcgcgtgcacgcgaattcgacatggcccggcagcgcctggagcacacggatcggctactgcgcgctgcggccgagcaatgggagcaggctcgcacaatcctggaacgcgatgccgaggatctgacgttgccgcccgcgcgcgatgccttgcgggccatcgaccaagcgctgcagatgtttggagactgcctgcacacgctagccgtcgtcgtgcgggagctgcgcgacgcccagaccgaacacgccgagcagttgcagcgtgagcaacaggcggagtccgatgcccggcatgccctcgagcaatccgccgagcgcgaggccctgaccgacgaagctggcatccgcttggaaacgctgcgcgcatccgtcggcgccagggtggaagagctgcaacggcgcctcagcgacgctcggggcgccgtcacgagcggcgagaccgagctcaggcaacggaacgacgcccggcgcttggccggcgaagcgcgcgcccgggccgagcaaaaggccgaggcagccgacgccacgcttgtcgaacgcacagccgcacgccagcacgccgtgggacagttgcagggcttttccgccaccggtctgctggtcacggccctgcccgatgccgagctgccgtccatgcacgcgccctggaccatcgagccggcactggcgctggcgcgacgtaccgaacaggcactgctccacgtcaaggacgacgatgaagcctggaaccgcgtgcaaaaccaagtctcgcaggattacaccgaactcggtcgcgcactcgccgcgctgagccaccaggcccaggccgaaacaaacgacttcggcctagtcgtcagcatcatctaccaaaaccgcccggaacgtcctgaccagttgagtgcgcgcctggccggagaaatttcccagcgccgagaactcctcacggccggcgaacgtcaggtgctcgagaaccatctgcaggcagagatcgccagcgcagtgcaaaagctgctgcgcgatgccgaacgtcaagtcaaggccatcaacgatgaattggacaagcgccccacctccaccggcgtgcgcttccgtctgcaatgggaaaccctgcccgaaggtgctgatggcgcaccggtgggcctcgaggccgcacgccgccgcttgctcaacaccagcacggatctctggagcgccgaagaccgtcgggtggtcggcgaaatgctgcagcagcgcgtcgccgcggaacgcagccgcgccgatgcagaccagggcggcagcctgctggatcagttggcccgcgcgctggactaccggcgttggcatcgcttccgcgtgcaacgctgggacggccaatggcgcccgctgtccggtcctgcctccagcggcgaacgcgcgttgggcctgacggtgccgctattcgccgccgtctccagctactacacgcaggaaagctacgcccatgcaccacgtctcgtattgctggacgaggtttttgccggcatcgacgacgcggcgcgcgcgcactgctgggcgctgatccgcgaattcgatctggacttcgtggtaaccagcgagcgcgaatgggcctgttccgccgaactgcccggcgtagccatcgcgcaactgcagcgccacgaaggcatcgacgccgtacatgtctcgcgctggacctgggacgggcgaaaccggcggcgcgaagacgacccgaaccggaggttccccaacgcatga

SEQ ID NO: 50397 - DNA, 1305 bp, Ralstonia solanacearum FQY_4
atgagttcctccgaagccaaactccaacgcttactcggcggtcctgcgctcttgcccctgcgtcaacgcctgcgtcaccacttcgagcggcagaatgacggcgagacccgagcgaccctgcaactgacccaactccgcgccggcgagcatgaggccctggcgctgctcaccggacgcacgtcgcgacccactcgctcaatgcgcatcgacatcacgcagatcgatgccgcattgcagaccgccggcatctgccgttcattgcgcgaggcgctggagcgactcgacggcccgatcctgaaccgggcggccgcacgcgccgcgatccaggcggcctggtccgaggtgactcaaggccgggaggtcgacgcgcgactgcaagcgtggctggatacgccggccgccggcccccagctcaagcgcctcgcaaagcagaacactgccgcagccaaaaccctgctgagacaggccgacgcggtcttgcgcggcctgccagccgtgggactcgcacgcgcgcaactggctgcgcaaacgctaggcaatgcacatgcgctcgatgctggccagcctgtagcgagcatcgtgcttgctgcgtggcgctgcgccgaagcagccatggcgtcatcccggcaagaggagccaaccgacccggagcgtgaattcgacgacgatgaagccgaagatcgcgacgacaaagcgcgccttgcccatgaacgcacccgcgacatctgggcacgagccggcgtcctggtcaacgagctggcgcgaccggcactgatgctgaatctgccaatcgctgaccacgtcacgccaagctggacggccggtgagcccgcttacctgtcactgcgtcaactcgtgcgtacgcccccagcctggaccgtcaaaggcacgcccgtcttcgtctgcgagaatcccaacctcctggcaattgccgcggatcgactgggcgcgcgttgcgccccgctggtctgcaccgacggtatgccagccgccgcgcaacgcgcactgctgacgcaactactgcacgctggcgcccgtctgtactatcacggcgatttcgactggcctggtctgaggatcgccaaccatgtgatccgcacctggcgggccatcccttggcgcttggccgcgagcgactacaaagccgcagtgaaagctgcgccacacgtacggcgcgaccttgacgaaacggacgccgtcgccgtgtgggatccgttgctgacccctgctatgcgcgatcacggcctatccatcgccgaagaggcggtagcggatggattgatcgaggatttacggctcccctga

SEQ ID NO: 50398 - DNA, 1623 bp, Streptomyces davawensis JCM 4913
gtgccgatccgtacgctcgaaaacatggtgggggacgaactgcacgaagaaccacacgacgacgacagcggcagccagacctggcagcggctcagcgcctacgcctacctcagcgcacccgaacgcctggagtacgtcgcggtgatgcgggtcttctgcggcaccctgctcgcggacctcgccgtacccgatgtcctcgccaagcttgcgcagtccgggcacccggcggctgcgctgggggccgagaccttgaccgctcggctcgaacagctcgtgcgctggggcaatctgctgcgcagtacccacacggtcaccgcgaccagcatcgccgagtatcagcgctcccggtcccgttaccagctgtccaagctgggcgagcgcgtgcagcgcgacgccgacgaggtgctggcgggagcggacgccgcacgtgaggtcagcagtgagctgctcaccctcgtcgaccgagggctcaaggagatcgccaacctagccgccgctccgggcggcggcacggacccgcaacaggccctggagaagatcagcaccctcttcgcgcaattctccgaattcgccgagtccgtgcgggacttctacgcctacctcggtcaagtactcgcccgctacgacctcgacggcgccgagtaccaggggttcaaggaactgctgctcgactacgtggaagcgatcaccgaggacgtgtccttccgcgccccgcgcattgccgcccatctgcgtgcgatctggccgcacctgcccacgctgttgagccgtatcgatgcgcatgcgtcgggtctcggtgcgctctccgatgctttgcccgagacgcgggtgcagcgcagccgggggcgggagatggccgactgggaggggctgcgcgattggtttgccgacagcgacggtcacggcagccaggtcgaccagctccgggacgccaccctgcgcgctttgcagtcgctccttgccaatgccaaacggatgctgcgctcggcctcgggggagatgtcccgccgtaaggacctgctcaggcttgccgcctggttcgacgccgcggagcccgaggaggcccatgacatcgcggtggccgccttcgggctgtacggggcacggcatctgggcgtggcgccggaccccgatctgtccgtaccggcgtatgtgagctggtggaccgggcccgttgtggacgtgccggtggcgttgcgtgagcgtggcagccgagccccgcgcgggcgctcagcagcggtggaggaccacggcgagcagaagcgccgtctcatggaggaagcacgcgagctggccgccgcccggcaggctgccgccgccgaactgcgcagcgcctccggccggttcgaccaggtgaggctggggtccgcggccatgcgactcctgctggaactcctcaccgcagctctcggcaacgcccaactgcacaggaaggacggtgactttcagctcgatggagggcacgcggacgatgcggatctgggcatcagactgacggcgtggcggaccccgggcaggcacaccctgctgcgttccgtggacggagacctgacagcggacgacctcaccctggccgtcgagagcacctcagcgcccgccgcagccgaggaggcgagcgcctga

SEQ ID NO: 50399 - DNA, 1344 bp, Streptomyces davawensis JCM 4913
atggccctgccctccacccacgacgtggcactcgctgccgaacgccgggccgccgcccgcctgctgttggcccacccgctggtcaccagcaacggcccgcaaagcgacacctttccgttgatccgccgccacgccgactggctttcccagcgcttccagcaggtgttcggctaccggctcctcgtcgaagcgtcgcatgcccgtctgttcaaggccggcctcgggcccggctccgggcaccgtctggagcggccgtccaccggcacaccgttcacgccacggacgtacacctacctggccctcgccctctcggtcctcgtcaccgcccccgagcagatcctgctctcccagctcgtcgccgacctgagggccgcagctgtggacgcgggcatcgagatcagcgacaccgggcgccaggcggagcggcgcaccctcgccgccgcgctgcgccaactcgtcgactggggcgtgctggcggaaaccgagggccatgtctcggccgttgccgaggagcggggcggcgaggcgctgctgaccgtggaccgcgagatcgcccgcgtggtcgtcgccgggccgctggcgcagagccgcgacggcgcggatcttgtccgacgggccgccgaccctggcttcgggggtccgcggacgtacgtgcgcagacgcctcgtcgagacacccgtcgtccacctggacgacctcaccggcgccgagcgggaatggctgcgtacccgacagcggcgtgagtcccaggccttctccgaactgctgggcctggaggccgagatccgtgccgagggcatcgccctggccgacccggacggcgacctcaccgatctgtacctgcccggcaccggcacggtcgcgcaggcggccctgctgctggtgggacggctggtcgaccggctgcgccccgaggatcccggccacccagcggtcggcggcaggctggtcatcggcgtgcccgtcccggacgggctgttgaccgagttgctcgatgagctcgtcgaggagtacggccgacgcagcaactggcagcgaggcctcgtggaagatcgggacgggctgctcgccgccgtcctcgacctgctggtccgcatgcgcctcgtggcacccgtcggccgggtgcgcgccgacggccacggcctgcccgaaggatacgaggacgcggcgctggacggccggaccgtcaccgacgtctcgggcgcccgcggacaggaccgcacggacgggtgggtgctgcttgccgcggccgcccggttcgccaccacggtggccgtcacctcccgtaccgaacagccgccagcagacgatgtcccccagggatctcaggagccgacccggtga

SEQ ID NO: 50400 - DNA, 4221 bp, Streptomyces davawensis JCM 4913
gtgaaccgccccccttccgcgcaccgctaccgactgcaccgcgccggcatccgcaatgtgtggcagtacgacgagcaggagttcgccttcggcgacggccgcctgctgctgcgcggcaagaacggcgccggcaagtccaaggccctggagatgctgctgccctacctcctggacggcgatgcccgtgcgctggatgcgaccggtaccgggcgcaccacccttccctggctcatgctggacggattcgagcagaccaaccggctgggctatctgtgggtggagttcgcgcgcacggacgacgacggcaacaatcaccacctcaccctcggagcggccatccgcgcctcgcagtcgaccaggacggccaagccgttcttcttcgtcaccccgctgcgggtgggcgaggacctgcacctggcgcccgccggtcagccgttgccgctcgaccaactcaagtcgctcgtcggcccggagaacgtcaccgaccgtgccgtggagcaccgggcccgggtcgcccgccatctgttcggcctcaccgatccggcgcggtatcgcaatctgctccatctgctgcaccgcctgcggcgccccaccatcggcgaccgtatcgactccggcggtctggtctccgtcctcgcggagacgctgcccgcgctcgacgacgaggtcgtggagaaggtggcccgcaacctcgacgacctggactccgtacggaccgacctccagcgcctggagcggaccgacgaggcgctgcggaccttcctgaccggctaccgcggctatctgcacggggcgctgcgccgtcggaccgccgaggtgaacggcgaactggagcggctggcggagcaccggcgcctggcgggcgaggcggtgaagaaggcggcgaagctccgcacgagcgaggacgaactcaccgctcgcctcgacgtcctcacggccgaggcggaagcggccgagacggacctcgccgccctgcatgccagcgccgcctaccgcagcttgcaggaactcggcgagaaacgcgccacggtgaccgccctgcacagcgcggccgcgaccgccttcaaggcgctgcgccaggcccacagcactcaggaggaggcaggacgccggctcaccgaagaagccggaaggctcggcggagagctggccgaactcgaaacgacccacggcgagttgctgcgcgaggcggagcgctccggcctcgaccccgtgcatctgggcgaacccgggacggtccccgtctcgccggtcgcgggtgcagcggcagcggaactgacctccccggacggcgacttccacgtcgtacgccacagcgaggtgcttgtcgtcgacacggagtcctgcgcgacgggcctgcacggatgggacacccaactgggcgccgccgggcccgtgatcaggaaccgcgcccgggccgtgaccgaactgaccgcactcatcgacacgacccaccaggcccagcgagaggcccacgaggccgacgccacgcgggaacgactggaggagcaggcggacgacgcacgtgagcgggccggacaccgacgcgaggagacggcacgcgaaggcgaggcctacgcaggcgccgtacggacctggaccgagcggctggagagcctcaccggcctgtccctcgacgccgtgcacgctctgaccgcccacgacccggcggaggggccgcttcccgcccacgcccccgacgacgtggccgacaccgcccggtcggccgtcgagccatggctggccgaactgggcgaacagcgcatcgcgcgtgccgtggcgatccgcgagctggctgccgaacaggaccgcctgcgacagaagcggaacgactgggaagcccgcaccgaccccgagcccgcacccccgccccaccgctcggcacctcgcacccccggcaccggggcacccctgtaccggcttgtggaattcgccgacgacctggagccgacggcccgggcgggcctggaagccgcactcgaggcgagcggcctgctcgatgcctgggtgtgcggcgacggcaccgtcatggacccggccacccacgacaccctcctcacccccggtaccccggctgccggacccgcgctcgccgaggtgttgcacccggtcatggcaccgggcagcggagtgcttcccgagcaggtcgagggcgtgctccacgcggtggctctggtcacggacgggaccaccggcacccaggcggaatccgcgatcggcacggacggcttctggaaactgggtatcgcccgaggtcgtcacaccaagcaggcggccgagtacgtcggcgcggaggtgcgtgccgagacccgtcgccgggccctggccgaactcgatcgacaactcgcggacaagcaggcggaggtgacgcaacaggaacaggagctgcggatcctcacggagcatcgcgcccaagtggccgacgtactgagccacccgcccacgggacgcccactgaccgacgcgtgggcccgcgccaccgaggccgagcgtgctgcccaggtgctggccggccaggcatccgcagcagcccgtgcggcggaggaggcgcgcgcccgcgcggtcgccgcccggcgcgaggccgaggcgaccgcgagcgcgcacgacctcccggttgacccggccgcactcggctccgtacggctgtgtctggaccgcctcgacacgggcacacaacgactgcgcaggcggctgcgcgtggtgggttcgtccacggacgcccatcgccggagtcgcgaagacttcgcgcgcgctctgacgtccaccggggaggcggaatccgactactccgaaccgctcgcccgcctcgacgccgcgcgccgcaccgttcggggtctggaggaggcgctggatgcgccggagcaggagatccttgcccgcgagaacgaggcgaagcggcgactggaggccgtgggacgtcaactccccggcgctgagcgggacctgaatgccgtgcacgacgagcgagtgcgcgcggaggaggacgagaggggcagacgagaggccctggccacgcaggaagcagaggccgtcgccagtggcaggagactgcgtacgacgctgtccctgccgggcgtgagcaggggcgcgggcctcgacatgcaggcggaggaccagggaggcgaggtgcactcctcccagcgcggcgagcgttccgccgagcagagcgatgcgcacccttccggggacggcgaacacgaccgcaccaagaccctgcgcctgctcgtggacgacgtacgaagccgcctggacgccgagcggcgcgatatctcggacaccgcgctcctcaaccgtcacacggaactgcgcgaccagctctccggaggctacgacgccaccctggaggaacacgacggcatcaagatctgccgtctcgtcgacgaccacggcccgcacgacatcgccgtggtcggcgagcgcatcgccgcccaggcgaccgaggcccgcgaacggctgacggagcgcgagcgagaggtgttccagcgcttcctcaccggagagctgggggatcacctctcctcccaggtcctgtccgcgggagccctggtagccgctctgaacgacacgctgtccacggtccggacctcacacgggctgggcgttgcgctcgactggaagctggccgacggcgtggaagccgacgtcaaagcggcggtcgacctcctgcgcagcccctccggcttgcgcacccacgaccagtccgaccagctccgcgacgtactccagcgccgcatcgaagacgcccgccgcgccgacccgggcgccagctacgcggcccatctgcgcaccgcactcgactaccgggactggttcaccttcaccccctgggtggtcaacgacgccgcccccggcagccgccgcaaactctccggccgcaccggcctcagccagggcgaacagcgagtcctgtcctacctggtcctcttcgccgccgcggccgcccacttcacgagcctcgccgagaccgccccgcacgcaccccggctgatcctgctggacgacgccttcgccaaggtcgacgagcccacccatgcgcgcctgggccgcatcctggtcgacctggacctcgacttcgtcctcaccagcgaacgcctcatcggcaactggcccgacgtgccgtccctgcacatctacgagtgcctgcgcgacccgcacgtgcgaggcgtggccacgctccactacacgtggaacgggcggcagaggcggctggtgtcggtatga

SEQ ID NO: 50401 - DNA, 1305 bp, Streptomyces davawensis JCM 4913
atgacggacgcccgagcggaggacgagccgtcgctgcccgccgaagcgctggcgttcctgacccggccggggctgaagcgtctttggacggcggcccgtacccgcctcgaacggggcggcctccgtccggtcggcacgatccgcctgccggacctggacgcggaggagcgccaggcactgtccctcctcctggccagaccggtcaccggtcccgccgtcacgatccgcctgtcggacctggacacacgcctgcgcaccagcgcggtcggactgagcctggctgcgaccctgacggaactgggcccgccgctgaccgaccggcgggcggcccgggacgcggcgcaagccgaacgcacccgtctctggtcggagtcggaggcggccctcgccgcaacgccactggcgaaccaggagtgggcccggcaatggctggagggcatacggcgagggggcacgctgatgcggcagccgtccggcaccgccctcaccaccatcgcccaggccatcgagaccctcgccaccctcttccccggcacagcaacggatccgacccccgccacctggggccgcggcgaactggccacccgcacaaccggttcggcccatggcctggacgacggcacgctgctggcccgcctggtccagcgcggcatagcggtggcccggggcgtggacttccccatcgacgcgccgggccgccgcgctctgtggcgtcaggcctcggtcacccccgacgaggtttccagcaccgtgctcacctacggccttcggccgacgggcaccacctggcaggaaggagccctgcgccaacgcgccgaccaccggctggaggcgcacctgacgctgcgcgaactgcgcgcccttcagctgtcgttcccgcccggcacgcggatccacgtctgcgagaacccccgtgtggtggaggccgcggcggacaccgcctgcaccgcacccctgatctgcacttcgggcagtgccgcgacggtggtcctcacgctcttggacgcgttgtcggcggccggctgcaccttcgcctaccacggtgatttcgactggccgggcatcgccctcgccaaccggatcatggagcgctaccaggcggaaccgtggcgcatgcaagcggcggactacgaatacctcgcgacgcgagcggagctgcacgggacaccgccgctttccctcaccggcacaccgatcgaggcggcctgggacgcggaactggccccgaccatggacgccttgggcatcgccctgcatgaggaggcagcgctggatctgctgctgggcgatctcgtagaagcctga

SEQ ID NO: 50402 - DNA, 1569 bp, Streptomyces davawensis JCM 4913
gtgcttgaacgcgatgactcgggagtctccgagtcgttcaatcttgactcattgactgtgagcgaccgcctgcgactgttcaatttcacgcagcgtgatgaccatgtggcgtatctgtgggtgttgcgggcgatgaacgtgctacgggccgtccaccaactgcaggtccaccccgacgacgtggcgaacgcgctgagcgagctcgcggtagcgcacgacgaggtgccgtccgccgcggacttgaacctgcgggccatgctcgacaacctctcgtcggacaatgagcaggtcctctaccgagtggaggacgcggcacggtgcgggaatctggccgcgtaccggaaccggcagtcggtctaccagttcacggagatcggctaccgcgtctactgcgcggtggaagaggtcatcggctcccgggtgcaggacgcgaacctgtcgcggctggtcttcgccgacatcctggcggacttcaaggcgctggcgaccgcgaaccgggagggcgaccaggacgaggtgtatcgcaagcttgcccgcctcgacaacgtgctggaggacatgacccagcgagcggcacgcttctatctgaccctgaacgacgtggcgcgtacgacggacatctccccggagacgttcctgcggtacaagcacgcgctgctggcgcacatgagtgagttcacagcggaactggaacgctacgcgccccggctggccgaggccgtgtacgaggtggaagacactggggtggagaccctgttggagcgggccgccgcggtggatgaacggccgatgatgcggccggccgcgcgacttgaggactggcggcggcgctggatggggctgcgccagtggttcttggccgacggccctggggagaccaaggccgctcagctgcaaggcgctacccgcacggccatctcgggggtcattgccctgctgcggcaggtgacggagtcacgtcgaggaggggtgagccggaccacccagctgcggcatctcgccgcctgggcggcggctgcgccggatgagcaggcggcgaacgcgctggtgtcggccgctttcgacctgcgttcggtacggcatctgtcgggtgctcacgacgacgatgaccagatttcgccgcgggcgacatggtgggatgcgcccggtgtggagatcagcatcagcctgttccggcatggcaaacggcccgcaccgggcgggccgcagccggtccggacgcgtcgtggcgcgcacgcccggctgcgggagcagcagctggcggctcgggccatggacagggaggccgccacggatctcctggaccacggtccccacgaccgggtgctgagcgaggcagagacccgagccgtgctcaagctgctgacccgtgccctccaggcacgaacggtcgtcgcgggccggctgcgttcgggcaccggcagcagcgacgtgctgacgctgcgcctggtcccgaacgagcgcggcagccagctacggaccgagaccggcacgctgcacctgcccggcttcgccctggagatcaagccccatggtgcgatgcgccgacgccgaacggagaagccctga

SEQ ID NO: 50403 - DNA, 1419 bp, Streptomyces davawensis JCM 4913
atgcccgcccatcgcgtagccgcctccgtggagcctgcggacctcggctcgtaccagcaagctgcccggctcatgctgttgcacggcgtcgtcaccgagagctacccccgagccaaggcgctcgctctggtgctgcagtggtcagacgaactggccaaggacttccgtgacttgttcggctactccttgcagaccagcgcccgtcacgcacggctgctgcggcggctggacgcgttcgatgccagccaggcgttcctcacggtgaagagcaagaggccgttcgaccggcggcgtctggcctacctgtgcctgatcctggcctgcttgcaccggtcacgcatcgagatcaacctcgccgatctcgtcaagctgctcacaccgtccgccaacgcgatcgagcacctgggcttcgatgcgaccgcgccgggccacaaggacgcagtcgtggatgtgatggactggctcgtcgaccggggtgcgctgcggatctccgatggatctatggaggactgggcccgtgaccacgaccgcggcgatgcgctgttcgacatcgaccacgacacctgcgcggcgcttttcaggccgaacaagccgctgcagcacctggccagcgctgccggcctgctggacaccccgaccgccggcaccggacgggaccctcgtcggcggtttgctgcccagcgagctcgccgactgctgatcgagtacccggtggtctacttcagcgacaccgacgcggagacggcgatagcgctgcgccagcccaccctggcggaggacatcgcacggctgaccggattgccggtcgagcgccgcgccgaggggatcatgctcgtcgacaccacagggcatttcactgacaagcgattccccggccgcggcggggcagtcaaccgcacggccgggctggtgctcgcgaagatcgcggacttgcgggaagacccggaccgggccgccagtcttcagtacctcctgcccgccggaccaggggaggaacaagcggacctgctgagccgcatcgacatggccctgccgcaggccggcacgctcgcagcattgacgcaggacccgcatgcggacgctggctggcacgcggacgaggccgatccggacgtgccggtgcatgaagggcagacgggcctgccattcgtggaacacggcacgttggagcagatgatcaacgagctctacgaagagttcggcccctcctccttcaccaacaagtggcaggccgaccccggcggcctgctggcagaggcagtcacgctcctggccgacctgcgcctggtccacatcgtccccggcgggatcctggtccggcccgcggccggccgctaccgcaacatcaccgccgtcctcccgcgccccgagcacggccagttcgctctcgacttcccccttgaggacacctctcgatga

SEQ ID NO: 50404 - DNA, 4320 bp, Streptomyces davawensis JCM 4913
atgactctcatcccccactcccgcaccgcttacgagccggaggttcgcttcaagcccacccgcgccggagtgatcggtctttgggactacaccgacgaggagttcgtcttcgccgatggccgactggtcctgcgggggcacaacggctccggcaagaccaaggccctcgaagtgctgttccccctcgtgctggacggtgtcctcgacgcaaggcgtcttgatccgttcagcggcgaggagcggaccatgaaatcgaacctgctctacaaggggcaagaatccgcctacggctatgtgtggatggaatttgcccgcaccgaccccgacggggaggtcagtgaagccgtcaccgtggggatcggcatgcgggtgaccaaggcgatgtccacgccggcccgcttcttcttcgtcaccgacggcagagtcggcatcgacttcggcctgctggacgccgcctcgcgcccgctgcgggagaaggccctggagaagctgctgggtaagaaggccatcttcgatacggcggaggcgtaccggcaagagatcgacgaacggctgttcgggctgggccgcgagcgctacagccagctggtcaaccttctgctccagctgcgacgcccgctgctggccaaggatcttgacccggtcaagctgtccgacaccctcaccgccggcctgcgccccgtcgacgatgacctcatcctgcaggccgcccgcgacttcgagaacctcgccgagatccaagcgctcctcaacgcccttacgggggcggataccgcggtccggaacttcctgcgtgaatacaccagttacctgcgcgcccatgcccgtgaccgcgtcgaccaggtcaccgggcgcatccaggacacggccgcccagtgcgagaagatcatggaagccgcggaggaccgccgcacctccgagcggcaggtgacttccgcacaacaggagcgggataccgccgaacgccagtgcaacgaagtcggcgcccgcctggccgagtacaagaaccacgacgccatcaagcaacgtgacgacctcaatgaactgcgcgaccgcgtacacacggaacgccggggcatcgccgacagcgaacgccacctcaaccaggcccagaagaacctggccaccctcaagggggaggctgagcgcgctgtccagcggcacgatgagctacgcaaagcggcctcccggcacacccacagcctgatggacgccgcacgccgctgcggcatcctgcacgacgacgccacgctggatcttggtgccgaactggacacagacgtagcaggtcgcgtagccgcgcggcgcagcgaactggaggacgtacgcgcccacctcagcgcgtttgaggacgccacgaaagaccaggatcgcgagcaggaccactgcgacgcggccagcggcgagctgaccgaggccgagcagcagtccgccgcagcagccgagacgctcaccatcgcccgcaccacggcccgccaggaactggacgaattcatcagccgctggagcagcggcaacgacatcgcggtcctggccgccgccgacggtgacgcactgcgcgcggccatcgacgcggtgggagaacccgaagcgacgccgctgccggaggtgtttcggtccctcaccgaccagcgccgcaccagggccctgacccgcgtcgagaccttgaagcgggagcacagcgacactgcggacgctctgagcagcagacaggatgagcgcgacaccgtggccgctgaggctgatgacgcgcccccacccagtgacctgcgtccggccggccgcgatgagcggcccggcgccccgctgtggcagctcgtacagttcgccgatcacgttccggacgcccatgcagccgctgtggagggcgccctgtacgcggccggccttctcaccgcctggctgcaccccgaccctgcgctgaccgaccaggcactgcacgacaaggtcgccgacgcctatctgcgcccgctgcctcctgcacagcggcccaccggatccaccctggccgacgtactggtcgtcgaagatcagcagctcgtcgacgccgcggccgttcaggccgtcctggcatccatcgccgtggcggaggacatctctacaacagacgacgcgctgcgcgctcccatggtcacgaccggctcacacttctgcctcggcatccaggtcggtgcgcatcccaaggaacagccggagtacatcggcgccaccgcgcgagccgcccgtcggcgcgaacggttgcgtctgctcgacgaatccatcgccgccctggaagctcagctcgccggcatcgaagagcagcagcggtacgcgcaagaagcattcgacgacttcgactgcgccagggatgaactcccccgcacccagccgatcaccgatgcggtaggcgaggtggccgtggtggcggagaaggttgccggcgcccgccgccgcctcatcgaaacccgcaagcggctcgacggggcgatcgcgcgcgcccatgagaagaaccggcagcttcggcatgctgccacggccgcacggctgcccaccgtccgcgaggaactgaacaacgtcgcccaggccatcgacgacttcgccgacgccgggaaggcgctctccacctgccgtgagcaggccgatgccgccgagcgcgacatcaccggccgcagggagatcatcgcagcgcatacagagtcctgcgcagaacaggctgaggcgctacaggcgcgcaaggatgagttcgccgttcaggaggaacgtctacgcacccaggaagcgacgctcgaagcccctctgcaggagattctgcagcagatcgcggacggggaggagcagctcaccgcagcgcagaagacgtacggccgtgcgaagaaggacgcggaagatcagcgagaccggcttctgaaggctgaccatgccctggagttcggccgtacagcactggccacggccgtggctgagcaggtgcgcaccacgctcacgcttgagccgtatgcccggccagaccttctcggcctcctcgaagcgaacgccgagaccgtctggctgccgcacgacatgtggccgagccccgagcaggcagtccaggccctcatggacagcctgacctcgcccgacacttccctcacgggcatggaggccgcccagaacgtcgtccccgcgtccgtcgcatccttgatcaacgcgctcgacgaggcaacacgaggacggccgatcaccgcgagtctcctgaagaccgtgacgaccaaaatctctactgctatcaccgcgctggaggcagccctgctggagtccgatcagggctatctcttcgagtgggagccggcgggtgacatcatcctggctcgggtcaccgacagcgaaggaccagctcccgtggcggacttcgcccgccgcctggccgaacagctcgctgatcagagcgtgctgctggaggacaaagaacggactgtcctggaggacggactcctgaccgggctggccgagcagatccacgatcgcaccgtcgccgcccgcgatctggtcaggagcatggacgccgacacccgctccaagccgatgtcttccgggacgacggtaggcatcaactgggtcgtctccgacgcgctcaccgactcccagcaggccgtcaacaaactgctcgacaaggacgcctccggtctcggcccggccggactggccgaactccgctcccacctgcgcagccagatccgcgccaaggccgctgccgacaagaagaggagctaccagcaagtgatcgcggaagtcctggactaccgcgcctggcgcaagttcgagctccgtctgttccggccaggcatgagcgaggcggagcggaagaagggagaactgctcaccaaggccaagcacagcgtgatgtccggcggcgaaaagtccgcctccatccacctgccgctctttgcagccgcccacgcccagtacagctcggcgtaccccacgtgcccgcggctgatcgcccttgacgaggctttcgccggcatcgacgagaagtaccgccccgacttgctcgccctcacggctaagttcgacctcgacctcttcatgacgggctacgacctgtggatcacctaccccgacgtgccgcagatctcgcactacgacatgaagcatgacgaggcgtctcacaccgtctccgccatgttgctggtctgggacggcgagcagatcctcgatgaccttgagtatcccggatccgacgatctggctgccgaactcctcggcttcacgccccgtcggcacgttcctgcagaggcaggactgctcgcggacatccctgaggacgagccgacaaacgacgatgccgaggaagcagaatga

SEQ ID NO: 50405 - DNA, 1275 bp, Streptomyces davawensis JCM 4913
atgaccgggtcagcagaggcatacgagcgctatcgggcccccgagttccgccggctcctggccgctgcccggcgctcgctcgagcgccacggcggcgagatcaagggctccatcggcctggccaacccgaccacggccgagcgtaacgccatcatcggcattaccggtacgtaccggtcggccgacgtccgccgcatcaccatccccctctcagcgttggagcagagcgtctgcaacgtcaccggcatgtcgctccgcgacctcctggaacggatcggccccgagctgcgatttcgcgccgatgagcggaacgcgctcgatcaggcccggcagacgatcctccttgagggcgaggccagccggctgcacgccgagcactcctggtaccggcagtggctggccggcctcgcatccgacggcacgatcaccgcactgatcaataagaaggacacccacctcttcagccaggccgtccgcgtcctggaacacctctacaaccggcccggcgacgctccaccgatcatgctgcccgccttggccgacgccaccacaggagacaccaaagccctcaactccggccgcggctcgctgccgaccctggtcctgcgagccctggccatggcacgtggaatcccactcgaaccaggagccgaggcccggcgcgagctgtgggacgccttcgacgtcatcgtcgacgacctcgccagccgtgtcctcgtcctcaacctccccgcgaccggccagggcctgggccagtggctcaccgacgccgcccgctatggcactcccttccacgtcaccctccaccagctcatcacccttccgatcgccgtgaacctgccaacggtgtacgtctgcgagaacccggctgtgctccgtcgcgccgccggtgagctcggtgtcggcagtccgccgctgatctgtgccgaaggtcgtccctcgaccgcctttcaccggctcgcgcagctgatcgtcgaagccggcggcaccttgcgctatcacggggacttcgactggcccggcatcgacatgaccaaccagctccgcgcccgctaccaggcggaaccctggcggatgaccgcggcggactatctcagcgcggttcgcgccgacagcgatcacgtccccctgagcggcaaggcacagggcaccctctgggagccagggcttgctgaggccatgaagcgggagaaccgcgccgtctacgaagaggccgtcgctgacgtcctcctggatgattggaagggccctgccagagcagggggcgatggataa

SEQ ID NO: 50406 - DNA, 1332 bp, Enterococcus durans IPLA 655
atgctaaaaaattatcctgaaccttatacagaagatgagcttctgactgatttgaaacgattatgggattatggaaatttaaatgtgattgaagaacaagcaaaaaaacgtacactcgaggagttcaacactaacgactatacttattctattgaatctcgtacagtggacatcgttgaattatctgaagaaattgaacaacggatggacgagctagtgggggaattgaatggaaataaacttcgagatatctatactattttagaacgtatgcctagattgactgaccaagaaaaaatctataagaattatgaggatttaaagcgcgtttttcaagaaaataatgacaatacagtgagctattttggttatttgaacaaagaaatcacaaaaggtgtcttacaatctaaggaatttattgatgtaaagataaattttttactctatctaaaagattatgttttagaattggaaaaacaacgtccaaaaatatggagtacacttaaaaatattagtgaagaaactaagatgaatatagcaaatacccatataaaacatcgtaaagaaattgcttcattctccccagaaaaaataaatgaaaccgacttgaaaaatcaagtatttgaccagtttaacaatattaaagtttggtttagcaataatgaacatagcatgtatagcaaaatatacaaccaagcagaacagatgattcaaatattttcaaatgcggatgtgcaatacttcaacagacataagatgcaacgaaatagacaagcagattttcgaaaagttgcagaatggatgtatcaagaaggtaatgtagatgaagtggccaaaatgtttgtttctatttttggaatgatgaacatgaaacatgtaaaaactagtgaacagtatatttacgatggagataaatttagtagtatctgggagatttccccagaacttattgaattaaaaccgcgaaacaaagtaggaactgttcctcagaacgtccaagcaacaaaagcatattcttctgatcggagaaaactcagaaaattattactagacaatgaaataaaacaaaaagagcgtgtattagactactttgacaacggagttttaaacctcagtgaagatatatttatggatgaggaaactagaaaaattattcgtcagtggatcagtaatggaattactcgtaaagatcatatcacgaatacagtatttggattaaaaatacttgtagaactggacgaagaagctgaagctagaatttattcagaaaatggtgctttaacaatgtctggtgtaacattatctattctagattttgggaaggatgagtga

SEQ ID NO: 50407 - DNA, 1146 bp, Enterococcus durans IPLA 655
atgaacgaatctattttcaatttaattcaacccttgtttgaaaattatatcatatatagaaaaagcaacccaaaactatatttccatatacgtcaaaaccaaatagaaatctctcgtaatttaaaatattattttggattgaaacttaccatccagaaagagtttattatggtaagacatataccgttagaagctaagccatatatggcgattaatgattttaaagaaataaatgactatgtatttctaatgctattaatggcgattattgatgctaagcgcattgatgaatctttttatttaggagatatcgtaaaagatatagtatccattcatccagataaagaaatgttagattggacgatttcattacaaagaaaatcgttagtcaaagcactaaaactaatgactgaattaggaataattaaattgatggatggcttaacagaagattttgatactaaattttcaaaagatgatgaacgaccgtacgctctctatgagttaggtgactttagtaaattcttctttaataatcaatcaagaatttttgataattttattgagtatcaatcattcgaagaatataaaaattctttgaaaacggagcagcaagaaactttagccctccgccaacgtgtctatcgacaactgatcgaaaatatagcaattaattttaatagaaatacagcagatagcgagtttgtctatatgcgccgttcagagaatgaacgtagtctaaaaactttttgggatcaaactacatacaacttcgaactttataaagatacagcatttttatcaactgaaaaattttctactaatcttgcaatgtttccaacaagaatgcaaattgatgaaattatcttgcagttgtcagaaatcttgagaaatgaagatactcatgaaataaatgaaaaaggggaaaagaacttgacctatccggcatgggaaaaagttatttcacaaaaattgattaagttttatgaccaatactggacaacagaatttcgtggaaagggttttgattttcttaataccaatttaaaaaaacggttacaagaaatctgtttcatttatgatgatagaaatgaagaattgataacaatttatccggtttttgtaagaattattggcgcaatttaa

SEQ ID NO: 50408 - DNA, 4158 bp, Enterococcus durans IPLA 655
atgaataataaatgggtgattaatcgagcaggatttcataatttttggaaatatgctggttcatttttttttgattttgcagatggcaaactgtttttaagaggtagcaacgggcgtggaaaatctgttgctatggtcagtcttttaccacctttgttggatggcagggtagatgctcggcgaatggatcctttttttcaatcaactgatcggaaaatgggcgacatccttttagaggagcaagatattttaggtattgatagtagaattggctatattacattagagtacaaacgaatgaatgaaaatggaattgaggaatactttacatctggtatcggtatgaaagcggacagaagtaacagtaatggtagtagttctaacctaacgcgttggtattttgctatcaacggatcacctcgagtaactgaacccaatactgatgggtttcatgtcgttgaagacaacggagatgatacattttcttcattgaccaagcaagtattaaaaaataaaataaatggtatcggggcacgattctttgatacgccatcttcctatggagaatatattaacaaaaaaatttttcaatttactaaaatagaagaatttaatacaatgattaaacttttgattacattacgcgcttctaaattaggagataaatctggtccaagttcagtgacagaaattttagaacactctatggctgaattacctgaaggagaactagatgtattaaaaaatgtaattgaagatatggagcgtattcaagaggatcaagtgaatttgacaaacgaattgaaatcgttatccaaagtaaacagaaaatatagggactatcttgatgaaaagttaggacaattagcaacagcatggcttagaaataaacaagaatatgaaatttttattcattctatcgattctactaaagaaggcattgcaaaattagatgcaaagtttcacaacctggaagaaaaacaaaatctatcagagagaagtttgtctttgttgcgtgaagaatatgaaagaaatacaatagccagtgataatgaattaaccagaagagtttctgaattagaaaaagaacttgagcagttaaattctgatatagaaaaaaagaactctcaattgaaaaagcacgaaaactatctaaaaaaacttcaaagtagacttgaagacgctaaaaaagatttggaaggtcaaacagaacaacagaaacagaattttattgatcttttagataatgccagtggttttaattatactaagcagcatcaaaaatttcttgaaagtctttcaagtgaagacgaaaaagttattgccgatatcagacgtcaaaagaaattgattacagatttacaaaataatctgagtctaattgaaagttgctttaaatcgataaatcattcaaaaagcatagtaaaaaaggctgaaatcaatcattcaaaagcaattgaagaactacaaatagctaaaatccaatttactgaagcaacggaatctttagaagaagaaaaagatagactttatactgaagttgttgaatggtctaatttaactacttttaagataccttctgactatttgaataaatcattatccgcaattcgtaaactttatgataacgatacagaatttagtgatgtaatggtacctctagaacaagcaaaaagagaatctataaatttacttgagcaacagctcattcctttacagagccaggtagaaatactgcaagaatcactaaaccaaaaaaagctggaacaagacctgcttttaaagggaaaaatagtagaacctagcagaactgaagagcatagacatgcaagggagacattaaaaaaatctgatatagtatttagatcgttttatgaaacagttgattttagagaaaatattgaagaagatttaaaaaataccattgaatcggctgtagctgaaagtggctttttagatgcaattatttcaactgatgcaaatgcattaatcgaaaatgataaattaatcattccccaacctttcactttaggagaaagaagcaatacgctatcccactatctaaaaattgaaaaaaatctacccgatgaactaagcgaaatcgttggggacatcttaaatagtattcaaataaatgagggtgatgatccttcattacctattatctatcctgacggtacatatcaattatccattttgaaaggaaaatcaaattctcaatataaagcagcatttattggagagtccagtcgtgaagcggaacgcaaacgtaaacttgagagtttgaaaaatgaactctcacaattaaaagaacatcagaaaatatgcaaagaggaaataactcagctagaacaaaagagaagtctttatgaagaagatttcgaagcgtgtccaaatgacttaaaggtgcgtgaatcattaaggcttcataaaagggcaatggatcaagttgctgttaaaagtgaactagaacgtatgcaattagatcaaaaagaaatcgctgctgcagagttacaaaagcatcgtaaaaaactctttgatctaagatcgttaataaatatagatgtttcagaggaaacactaacagaaataaaacagtactcgaataattactacaacatacttgaagatatagtagagacaattcatcaattaagaaaattgaaaaatcgatcagctgagcaagaaacagattatcattaccaaaaggagttatgtaaggatgctatagaggatctaggaatagtcacacatcaattagaagataaaacaacaacattaaaaaagataaaagaacaaagagagtttaaagaagttgaagaaatgagtttgcgacaggaaaaactaaaaaaagaaatcagaaataaagaagaagaaaaaggtgctactgatcgattattaggtgaactagagtcaaagatcaacaactccagagaaaaattggatttgttaataaaacagaaagaaggaaagttacagcttaaagaagattggctaaagttatatagctcagctattcaaaagtattctctagatgctaagattgatcttcatagtttttcaaaacaattcggacgaaaaattgatcgaaataaactgatgcaaatttctgctgctttgacgaaagtaattcgtgaaaatcgagaccaattgcttgtttataatcttgaatcagaattgagaaaagtcactattcgctctaaaaacgaagatgatttattagaagttttatatgaaaattgggatgattataataattttgagtcagtcgaggtagatacccaaaatatgcgaaattcgccttttttactagaagctatgctacgtaaagaaaaggaagaaaatgaccaggcttatcaaaaagatcaagaagaaatgtaccgtcaagctctatttggaaagttgggaaaaacaacacgtgaattggtagtagaaggtcgtaattgggcagttaaaatggataagatgttacaacgtgtttatggtgaaaaagacgacttgcaactcgaattaaaattggttccaaagccttctcaagcagaaggggtcacgtctacaagccaactaattgatatttggagtaatgcagaagaaggaattttaagagaacaagatcagaaaaaagtaatcagtttttttaaaaaaggcttggatgatgccatagttatagtaaaagaaaatcctgggaccactgatttaaaagaagaattaaaaagagtttttgattatcgccaatggtttttctttcgtttaaattataaaaagaatgcgaagcaaaaggagtttaaacgactaactcaagaagccttcatgaagatgtcaggtggtgagcgagccaaatctctttacctacctttatttattgctatgcgcttaagatttgaatccgctagtgagaatgcaccatacatcattactttggatgaggctttctctggagtagatgaagaaggtcgtgaatctatgatgggagtcgctgaagaattagaattcaactatattatgaattctcaagagatgtggcctgaatatccgacagtatcaagtattaatacgtatgaattcaagcagggaaaaagtgatccttttgtggaaacggttaagtacggttggaatggacgtgtccgttctaaaatagtaggtgatgaatttgaataa

SEQ ID NO: 50409 - DNA, 1287 bp, Enterococcus durans IPLA 655
atgaatttgaataaaggtacaattgaatttttttcaaaaaataaaaaaacttgggagagttggttttccttattagccaaacgatatttttcgtatggaacatttggagggtatgtcaactatgaagagttgggagctgttgatttaacaccaataaaagagtttttagggctttctcaagtcgaatttgaggctaaaaataaattttctataaaaaaatttataatgcggtataatcggagcgctcttgctgaaaaggatagtttagaaaatgtaattgagtactttattgaacaaagtttgataacaaaggaaaaattatgtgaacaagagactatcaaacgaaaagaatttgatacactcgttgatatattattgagcgacaaatcacccttactagtagaaagtacacgtaaaaacttatttgaaaaatggaaggatgatcagacagtcattgaatctttagaaaaggctcaatttgcgttgaatcatctaccaaattcatttttacaattaccttatttttcgaatcaactattccacaatgcccacgagttagacacaaatagtttaactggagaaatattcaacagtatgttaagaaaatcatttgaactttcaaaaactacacgaagaaaatactattcaaaagttgaattgagtgaagatgtgtatactcacgtcaaattattacgaggggatcatacaatatatgcttttgttcaaggcatatattcaaacgaccttactatttggaatgcacatgccaaggaaagagacagttggattgtccgtaaagggcatgttttaaacgccaaagatttatatactaaaaataacaaagtctttgtagtagaaaatgatggtgtattccaaatgcttacagaaatgtttccaaatttaccttttttatccacaagtggtcaacctaattacactgttttaaaaatagtagaaaagttagtgattagcgacactatgatttattattctggtgatttagacccaaatgggctctcaatggctcaaaatattttgaaattatatcctctgaatgtgaagttggtaggaatggatgcagaaatatacagtagtaaattaaaaacgaaagaattaactaaaaaccaaataaaattgctggatagtattctggtaccagacttgcaagacttgaagcatagaatatatcttgaacaaaaagctgttgaacaggaagcattaactgaaagctatatacctttgttagaagagtgggattcaaaaataagcacaaccgaaaatgaataa

SEQ ID NO: 50410 - DNA, 1488 bp, Thermoanaerobacter thermohydrosulfuricus WC1
atggaagataaacttgatttgaatgtgataaaaccgattgaagaggtaaagtatttgtctgcggaaaatgcttcgcgatatcgccttatcatgaggtatttttatgaacagtaccagaaatttaaatattggctgtacaaagaggatgtatatgaatatgtaagtcaatttgatatgtttgctgactatacaatggaaaaatgtgagcaggacttaaaagcacttactgaatggaaaaaccttattgcgacacaagataccagtaaagcttctacgattgacgaatttaaaaacaaaaaattcaggtatcaattaagtccatattctattgagatagaaagaatgaccataaggctggaaagcatcgtcggttatggtgggtcactacagccgtctttatttgaaaggatttaccgcaatttaataaagataaatgaaatggcgaaaaaagaggatttacaggaaataaacagatggtgggaagacctcaataccgactttgaaaatatatatcacaatgcgacagattacattgcaagtcttcaaagctctaacgctgatgaacttatgaagtcagagcagtttataatttacaaagacaaacttatagaatatttaagagattttataaaagaccttcagagattttctgttgccatagagagctttttgaaaaaggtgagtccggaggttgtcaattccgttgtagataagttatgccaatatgaaatgagtatcccaagaattgacagggttttaaatgaagaggaagtaaaagaagatttgatggataagtggaataacatatctttttggtttacaggtcataattttgaagacggcgaggcagtaaggcttcttaatatatcaaacgaaataatcagaaaaataacaatgtatgcggcgagaatagctgaaaacagaatgaaagctgccagcagaaagaatgaatatattgctctttctaaaatgtttgcaaaagcaagcaatataaaagaagcacaccttttgtctgcggcggttttcggttgcttttacacaaggcacataaaaggtgattttgaaagaaagacagaaagtgtaaaccagagcgtatgggaagaaccgccctttaaagtgattataaagccaaaaacaaggagctacggtaattctgttaagacaaatgcgattattgataaaagtgctgacaagacggagatgctgatggactatctcaatcagaaaaatatagaagatgaaataatagcaagttgcattgttggaaatagaataaggataaaggatttacctgttgtaaaaccttttgtgagggcaacgatacttaaatggataggaaaagcgatggcaagaaatagctttacaggaaagacagaagatggcagaacatacagacttcacatgccaaagaatggcgaaagagcggttttgaaatgcacggatggtaatcttgatatgcctgatattgtaattgagtttgttgattga

SEQ ID NO: 50411 - DNA, 1152 bp, Thermoanaerobacter thermohydrosulfuricus WC1
atggaagaacttcagatgcttcttgaaaatttttggatactgagagaggatagagaaaatttcaacaaaatacgggatgctgagaataaaataaaaccttttgttgaagagaagttaggatatagattgattataaacccatatattattaagttagaaaaagtgccgtcagatgttgaagagtggatggggatagatgcatttcaaatgcctatggattatgcatttttgtgtttgctcttagcttttttggaggataaaggaccagaagaccagtttgtgctgtctaatataacggaatacatagaggcgcagtatgatggacctgataaagtagattggacgctttttcagcacagaaagtcacttgtgcgggtgctcaattttgctgtagatattggcataattaaaatagatgatggtgaccacgagaggttttcagaaagtgaagatactgaggttctttacgaaaacacaggtatttcaaggtattttttgaggtcttttaacagagaaattacagaagacatgaagattgaggattttttgcaggaggatttaaatctttcaaaccccaaagatgcggttatacagagaagacacagggtgtaccgaaaacttattctttcaccttctgtgtatagtgaaggacctgatgaccaagacttcatgtatataaaaaattacagaaatactatagcgaaagatttagaggagtatcttgatgcaaaacttcacctccacaaaacttctgcttttgttctctttaatgacaacaaatatttaaagtcctattttcccgacaaaaacaagaacatatctgatataatgctgcaggtaagtaaaattataagacaaatgattgaagatggaaaactcgcctataatcctgatgatactatagatataactgaagcagaatttataaatattattttgaaagtaaaggaaagatttagtgatggttggtataagtcttacagggaaatgagtgaaaagcagcttatagaagaggtcattgaaaacatggaaagctttaagatgataaaaagagttgaggaattgcattctattaaaatattgcctatggcggcaaagttaattggggaatatcctccagatttcgaaaaaggagaaggtgcagatgagtga

SEQ ID NO: 50412 - DNA, 4167 bp, Thermoanaerobacter thermohydrosulfuricus WC1
atgagtgaaaaattagccgaaagatggatgattaacaggattgggcttcttaatttttggtattatgatgatgaaatatttgagtttgcagatggaaggcttcttttaagaggtgctaatggttctggaaagtcagtgacaatgcagagtttcatacctttagtattagatggcaacaaaagtcctgaaagacttgatccctttggctcaaaggcgagaaagcttgaggactatcttcttggggaagaagaggtaagtgggcttgatgaaagaactggctatcttttcatggaatttaaaaaagagaaaaaagacagctacattacaataggcatgggactaaaggcgaaaaggcatcaaaatatggacttttggggctttgtaatacttgacggcaggcgtataggtatcgacttctttttatacaaaatggaaataggcgatgacggcaaaagagtaaaagtcccacttaccaaaaaagaacttaagaatagaataggtgaaggcggagaagtagttgaaagccaaaaagagtacatggaaatggtcaataaatacatttttggctttagttctatcgaggaatacgacgagctcataaaactgctgatacagcttagaagtccaaagctttccaaagacttcaggcctactgtgatatatgaaattatgaaggcttcactgccttcactcacagatgatgatttgaggcctctttcagaaaccatagaaaatatggaccagattaagatgcaccttgatgttctttacaggaatatggctgcagtaaaaaagcttaaaaatgagtacgacaactataacagatacattctttatgaaaaggctggggatttagtaaaggcatacagcgatttatacgcatcaaaaaaagaatacgataatttaactaaagatattgaaaattacagaagtacaatagcaaacttaggaaatgacatcatttctcttgaaagtgaaagagaagccttaaagaaaaaggaagaacagctttcaagtggtgatgctaaaagaacccaaaaggagttattagaagaagaggatcgatataagcagtatttggaggataagtctaaaaaagaagaagaactccgtaataaacaagataaatattatggtttagaaagaaagataaaaaacactgaggaacaaaaatacaaactggataaagaactacaggataaattagaggatatatcttcaattgcacaggatatagatttcatggaacatgagttttctgtaagtgaacttaaaaaagtgtatggaaaagaatttgattttacttattggaaaaatgaattaaaaaagcataaagataaaataaagcgtgccatcaatgcattgagagaagaaatagaagcaaataaaaggtatgatgccgcacttaaagagcaggaaaggcttaaaaaagaaagagaagacagggctaaaaagttggaagaggcagaaaggctttttgacgaacaaaaaagagagtacgttgagagagtttatagttggtcgcagggcaatgcagaacttaagcttttaagtagccaactggaaggcttaagccgtgtcatactggcgtatggagaggataaaggatttgacgatattttggcttttgtgagaaaaccctatgaggaaatactaaatggaattcagcaagaaattttaagattagaaaatcaaagagaggtaaaagaaaatcagcttcatgagaaagaaaagttattggaggaatggaaaaacaaaaaagatcctgagcctgaaagagatgaacaagtcataaacaacagaaaaaggcttaaagaagctggaattccttacattcctctttacatggcgattgattttaaagaggatgtggatgaagagacaagaggcaatatagaagctgcgatagaagacatggggcttttggatgctcttatcgtccccaaagaatattttgaaaaagctcttcaaatggacagcaatatggcggataaatatgttatgcctggaagctttaatatgatgttaaatgtatctcaatattttaaagtagttgacaatgaagaaggagtttcaccagaagatatttcggatgctttaagcaatatatttgtatccgaagaaagcgggacaacctatattgattcaaatggcacatatggaataggagtaataaaagggaaagcgcgggataaagttaaatcaaagtacatcgggagtgagtctagaaagcgctacagagaagagcttattaaatctatacaagaagaaatacaggctataaaagctgaaatatctgcaatcgatgaggaaataaatgcaaaaaaatcaagaatacagaggctggattacgaatattcggcatttcccgggaaagaagatattgaagaagcatatagatatttaaaaacggcaaaggctgattacgaatacacctctcataaactggatgaacagtttttcacagttaaaaactgttttgaggaccttcagaaaaagaaagctgttgtaagagaattgacatctggcataaacatacatccagatattgatacctattcttctgcgtatgaatatgcggaagaatacgcttcagggcttaatgaagtagaaatactatacaacaaatatgttttgcacatttcaaacgaagaaatgttattgcagcaaaaacaagatttagaatacgatattgataacttaaagtacgaaatagacgtactggaaaacaaaatacagagttctgttaagaaaattgagatgctaaaagagacattaaaagaacttggacttgaagaaattgaaaaagaactggagatttgcctaaaaaggctggaggaaatacctaaagagattacaaataaatcagccgaaaaagcaaaacttgaggagcggctacagagaagcttaaaagaccttttaaacattgaagaagagattaatcttaaagagaaaatttacaatattgttgaagagggtttaaaaagggaattagcacttggctttgtcaagcaagacgttgaaaaggaggatatgttaaaattaagtaaaagcattctttctgaatacaaaggcttttttgacaaggcgggctttgacagagaaaagtttacagagagacttcaaaatgtgtattttgaaactcgcaacgaacttttggaatatgggctttcaattggcaatatctttgacgaagcttgtgagggagacaatgaaagaataaaagaggcaaagaataagcagagaaggctcaatattacggcaaatataaatggtaaaattgtgtctttatatacgctttattctaatattgaagaagatataatggcgaatgaaagccttttaagagagactgataagattctttttgaagagattataatgcacaatgtgggaattaagataagagcaaagatttttaaagcagaagaatgggtaaagaaaatgaataaactcatgtctgaaagggatacttccagcggacttaagttctctattgagtggagaagcattcctgcttctaatgaagaagaacttgatacaaaagagcttgtggatattttaaaatccgatgctgatatgctgaaaaaggaagtcttcgataaagtcgtaaatcattttaggtcaaaagtagaaagagccaggagggcaatggaggaaaaaaacaatacagaaacttttcacaagattatgaaagaaatattagattacagagattggtttgagtttaagctttactacaaaaaagaaggggaaagccgcaaggagcttactgataatgcttttaataagttgagcggcggagaaaaagcgatggccatgtatatacctttgttttccgcggtttactcaagatatgagggagcatcgccgactgcacctcgcataatatctctagatgaagcatttgcaggagttgatgacacaaacataagggatatgtttaaactgattgaagatctaagatttaattatataatgaattcgcaggttttatggggagattatgacactgtccccaagctttcaatttatgaacttgtaaggccaaaaaatgcaaaggctgtattggtcatgaagtatttgtgggatggaaaagtaaagcatcttatacttcctgaaaaagaggaggttgctgctcttgaggtgggtgctataaatgaataa

SEQ ID NO: 50413 - DNA, 1296 bp, Thermoanaerobacter thermohydrosulfuricus WC1
atgaataaagaagaacttaaatattttaaagaaaaaaagggatacaagaggatttttgaaggtatacgggaaaagtacagaagtttaggacgtcttggaggcgttgtaaagcttgataatcttacggaagatgaaaaagaagtacttacaaaccattttaaaaaagactataggacaaaaaaatctgcatccattgatgtggcaaagtttgaagagtcgctaaaaaatacgcgatttgaggagtatacgctaaaagacatactggaatactattttggcgaaaaactcaccagcaaaaaagaggatatggaaatattggcaaaagaaagagaagagttctttaaagagctcttctctaaataccaggaatgtaagtgcattgattggctaaaaagtttgtatgagggaaccgctataggggtaaggacagtaaatcagaggtatttaaatgataaggccggattaaaaaaagatataatatacgtatgcgatgccataaacaatttgcctgtttataaaggggaaaagaaaagactgccggtgttttcttcccagattgcacgtaatcctcactattttgattcaaatacagaagctggaagtatgtttataaacgccttatgcactttgttggggctgaatgaagtaaagggaaccgaagaaatatcagaactttattacaacgttggcattttgatagatgaaatatccaattatgtcacactctcaggacttttggcatatgagggcgatacggaaaatcaagtatttaaggctgcttatgaaagcaatcaagtcttgcaagttcctcttttaaatttgagtaaaattgagagggtcataagcccttctaagaaagtgtatgctgtagagaatccttcagtttttacatctttaatagatgccacaagcaaagtatttcctcttgtatgcacatatggccagccaaaactttcttctctcctgctcttggacatgctttataaagaagggacagagatatattactcgggagattttgacccagaggggcttatgatagcagataaattgtacaaaaggtataaagacaagtttcactttttaaggtacgatgtagaagattatttaaaatctctttcaaatgaagtcataaatgatgtgaggcttagtaagctaaataagattgaatcacctttactctttgatgtggcaaaggagatgaaaataataaaaaaagcagggtatcaggagcttataatagatgatattataaatgatataaaattgattgaagaaggtaagggggagtggtaa

SEQ ID NO: 50414 - DNA, 1482 bp, Anoxybacillus flavithermus AK1
atggatacgtcatggctaaagccgattacagaggcgaaatatttagtagttgataacgcatatcggtaccgagcgattttgcgctatttttatacgcagcacgagcgaatgcgccaatatttgttttcagaagaagtatacgcttttttaaaacaattcgatgaatttcaaagttatacggaagaagagttgcaacaagacttagagcagctcgtcaaatggaaaaacttgatcgctagacaggaaaccgatcatattcggacgattgacgaatttaaaaagaaacgctttcgctatcagtgcagcccatatacggtcgaaatcgaacgaatgattcgcgcgcttgagcagctaggggagacgtttggcggctcgctcgagaaaacgcggtttgaccgcctgtatgcgtcgcttgtccgaatggaatcaattatccacgacggattttccgaaaagcgggaggaaatgaatcaagtgtgggaagaaacgtttgattattttaaaaaaatcatccaaaactctgccgactatattgcctatttaaacggagaaaacatggaagagcgaatgatgtccgattcatttctcgtctataaagaacagtttaccacctatttgcgtgatttcattgttgcattgcaaaaaacgtcaatgcaaattgaaaagctgctcgaagacttgccagaggacggtattcgacgttttattgaggaagtggtcgcttatcagcttgccattccacgctttgaaggagcgattctttcgcgtgaacagctagtggaagagaagctagatacgtggcgcagtttaaatgaatggtttttaggacgaaatgggcatgaaagtgaactgtcgtttttacaaaaacagacgaacgaagcgattcggcgaatgacgcgcgtcgttcagcgcctaggcgagcgccatcaccacttccgtagccgaaaaaaagattacttgcatttagcgaaatggttttcttcattagaaacgatagaagaagcgcataaattatcggcggttgtattcggctgttttcatacaaagcatatcgttgccgaaaatgatgcgacggaaaatatgtaccgtgatatttgggaggaacagccggcagaatggctcgtcaaaccacgcgttcgccactaccgagaaaagagaaaacctgaagcaatggttgatcggcgaagagaaaaagaggaaacgatggttgcctacttagcagcgaagcaaaaagaagaagaagagctcgctcagcttataaacgacgggaaaattgtacttcaggagctcccggtcgttgcttcgcatattcgcaaaacgctgctcgggtggattgcaaaagcgatggggcgagaagaccggatggtgcaaacggaaaatggatggaaagtgaaagtagtccaacgtgaaggaacgattacactgaaagcagaagatggcacactcatgatgccaaattacgaaatccatttgctagactag
